United States Patent Application Publication US 2008/0229439 A1 - sequence listing, part 3

SEQ ID NO: 4788 - DNA, 5008 bp, Zea mays
  Clone ID: TF_ZmC4916_361
atggatcctaaggggaagggaattgtgatcaacgacaaggagaaggagtccttcgtcaacgagccaagggatgacaagtccaatgactcgggctcgggccacaagcgaagagatgggaagaagaagaagacaagacgcatcaaggagatcgtctactacgacagcgatgagtcctcttcttcccaaaaggacgacgaccacgacaaacaaaggaaaccggttaattctaacttttcttttgactactctcgtattccgcaaagttcaaattcacatttgctttccattccactcggcaagcccccacactttgatggggaggactacggattttggagccacaaaatgcgtagtcacctattctctctccatcctagcatatgggagattgtagatagtggaatgcactttaatagttcggatagtcctatattcattaatgagcaaatccataagaatgcacaagctactactgttcttctagcctcattgtgcagggatgaatataataaagtgagtggcttggataacgccaagcaaatctgggataccctcaagatctctcatgagggaaatgacgctaccttgctcaccaaaatggagttggtggagggcgagcttggacggttcgcgatgataaggggcgaggagccaactcagacatacaaccggctcaagacccttatcaacaaaataaggagctacggaagcacgcgatggacggaccacgacgtcgtccgactaatgctcaggtcctttaccgttcttgatcctcatttggtgaataatattcgtgagaatcccaggtacaccaaaatgtcgcccgaagaagtcctaggaaaatttgtcagcgggcgaatgatgatcaaggaggcaaggtatgtggacgacgccttgaatggaccgatcaacgagccgcaaccttttgctctcaaagccacagggaacaaggaggcgctacccagcaaggtggcgcaaattgaggcggccggtcttaatgaagaagaaatgaccctcattatcaagagattcaagacggtgctaaaaggtcgcaatggacagccgagcaagactaagaccaaggggaagcgatcatgcttcaaatgcggtaagcttggtcattttattgctaactgtcccgataatgatagtgaccaggaaaagggaaacaagagggaaaagaagaagcattacaagaaggcaaagggcgaggcgcatctaggcaaggagtgggactcggattgctcctcgtccgactccgacaatgaaggactcgccgccaccgccttcgacaaatcaaccctcttccccaacgagcgtcacacatgccttatggcaagggagaagaaggtatgtactcgcaactctacctatgcttcttcaagtgaggacgaatctagtgatgaggatgaagtagattattcatgtttgttcaagggcttagatagatctaagatagacaaaattaatgaattaattgatgccttgaatgaaaagaatatacttttagaaaagcaagaggatttgttgtatgaagagcatgataaatttgttgaggcacaaaaatcctatgctttagaagttaagagaaataaaatgctttcttttgaactatctacttgtcatgaaaccatttctactttgaaaggtgtcaacaatgatttaaatgctaaattagaagtagcaaataaatccaattcttgtgtagaacatgttgaaatttgtactaggtgtaaagattttgacattaatgcttgtagtgaacacctagtttcaatttccaagcttaatgatgaactggctagtcttaatgctcaacttaagactagcaagaatgatttcgataagctaaaatttgcaagggatgcctacacaattggtagacacccctcaattaaggatggacttggcttcaagagagaagctaagaacttaacaagccataaggctcccattcccgccaaggagaaagggaaaggcccctatggctagtaatgtgcaaaagaaccatgcttttatgtattatgataggagacaaactagaaatgcttataggagttataatgcttttgatgattttgactctcatgccatgtttgctcctagttcctcttatgtgtatgatagaaatgttactaggagaaatgttgttcctaagagaaatactattcatcatgtgtctagaaagaatgctattcatgctcctaggaaagtagtgaatgaaccttccacaatttattatgctttaaatgcttcctttgctatttgtagaaaggataagaaaattgttgctaggaagttaggggcaaaatgcaagggagacaaaacttgcatttgggtccctaaggatatttgcactaaccttgtaggacccaacatgagttgggtttatgcatccgggggttcaagctggattattgatagcggatgcacaaaccatatgacgggggagaagaagatgttcacctcctacgtcaagaataaggattcccaagattcaatcatattcggtgatgggaatcaaggcaaggataagtctgaaacccaaggaaccctcaagcgcttcctcaggagagctcaaaatgagtttgagctcaaggtgaagaagataaggagcgacaacgggtccgagttcaagaaccttcaagtggaggagttccttgaagaggaagggatcaagcacgagttctccgctccctacacaccacagcaaaatggtgtggtagagaggaagaacaggacgctcatcgacatggcgaggacgatgctaggagagttcaagacccccgagtgcttttggacggaagccgtgaacacggcttgccacgccatcaacagggtctaccttcatcgcctcctcaagaagacgtcgtatgagctgctaaccggtaacaaacccaatgtatcttactttcgtgtatttgggagcaagtgctacattctagtgaagaaaggtagaaattctaagtttgctcccaaagctgtagaagggtttttattaggttatgactcaaatacaaaggcgtatagagtcttcaacaaatcatcgggtttggttgaagtctctagcgacgttgtatttgatgagactaatggctctccaagagagcaagtttttgattgtgatgatatagatgaagaagatgttccgacggctgctatacgaactatggcgattggagaagtgcggccacaggaacaagatgagcaagatcaaccctcttcctcaattatggtgcatccctctactcaagacgatgaacaggttcatcaaaaggaggcgtgtgatcaagggggagcacaagatgatcacgtgatggaggaagaagcgcaaccggcacctccaacccaagttcgagcgacgatccaaagggatcatcccgtcgaccaaattctgggtgacattagcaagggagtaactactcgatctcgattagttaatttttgtgagcattactcctttgtctcttctattgagcctttcagggtagaagaggccttgctagatccggactgggtgttggccatgcaagaggagttaaacaacttcaagcgcaatgaagtttggacactggtgcctcgtccgaagcaaaatgttgtgggaaccaagtgggtgttccgcaacaaacaggacgagcacggggtggtgacgagaaacaaggctcgacttgtggcaaaaggttatgcccaagtcgcaggtttggatttcgaggagacctttgctcctgtggctaggctagagtcaattcgaatcttgctagcatatgccgctcaccattctttcaggttgtaccaaatggatgtgaagagcgctttcctcaacgggccaatcaaggaggaggtgtacgtggagcaaccccctggcttcgaggatgaacggtaccccgaccatgtgtgtaagctctctaaggcgctctatggacttaagcaagccccaagagcatggtatgaatgccttagagactttttacttgctaatgctttcagggttgggaaggccgatccaactcttttcactaagacatgtgatggtgatttgtttgtgtgccaaatttatgttgatgacataatatttggttctactaaccaaaagtcttgtgaagagtttagcagggtgatgacgcagaaattcgagatgtcgatgatgggcgagttgaactacttccttgggttccaagtgaagcaactcaaggacggcaccttcatctcccaaacgaagtacacgcaagatctgctaaagcggtttgggatgaaggacgccaagcccgcaaagactccgatggggaccgacggacacaccgacctcaacaaaggaggtaagtccgttgatcaaaaagcataccggtcaatgataggttctttgctttatttatgtgctagtagaccggatattatgcttagcgtatgcatgtgtgctagatttcaatccgatcctaaggagtgtcacttagtggcggtgaagcgaattcttagatatttggttgctacgccttgcttcgggctctggtatccaaaggggtctacctttgacttagttggatactcagactccgactatgctggatgtaaagtcgataggaagagtacatcggggacgtgccaattcttaggaaggtccctggtgtcatggaactctaagaaacaaacttccgttgccctatccaccgctgaggccgagtatgttgccgcaggacagtgttgcgcgcaactactttggatgaggcaaaccctcagggactttggctacaatctgagcaaagtcccactcctatgtgataatgagagtgctatccgcatggcggaaaatcctgttgaacacagccgcacaaagcacatagacatccggcatcactttttgagagaccaccagcaaaagggagatatcgaagtgtttcatgttagcaccgagaaccagctagccgatatcttcactaagcctctagatgagaagaccttttgcaggttgcgtagtgagctaaatgtcttagattcgcggaacctggattga

SEQ ID NO: 4789 - DNA, 4788 bp, Zea mays
  Clone ID: TF_ZmC4916_362
atggatcctaaggggaagggaattgtgatcaacgacaaggagaaggagtccttcgtcaacgagccaagggatgacaagtccaatgactcgggctcgggccacaagcgaaaagatgggaagaagaagaagacaagacgcatcaaggagatcgtctactacgacagcgatgagtcctcttcttcccaaaaggacgacgaccacgactacaaaaagacggtcaattcgaacttttcatttgattattctcgtattcaacatagttcgaattcgcatttgctttccattcctcttggcaaacccccacactttgatggggaggactacggattttggagtcacaaaatgcgtagtcacttattctctctccatccaagcatatgggagattgtggagaatggaatgaaatttgatagctcggatagccctatgcttataaatgaacaaattcatagaaatgcacaagctactactgttctcttagcatctttgtgcagggaagaatacaataaggtgagtggcttggacaatgccaagcagatatgggacaccctcaagatctctcacgaggggaacgacatcaccatgctcaccaagatggagttggtggagggcgagcttggacgattcgccatgataaggggagaggagccaactcaaacctacaaccggctcaagacccttatcaacaaaataaggagctacggaagcacgcgttggacggatcacgacgtcgtccgcctaatgctcaggtcctttaccgttcttgatcctcatctcgtgaacaatattcgtgagaatcccaggtacatgatgatgacgcccgaggaagtgcttggaaaattcgtgagcgggcggatgatgatcaaggaggcaagatacgttgacgacgcattgaacggtccactccacgagcctcaacccattgctctaaaggcaacgaggagcaaggagtcgcttcctagcaaggtggcgcaaattgaggcggccggtcttaatgaagaagaaatggccctcattatcaagagattcaagacggtgctaaagggtcgcaatggacagccgagcaagactaagaccaaggggaagcgatcatgcttcaaatgcggtaagcttggtcattttattgctaactgtcccgataatgatagtgaccaggaaaagggaaacaagagggaaaagaagaagcattacaagaaggcaaagggcgaggcgcatctaggcaaggagtgggactcggattgctcctcgtccgactccgacaatgaaggactcgccgccaccgccttcaacaaatcggctctcttccccaacgagcatcacacttgcctcatggcaagggaaaagaaggtaatcactcgtaatgctaatacttatgattcttctagtgatgatgaatctagtgaggatgaaattgattactctagcttattcaagggattggatagaactaagatagctaagattaatgagttgattgatgccttaaatgaaaaggatagaaccttagagaaacaagaagatctcttatatgaagaacatgataaatttgttagtgctcaaaattcacttgctctagaagttaaaagaaatggaatactttcttgtgaactttctacttgtaatgaaaccatttcttctttaaaaggtgaaattaaagatttaactactaaactagaagtagcaagtaactcgtatgttgaaaatattacaatttgcactaggtgtaaggattttgatgttaatgcttgtagtgaacacttagtttccatttcaaaattaagtgatgaagtggctagtcttaatgctcaacttaagactagcaaaagtgattttgaaaaactaaaatttgctagggatgcctacacggttggtagacacccctcaattaaggatggacttggcttcaagagggaagccaagaacttaacaagccataaggctcccattcccgccaaggagaaagggaaggcccctatggctactagtgctaagaggaaccatgcctttttgtatcatgaaagaagacatactagaaatgatgtttttgattcacatgcttatgactcttatgctatgactgcttctagttctcatgttatgcatgatagaagaaatgttgttcaccaaatgcctaggaaaaatgtagttcataatgctcctaggaaagtttatgcatccgggggttcaagctggattatcgacagcggatgcacaaaccatatgacgggggagaagaaaatgttcacctcctacgtcaagaataaagattcccaagattcaatcatattcggtgatgggaatcaaggcaaggataagtctgaaacccaagggaccctcaagcgcttcctcaggagagctcaaaatgagtttgagctcaaggtgaagaagataaggagtgacaacgggtccgagttcaagaaccttcaagtggaagagtttcttgaggaggaagggatcaagcatgagttctctgctccctacacaccacagcaaaatggtgtggtagagaggaagaacaggacgctaatcgacatggcaaggactatgcttggagagttcaagacccccgagtgcttttggacggaagccgtgaacacggcttgccacgccatcaacagggtctaccttcaccgactcctcaagaagacgtcgtatgagctactaaccggtaacaaacccaatgtatcgtactttcgtgtatttgggagtaaatgctacattctagtgaagaagggtagaaattctaagtttgctcccaaagctgtagaagggtttttgttaggttatgactcaaatacaaaggcgtatagagtcttcaacaaatcatcgggtttggttgaagtctctagcgacgttgtatttgatgagactaatggctctccaagagagcaagttgttgatcttgatgatgtagatgaagaagatgttccgacggccgctatacgaaccatggcgattggtgatgtgcgaccacaggaacaagaagagcaagatcaaccttcttcctcaactatggtgaatcccccaactcaagacgatgaacaggttcatcaacaggaggcgtgtgatcaagggggagcacaagatgatcttgtggtggaggaagaagcgcaaccggcacctccaacccaagttcgagcgatgattcaaagggatcatcccgtcgaccaaattctgggtgacattagcaagggagtaactactcgatctcgattagttaatttttgtgaacattactcctttgtctcttctattgagcctttcagggtagaagaggccttgctagatccggattgggtgtcggccatgcaagaggagttaaacaacttcaagcgcaatgaagtttggacactggtgcctcgtcccaagcaaaatgttgtgggaaccaagtgggtgttccgcaacaaacaagacgagcacggggtggtgacgagaaacaaggctcgacttgtggcaaaaggttatgcccaagtcgcaggtttggatttcgaggagacttttgctcctgtggctaggctagaatcaattcgtatcttgctagcatatgccgctcaccattctttcaggttgttccaaatggatgtgaagagcgctttcctcaacgggccaatcaaggaggaggtgtacgtggagcaaccccctggcttcgaggatgaacggtaccccgaccatgtgtgtaagctctctaaggcgctctatggacttaagcaagccccaagagcatggtatgaatgccttagagatttcttaattgctaatgctttcaaggttgggaaagccgatccaactctttttaccaagacttgtgatggtgatttgtttgtgtgccaaatttatgtcgatgacataatatttggttctactaaccaaaagtcttgtgaagagtttagcagggtgatgacgcagaaattcgagatgtcgatgatgggcgagttgaactacttccttgggttccaagtgaagcaactcaaggacggcaccttcatctcccaaacgaagtacacgcaagatctgctaaagcggtttgggatgaaggacgccaagcccgcaaagactccgatggggaccgacggacacaccgacctcaacaaaggaggtaagtctgttgatcaaaaagcataccggtcaatgataggttctttgctttacttatgtgctagtagaccggatattatgcttagcgtatgcatgtgtgctagatttcaatccgatcctaaggaatgtcacttagtggcggtgaagcgaattcttagatatttggttgctacgccttgcttcgggctctggtatccaaaggggtctacctttgacttagttggatactcagactccgactatgctggatgtaaggtcgataggaagagtacatcggggacgtgccaattcttaggaaggtccctggtgtcatggaactctaagaaacaaacatccgttgccctatccaccgctgaggccgagtacgttgccgcaggtcagtgttgcgcgcaactactttggatgaggcaaaccctccgggactttggctacaatctgagcaaagtcccactcctatgtgacaatgagagtgctatccgcatggcggagaatcctgttgagcacagccgcacaaagcacatagacatccggcatcactttttgagagaccaccagcaaaagggagatatcgaagtgtttcatgttagcaccgagaaccagctagccgatatctttaccaagcctctagatgagaagaccttttgcaggctgcgtagtgagctaaatgtcttagattcgcggaacttggattga

SEQ ID NO: 4790 - DNA, 1830 bp, Zea mays
  Clone ID: TF_ZmC4916_369
atggatcctaagggcaaggggatgatgatcaacgacaaggagaaggagaccttcgtcaacgagcccaatgatgacaagcccaccgactcaggctcgggccacaaaagaaaagacgggaggaagaagaagacaaagcgcatcaaggaaattgtctactacgacagcgacgaatcttcctcctcccaaaaggacgacgacgaccatgatagacgaaagacgatccataaaaatgcacaagctactactgtgttgctagcctctttgtgcagggacgagtatcacaaggtgagcggcttggacaatgccaagcagatctgggacaccctcaagatctctcatgagggaaacgatgtcaccttgctcaccaaaatggagttggtggaaggcgagcttggacggttcgcgatgataaggggcgaggagccgacacaaacatacaaccggctcaagacccttatcaacaaaataaggagctacgggagcacgcgatggacggaccacgacgtcgtccgcctaatgctaaggtcatttaccgttcttgatcctcatttggtgaacaatattcgtgaaaatcccaggtacaccaagatgtcgcccgaagaagttcttggggaatttgttagcgggcgaatgatgattaaggaggcgaggtacgtggacgacgccttgaatggtccgatcaacgagccgcaaccccttgctctcaaggcaacacgaagcaaggaggcgctacctagcaaggtggcacagattgaggcggccggacttaataatgaagagatggctctcatcatcaaaagattcaagacggtgcttaaaggtcgcaagggacagccaagcaagaccaaagccaaggggaagcgctcatgcttcaaatgcggtaagcttggtcattttattgctaactgtcccgacaatgatagtgatcaggatcaagggaacaagagggagaaaaagaagaactataagaaggcaaagggcgaggctcatcttggcaaggagtgggattcagactgctcctcgtccgactccgacaatgagggactcgccgccactgccttcaacaagtcatccctcttccccaacgagcgtcacacttgcctcatggcaagggagaagaaagataagtctaaaacccaagggaccctcaagcgcttcctaaggagagctcaaaatgagtttgagctcaaggtgaagaagataaggagcgacaacgggtccgaattcaagaaccttcaagtggaagagttccttgaggaggaggggatcaagcacgagttctccgctccctacacacctcagcaaaatggtgtggtagagaggaagaacaggacgctcatagatatggcgtggactatgcttggagaattcaagacccccgagtgcttttggtcggaagccgtgaacacggcttgccacgccaccaacagggtctaccttcaccgcctcctcaagaagacgtcgttgtatcaaatggatgtgaagagcgctttcctcaatgggccgatcaaggaggaggtgtacgtggagcaaccccctggcttcgaggatgaacggtaccccgaccattcttgtgaagagtttagcagggtaatgacgcagaaattcgagatgtcaatgatgggcgagttgaactacttccttgggttccaagtgaagcaactcaaggacggcaccttcatctcccaaacgaagtacacgcaagacttgctaaagcggtttgggatgaaggacgccaagcccgcaaagactccgatgggaaccgacggacacatcgacctcaacaaaggagattttggtgaggcaatggggttaaagggccaagattga

SEQ ID NO: 4791 - DNA, 5337 bp, Zea mays
  Clone ID: TF_ZmC4916_372
atggatcctaagggcaaggggatggtggtcaatgataaggagaaggagtcattatttgtcaatgatccaaaggaggacaagcctactgactcgggctcgagccacaaaagaaaagatgggaggaagaagaaaacaaggcgtatcaaagagatagtctactacgacagcgacgaatcctcttcttcccaaaaggacgacgacaacgtctacgagaataagaagacagttaattcatacttctcttttgattattctcatattcctcaaactaccaatgctcatttactctccattccacttgcctcattgtgcagggacgagtaccataaggtgagcggcttggacaatgccaagcagatctgggacaccctcaagatctcacatgaggggaacgacgtcaccatgctcaccaagatggagttggtggaaggcgaactcggaagattcgcgatgataagaggggaggagccaacccagacgtacaacaggctcaagacccttgtcaacaagataaggagctatggaagcacgcgatggacggaccacgacgtcgtccgcctaatgctaaggtcctttactgtacttgatccacatctggtaaacaatattcgtgaaaatcctaggtacaccaagatgtcgcccgaagaaattcttgggaaatttgtaagcgggcggatgatgattaaggaggcgagatacatagatgatgcgttgaatggcccaatccacgagcctcaaatcgttgctctcaaagcaacaaggagcaaggaggcgctacctagcaaggtggcgcaagttgaggcggccgggcttaatgaggaagaaatggccctcattatcaagcggttcaagacggcgctaaagggtcgcaaggagcaccccaacaagaacaagacgaaggggaagcgctcctgcttcaagtgtggtaagattggtcattttatcactaattgccccgataatgatagtgaccaggaaaagaagagtggaaagtgggaaaagaagaagaactacaagaaggcgaagggcgaggcacatcttggaaaggagtgggattcggattgctcctcgttcgactccgacaacgaaggactcgccgccaccgccttcaacaagtcatccctcttccccaacgagcatcacacatgcctcatggcaaaggagaagaaggtatgtactcgaaacaatattacttatgcttcttcaagcgaggatgagtctagtgatgatgatgaaatagactattcatgcttattcaagggattagatagaactaagattgataagattaatgaattgattgatgctttgaatgataagaatagattactagaaaaacaagaggaccttttatatgaagagcatgataaatttgttagtgcacaaaattctcttgctctagaagttaaaaggaatgaaatgctttcttgtgaactatctacttgtcatgaaaccatttctactttaaaaggtgttaatgatgatttaaatgctaaactagaagtagcaaataaatctaactcttgtgtagaacatgttatgatttgcaataggtgcaaagattttaatgttgatgcttgtagtgaacacctagtttgcatttctaaattaaataatgaagtggctagtcttaatgcccaacttaagtctagcaagagtgaatttgacaagctaaaatttgcaagggatgcctacacgattggtagacacccctcaattaaggatggtcttggcttcaagagggaagtcaagaacttaacaagccataaggcttccatctccgccaaggagaaagggaaggcccctatggctagtaatgctcaaaagaaccatgccttcatgtatcacgataggaaacattctagaaatggttatagaagttatgatgctcttgattctcatgccatggttgtttctagttcttctattatgcatgatagaaatttagcttggagaaatgttattaatcacatgcctagaagaaatgttgttcatgtttctaggaaaataataaatgaaccttctacaatttatcatgcttgcaatgcttcatttgcgatttatagaaaggataggaaagtgattgctaggaaactaggggcaaaatgcaagggagataaaacttgcatttgggtccctaaagatattatcactaaccttgtaggacccaacaagagttgggtttatgcatccgggggatcaagctggattatcgacagtggatgcacaaaccacatgacgggggagaagaagatgttcacctcctatgtcaagaataaagattcccaagattcaattatatttggtgacgggaatcaaggcaaggttaaaggcttaggcaagattgcaatctcaaatgagcactctatttctaatgtattcttagtagagtcacttggatataatttgttatccgtaagtcaattatgtaatatgggatataattgtctattgacaaatgtagatgtgtctgtctttagaagaagtgatggttcattagcttttaagggtgtattagacgacaaactctatttagttgattttgcaaaagaggaggtcggtctagatgcatgcttaattgctaagactagcatgggctggctgtggcatcgccgcttagcacatgtggggatgaagaaccttcacaagcttctaaagggagaacacgtgataggtctaactaatgttactttcgaaaaagatagaccttgtgcagcttgtcaagcagggaaacaagtgggaagctctcatcgtgccaaaaatgtgatgacaacatcaagacccctggagttacttcatatggacctcttcggacccgtcgcctatctaagcataggaggaagtaagtatggtcttgttatagttgatgatttttcccgcttcacttgggtattctttttgcaggataaatctgaaacccaagggaccctcaagcgcttcctaaggagagctcaaaatgagtttgagctcaaggtgaagaagataaggagcgacaatgggtccgaattcaagaaccttcaagtggaggagtatcttgaggaggaaggaatcaagcacgagttctccgctccctacacaccacagcaaaatggtgtggtagagaggaagaacaggacgcttatagacatggcaaggacgatgcttggagagttcaagacccccgagcgcttttggtcggaagtcgtgaacacggcttgccacaccatcaaccgggtctaccttcatcgcctcctcaagaagacttcgtatgagctactaaccggtaacaaacccaatgtttcgtatttccgagtttttggtagtaaatgctacattctagtgaagaagggtaggaattccaaatttgctcccaaagccgtagaagggtttttgttaggttatgactcaaatacaaaggcgtatagggtcttcaacaaatcattgggtttggttgaagtctctagcgacgttgtatttgatgagactaatggctctccaaaggagcaagttgttgaccttgatgatgtagatgaagaagacgttccaacagccgcaatacgcaccatggcgattggagatgtgcggccacaggaacaaaatgagcgagatcaaccttcttcctcaacaatggtgcatcctccaactcaagacgatgaacaggttcatcaagaggaggcgtatgatcaagggggagcacaagatgatcatgtaatggaggaagaagcacaaccggcacctccaactcaagtccgagcgatgattcaaagggatcatcccgtcgaccagattttgggtgacattagcaagggagtaactactcggtctcgattagttaatttttgtgagcattactcttttgtctcttccattgagcctttcagggaggagctcaacaacttcaagagaaatgaagtttggacactggtgcctcgtcccaagcaaaatgttgtgggaaccaagtgggtgttccgcaacaaacaagacgagcacggggtggggacaaggaacaaggcacgacttgtggcaaaaggttatgcccaagtcgcaggtttggactttgaggagacttttgctcctgtggctaggctagagtccattcgtattttgctagcatatgccgctcaccattctttcaggttgttccaaatggatgtgaagagcgctttcctcaacgggccaatcaaggaggaggtgtacgtggagcaaccccctggcttcgaggatgaacagtaccccgaccacatctgtaagctctctaaggcactctatggacttaagcaagccccaagagcatggtatgaatgccttagagactttttaattgctaatactttcaaggttggcaaagccgatccaactctttttactaagacatgtgatggtgatctttttgtgtgccaaatttatgtcgatgatataatatttggttctactaaccaaaagtcatgtgaagagtttagcagggtgatgactcaaaagtttgagatgtcgatgatgggcgagttaagctatttccttgggttccaagtgaggcaactcaaggatgggactttcatctcccaaacgaagtacacacaagacttgatcaagcggtttgggatgaaggacgccaagcccgcaaagactccaatgggaaccgacggacacaccgacctcaacaaaggaggtaagtccgttgatcaaaaggcataccaatctatgctagtgtctttactttatctatgtgctagtagaccagacattatgcttagcgtatgcatgtgtgctagatttcaatccgatccaagggagtgtcacttagtggctgtgaagcgaattcttagatatttagtcgctacgccttgcttcgggatctggtatccaaaggggtctacctttgacttgattggatattcagactccaactatgctggatgtaaggtcgataggaagagtacatcggggacgtgccaattcttaggaaggtccctggtgtcatggagttctaagaaacaaactttcgttgccctatccaccgctgaggccgagtatgtttccgcaggacagtgttgcgcgcaactactttggatgaggcaaaccctcagggactttggctacaatctgagcaaagtcccactcctatgtgataatgagagtgctatccgcatggtggataatcctgttgaacacagccgcacaaagcacattgacatccggcatcactttttgagagaccaccagcaaaagggagatatcgaagtgtttcatgttagcaccgagaaccagctagccgatatctttactaagcctctagatgagtcgaccttttgcaggctgcgtagtgagctaaatgtcttagattcgcggaacttggattga

SEQ ID NO: 4792 - DNA, 1645 bp, Zea mays
  Clone ID: TF_ZmC4916_373
atgacgtggctggcgcaccggacatgtccggtgtgcaccggactgtccggcgactttcagaagggaatcgtgatcaacgacaaggagaaggagtccttcgtcaacgagccaaaggatgacaaacctattgactcggggtcgggccacaagcgcaaagatgggaagaagaagaagacaaagcgcatcaaggagatcgtctactacgacgatagcgatgagtctacttcttcccaaaagaacgacaacaacgactacgagaaaaagaaaacggtcaattcgaacttttcttttgattactctcgtattcctcaaagtacaaatgctcatttattatctattccacttggtaaacctcctcattttgatggagaggactacggattttggagtcacaaaatgcgtagtcacttgttctctctccatcctagcatatgggagatagtagaaagtggaatgcattttgatagtagtgatagtcccatgtttatcaatgagcaaattcataaaaacgcacaagctactactgtgttgctagcctcattgtgcagggatgagtaccacaaagtgagcggcttggacaatgccaagcagatctgggacaccctcaaaatctcacatgagggcaacgatgtcaccatgctcaccaagatggagttggtggaagacgaacttgggagattcgctatgataaggggggaagagccaacccaaacatacaaccggctaaaaccccttgtcaacaagataaggagctacggaagcacgcgatggacggatcacgacgtcgtccgcctaatgctaaggtcttttactgtccttgatcctcatcttgtaaacaatattcgtgagaatcctaggtacaccaagatgacgcccgaggagatacttggaaagttcgtgagcggacgaatgatgatcaaggaagcaagatacgtggacgacgcattgaatggtccaatcaatgagcctcaacctattgctctcaaggcaacaagaagcaatgagatgctacctagcaaggtggcacaaattgaggcggccggacttaatgatgaagagatggctctcatcatcaagagattcaagacggcgctaaaaggtcgcaaggggcagccaagcaagaccaagacaaaggggaagcgctcatgcttcaaatgcggtaagcttggtcattttattgctaactgtcccgacaatgatagtgatcaggatcaagggaacaagagggagaaaaagaagaactataagaaggcaaagggcgaggctcatcttggcaaggagtgggattcggactgctcctcgtccgactccgacattgagggactcgccgccactgccttcaacaagtcatccctcttccccaacgagcgtcacacttgcctcatggcaagggagaagaaagtaagcactcctaatactagtacttatgcttcttcaagtgaggatgagtctagtgatgatgatgagatagattactcatgcttattcaagggattagatagaactaaggtagataaaattaatgaattgattgatgccttgaatgataggaatatactgttagaaaagcaagaggatttgttgtatgaagaacatgaaaaatttgtagaagctcagaaatctcttgctaagagtcgacctgcag

SEQ ID NO: 4793 - DNA, 4995 bp, Zea mays
  Clone ID: TF_ZmC4916_387
atggatcctaaggggaagggaatcgtgatcaatgacaaggagaaggagtccttcgtcaacgagccgaaggatgacaagactactgactcgggctcaggccacaagtgcaaagacgggaagaaaaagaagacaaggcgcatcaaggagatcgtctactacgacgatagcgatgagtctacctcttcccaaaaggacgacgacaatgactacaggaagacggtcaattcgaacttttcatttgattattctcgtattccacatagttcgaattcgcatttgctttccattcctcttggcaaacctccacacttcgatggggaagactacggattttggagtcacaaaatgcgtagtcacttattctctctccatccaagcatatgggagattgtagagaatggaatgaaatttgatagctcggatagccctatgcttataaatgaacaaatccatagaaatgcacaagctactactgttctattagcatctttgtgcagggaagagtacaataaggtgagcggcttggacaacgccaagcagatatgggacaccctcaaaatctctcacgaggggaatgacatcaccatgctcactaaaatggagttggtggagggcgagcttggacgattcgcaatgataaggggagaagagccaacccaaacttacaacaggctgaagacccttatcaacaaaataaggagctacggaagcacgcgatggacagaccacgacgtcgtccgcctaatgctaaggtcatttaccgttcttgatcctcatttggtgaacaatattcgtgaaaatcctaggtacaccaagatgtcgcccgaagaagttcttggaaaatttgtaagcgggcgaatgatgatcaaggaggcaaggtacgtggacgacgcattgaatggtccaatccatgagcctcaacccattgctctcaaggcaacaaggagcaaggaggcgctaccaagcaaggtggcgcaagttgaggcggccgggctaaataatgaggagatggccctcatcattaagcgcttcaagacggcgcttaaaggtcgcaagggacagccaagcaagaccaagacaaaggagaagcgctcatgcttcaaatgcggtaagcttggtcattttattgctaactgtcccgataatgaaagtgaccaggaacaagggagcaagagggagaagaagaaggcatacaagaaggcaaagggcgaggcacatctaggcaaggagtgggattcagattgctcctcctccgactccgacaatgaaggactcgccgccactgccttcaacaagtcatccctcttccccaacgagcatcacacatgccttatggcaagggagaagaaggtgagtactcaagactccacttatgcttcctctagtgataatgagtctagtgatgatgatgacatagattattcatgcttgttcaagggcttagatagatctaagatagataaaattaatgagttgattgatgctttgaatgataagaatagattactagaaaaacaagaggatcttttatatgaggagcatgataaatttgttagtgcacaaaattctcttgctctagaaattaaaagaaatgaagtgctttctagtgaattatcttcttgtcatgaaaccattgctactttaaaaggtgttaataatgatttaaatgctaaactagaagtggctagtaaatctaactcttgtgtagaacatgttatggtttgcactaggtgtaaagattttaatattgatgcttgtagtaaacacctagtttcaatttctaaattgaatgatgaagtggctagtcttaatgcccaacttaagactagcaagagtgattttgataaactaaaatttgcaagggatgcctacacaattggtagacacccctcaattaaggatgggcttggcttcaagagggaagtcaagaacttgacaagccataaggctcccattcccactaaggagaaagggaaggcccctatggctactagtgccaaaaagaaccatgccttcttgtatcatgataggaaaaattctagaaatgcttttagaagttatgatgtttttaattcacatgcttatgattcttatgccatgactgcttctagttcttcctatatgcatggtagaaatgtgactaggagaaatgctattcatcatgtgcctagaaagaatattattcatgctcctaggaaagtagtaaatgaaccttctacaatttattgtgctttaaatgcttcctttgctatttgtagaaaggataggaagatagttgctagaaaattaggggcaagatgcaagggagacaaaacttgcatttgggtccctaaggatatttgtgctaaccttgtaggacccaacatgagttgggtttatgcatccgggggttcaagctggattatcgacagcggatgcacaaaccatatgacgggggagaagaagatgttcacctcctacgtcaagaataaggattcccaagattcaataattttcggtgatgggaatcaaggcaaggataagtctgaaacccaagggaccctcaagcgcttcctcaggagagctcaaaatgagtttgagctcaaggtgaagaagataaggagcgacaacgggtccgagttcaagaaccttcaagtggaggagttccttgaggaggaagggatcaagcatgagttctctgctccctacacaccacagcaaaatggtgtggtagagaggaagaacaggacgctaatcgacatggcgaggactatgcttggagagttcaagacccccgagcgtttttggtcggaagccgtgaacacggcttgccacgccatcaacagggtctaccttcaccgcctcctcaagaagacgtcgtatgagcttctaaccggtaacaaacccaatgtatcttactttcgtgtatttgggagcaagtgctacattctagtgaagaagggtagaaattctaagtttactcccaaagctgtagaagggtttttattaggttatgactcaaatacaaaggcgtatagagtcttcaacaaatcatcgggtttggttgaagtctctagcgacgttgtatttgatgagactaatggctctccaagagagcaagttgttgattgtgatgatgtagatgaagaagatgttccaacggccgctatacgaaccatggcaattggagaagtgcggccacaggaacacgatgaacgagatcaaacatcttcctcaactatggtgctacccccaactcaagacgatgaacaggttcatcaacaggaggcgtgtgatcaagggggagcacaagatgatcgtgtgatggaggaagatgcgcaaccggcacctccaacccaagttcgagcgatgattcaaagggatcatcccgtcgaccaaattctgggtgatattagcaagggagtaactactcgatctcgattagttaatttttgtgagcattactcctttgtctcttctattgagcctttcagggtagaggaggccttgctagatccggattggatattggccatgcaggaggagctcaacaacttcaagcgcaatgaagtttggacactggtgcctcgtccgaagcaaaatgttgtgggaaccaagtgggtgttccgcaacaaacaggacgagcatggggtggtgacgaggaacaaggctcgacttgtggcaaaaggttatgcccaagtcgcaggtttggactttgaggagacatttgctcctgtggctaggctagaatcaattcgtattttgctagcatatgccgctcaccattctttcaggttgtaccaaatggatgtgaagagcgctttcctcaacgggccaatcaaggaggaggtgtacgtggagcaaccccctggcttcgaggatgaacggtaccccgactatgtgtgtaagctctctaaggcgctctatggacttaagcaagccccaagagcatggtatgaatgccttagagactttttaattgctaatgctttcaaggttgggaaagccgatccaactctttttacaaagacttgtgatggtgatttgtttgtgtgccaaatttatgtcgatgacataatatttggttctactaaccaaaagtcttgtgaagagtttagcagggtgatgacgcagaaattcgagatgtcgatgatgggcgagttgaactacttccttgggttccaagtgaagcaactcaaggacggcaccttcatctcccaaacgaagtacacgcaagatctgctaaagcggtttgggatgaaggacgccaagcccgcaaagactccgatggggaccgacggacacaccgacctcaacaaaggaggtaagtccgttgatcaaaaagcataccggtcaatgataggttctttgctttacttatgtgctagtagaccggatattatgcttagcgtatgcatgtgtgctagatttcaatccaatcctaaggagtgtcacttagtggcggtaaagcgaattcttagatatttggttgctacgccttgcttcgggctctggtatccaaaggggtctacttttgacttagttggatactcagactccgactatgctggatgtaaggtcgataggaagagtacatcggggacgtgccaattcttaggaaggtccctggtgtcatggaactctaagaaacaaacctccgttgccctatccaccgctgaggccgagtacgttgccgcaggtcagtgttgcgcgcaactactttggatgaggcaaaccctccgggactttggctacaatctgagcaaagtcccactcctatgtgacaatgagagtgctatccgcatggcggaaaatcctgttgaacacagccgcacaaagcacatagacatccggcatcactttttgagagaccaccagcaaaagggggatatcgaagtgtttcatgttagcaccgagaaccagctagccgatatctttaccaagcctctagatgagaagaccttttgcaggctgcgtagtgagctaaatgtcttagattcgcggaacttggattga

SEQ ID NO: 4794 - DNA, 1981 bp, Zea mays
  Clone ID: TF_ZmC4916_389
atggatcctaaggggaagggaatcgtgatcaacgacaaggagaaggagtccttcatcaacgagccaaaggatgataagcctactgactcgggctcgggccacaagcgcaaagatgggaagaagaagaagacaaggcgcatcaaggagatcgtctactacgacgatagcgatgagtctacttcttcccaaaaggacgactacaggaagacggtcaattcgaacttctcatttgattattctcgtattccacatagttcgaattctcatttgctttccattcctcttggcaaacctccacacttcgatggggaggactacggattttggagtcacaaaatgcgtagtcacttattctcactccatccaagcatatgggagattgtagagaatggaatgaaatttgatagctcggatagccctatgcttataaatgaacaaatccataaaaatgcacaagctactactgttctattagcatctttgtgcagggaagagtacaataaggtgagcggcttggacaacgccaagcagatatgggacaccctcaagatctctcacgaggggaacgacatcaccatgctcactaaaatggagttggtggagggcgagcttggacgattcgcaatgataaggggagaggagccaacccaaacctacaatcggctcaagactcttatcaacaaaataaggagctacggaagcacgcgatggacggaccacgacgtcgtccgtctaatgctaaggtcctttaccgttcttgatcctcatctcgtaaacaatattcgtgagaatcctaggtacatgatgatgacgcccgaggaggtactcggaaaattcgtaagtgggcggatgatgatcaaggaggcgagatatgtcgacgacgctctaaacggtccaatcaatgagcctcaacctcttgctctcaaggcaacaagaagcaaggagatgctacctagcaaggtggcacaaattgaggcggccggacttaatgatgaagagatggctctcatcatcaagagattcaagacgacgctaaaaggccgcaagggacagccaagcaagaccaagacaaaggggaagcgctcatgcttcaaatgtggtaagcttggtcattttattgctaactgtcccgacaatgatagtgatcaggatcaagggaacaagagggagaagaagaagaactataagaaggcaaagggcgaggcgcatctaggcaaggagtgggactcagactgcttcctttccgactccgacaatgaaggactcgccgccaccgccttcaacaagtcatccttcttccccaacgagcatcacacatgccttatggcaagggaaaagaaggtgagtactcgagaccccacttatgcttcttctagtgataatgagtctagtgatgatgatgacatagactattcatgcttattcaagggcttagatagatctaagatagataagataaatgaactcattgatgccttaaatgataagaataggctattagagaaacaagaggatttgttgtatgaagaacatgataaatttgtagaggcacaaaaatcctatgccttagaagttaaaagaaatgaaatgctttcttatgaactgtctacttgtcatgaaaccatttctactttgcaaggtgttaacaatgatttaaatgcaaaattagaagtagcaaataaatctaattcttgtgaagaacacgttataatctgcactaggtgtaaggattttgatattgatgcctgtagtgaacacctagtttcaatttcgagattgaatgatgaagtagctagtcttaatgcccaacttaagactagcaaaagtgatttcgataagctaaaatttgctagggatgcctacacggttggtagacacccctcaattaaggatggacttggcttcaagagggaagccaagaacttaacaagccataaggctcccatctccgccaaggagaaagggaaggcccctatggcaa

SEQ ID NO: 4795 - DNA, 5118 bp, Zea mays
  Clone ID: TF_ZmC4916_393
atggatcctaaggggaagggaatcgtgatcaacgacaaagagaaggaatccttcgtcaacgagccgaaggacgacaagcctaccgactccggctcgggcaatagacggaaggaagggaagaagaagaagacgaggcgcatcaaggagatcgtctactacgacgacaacgatgagtctacttcttcccaaaaggatgacgaccacaacgactacgagagagggaaaccggttaattcgaacttttcttttgactactcttgtattccgcaaagttcaaattcacatttgctctccattccactcggcaagcccccacactttgatggggaggactacggattttggagccacaaaatgcgtagtcacctattctctctccatcctagtatatgggagattgtagagagtggaatgcactttgatagttcggatagtcccatgttcattaatgagcaaatccataagaatgcacaagctactactgttcttctagcttcattgtgcagggatgaatatcacaaagtgagcggcttggataacgccaagcagatctgggacaccctcaagatttcacatgaggggaacgacgtcaccttgctcaccaaaatggagttggtggaaggcgagcttggacggtttgcgatgataaggggcgaggagccaactcaaacatacaaccggctcaagatccttatcaacaaaataaggagctacagaagcacgcgatggacggaccacgacgtcgtccgactgatgctaaggtcctttacagttcttgatcctcatttggtgaataatattcgtaagaatcccaggtacgtggacgacgcattgaatggtccaatcaacgagcctcaaccccttgctctcaaggcaacaagaagcaaggaggcgctacctagcaaggtggcacaatttgaggcagccggacttaatgatgaagagatggccctcatcatcaagagattcaagacggcgctaaagggtcacaaggggcagccaagcaagaccaagacaaaggggaagcgctcatgcttcaaatgtggtaagcttggtcattttattgctaactgtcccgacaatgatagtgaccaagaaaaaggaaacaagagggagaagaagaaaaattacaagaaggccaagggcgaggcacatatcggaaaggagtgggattcggattgctcctcctccgactctgacaatgaaggactcgctgccactgccttcaacaagtcatccctcttccccaacgagcatcacacatgcctcatggcgaaagagaagaaggtatgtactcgagacagtactacttatgattcctcaagtgatgatgattctagcgatgaggaaatagattactctagcttgttcaagggattggatagaaataaaattgataaaatcaatgaattgattgatgccttgaatgaaaaagataggcttttagaaaagcaagaggatttgttgtatgatgaacatgataaatttgtagaggcacaaaaatcctatgctttagaagttaaaagaaatgaaatgctttcttatgaactatctacttgtcatgaaaccatttctactttacaaggtgttaacaatgatttaaatgctaaattagaagcagctaataaatctaattcttgtgtagaacatgttatgatttgcattaggtgtaaggattttgatattgatgcttgtagtgaacacctagtttcaatttctagattaaatgatgaaatagctagtcttaatgaccaacttaagactagcaaaagtgattttgataagctaaaatttgcaagggatgcctacacgattggtagacacccctcaattaaggatggacttggcttcaagagggaagtcaaggacttaacaagtcataaggctcccatctccaccaaggagaaagggaaggcccctatggctattagtgctaaaaagaaccatgcttttatgtatcatgataggagacatgctagaaatgcaaatagaagttatgatgcttttgattcacatgtttatgattcatatgctatgtttgcttctagttcttcctgtttatgcatccgggggatcaaactggattatcgacagtggatgcacaaaccatatgacgggggagaagaagatgttcacctcctacgtcaaaaacaaggattccaagattcaataatattcggtgatgggaatcaaggcaaggtaaaagggttagatgtgtctgtcgttagaagaagtgatggttcactagcttttaagggtgtattagacgacaaactttacttagttgattttgcaaaagaggaggccggtctagatgcatgcttaattgctaagactagcatgggctggttgtggcatcgccgcttagcacatgtggggatgaagaaccttcacaagcttctaaagggagaacatgtgatatgtttaactaatgtgcaattcgaaaaagatagaccttgtgcagcttgtcaagcaggcaaactggtgggaagctctcatcacatcaaaaatgtgatgaccacatcaagacctttggagatgcttcacatggacctattcggacccgtcgcctatctaagtataggaggaagtaagtatggtcttgttatagttgatgacttttcccgcttcacttgggtattctttttgcaggataaatctgaaacccaagggaccctcaagcgcttcctaaggagagctcaaaacgagtttgagctcaaggtgaaaaagataaggagcgacaatgggtccgagttcaagaaccttcaagtggaggagtaccttgaggaggaagggatcaagcacgagttctccgctccctacacaccacagcaaaatggtgtggtagagaggaagaacatgacgcttatagacatggcgaggacgatgctaggagagttcaagaccctcgagcgcttttggtcggaagccgtgaacacggcttgccacgccatcaacagggtctacctgcatcgcctcctcaagaagatgtcgtatgagctactaaccggtaacaaacccaatttttcgtattttcgagtttttgggagtaaatgctacattctagtgaagaagggtaggaattccaaatttgctcccaaagccgtagaagggtttttgttaggttatgactcaaatacaaaggcgtatagagtcttcaacaaatcatcgggtttggttgaagtctctagcgacgttgtatttgatgagactaatggctctccaagagagcaagttgttgattttgatgatgcagatgaagaagaagttccaacgaccgcaatatgcaccatggcaattggagatgtgcggccacaggaacaagatgagcaagatcaaccttcttcctcaacaatggtgcaacccccatctcaagatgatgaacaggaggtgtgtgatcaagggggagcacaagatgatcttgcaatggaggaagaagcacaatcggcacctccaacccaagttcgagcaatgattcaaagggatcatccagtcgaccaaattttgggtgatattagcaagggagtaactactcgatctcgattagttaatttttgtgagcattactcctttgtctcttctattgagcctttcagggtagaagaggccttgctagatccggactgggtgttggccatgcaggaggagctcaacaacttcaaaagaaatgaagtttggacactggtgcctcgtcccaagcaaaatgttgtgggaaccaagtgggtgttccgcaagaaacaagacgagcacggagtggtaacgaggaacaaggctcgacttgtggcaaaaggttatgcccaagtcgcaggtttggactttgaggagacttttgctcctgtggctaggctagagtccattcgtattttgttagcatatgccgctcaccattctttcaggttgttccaaatggatgtgaagagcgctttcctcaacgggccaatcaaggaggaggtgtacgtggagcaaccccctggcttcgaggatgaacgataccccgaccacgtgtgtaagctctctaaggcgctctatggacttaagcaagccccaagagcatggtatgaatgccttagagactttttaattgcaaatgctttcaaggttgggaaagccgatccaactctttttactaagacttgtgatggtgatctttttgtgtgccaaatctatgtcgatgacataatatttggttctactaaccaaaagtcttgtgaagagtttagcaaggtgatgactcagaaattcgagatgtcgatgatgggcgagttaagctacttccttgggttccaagtgaggcaactcaaggatggaaccttcatctcccaaacgaagtacacacaagatttgatcaagaggtttgggatgaaggacgccaagcccgcaaagactccgatgggaaccgacggacacaccgacctcaacaaaggaggtaagtctgttgatcaaaaagcataccggtctatgatagggtctttactttatttatgtgctagtaggccggatattatgcttagcgtatgcatgtgtgctagatttgaatccgatcctaaggagtgtcacttagtggctgtgaagcgaattcttagatatttagtcgctacgccttgtttcaggatctggtatccaaaggggtctacctttgacttgattggatattcagactccgactatgctgggtgtaaggtcgataggaagagtacatcggggatgtgccaattcttaggaaggtccctggtgtcatggagttctaagaaacaaacctccgttgccctatccaccgctgaggccgagtacgttgccgcaggacagtgctgcgcgcaactactttggatgaggcaaaccctcagggactttggctacaatctgagcaaagtcccactcctatgtgataatgagagtgctatccacaaggcggataatcctgttgaacacagccgcacaaagcacattgacatccggcatcactttttgagagaccaccagcaaaagggagatatcgaagtgtttcatgttagctccgagaaccagctagctgatatctttaccaagcctttagatgagcagaccttttgcaagttgcgtagtgagctaaatgtcttagattcgcggaacttggattga

SEQ ID NO: 4796 - DNA, 3285 bp, Zea mays
  Clone ID: TF_ZmC4916_408
atggatcctaaggggaagggaattgtgatcaacgacaaggagaaggagtccttcgtcaacgagccaagggatgacaagtccaatgactcgggctcgggccacaagcgaagagatgggaagaagaagaagacaagacgcatcaaggagatcgtctactacgacagcgataagtcctcttcttcccaaaaggacgacgaccacgacaaacaaaggaaaccggttaattctaacttttcttttgactactctcgtattccgcaaagttcaaattcacatttgctttctattccactcggcaagcccccacactttgatggggaggactacggattttggagccacaaaatgcgtagtcacctattctctctccatcctagcatatgggagattgtagatagtggaatgcactttaatagttcggatagtcctatattcattaatgagcaaatccataagaatgcacaagctactactgttcttctagcctcattgtgcagggatgaatataataaagtgagtggcttggataacgccaagcaaatctgggataccctcaagatctctcatgagggaaatgacgctaccttgctcaccaaaatggagttggtggagggcgagcttggacggttcgcgatgataaggggcgaggagccaactcagacatacaaccggctcaagacccttatcaacaaaataaggagctacggaagcacgcgatggacggaccacgacgtcgtccgactaatgctcaggtcctttaccgttcttgatcctcatttggtgaataatattcgtgagaatcccaggtacaccaaaatgtcgcccgaagaagtcctaggaaaattcgtcagcgggcgaatgatgatcaaggaggcaaggtatgtggacgacgccttgaatggaccgatcaacgagccgcaaccttttgctctcaaagccacagggaacaaggaggcgctacccagcaaggtggcgcaaattgaggcggccggtcttaatgaagaagaaatggccctcattatcaagagattcaagacggtgctaaagggtcgcaatggacagccgagcaagactaagaccaaggggaagcgatcatgcttcaaatgcggtaagcttggtcattttattgctaactgtcccgataatgatagtgaccaggaaaagggaaacaagagggaaaagaagaagcattacaagaaggcaaagggcgaggcgcatctaggcaaggagtgggactcggattgctcctcgtccgactccgacaatgaaggactcgccgccaccgccttcaacaaatcaaccctcttccccaacgagcgtcacacatgccttatggcaagggagaagaaggtatgtactcgcaactctacctatgcttcttcaagtgaggacgaatctagtgatgaggatgaagtagattattcatgtttgttcaagggcttagatagatctaagatagacaaaattaatgaattaattgatgccttgaatgaaaagaatatacttttagaaaagcaagaggatttgttgtatgaagagcatgataaatttgttgaggcacaaaaatcctatactttagaagttaaaagaaatgaaatgctttcttttgaactatctacttgtcatgaaaccatttctactttgaaaggtgtcaacaatgatttaaatgctaaattagaagtagcaaataaatccaattcttgtgtagaacatgttgaaatttgtactaggtgtaaagattttgacattgatgcttgtagtgaacacctagtttcaatttccaagcttaatgatgaactggctagtcttaatgctcaacttaagactagcaagaatgattttgataagctaaaatttgcaagggatgcctacacaattggcagacacccctcaattaaggatggacttggcttcaagagagaagctaagaacttaacaagccataaggctcccattctcgccaaggagaaagggaaggcccctatggctagtaatgtgcaaaagaaccatgcttttatgtactatgataggagatattctagaaatgcttttagaggtcatgatgtgtttgattcacatgcttatgactcttatgctatgactgcttctagttctcatgttatgcatggtagaaatatgtctaggagaaatgctattcatcatgtgcctagaaagaatgttattcatgctcctaggaaagtagtgaatgaaccttctacaatttattgtgctttgaatacttcatttgcaatttgtagaaaggatagaaaagtaattgctaggaagttaggggcaaaatgcaaaggtgataaaacttgcatttgggtccctaaggaaattgtgactaaccttgtaggacccaacaagagttgggtttatgcatccgggggttcaagctggattatcgacagcggatgcacaaaccatatgacgggggagaagaagatgttcacctcctacgtcaagaataaagattcccaagattcaattatattcggtgatgggaatcaaggcaaggataagtctgaaacacaagggaccctcaagcgcttcctcaggagagctcaaaatgagtttgagctcaaagtaaagaagataaggagcgacaacgggtccgagttcaagaaccttcaagtggaggagttccttgaagaggaagggatcaagcacgagttctccgctccctacacaccacagcaaaacggtgtggtagagaggaagaacaggatgctcatcgatatggcgaggacgatgctaggagagttcaagacccccgagagcttttggacggaagccgtgaacacggcttgccacaccatcaacagggtctaccttcatcgcctcctcaagaagacgtcgtatgagctactaaccggtaacaaacccaatgtatcttactttcgtgtatttgggagcaagtgctacattctagtgaagaagggtataaattctaagtttgctcccaaagctgtagaagggtttttgttaggttatgactcaaatacaaaggcatatagagtcttcaacaaatcatcgggtttggttgaagtctctagcgacgttgtatttgacgagactaatggctctccaagagagaaagttgttgatcttgatgatgtagatgaagaagatgttcctacggccgctatacgaaccatggcgattggagaagttcggccacaggaacaagataaacgagatcaaccttctccctcaaccgaagatgatgaaaaggtacctcaagtggaggcgcttgatcaaggggagcacaagatgatcaagtga

SEQ ID NO: 4797 - DNA, 5430 bp, Zea mays
  Clone ID: TF_ZmC4916_409
atggatcctaaggggaagggaatcgtgatcaacgacaaggagaaggagtccttcgtcaacgagccaaaggatgacaagtccaacgacttgggctcaggccatagacgaaaagatgggaagaagaagaagacaaggcgcatcaaggagattgtctactacgacagcgacgaatcttcctcttctcaaaaggacgacgacaacaactacaggaagacggtcaattcgaacttttcatttgactattctcgtattccacataattcgaattcgcatttgctttccattcctcttggcaaacctccacacttcgatggggaggactacggattttggagtcacaaaatgcgtagtcacttattctctctccatccaagtatatgggagattgtagagaatggaatgaaatttgatagctcggatagtcctatgcttataaatgaacaaatccatagaaatgcacaagctactactgttctcttagcatctttgtgcagggaagaatacaataaggtgagcggcttggacaatgccaagcagatatgggacaccctcaagatctctcacgagggcaatgacgtcaccatgctcaccaagatggagttggtggagggcgaacttggaagattcgctatgataaggggggaggaccacttggcattaactgagccaagggatgacaagtccaacaactcgggctcgggacacaagcgaaaagatgggaagaagaagaagacaagacgcatcaaggagatcgtctactacgacagcgatgagtcctcttcttcccaaaagaacgacgacaacgactacaggaagacggttaattcgaacttctcatttgattattctcgtattccacatagttcgaattcgcatttactttccattcctcttggtaaacctccacattttgatggggaagactacggattttggagtcacaaaatgcgtagtcatttattctctctccatccaagcatatgggagattgtagagaatggaatgaaatttgatagctcggatagccctatgtttatcaatgaacaaattcataaaaatgcacaagctactactgttctcttagcatctttgtgcagggaagagtacaataaggtgagcggcttggacaatgccaagcagatatgggacaccctcaagatctctcacgaggggaacgacatcaccatgctcaccaagatggagttggtggagggcgagcttggacgattcgccatgataaggggagaagagccaactcaaacttacaaccggctcaagacccttatcaacaagataaggagctacggaagcacgcgttggacggatcacgacgtcgtccgcctaatgctcaggtcatttaccgttcttgatcctcatctcgtgaacaatattcgtgagaaccccaggtacacgatgatgacgcccgaagaagtacttggaaaattcgtgagcgggcggatgatgatcaaggaggcaaggtacgtcgatgacgcgttgaacggtccaatccacgagcctcaacccattgctctcaaggcatcgaggagcaaggaggcactaccaagcaaggtggcgcaaattgaggcggccgggcttaatgatgaagaaatggctctcatcattaagcgcttcaagacggtgctaaagggtcgcaatggacagccgagcaagactaagaccaaggggaagcgatcatgcttcaaatgcggtaagcttggtcattttattgctaactgtcctgataatgaaagtgaccaggaaaagggaaacaagagggaaaagaagaagcattataagaaggcaaagggtgaggcgcatctaggcaaggagtgggactcggattgctcctcatccgactccgacaatgaaggactcgccgccaccgccttcaacaaatcaaccctcttccccaacgagcgtcacacatgccttatggcaagggagaagaagatatgtactcgcaactctacctatgcttcttcaagtgaggacgaatctagtgatgaggatgaagtagattattcatgtttgttcaagggcttagatagatctaagatagacaaaattaatgaattaattgatgccttgaatgaaaagaatatacttttagaaaagcaagaggatttgttgtatgaagagcatgataaatttgttgaggcacaaaaatcctatgctttagaggttaaaagaaatgaaatgctttcttttgaactatctacttgtcatgaaaccatttctactttgaaaggtgtcaacaatgatttaaatgctaaattagaagtagcaaataaatccaactcttgtgttgaacatgttgaaatttgcactaggtgtaaggatgttgatattaatgcctgtagtgaacacttagtttccatttcaaaattgagtgatgaagtagctagtcttaatgctcgacttaagactagcaaaagtgattttgaaaaactaaaatttgctagggatgcctacacggttggtagacacccctcaattaaggatggacttggcttcaagagggaagccaagaacttaacaagtcataaggctcccattcccgccaaggagaaagggaaggcccctatggctactagtgctaaaaggaaccatgcctttttgtatcatgataaaagacaaactagaaatagaagttatgatgcttttgattcatatgtttatgattctcatgccataaaggatagaaaagtaattgctaggaagttaggggcaaaatgcaaaggtgataaaacttgcatttgggtccctaaggaaattgtgactaaccttgtaggacccaacaagagttgggtttatgcatccgggggttcaagctggattatcgacagcggatgcacaaaccatatgacgggggagaagaagatgttcacctcctacgtcaagaataaagattcccaagattcaattgtattcggtgatgggaatcaaggcaaggaaaaatccgaaacccaagggactctcaaacgcttcctcaggagagctcaaaatgagtttgagctcaaagtgaaaaagataagaagcgacaacgggtccgagttcaagaaccttcaagtggaggagttccttgaagaggaagggatcaagcacgagttctccgttccctacacaccacagcaaaatggtgtggtagagaggaagaacaggacactcatcgacatggcgaggacgatgctaggagagtacaagacccccgagtgcttttggacggaagccgtgaacacggcgtgccacgccatcaacagggtctaccttcatcgcctcctcaagaagacgtcgtatgagctactaaccggtaacaaacccaatgtatcgtactttcgtgtatttgggagtaaatgctacattctagtgaagaagggtagaaattctaagtttgctcccaaagctgtagaagggtttttgttaggttatgactcaaatacaaaggcgtatagagtcttcaacaaatcatcgggtttggttgaagtctctagcgacgttgtatttgatgagactaatggctctccaagagagcaagttgttgattgtgatgatgtagatgaagaagatgttccgacggccgctatacggaccatggcgattggagaagtacggccacaggaacaagatgaacgaaatcaaccttcttcctcaactatggtgcatcccccaaccgaagatgacgaacaggtacctcaagtggaggcgctcgatcaagggggagcacaagataatcatgtgatggaggaagaagtgcaaccggcacctccaacccaagttcgagcgatgattcaaagggatcatcccgtcgaccaaattctgggtgacattagcaagggagtaactactcgatctcgattagttaatttttgtgagcattactcttttgtctcttctattgagcctttcagggtagaggaggccttgctagatccggactgggtgttggccatgcaagaggagctaaacaacttcaagcgcaatgaagtttggacactggtgcctcgtccgaagcaaaatgttgtgggaaccaagtgggtgttccgcaacaaacaggacgagcacggggtggtgacgaggaacaaggctcgacttgtggcaaaaggttatgcccaagtcgcaggtttggactttgaggagacctttgctcctgtggctaggcttgagtccattcgtattttgctagcatatgccgctcaccattctttcaggttgtaccaaatggatgtgaagagcgctttcctcaacgggccaatcaaggaggaggtgtacgtggagcaaccccctggcttcgaggatgaacggtaccccgaccacgtgtgtaagctctctaaggcgctctatggacttaagcaagccccaagagcatggtatgaatgccttagagactttttacttgctaatgctttcaaggttgggaaggccgatccaactctttttacaaagacaagtgatggtgatttgtttgtgtgccaaatttatgtcgatgacataatatttggttctactaaccaaaagtcttgtgaagagtttagcagggtgatgacgcagaaattcgagatgtcgatgatgggcgagttgaactacttccttgggttccaagtgaagcaactcaaggaaggcaccttcatctcccaaacgaagtacacgcaagatctgctaaagcggtttgggatgaaggacgccaagcccgcaaagactccgatggggaccgacggacacaccgacctcaacaaaggaggtaagtccgttgatcaaaaagcataccggtcaatgataggttctttgctttacttatgtgctagtagaccggatattatgcttagcgtatgcatgtgtgctagatttcaatccgatcctaaggaatgtcacttagtggcggtgaagcgaattcttagatatttagttgctacgccttgcttcggactctggtatccaaaggggtctacctttgacttagttggatactcagactccgactatgctggatgtaaggtcgataggaagagtacatcggggacgtgccaattcttaggaaggtccctggtgtcatggaactctaagaaacaaacctccgttgccctatccaccgctgaggccgagtatgttgccgcaggacagtgttgcgtgcaactactttggatgaggcaaaccctcagggactttggctacaatctgagcaaagtcccactcctatgtgacaatgagagtgctatccgcatggcggaaaatcctgttgaacacagccgcacaaagcacatagacatccggcatcactttttgagagaccaccagcaaaagggagatatcgaagtgtttcatgttagcaccgagaaccagctagccgatatctttaccaagcctctagatgagaagaccttttgcaggctgcgtagtgagctaaatgtcttagattcgcggaacttggattga

SEQ ID NO: 4798 - DNA, 2514 bp, Zea mays
  Clone ID: TF_ZmC4916_428
atggatcctaagggaaaggggatggtggtcaacaacaacgagaaggagtctatcttcaacgagccgaaggatgacaagcctatcgactcgggctcaagccacaagcgcaaagacgggaagaagaagaagacaaggcgcatcaaggagattaaggatgacgacgactacgagaaaaagaaaacgatcaattcaaacttttcttttgactactctcgtattccgcatagtacaaatgctcatttattatctattccacttggtaaacctcctcactttgatagagaggactacggattttggagtcacaaaatgcgtagtcatttgttctctctccatccaagcatatgggagatagttgagaatggaatgcattttgatagtagtgatagtcccatgtttatcaatgagcaaattcataaaaatgcacaagctactactgttcttctagcttccttgtgcagggatgaataccacaaagtgagcggcttggataacgccaagcaaatttgggacaccctcaagatctctcatgaggggaatgatgtcacaatgctcaccaagatggagttggtggaaggcgaactcaggagattcgctatgataaggggagaagagccaactcaaacgtacaaccggctaaagacccttgtcaacaagataagaagctatggaagcacgcgatggacggaccacgacgtcgtccgcctaatgctaaggtcttttactgtccttgatcctcatcttgtaaacaatattcgtgagaatcctaggtacaccaagatgacgcctgaggagatacttggaaagttcgtgagcgggcgaatgatgatcaaggaagcaagatacgtggacgacgcattgaatggtccaatcaatgagcctcaacctcttgctctcaaggcaacaagaagcaaggagacgctacctagcaaggtggcacaaattgaggcggccggacttaatgatgaagagatggctctcatcatcaagagattcaagacggcgctaaaaggtcgcaaggggcagccaagcaagaccaagacaaaggggaagcgctcatgcttcaaatgtggtaagcttggtcattttattgctaactgtcccgacaatgatagtgatcaggatcaagggaacaagagggagaagaagaagaattataagaaggcaaagggcgaggcacatctaggcaaggagtgggattcggattgctcctcatccgactccgacaatgaaggactcgccgccaccgccttcaacaagtcatccttcttccccaacgagcatcacacttgccttatggcaagggagaagaaggtttatgcatctgggggttcaaactggattatcgacagccgatgcacaaaccatatgacgggggagaagaaaatgttcacctcctacgtcaaaaacaaggattcccaagattcaataatattcggcgatgggaatcaaggcaaggataagtctgagacccaagaaaccctcaagcacttcctaaggagagctcaaaacgagtttgagctcaaggtgaagaagataaggagcgacaacgggtccgagttcaagaaccttcaagtggaggagtaccttgaggaggaagggatcaagcacgagttctccgctccctacacaccacagcaaaatggtgtggtagagaggaagaataggacgctaatcgatatggcgaggacgaagcttggagaattcaagacccccgagcgtttttggtcggaagctgtgaacacggcttgccacgccatcaacagggtctaccttcaccgcctcctcaagaagacgtcgtatgagcttctaaccggttatgattcaaatacaaaggcgtatagggtcttcaacaaatcatcgggtttggttgaagtctctagcgacgttgtatttgatgagactaatggctctccaagagagcaagttgttgatcttgatgatgtagatgaagaagatgttccgacggccgctatacgaaccatggcgattggtgaagtacgaccacaggaacaaaaggagcaagatcaaccttcttcctcaactatggtgcatcccccaactcaagacgatgaacaggttcatcaacaggaggcgtgtgatcaagggggatcacaagatgatcatgtgatggaggaagaaactcatcctgcacctccaacccaagttcgagcgatgattcaaagggatcatcccgtcgatcaaattcttggtgatattagcaagggagtaactactcaatctcgattagttaatttttgtgagcattactcctttgtctcttctattgagcctttcagggtagaggaggccttgctagatccggactgggtgttggccatgcaagaggagctcaacaacttcaagaggaatgaggtttggacactggtgcctcgtcctaagcaaaatgttgtgggaaccaagtgggtgtttgtcggtgttttgggtccgaccgcacacccggggttgcccctcaaggtgtttttaggagtaggacggtgtcgacaactgtag

SEQ ID NO: 4799 - DNA, 5454 bp, Zea mays
  Clone ID: TF_ZmC4916_434
atggatcctaagggcaaggggatggtgatcaacgacaaggagaccttcgtcaacgagctcaatgatgacaagcccactgactcaggctcgagccacaaaagaaaagacgggaggaagaagaagacaaggcgcatcaaggaaattgtctactacgacagcgacgaatcttcctcctctcaaaaggacgacgacgaccacgatagacgaaagacggttaactcaaacttttctttcgattattcgcgcatcccgcaaagttcaaattcacatttgctctccattccactcggcaagcccccacactttgatggggaggactacggtttttggagccacaaaatgcgtagtcacctattctctctccatccaagcatatgggagattgtagagaatggaatgaaatttgatagctcggatagccctatgcttataaatgaacaaatccatagaaatgcacaagctactactgttctattagcatctttgtgcagggaagagtacaataaggtgagcggcttggacaacgccaagcagatatgggacaccctcaagatctctcacgaggggaacgacatcaccatgctcactaaaatggagttggtggagggcgagcttggacgattcgcaatgataaggggagaggagccaactcaaacttacaaccggctcaagacccttatcaacaaaataaggagctacggaagcacgcgatggacggaccacgacgtcgtccgcctaatgctaaggtcctttaccgttcttgatcctcatctcgtaaacaatattcgtgagaatcccaggtacacgatgatgacgcctgaggaggtgctcggaaaattcgtaagcgggcggatgatgatcaaggaggcgagatacgtcgacgacgctctaaacggtccaatcaatgagccgcaacctcttgctctcaaggcaacacgaagcaaggaggcgctacctagcaaggtggcacagattgaggcggccggacttaatgatgaagagatggctctcatcatcaaaagattcaagacggcactaaaaggccgcaaggggcagccaagcaagaccaagacaaaggagaagcgcttatgcttcaaatgtggtaagcttggtcattttattgctaactgtcccgacaatgatagtgatcaggatcaagggaacaagagggagaagaagaagaactataagaaggcaaagggcgaggcgcatctaggcaaagagtgggactcggactgctcctcttccgactccgacaatgaaggactcaccgtcaccgccttcaacaaatcaaccctcttccccaacgagcgtcacacatgccttatggcaagggagaagaaggtatgtactcgaaactctacctatgcttcttcaagtgaggacgaatctagtgatgaggatgaagtagattactcatgtttgtttaagggcctagatagaaccaaggtagacaaaattaatgaattgattgatgccttgaatgataagaatatgcttttagaaaagcaagaggatttgttgtatgaagaacatgataaatttgtagaagcacaaagatctcatgctctagaagttaaaagaaatgaaatgctttcttgtgaattatcttcttgccatgagacaatttctaaattaaggagcattaatgataatttgaatgctaagttagagattgctagtaaatctaattcttgtgtagaaattgttgaaacttgtaataggtgtaaagattttgacattgatgcttgtagtgatcatttagtttcaatttctaagttaaatgaggaattagctagtcttaatgcccaacttaagactagcaagaatgaatttgacaagctaaaatttgcaagggatgcctacacgattggtagacacccctcaattaaggatggacttggcttcaagagagaagccaagaacttaacaagccataaggctctcattcccgccaaggagaaagggaaggcccctatggctagtagtgtgcaaaagaaccatgcgtttatgtaccatgataagagacaaactagaaatgcttataggagttacaatgcatataatgcctttgattctcatgccatgattgcttctagttctttttatgtgcatgatagaaatgttggtaggagaaatgttgttcataatttgcctaggagaaatgttgttaatgttcctaggagagttaatgaaccttctacaatatatcatgctttgaatgattcctttgctatttgtagaaaggataggaaaatagttgctaggaagttaggggccaaatgcaagggatacaaaacttgcatttgggtccctaaggatatttgcactaaccttgtaggacccaacatgagttgggtttatgcatccgggggttcaagctggattatcgacagcggatgcacaaaccatatgacgggggagaagaagatgttcacctcctacgtcaagaataaggattcccaagattcaattatattcggtgatgggaatcaaggcaaggtaaaagggttagttaagtctcttggttacaatttgctatctgttagtcaactatgcaatatgggatataattgtctttttacaaatgtagatgtgtctgtctttagaagaagtgatggttcactagcctttaagggtgtattagacggcaagctttacttagttgattttgcaaaagaagaggccgatctagatgcatgcttaattgctaagactagcatgggctggctgtggcatcgccgcttagcacatgtggggatgaagaaccttcacaagcttctaaagggagaacacgtgataggtttgactaacgtacaattcgaaaaatatagaccttgtgcagcttgtcaggcaggtaaacaggtgggaggagcacatcacagcaagaatgtgatgaccacatcaagacccctggagctgctacatatggacctcttcggacccgtcgcctatctaagcataggaggaagtaagtatggtttagttattgttgatgacttttcccgcttcacttgggtgttctttttgcaggataagtctgaaacccaagggaccctcaagcgcttcctcaggagagctcaaaatgagtttgagctcaaggtgaaaaagataaggagcgacaacgggtccgagttcaagaaccttcaagtggaggagttccttgaggaggaagggatcaagcacgagttctccgctccctacacaccacagcaaaatggtgtggtagagaggaagaacaggacgctaatcgatatggcgaggacgatgcttggagaattcaagactcccgagcgtttttggtcggaagccgtgaacacggcttgccacgccatcaaccaggtctaccttcatcgtctcctcaagaagacctcgtatgagctactaaccggtaacaaacccaatgtatcttactttcgagtatttgggagcaagtgctacattctagtgaagaaggttagaaattctaagtttgctcccaaagctgtagaagggtttttgttaggttatgactcaaatacaaaggcgtatagagtcttcaacaaatcatcgggtttggttgaagtctctagcgacgttgtatttgatgaaactaatggctctccaagagagcaagttgttgatcttgatgatgtagatgacgaagacgttccaacggccgcgatacgcaccatgacgattggagatgtacggcctcgggaacaattggagcaagatcaactgtcttcctcaactatggtgcatcccccaacccaagatgacgaacaggtacctcaagtggaggcgcatgatcaagggggagcacaggatgttcaagttgaagaggaagaagcgcaatcggcacctccaacccaagttcgagcggtgattcaaagggattatcccgtcgaccaaattttgggtgacattagcaagggagtaactactcgatctcgattagttaatttttgtgagcattactcctttgtctcttctattgagccttttaaggtagaggaggccttgctagatccggattgggtgttggccatgcaggaggaactcaacaacttcaagcgcaatgaagtttggacactggacgagcacagggtggtgacgaggaacaaggctcgacttgtggcaaaaggttatgcccaagtcacaggtttggactttgaggagacttttgctcctgtggctaggctagaatcaattcgtatcttgctagcatatgcctctcaccattctttcaggttgttccaaatggatgtgaagagcgctttcctcaacgggccaatcaaggaggaggtgtacgtggagcaaccccctggcttcgaggatgaacggtaccccgaccacgtgtgtaagctctctaaggcgctctatggacttaagcaagccccaagagcatggtatgaatgccttagagactttttaattgctaatgctttcaaggttgggaaagccgatccaactctctttacaaagacatgtgatggtgatttgtttgtgtgccaaatttatgtcgatgacataatatttggttctactaaccaaaagtcttgtgaagagtttagcagggtaatgacgcagaaattcgagatgtcgatgatgggcgagttgaactacttccttgggtttcaagtgaagcaactcaaggacggcaccttcatctcccaaacaaagtacacgcaagacttgctgaagcggtttgggatgaaggacgccaagcccgcaaagactccgatggggaccgacggacacaccgacctcaacaaaggaggtaagtccgttgatcaaaaagcataccggtcaatgatagggtctttactttatttatgtgctagtagaccggatattatgcttagcgtatgcatgtgtgctagatttcaatccgatcctaaggagtgtcacttagtggcggtgaagcgaattcttagatatttggttgctacgccttgcttcgggctctggtatccaaaggggtctacctttgacttggttggatactcaggctccgactatgctgcatataaggtcgataggaagagtacatcggggacgtgccaattcttaggaaggtccctggtgtcgtggaactctaagaaacaaacttccgttgccctatccaccgctgaggccgagtatgttgccgcaggacagtgttgcgcgcaactactttggatgaggcaaaccctccgggactttggctacaatctgagcaaagtcccactcctatgtgacaatgagagtgctatccgcatggcggaaaatccagttgaacacagccgcacaaagcacattgacatccggcatcagtttctgcgagaccaccagcaaaagggagatatcgaagtgtttcatgttagcaccgagaaccagctagccgatatctttaccaaacctctagatgagaagaccttttgcaggctgcgtagtgagctaaatgtcttagattcgcggaacttggattga

SEQ ID NO: 4800 - DNA, 5010 bp, Zea mays
  Clone ID: TF_ZmC4916_454
atggatcctaaggggaagggtatagtgatcaacgacaaagagaaggaatccttcgtcaacgagccgaaggacgataagcctaccgactccggctcgggccaaagacggaaggaagggaagaagaagaagaccaggcgcatcaaggagatcgtctactacgacagcgacgagtctacttcttcccaaaaggacgaggaccacaacgactacgagagaagaaaaccggttaattctaacttttcttttgactactctcgtattccgcatagttcaaattcacatttgctttccattccactcggcaagcccccacactttgatggggaggactacggattttggagccacaaaatgcgtagtcacctattctctctccatcctagtatatgggagattgtagagagtggaatgcattttgatagttcggatagtcccatgttcattaatgaacaaattcataagaatgcacaagctactactgttcttctagcttccttgtgcaggaatgaataccataaggtgagcggcttggataacgccaagcaaatctgggacaccctcaaaatttctcatgaggggaacgacgtcaccttactcaccaagatggagttggtggagggcgagcttggacggttcgcaatgataaggggcgaggagccaacgcaaacatacaatcggctcaagacccttatcaacaagataagaagctacgggagcacgcgatggacggaccacgacgtcgtccgcctaatgctaaggtcatttaccgttcttgatcctcacttggtgaacaatatacgtgaaaatcccaggtacaccaagatgtcgcccgaagaagttcttgggaaatttgttagcgggcgaatgatgatcaaggaggcgagatatgtggacgacgccttgaatggtccgatcaacgagccgcaacctctcgctctcaaggcaacacgaagcaaggaggcgctacctagcaaggtggcacaaattgaggcggccggactcaacgatgaagagatggctctcatcatcaagagattcaagacggcgctaaatggtcgcaaggggcagccaagcaagaccaagaccaaggggaagcgctcatgcttcaaatgcggtaagcttggtcattttatcgctaactgtcccgataatgaaagtgaccaggaaaaggggaacaaaagagaaaagaagaagcaatacaagaaggcaaagggcgaggcgcatctaggaaaggagtgggactcggattgctcctcctccgactccgacaacgaaggactcgccgccactgccttcaacaaatcggctctcttccccaacgagcgtctcacatgtcttatggcaagggagaagaaggtgagtactcaagactccacttatgcttcttctagtgatagtgagtctagtgatgatgacatagattattcatgcttgttcaagggcttagatagatctaagatagataaaatcaatgaattgattgatgcattgaatgaaaaggataggcttttagaaaagcaggaggatttattgtatgatgaacatgataaatttgtagaggcacaaaaatcatatgctttagaagtaaaaagaaatgaaatgctttcttatgaactatctacttgtcatgaaaccatttctactttacaaggtgttaacaatgatttaaatgctaaattagaagtagcaaacaaatctaattcttgtgtagaacatgttgaaatttgtactaggtgtaaagactttgacattaatgcttgtagtgaacacctagtttcaatttccaagcttaatgatgaactggctagtcttaatgctcaacttaagactagcaagaatgatttcgataagctaaaatttgcaagggatgcctacacaattggtagacacccctcaattaaggatggacttggcttcaagagagaagctaagaacttaacaagccataaggctcccattcccgccaaggagaaagggaaggcccctatggctactagtgctaaaaggaaccatgcatttttgtatcatgatagaagacaaactagaaatgtaagtcatgatgcttatgattcatatgtttatgattctcataccatgtttgctcctagttcctcttatgtgtatgatagaaatgttactaggagaaatgttgttcctaaaagaaatgctattcatcatgtgcctagaaggaatgttattcatgctcctaggaaaatagcaaatgaaacttccacaatttattatgctttaaatgcttcctttgctatttgtagaaaggataagaaaattgttgctaggaagttaggggcaaaatgcaagggagacaaaacttgcatttgggtccctaaggatatttgcactaaccttgtaggacccaacatgagttgggtttatgcatccgggggttcaagctggattattgatagcagatgcacaaaccatatgacgggggagaagaagatgttcacctcctacgtcaagaataaggattcccaagattcaatcatattcggtgatgggaatcaaggcaaggataagtctgaaacccaagggaccctcaaacgcttcctcaggagagctcaaaatgagtttgagctcaaagtgaaaaagataagaagcgacaacgggtccgagttcaagaaccttcaagtggaggagttccttgaagaggaagggatcaagcacgagttctccgctccctacacaccacagcaaaatggtgtggtagagaggaagaacaggacgctcatcgacatggcgaggacgatgctaggagagttcaagacccccgagtgcttttggacggaagccgtgaacacggcgtgccacgccatcaacagggtctaccttcatcgcctcctcaagaagacgtcgtatgagctactaaccggtaacaaacccaatgtatcgtactttcgtgtatttgggagtaaatgctacattctagtaaagaagggtagaaattctaagtttgctcccaaagctgtagaagggtttttattaggttatgactcaaatacaaaggcgtatagagtcttcaacaaatcatcgggtttggttgaagtctctagcgacgttgtatttgatgagactaatggctctccaatagagcaagttgttgattgtgatgatgtagatgaagaagatgttccgacggccgctatacggaccatggcgattggagaagtacggccacaggaacaagatgaacgagatcaaccttcttcctcaactatggtgcaacccccaaccaaagatgacgaacaggtacctcaagtggaggcgcttgatcaagggggagcacaaaatgatcaagtgatagaggaagaagcgcaaccggcacctccaactcaagttcgagcgatgattcaaagggatcatcccgtcgaccaaattctgggtgacattagcaagggagtaactactcgatctcgattagttaatttttgtgagcattactcctttgtctcttctattgagcctttcagggtagaagaggccttgctagatccggactgggtgttggccatgcaagaggagttaaacaacttcaagcgcaatgaagtttggacactggtgcctcgtccgaagcaaaatgttgtgggaaccaagtgggtgttccgcaacaaacaggacgagcacggggtggtgacgaggaacaaggctcgacttgtggcaaaaggttatgcccaagtcgcaggtttggatttcaaggagacttttgctcctgtggctaggctagaatcaattcgtatcttgctagcatatgccgctcaccattctttcaggttgtttcaaatggatgtgaagagcgccttcctcaacgggccaatcaaggaggaggtgtacgtggagcaaccccctggcttcgaggatgaacggtaccccgaccatgtgtgtaagctctctaaggcgctctatggacttaagcaagccccaagagcatggtatgaatgccttagagatttcttaattgctaatgctttcaaggttgggaaagccgatccaactctttttactaagacttgtaatggtgatttgtttgtgtgccaaatttatgtcgatgacataatatttggttctactaaccaaaagtcttgtgaagagtttagcagggtgatgacgcagaaattcgagatgtcgatgatgggcgagttgaactacttccttgggttccaagtgaagcaactcaaggacggcaccttcatctcccaaacgaagtacacgcaagatctgctaaagcggtttgggatgaaggacgccaagcccgcaaagactccgatggggaccgacggacacaccgacctcaacaaaggaggtaagtccgttgatcaaaaagcataccggtcaatgataggttctttgctttacttatgtgctagtagaccggatattatgcttagcgtatgcatgtgtgctagatttcaatccgatcctaaggagtgtcacttagtggcggtgaagcgaattcttagatatttggttgctacgccttgcttcgggctctggtatccaaaggggtctacctttgacttagttggatactcagactccgactatgctggatgtaaggtcgataggaagagtacatcggggacgtgccaattcttaggaaggtccctggtgtcatggaactctaagaaacaaacttccgttgccctatccaccgctgaggccgagtatgttgccgcaggacagtgttgcgcgcaactactttggatgaggcaaaccctcagggactttggctacaatctgagcaaagtcccactcctatgtgataatgagagtgctatccgcatggcggaaaatcctgttgaacacagccgcacaaagcacatagacatccggcatcactttttgagagaccaccagcaaaagggagatatcgaagtgtttcatgttagcaccgagaaccagctagccgatatcttcactaagcctctagatgagaagaccttttgcaggttgcgtagtgagctaaatgtcttagattcgcggaacctggattga

SEQ ID NO: 4801 - DNA, 4986 bp, Zea mays
  Clone ID: TF_ZmC4916_471
atggatcctaaggggaagggaatcgtgatcaacgacaaggagaaggagtccttcgtcaacgagccgaaggatgacaagcctactgactcggggtcgggccacaagcgtaaagatgggaagaagaagaagacaaggcgtatcaaggagatcgtctactacgacgatagcgatgagtcgacttcttcccaaaaggacgacgacaacgactacaggaagacggtcaattcgaacttttcatttgattattctcgtattccacatagttcgaattcgcatttgctttctattcctcttggcaaacctccacacttcgatggggaagactacggattttggagtcacaaaatgcgtagtcacttattctctctccatccaagcatgtgggagattgtagagaatggaatgaaatttgatagctcggatagccctatgcttataaatgaacaaatccatagaaatgcacaagctactactgttctattagcatctttgtgcagggaagagtacaataaggtgagcggcctggacaacgccaagcagatatgggacaccctcaagatctctcacgaagggaacgacatcaccatgctcactaaaatggagttggtggagggcgagcttggacgattcgcaatgataaggggagaggagccaacccaaacttacaaccggctcaagacccttatcaacaaaataaggagctacggaagcacgcgatggacggaccacgacgtcgtccgcctaatgctaaggtcctttaccgttcttgatcctcatctcgtaaacaatattcgtgagaatcccaggtacacgatgatgacgcccgaggaggtactcggaaaattcgtaagcgggcggatgatgatcaaggaggcgagatacgtcgacgacgctctaaacggtccaatcaatgagcctcaacctcttgctctcaaggcaacaagaagcaaggaaatgctacctagcaaggtggcacaaattgaggcggccggacttaatgatgaagagatggctctcatcatcaagagattcaagacggcactaaaaggccgcaaggggcaaccaagcaagaccaagacaaaggggaagcgctcatgcttcaaatgtggtaagcttggtcattttattgctaactgtcccgacaatgatagtgatcaggatcaagggaacaagagggagaagaagaagaactataagaaggcaaagggcgaggcgcatctaggcaaggagtgggactcggactgctcctcttccgactccgacaatgaaggactcgccgccaccgccttcaacaagtcatccctcttcccaaacgagcgtcacacatgccttatggcaagggagaaaaaggtgagtactcgagactccacttatgcttcttctagtgataatgagtctagtgatgatgatgacatagactattcatgcttattcaagggcttagatagatctaagatagataagattaatgagttgattgatgctttgaatgacaagaatagattactagaaaaacaagaagatcttttatatgatgagcatgataaatttgttagtgcacaaaattctcttgctctagaaattaaaaggaatgaaatgctctctggtgaattatctacttgtcataacaccatttctactttagaaggtgtcaacaatgatttaaatgctaaattagaagtggcaaataaatctaattcttgtgaagaatatgttgtaatttgtactaggtgtaaagactttgacattgatgcgtgtagtgaacacctagtttcaatttccaagcttaatgatgaattggctagtcttaatgctcaacttaagactagcaagaatgattttgataagctaaaatttgcaagggatgcctacacgattggtagacacccctcaattaaggatggacttggcttcaagagggaagccaagaacttaacaagccataaggctcccatctccgccaaggagaaagggaaggcccctatggcaagtagtactaaaaggaaccatgcttttatgtatcatgataggagacaaactagaaatgcttataggaataataatgcttatgatgattttgaccctcatgccatgtttgcttctagttcttcctatatgcatggtagaaatatgtctaggagaaatgctattcatcatgtgcctaaaaagaatattattcatgctcctaggaaagtagtgaatgaaccttctacaatttattgtgctttaaatgcttcctttgctatttgtagaaaggataggaaaataattgctaggaagttaggggcaaaatgcaagggagacaaaacttgcatttgggtccctaaggatatttgcactaaccttgtaggacccaacatgagttgggtttatgcatccgggggttcaagctggattattgatagcggatgcacaaaccatatgacgggggagaagaagatgttcacctcctacgtcaagaataaggattcccaagattcaattatattcggtgatgggaatcaaggcaaggataagtctgaaacccaagggaccctcaagcgcttcctcaggagagctcaaaatgagtttgagctcaaggtgaagaagataaggagcgacaacgggtccgagttcaagaaccttcaagtggaggagttccttgaggaggaagggatcaagcacgagttctccgctccctacacaccacagcaaaatggtgtggtagagaggaagaacaggacgctaatcgatatggcgaggacgatgcttggagaattcaagacccccgagtgtttctggtcggaagccgtgaacacggcttgccacgccatcaacagggtctaccttcatcgcctcctcaagaagacttcgtatgagctactaaccggtaacaaacccaatgtatcttactttcgtgtatttgggagcaagtgctacattctagtaaagaagagtagaaattctaagtttgctcccaaagctgtagaagggtttttgttaggttatgactcaaatacaaaggcgtatagagtcttcaacaaatcatcgggtttggttgaagtctctagcgacgttgtatttgatgagactaatggctctccaagagagcaagttgttgatcttgatgatgtagatgaagaagacgttccaacggccgctatgcgcaccatggcgattggtgatgtgcgaccacaggaacaattggagcaagatcaaccttcttcctcaacaatgatgcatcccccaactcaaaacgatgaacaagttcatcaagaggagtgtggtcaagggggagcacaagatgatcatgtgatggagaaagaagcacaaccggcacctccaacccaagttcgagcgatgattcaaagggatcatcccgtcgaccaaattctgggtgatattagcaagggagtaactactcgatctcgattagttaatttttgtgagcattactcctttgtctcttctattgagcctttcagggtagaagaggccttgctagatccggactgggtgttagccatgcaggaggaactcaacaacttcaagcgcaatgaagtttggacactggtgcctcgtcccaagcaaaatgttgtgggaaccaagtgggtgttccgcaacaaacaggacgagcacggggtggtgacgaggaacaaggctagacttgtggcaaaaggttatgcccaagtcgcaggtttggactttgaggagacgtttgctcctgtggctaggctagagtcaattcgcatcttgctagcatatgccgctcaccattccttcaggttgtaccaaatggatgtgaagagcgctttcctcaacgggccaatcaaggaggaggtgtacgtggagcaaccctctggcttcgaggatgaacggtaccccgaccacgtgtgtaagctatctaaggcgctctatggacttaagcaagccccaagagcatggtatgaatgccttagagactttctaattgttaattctttcaaggttgggaaagccgatccaactctttttactaagacatgtgatggtgatttgtttgtgtgccagatttatgtcgatgacataatatttgattctactaaccaaaagtcttgtcaagagtttagcagggtgatgacgcagaaattcgagatgtcaatgatgggcgagttgaactatttccttgggttccaagtgaagcaactcaaggacggcaccttcatctcccaaacgaagtacacgcaagatctgctaaagcggtttgggatgaaggacgccaagcccgcaaagacaccgatgggaaccgacggacacaccgacctcaacaaaggaggtaagtccgttgatcaaaaagcataccggtcaatgatagggtctttactttatttatgtgctagtagaccggatattatgcttagcgtatgcatgtgtgctagatttcaatccaatcctaaggagtgtcacttagtggcggtgaagcgaattctaagatatttggttgctacgccttgcttcgggctctggtatccaaaaaggtctacctttgacttggttggatactcagattccgactacgctggatgtaaggtcgataggaagagtacatcagggacgtgccaattcttaggaaggtccctggtgtcgtggaactctaagaaacaaacctccgttgccctatccaccgctgaggccgagtatgttgccacaggacagtgttgcgcgcaactactttggatgaggcaaaccctcagggactttggctacaatctgagcaaagtcccactcctatgtgataatgagagtgctatccgcatggcggaaaatcctgttgagcacagccgcacaaagcacatagacatccggcatcactttttgagagattaccagcaaaagggagatatcgaagtgtttcatgttagcaccgagaaccagctagccgatatctttaccaagcctctagatgagaagaccttttgcaggttgcgtagtgagctaaatgtcttagattcgcggaacttggattga

SEQ ID NO: 4802 - DNA, 4725 bp, Zea mays
  Clone ID: TF_ZmC951_358
ctaggtgctctcaataatatccggtcgagatgcacataaatagagtaaagaacctatcatcgaccggtataccttttgatctacgaatttacctcccgtgttgaggtcgagatgcccattggttcccatgggtgtcttgatgggcttggcatccttcatcccaaacttgtttagaatgtcttgaatatactttgtttggctaatgaaggtgccctcttggagttgcttcacttgaaatcccaagaagtacttcaactcccccatcattgacatctcgaatttttgtgtcatgatcctactaaattcttcacatgtagattcgttagtagacccaaatatgatatcatcaacataaatttggcatacaaacaaatcattgtcaaaagttttagtaaataaagtaggatcggcctttccaactttgaagccgttagtgataaggaaatctcttaggcattcataccatgctcttggggcttgcttgagcccataaagcgccttagagagtttatacacatagttaggatactcactatcttcaaagccgggaggttgctcaacatagacctcttccttgattgatccgttgaggaaggcacttttcacgtccatttgataaagcttaaagccatggtaagtagcataggcaagtaatatgcgaattgattcaagcctagctatgggtgcataggtttcaccgaaatccaaaccttcgacttgtgaatatcctttggccacaagtcgggctttgttccttgtcaccacaccatgctcatcttgcttgttgcggaagacccacttggttcctacaacattttggttaggacgtggaaccaaatgccatacctcgttcctagtgaagttgttgagctcctcttgcatcgccaccacccaatccgaatcttgaagtgcttcctctactttgtgtggctcaatagaggaaacaaaagagtaatgctcacaaaaatgtgcaacacgagatctagtggttacccccttatgaatgtcgccgaggatggtgtcgacggggtgatctcgttggattgcttggtggactcttgggtgtggcggtctcggttccgcatcctctttgtcttgatcatttgcatctcccccttgatcattgctgtcatcttgaggtggctcatctttttgatcttctccttcatcaacttgagcctcatcctcattttgagttggtggagatgcttgcgtggaggaggatggttgatcttgtgcatttggaggctctttggattctttaggacacacatccccaatggacatgttccttagcgcgacgcacggagcctcttcatcacctatctcatcaagatcaacttgctctacttgagagccgttagtctcatcaaacacaacgtcacaagaaacttcaacttgtccagaggacttgttaaagactctatatgcccttgtgtttgaatcatatcctagtaaaaagccttctacagtcttaggagcaaatttagattttctacctcttttaacaagaataaagcatttgctaccaaagactctaaaatatgaaatattgggctttttaccgataagaagttcatatgatgtcttcttgaggattcggtgtagatacaaccggttgatggcgtagcaggcggtgttgaccgcctcggcccaaaaccgatccgaagtcttgtactcatcaagcatggttcttgccatgtccaatagagttctattcttcctctctactacaccattttgttgtggcgtgtagggagaagagaactcatgcttgatgccctcttcctcaaggaagccttcaatttgagagttcttgaactccgtcccgttgtcgcttctaattttcttgatccttaagccgaactcattttgagctcgtctcaagaatccatttaagtttcttgggtatgagatttttctcccgccgatgcttatgtaagctatcgggccgaataggtccatgtgtaggagctcgagtggcctgtcagtcgtcatgatgttcttgtgtggatgatgaacaccaacttgcttccctgcctgacatgcgctacaaatcctgtctttctcaaaatgaacatttgttagtcccaaaatgtgttctccctttagaagtttgtgaacattcttcattccaacatgtgctagtcggcgatgccagagccagcccatgttagtcttagcaattaagcaagtgtcgagttcagctctatcaaaatctactaagtatagctgaccctctaacactcccttaaatgctattgaatcatcactccttctaaagacagtaacacctacatcttgatttccatcctcgaatgtgatagctcgttggggatcttggtttttctcgtaggaggagaacatcttcttctcccctgtcatgtggtttgtgcacccgctatcgatgatccaacttgagcccccagatgcataaacccaaacacaagtctttgaccccttgtgcttgcccccaacatacttggcaactacattgccggatttgttagttaaaacataagatgcatcaaaagttttaaatgaaatgttatgatcatttgatgcactaggagttttcttcttaggcaatttagcatgggttgattgcctagaactagatgtctcacccttatacataaaagcatgattagggccagagtgagacttcctagagtgaattctcctaattttgctctcgggataaccggcagggtaaaaaatgtaaccctcgttatcctgaggcatgggagccttgcccttaacaaaattagacaatcttttaggaggggcattaagtttgatattgtcccccttttggaagccaatgtcatccttgatgccggggcgtctcccactatagagcatgcttctagcaaatttaaacttttcattttctaagtcatgctcggcaattttagcatctaatttagctatatgatcattttgttgtttaattaaagccatatgatcatgaatagcatcaatgttaatgtctctacatctagtgcaaatagtgacatgctcagtggtagatgtagagggtttgcaagaattaagttcaacaatcttagcacataaaatgtcattgttatctctaagatcggaaatggaagcattgcaaacatctaattctttagccttagcaagcaatttttcattttcaatcctaaggctagcaagagatatgttcaattcttcaatcttagcaagtaaatcaacattatcatttctaagattgggaattgaaacatcacaagcatttgaatcaaccttagtaattaatctagcattctcatttctaaggttggcaattaaatcatgtgatgtgcctagctcactagttaatttttcacatttttcaacttctagagcgtaagcatttttaaccttaacatgctttttgttttccttgattaggaagtcctcttgggtgtccaagagttcatccttttcatggatggaattgtggccgacattggggaagaggagtcccttggtgacggcgatgttggcggcgtcctcgtcggaggaggagtcggtggagctctcgtcggagtcccactcccggcaaacatgggcatcgccgcccttcttcttgtagtatctcttcttctcctttcttctccctttcttgtcgtcgcccctgtcactatcactagataatggacatttagaaatgaaatgaccgggcttaccacacttgtagcacactttcttggagcggggcttgtaatccttccccctcctttgcgtgaggatttggctgaagctcttgatgatgagcgtcatttcctcgttgtcgagcttggaggcgtcgatgggtgttctacttgatgtagatttctccttcttttcctccgtcgccttgaatgcgaccggttgtgcttcggacgtggaggggccatcaagctcgttgattttctttgagccacgaattaattgaacttgtgtagggttaaggaaaacaagtgatctaagaataaccttaaccatttcgtggtcatcccattttttgctcccgaggttgcgcacttggttcaccaaggttttgagccggttgtacatgtcttgtggctcctccccttggcgaagtcggaagcgatcgagctccccctcgatcgtctcccgcttggtgatcttggtcacctcgtctccttcgtgcgcggtctttagcacgtcccaaatttcctttgcgctattcaacccttgcaccttattatactcctctcgacttagagaggctaggagtatagtggtggcttgggagttgaagtgcataatttgggctacttcatcctcatcatagtcttcatcccttttgtggagtgaggttaggtgatatcgcatcatatcactccacctagcataatcttcaccatcaaacattggtggtttgcctaatgggacggaaagtaatggcgtatgtttaggaatgcgagggtagcgtaaggggatcttactaaactttttgcgctcatggcgcttagaagttacggacggcgtgtcggagccggaggtggatggcgacgaggagtcggtctcgtagtagaccaccttcctcatcttcttcttcttcttgtcaccgctccgacgcgacttgtgtgaaggggattccttttccttccccttccctttgttgtaggactctcccgatggagcctccccgtggcttgtaatgggcttctcgccggtccccatctctttcttggcgtgatctcccgacat

SEQ ID NO: 4803 - DNA, 5166 bp, Zea mays
  Clone ID: TF_ZM3612.C6.o4.fg
atggatcctaaaggcaaggggatggtgatcaacgacaaggagaaggagtccttcgtcaacgagcccaatgatgacaggtccaccgactcaggatcgggccacaaaagaaaagacgagaggaagaagaagacaaggcgcatcaaggaaattgtctactacgacagcgacgaatcttcctcctctcaaaaggacgtcgacgactacgataaacgaaagatggttaactcaaacttttctttcgattattcgcgcatcccgcatagttcaaatgctcaattgctccccattccacttggcaagccccctcactttgatggagaggattacggattttggagccacaaaatgtgtactcacctgttttctctccatccaagcatttgggagattgtggaaagtggaatgaaatttgatagctcggatagccctgtgtttattaatgaacagattcataaaaatgcacaagctactactgtgttgctagcctctttgtgcagggacgagtatcacaaggtgagcggcttggacaatgccaagcagatctgggacaccctcaagatctctcatgagggaaacgacgtcaccttgctcaccaaaatggagttggtggagggcgagcttggacggttcgcgatgataaggggcgaggagccgacacaaacatacaaccggctcaagacccttatcaacaaaataaggagctacgggagcacgcgatggacggaccacgacgtcgtccgcctaatgctaaggtcatttaccgttcttgatcctcatttggtgaacaatattcgtgaaaatcccaggtacaccaagatgtcgcccgaagaagttcttgggaaattcgttagcgggcgaatgatgatcaaggaggcgaggtacgtggacgacgccttgaatggtccgatcaacgagccgcaaccccttgctctcaaggcaacacgaagcaaggaggcgctacctagcaaggtggcacagattgaggcggccggacttaatgatgaagagatggctctcatcatcaaaagattcaagacggtgcttaaaggtcgcaagggacagccaagcaagaccaaagccaaggggaagcgctcatgcttcaaatgcggtaagcttggtcattttattgctaactgtcccgacaatgatagtgatcaggatcaagggaacaagagggagaaaaagaagaactataagaaggcaaagggcgaggctcatcttggcaaggagtgggattcggactgctcttcgtccgactccgacaatgaaggactcgccgccaccgccttcaacaagtcatccctcttccccaacgagcgtcacacttgcctcatggcaagggagaagaaagtaagcacacataatactagtacttatgcttcttcaagtgaggatgagtctagtgatgatgatgagatagattactcatgcttattcaagggattagatagaaccaaggtagacaaaattaatgaattaattgatgccttgaatgataggaatatacttttagaaaagcaagaggatttgttgtatgaagagcatgataaatttgtagaagctcagaaatctcttgctctagaaattaagaggaatgaaatgctctctagtgaattatcttcttgtcatgaaactattgctaagttaaaaagttttaatgatgatttaaatgctaaactagaagtagctagtaaatctaattcttgtgtagaaattgttgaaacttgtaataggtgtaaagattttgacattgatgcttgtagtgatcatttagtttcaatttccaaattaaatgatgaattagctagtcttaatgcccaacttaagactagcaagaatgaatttgacaagctaaaatttgcaagggatgcttacacgattggtagacacccctcaattaaggatggacttggctacaagagggaagccaagaacttgacaagccataaggctcccatctccgccaaggaaaaagggaaggcccctatggctagtagtgtgcaaaagaaccatgcctttatgtaccatgatagaagacaacctagaaatgcttataggagttgtaatgcatataatgtctttgattctcatgccatgtttgcttctagttcttcttatgtgcatgatagaaatgttggtaggagaaatgttattcataatatgcctaggaaaaatgttgttaatgttcctaggaaagtaaatgaaccttctacaatttatcatgctttaaatgcttcctttgctatttgtagaaaggataggaagatagttgctagaaaattaggggcaagatgcaagggagacaaaacttgcatttgggtccctaaggatatttgtgctaaccttgtaggacccaacatgagttgggtttatgcatccgggggttcaagctggattattgacagcggatgcacaaaccatatgacgggggagaagaagatgttcacctcctacgtcaaaaacaaagattcccaagattcaataatattcagtgatgggaatcaaggcaaggtaaaagggctaggtaaaattgcaatctccaatgagcactctatctctaatgtgtttttagtagagtctcttggatataatttactatctgttagtcaattgtgcaatatgggatataactgtctatttacaaatgtagatgtgtctgtctttagaagatgtgatggttcactagcttttaagggtgtactagacggcaagctttacttagttaattttgcaaaagaagaggctggtctagatgcatgcttaatggctaagacttgcatgggctggctgtggcatcgccgcttagcacatgtggggatgaagaacctccacaagcttctaaagggagaacacgtgataggtctaaccaatgttcatttcgaaaaagatagaccttgtgcagcttgtcaagcagggaaacaggtgggaagctctcatcacaccaaaaatgtgatgacaacatcaagacccctggagctgctacatatggacctcttcggacccgtcgcctatctgagcataggaggaagtaagtatggtctagttatcgttgatgacttttcccgcttcacttgggtgttctttttgcaggataagtctgaaacccaagggaccctcaagcgcttcctaaggagagctcaaaatgagtttgagctcaaggtgaagaagataaggagcgacaacgggtccgaattcaagaaccttcaagtggaggagtttcttgaggaggaggggatcaagcacgagttctccgctccctacacacctcagcaaaacggtgtggtagagaggaagaacaggacgctcatagatatggcgaggactatgcttggagaattcaagacccccaagtgcttttggtcggaagccgtgaacacggcttgccacgccatcaacagggtctaccttcaccgcctcctcaagaagacgtcgtatgagctactaaccggtaacaaacctaatgtatcatattttcgtgtttttgggagtaaatgctacattctagtgaagaagggtaggaattccaaatttgctcccaaagccgtagaagggtttttattaggttatgattcaaatacaaaggcgtatagggtcttcaacaaatcatcgggtttggttgaagtctctagcgacgttgtatttgatgagactaatggctctccaagagagcaagttgttgatcttgatgatgtagatgaagaagacgttccaacggccgcgatacgcaccatggcgattggagatgtacgacctcaagaacatttggagcaagatcaaccgtcttcctcaactatgcctttcagggtagaagaggccttgctagatccggactgggtgttggccatgcaggaggaactcaacaacttcaagcgcaatgaagtttggacactggtgcctcgtcccaagcaaaatgttgtgggaaccaagtgggtgttccacaacaaacaggacgagcacggggtggtgacgaggaacaaggcccggcttgtggcaaaaggttatgcccaagtcgcaggtttgaactttgaggagacttttgctcctgtggctaggctagagtcaattcgcatcttgctagcatatgccgctcaccattctttcaggttgtaccaaatggatgtgaagagcgctttcctcaacgggccgatcaaggaggaggtgtacgtggagcaaccccctggcttcgaggatgaacggtaccccgaccacgtgtgtaagctctctaaggcgctctatggacttaagcaagccccaagagcatggtatgaatgccttagagactttttaattgctaatgctttcaaggttgggaaagccgatccaactctttttactaagacttgcgacagtgatctttttgtgtgccaaatttatgtcgacgacataatatttggttctactaaccaaaagtcttgtgaagagtttagcagggtgatgacgcagaaattcgagatgtcaatgatgggcgagttgacctacttccttgggttccaagtgaagcaactcaaggacggcaccttcatctcccaaacgaagtacacacaagatctgctaaagaggtttgggatgaaggacgccaagcccgcaaagacgccgatgggaaccaacggacacaccaacctcaacaaaggaggttctttgctttatttatgtgctagtagaccggatattatgcttagcgtatgcatgtgtgctagatttcaatctgatcctaaggagtgtcacttagtggctgtgaagcgaattcttcgatatttagtcgctacgccttgcttcgggatctggtatccaaaggggtctaactttgacttgattgggtactcagattccgactatgctggatgtaaggtcgataggaagagtacatcggggacgtgccaattcttaggaaggtccctggtgtcatggaactctaagaaacaaacctccgttgccctatccaccgctgaggccgagtacgttgccgcaggacagtgttgcgcgcaactactttggatgaggcaaaccctcagggactttggctacaatctgagcaaagtcccactcctatgtgataatgagagtgctatccgaatagcggaaaatcctgttgagcacagccgcacaaagcacattgacatccggcatcactttttgagagaccaccagcaaaagggggatatctaa

SEQ ID NO: 4804 - DNA, 4095 bp, Zea mays
  Clone ID: TF_ZM3654.C1.o3.fg
atggatcctaaggggaagggaatcgtgatcaacgacaaggagaaggagtccttcgtcaacgagccgaagaatgacaagcctactgactcgggctcgggccacaagcgcaaagatgggaagaagaagaagacaaggcgcatcaaggagatcgtctactacgacgatagcgatgagtctacttcttcccaaaaggacgacgacaacgactacaggaagacggtcaattcaaacttttcatttgattattctcgtattccacatagttcgaattcgcatttgctttccattcctcttggtaaacctccacactttgatggggaggactacagattttggagtcacaaaatgcgtagtcacttattctctctccatccgagcatatgggagattgtagagaatggaatgaaatttgatagctcggatagccctatgcttataaatgaacaaatccatagaaatgcacaagctactactgttctattagcatctttgtgcagggaagagtacaataaggtgagcggcttggacaatgccaagcagatatgggacaccctcaagatctctcacgaggggaacgacatcaccatgcttactaaaatggagttggtggagggcgagcttggacgattcgcaatgataaggggagaggagccaacccagacttacaaccgactcaagacccttatcaacaaaataaggagctacggaagcacgcgatggacggaccacgatgccgtccgcctaatgctaaggtcctttaccgttcttgatcctcatctcgtaaacaatattcgtgagaatcccaggtacacgacgatgacgcccgaggaggtactcggaaaattcgtaagcgggcggatgatgatcaaggaggcgagatacgtcgacgacgctctaaacggtccaatcaatgagcctcaacctcttgctctcaaggcaacaagaagcaaggagatgctacctagcaaggtggcacaaattgaggcggccggacttaatgatgaagagatggctctcatcatcaagagattcaagacggcgctaaaaggccgcaaggggcagccaagcaagaccaagacaaaggggaagcgctcatgcttcaaatgtggtaagcttggtcattttattgctaactgtcccgacaatgatagtgatcaggatcaagggaacaagagggagaagaagaagaactataagaaggcaaagggtgaggcgcatctaggcaaggagtgggactcggactgctcctcttccgactccgacaatgaaggactcgccgccaccgccttcaacaagtcatcccttttccccaacgagcgtcacacatgccttatggcaagggagaagaaggtttatgcatccgggggctcaagctggattatcgacagcggatgcacaaaccatatgacgggggagaagaagatgttcacctcctacgtcaagaataaggattcccaagattcaataatattcggtgatgggaaccaaggcaaggtaaaagggttagttgagtctctgggatataatttactatctgttagtcaattatgcaatatgggatataactgtttattcacaaacatagatgtgtctgtctttagaagaagtgatggttcactagcttttaagggtgtattagatggcaagctttacttagttgaatttgcaaaagaagagaccggtctagatgcatgcttaattgctaagactagcatgggctggctgtggcatcgccgcttagcacatgtgggaatgaagaaccttcacaagcttctaaagggagaacacgtgataggattaactaatgtgcaattcgaaaaagatagaccttgtgcagcttgtcaggcaggtaaacaagtgggaggagcacatcacagcaagaatgtgatgaccacatcaagacccttggagttgctacatatggacctcttcggacccgtcacctatctaagcataggaggaagtaagtatggtctagttattgttgatgacttttcccgcttcacttgggtgttctttttgcaggataagtctgaaacccaagggaccctcaagcgcttcctaaggagagcacaaaatgagtttgaactcaaagtgaagaagataagaagcgacaacgggtccgagttcaagaaccttcaagtggaggagttccttgaggaggaagggatcaagcacgagttctccgctccctacacaccacaacaaaatggtgtggtagagaggaagaacaggacgctcatcgatatggcgaggacgatgctaggagagttcaagacccccgagtgcttttggtcggaagctgtgaacacggcttgccacaccatcaacagggtctaccttcatcgcctcctcaagaagacgttgtatgagcttctaaccggtaacaaacccaatgtatcttactttcgtgtatttgggagcaaatgctacattctagtgaagaagggtagaaagtctaagtttgctcccaaagctgtagaagggtttttgttaggttatgactcaaatacaaaggcgtatagggtcttcaacaaatcatcgggtttggttgaagtctctagcgacgttgtatttgatgagactaatggctctccaagagagcaagttgttgattgtgatgatgtagatgaagaagatgttccgacggccgctatacacaccatggcgattggagatgtgcggccacaggaacaaaaggagcaagatcagccttattcctcaactatggtgcttcccccaactcaagacgatgaacaggttcatcaacaagaggcgtgtgatcaagggggagcacaagatgatcatgtgatggaggaagaagcgcaaccggcacctccaacccaagttcgagcgatgattcaaagggatcatcccgtcgaccaaattctgggtgatattagcaagggagtaactactcgatctcgattagttaatttttgtgagcattactcatttgtctcttctattgagcctttcagggtagaggaggccttgctagatccggactgggtgttggccatgcaagaggagctcaacaacttcaagtgcaatgaagtttggacactggtgcctcgtcccaagcaaaatgttgtgggaaccaagttgttccaaatggatgtgaagaacgctttcctcaacgggccaatcaaggaggaggtgtacgtggagcaactccctggcttcgaggatgaacggtaccccgaccacgtgtgtaagctctctaaggcgctctatggacttaagcaagccccaagagcatggtatgaatgccttagagatttcttaattgctaatgctttcaaggttgggaaagccgatccaactcttttcactaagacttgtgacggtgatctttttgtgtgccaaatttatgtcgatgacataatatttggttctactaataaaaagtcttgtgaagaatttagcagggtgatgacgcagaaattcgagatgtcgatgatgggcgagttgaactacttccttgggttccaagtgaagcaactcaaggacggcaccttcatctctcaaacaaagtacacgcaagacttgctgaagcagtttgggatgaaggatgccaagcccgcaaagactccgatggggaccgacggacacaccgacctcaacaaaggagattccgattatgctggatgtaaggtcgataggaagagtacatcggggacgtgccaattcttaggaaggtccctggtgtcatggaattctaagaaacaaacctccgttgccctatccaccgctgaggccgagtatgttgccgcaggacagtgttgcgcgcaactactttggatgaggcaaaccctcagggactttggctacaatctgagcaaagtcccactcctatgtgataatgagagtgctatccgcatggcggaaaatcctgttgagcacagccgcacaaagcacatagacatccggcatcactttttgagagaccaccagcaaaagggagatatcgaagtgtttcatgttagcaccgagaaccagctagccgatatctttaccaagcctctagatgagaagaccttttgcaggctgcgtagtgagctaaatgtcttagattcgcggaacttggattga

SEQ ID NO: 4805 - DNA, 4344 bp, Zea mays
  unsure (1)..(4344): unsure at all n locations
  Clone ID: TF_ZM3667.C6.o2.fg
atggatcctaagggaaaggggatggtgatcgacaacaacgagaaggagtctatcctcaatgagccgaagaatgacaagtctaccgacttgggctcaagccacaagcgcaaagatgggaagaagaagaagacaaggcacatcaaggagatcgtctactacgacgacagcgatgagtctacttcgtcccaaaaggacgacgacaacgactacaggaagacggttaattcgaacttttcatttgattattctcgtattccacatagttcgaattcgcatttgctttccattcctcttggcaaacctgcacaattcgatggggaggactacggattttggagtcacaaaatgcgtagtcacttattctctctccatccaagcatatgggagattgtagagaatggaatgaaatttgatagctcggatagccctatgcttataaatgaacaaatccatagaaatgcacaaactactattgttctattagcatctttgtgcagggaagagtacaataaggtgagcggcttggacaacgccaagcagatatgggacaccctcaaaatctctcacgatgggaacgacatcaccatgctcactaaaatggagttggtggagggcgagcttggacgattcgcaatgataaggggagaggagccaacccaaacttacaaccggctcaagacccttatcaacaaaataaggagctatggaagcactcgatggacggaccacgacgtcgttcgcctaatgctaaggtcctttaccgtccttgatcctcatctcgtaaacaatattcgtgagaatctcaggtacacgatgatgacgcccgaggaggtactcggaaaatttgtaagcgggaggatgatgatcaaggaggcgagatacgtcgacgacgctctaaacggtccaatcaatgagcctcaacctcttgctctcaaggcaacaagaagcaaggaaacgctacctagcaaggtggcacaaattgaggcagccggacttaatgatgaagagatggctctcatcatcaagagattcaagacggcactaaaaggccgcaaggggcaaccaagcaagaccaagacaaaagggaagcgctcatgcttcaaatgtggtaagcttggtcattttattgctaactgtcccgacaatgatagtgatcaggatcaagggaacaagagggagaagaagaagaactataagaaggcaaagggcgaggcgcatctaggcaaggagtgggactcggactgctcctcttccgactccgacaatgaaggactcgccgccaccgccttcaacaagtcatccctcttccccaacgagcgtcacacatgccttatggcaagggagaagaaggtgagtactcaagactccacttatgctttttctagtgataatgagtctagtgatgatgatgacatagattattcatgcttattcaagggcttagatagatctaagatagataaaattaatgaattgattgatgccttgaatgataagaataggcttttagaaaagcaagaggatttgctgtatgaagaacatgacaaatttgtagaaacacaaaaatcacttgcattagagattaagagaaatgaaatgctttcttttgaactatctacttgtcatgaaaccatttctactttaaaaggtgtcancaatgatttaaatgctaaattagaagtagcaaataaatctaattcttgtgtagaacatgttgtaatttgtactaggtgtaaagattttgacattgatgcttgtagtgaacacctagtttcaatttccaagcttaatgatgagttggctagtcttaatgtttatgcatccgggggttcaagctggattatcgacagcggatgcacaaaccatatgacgggggagaagaagatgttcacctcctacgtcaagaataaggattcccaagattcaattatattcggtgatgggaatcaaggcaagaataagtctgaaacccaagggaccctcaagcgcttcctcaggagagctcaaaatgagtttgagctcaaggtgaagaagataaggagcgacaacgggtccgagttcaagaaccttcaagtggaggagttccttgaggaggaagggatccagcacgagttctccgctccctacacaccacagcaaaatgccgtgaacacggcttgccacgccatcaacagggtctaccttcatcgcctcctcaagaagacttcgtatgagctactaaccggtaacaaacccaatgtatcttactttcgtgtatttgggagcaagtgctacattctagtgaagaagggtagaaattctaagtttgctcccaaagctgtagaagggtttttgttaggttatgactcaaatacaaaggcgtatagagtcttcaacaaatcatcggatttggttgaagtctctagcgacgttgtatttgatgagactaatggctctccaagagagcaagttgttgatcttgatgatgtagacgaagaagatgttccgacggctgctatacgaaccatggcgattggtgatgtgcgaccacaggaacaagatgagcaagatcaaccttcttcctcaactatggtgcatcccccaactcaagacgatgaacaggttcatcaacaggagacgtgtgatcaagggggagcacaagatgatcatgtgatgggggaagaagcgcaaccggcacctccaacccaagttcgagcgatgattcaaagggatcatcccgtcgaccaaattctgggagatattagcaagggagtaactactcggtctcgattagttaatttttgtgaacattactcctttgtctcttttattgagccttttagggtagaagaggccttgctagatccgtactgggtgttggccatgcaagaggagctcaacaacttcaaaaggaatgaagtttggacgctggtgcctcgtcctaagcaaaatgttgtgggaaccaagtgggtgttccgcaacaaacaagacgagcacggagtggtgacaaggaacaaggctcgacttgtggcaaaaggttatgcccaagtcgcaggtttggactttgaggagacttttgctcctgtggctaggctagagtccattcgtatcttgctagcatatgccgctcaccattctttcaggttgttccaaatggatgtaaagagcgctttcctcaacgggccaataaaggaggaagtgtacgtggagcaaccccctggcttcgaggatgaacggtaccccgaccacgtatgtaagctctctaaggcgctctatggacttaagcaagccccaagagcatggtatgaatgccttagagatttcttaattgctaatgcttttaaggttgggaaagccgatccaactcttttcactaagacatgtgatggtgatttgtttgtgtgccaaatttatgtcgatgacataatatttggttctactaataaaaagtcttgtgaagagtttagcagggtgatgacgcagaaattcgagatgttaatgatgggcgagttgaactacttccttgggttccaagtgaagcaactcaaggatggcaccttcatctctcaaacgaagtacacgcaagacttgctaaagcggtttgggatgaaggacgccaagcccgcaaagactccgatgggaaccgatggacacaccgaccttaacaaaggaggtaagtcagttgatcaaaaagcataccggtcaatgataggatcgttactttacttatgtgctagtagaccggatattatgcttagcgtatgcatgtgtgctagatttcaatacgatcctaaggagtgtcacttagtggcagtgaagcgaatccttagatatttagttgctacgccttgcttcgggctctggtatccaaaggggtctacctttgacttaattggatattcagattccgactatgctggatgtaaggtcgataggaagagtacatcggggacgtgccaattcttaggaaggtccctggtgtcatggaactctaagaaacaaacttccgttgccctatccaccgctgaggccgagtatgttgtcgcaggacagtgttgcgcgcaactactttggatgaggcaaaccctccgggactttggctacaatctgagcaaagtcccactcctatgtgataatgagagtgttatccgcatggcggaaaatcctgttgagcacagccgaacaaagcacatagacatccggcatcactttttgagagaccaccagcaaaagggagatatcgaagtgtttcatgttagcaccgagaaccagctagccgatatctttaccaagcctctagatgagaagaccttttgcaggctgcgtagtgagctaaatgtcttagattcgcggaacttggattga

SEQ ID NO: 4806 - DNA, 2595 bp, Zea mays
  Clone ID: TF_ZM4163.C7.o1.fg
atggatcctaaggggaagggaatcgtgatcaacgataaggagaaggagtccttcgtcaacgagccaagggatgacaagtccaacgactcaagctcgggccacagacgcaaagatgggaagaagaagaagacaagacgcatcaaggagatcgtctactacgacagtgatgagtctacttcttcccaaaaggatgaggacaacgactacaaacaaaagacggttaactcaaacttttcttttgattattcgcgcattccgcatagctcaaatgctcatttgctccccattccacttggcaagcctcctcactttgatggagaggactacggattttggagtcacaaaatgcgtactcacctattttctctccatccaagcatttgggagattgtggaaagtggaatgaaatttgatagctcggatagcccttcgtttataaatgaacagatccataaaaatgcacaagctactactgtgttgctagcctctttgtgcagggacgagtatcacaaagtgagcggcttggacaatgccaagcagatttgggacaccctcaagatctctcatgagggaaatgatgtcaccttactcaccaagatggaattggtggagggcgagctcggacgattcgcgatgataaggggcgaggagccgacacaaacatataaccggctcaagatcctcatcaacaaaataaggagctacggaagcacgcgatggacggatcacgacgttgtccgcctaatgctaaggtcatttaccgtccttgatcctcacttggtgaacaatattcgtgaaaatcctaggtacatcaagatgtcgcccgaagaaattcttggaaaatttgtaagcgggcggatgatgattaaggaggcgaggtacgtggacgacgcgttgaatggaccaatccatgagcctcaacccattgctctcaaggcaacaaggagcaaggaggcgctacccagcaaggtagcgcaaattgaggcggccggtcttaatgatgaagagatggccctcatcatcaaaagattcaagacggcactaaagggtcgcaagggacagccaagcaagactaagaccaagggaaagcgatcatgcttcaaatgcggtaagcttggtcattttattgctaactgtcccgacaatgatagtgaccaggatcacgggagcaagagggaaaagaagaagcattacaagaaggccaagggcgaggcacatatcagaaaggagtgggattcggattgctcctcctccgactccgacaatgaaggactcgccgccactgccttcaacaagacatccctcttccccaacgagcgtcacacatgccttatggcacgggagaagaaggtatgtaatcaagacaatgtcacttatgattcttccagtgataatgagtctagtgatgatgaaatagattactctagtttgttcaagggattggatagaactaaagtagataaaattaatgaattgattgatgccttgaatgaaaaagatagactcttagaaaaacaagaggaccttttgtatgaagagcatgacaaatttgtagaggcacaaaaatcttatgctttagaagttaaaagaaataaagtgctttctagtgaactatcttcttgtcatgaaaccattgctactttaaagagagttaatgacgacttaaatgctaaactagaagtagctagtaaatctaattcttgtgtagaacatgttgagatttgcactaggtgtaaagattttgacattgatgcttgtagtgaacacctagtttcaatttccaaacttaatgatgaattggctagtcttaatgctcaacttaagactatcaagagtaattttgataagctaaaatttgcaagggatgcctacacaattggtagacacccctcaattaaggatggacttggcttcaagagggaagccaagaacttaacaagccataaggctcccattcccgctaaggagaaagggaaggcccctatggctactagtgctaaaaagaaccatgcctttttgtatcatgataggagacaaactagaaatgcttataggagttataatgcatacaatgatttgtctcatgctatgtttgcttctagttcctcatatgtgtatgatagaaatgttggtagaagggacgttgttcataatatgcctaggagaaatgttgttaatattcctaggaaagttaatgagccttctacaatatatcatgctttgaatgcttcctttgcaatttgtagaaaggatagaaaggtttatgcatccgggggttcaagctggattatcgacagcggatgcacaaaccatatgacgggggagaagaaaatgttcacctcctacgtcaagaataaagattcccaagattcaatcatattcggtgatgggaatcaaggcaaggataagtctgaaacccaagggaccctcaagcgcttcctcaggagagctcaaaatgagtttgagctcaaggtgaagaagataaggagcgacaacgggtccgagttcaagaaccttcaagtggaggagttccttgaagaggaagggatcaagcacgagttctccgctccctacacaccacaacaaaatggtgtg

SEQ ID NO: 4807 - DNA, 4839 bp, Zea mays
  Clone ID: TF_ZM4323.C9.o5.fg
atggatcctaaggggaagggaatcgtgatcaacgataaggagaaggagtccttcgtcaacgagcccaaagatgacaagcataccgactcaggctcgggccatagacggaaggaagggaagaagaagaagacaaggcgcatcaaggaaatcgtctactacgacgacagcgacgaatcttcctcttcccaaaaggacaacgacgacaacgactatgacaaacaaaagacggttaactcaaacttttcttttgattattcgcgcattccgcatagctcaaatgctcatttgctccccattccacttggcaagcctcctcactttgatggagaggactacggattttggagtcacaaaatgcgtactcacctattttctctccatccaagcatttgggagattgtggaaagtggaatgaaatttgatagctcggatagcccttcatttattaatgaacagatccataaaaatgcacaagctactactgtgttgctagcctctttgtgcagggacgagtatcacaaggtgagcggcttggacaatgccaagcagatttgggacaccctcaagatctctcatgaggggaatgatgtcaccttactcaccaagatggagttggtggagggcgagctcggacgattcgcgatgataaggggcgaggagccgacacaaacatacaaccggctcaagatccttatcaacaaaataaggagctacggaagcacgcggtggacggatcacgacgtcgtccgcctaatgctaaggtcatttaccgttcttgatcctcacttggtgaacaatattcgtgaaaatcctaggtacatcaagatgtcgcccgaagaaattcttggaaaatttgtaagcgggcgaatgatgatcaaggaggcgaggtacgtggacgacgcattgaatggcccaatccatgagcctcaacccattgctcttaaggcaacgaggagcaaggaggcgctacccagcaaagtggcgcaaattgaggcggctggtcttaatgatgaagagatggccctcatcatcaaaagattcaagacggcgcttaaaggtcgcaagggacagccaagcaagaccaaagccaaggggaagcgctcatgcttcaaatgtggtaagcttggtcattttattgctaactgtcccgacaatgatagtgatcaggaccaagtgaacaagagggaaaagaagaagcactacaagaaggcaaagggcgaggcacatctaggcaaggaatgggactcggattgctcctcttccgactccgacaatgaaggactcgccgccaccgccttcaacaaatcaaccctcttccccaacgagcgtcacacatgccttatggcaagggagaagaaggtatgtactcggaactctacctatgcttcttcaagtgaggacgaatctagtgatgaagatgaagtagattactcatgtttgtttaagggtctagatagaaccaaggtagacaaaattaatgaattgattgatgctctaaatgagaagaacatgcttttagagaaacaagaggatttattgtatgaagaacatgataaatttatagaagctcaaaaatcctatgctttagaagttaaaagaaatgaaatgctttcttttgaactatctacttgtcatgaaaccatctctactttaaaaggtgtcaacaatgatttaaatgctaaattagaagtagcaaataaatccaattcttgtgtagaacatgtcgcaatttgttctaggtgtaaagattttgatattaatgcttgtagtgaacacttagtttctatttcaaaattaaatgatgaattagctagtcttaatgcacaacttaagactagcaagagtgattttgataaactgaaatttgctagggatgcctacactgttggtagacacccctccattaaggatggacttggcttcaaaagggaagccaagaacttaacaagccataaggctcccattcccgcaaaggagaaagggaaggcccctatggctactagcactaaaaagaaccatgcttttttatatcatgatagaagacaatctagaagtgcttataggggttataatgcttttgattctcatcatatgattgcttctagctcttcttatatgcatggtagaaatatgtctaggagaaatgctattcatcatgtgcctagaaagaatgttagtcatgctcctaggaaagtagtaaatgaattttctacagtatatcatgctttgaatgcttcctttgcaatttgtagaaaggatagaaaagtaattgctaggaagttaggggctaaatgcaagggtgataaaacttgcatttgggtccctaagaagatttgtgctaaccttgtaggacccaacatgagttgggtttatgcatccgggggttcaagctggattatagacagcggatgcacaaaccatatgacgggggagaagaagatgttcacctcctacgtcaagagtaaggattcccaagattcaattatattcggtgatgggaatcaaggcaaggataagtctgaaacccaagggaccctcaagcgcttcctcaggagagctcaaaatgagtttgagctcaaggtgaagaagataaggagcgacaacgggtccgaattcaagaaccttcaagtggaggagttccttgaagaggaagggatcaagcacgagttctccgctccctacacaccacagcaaaatggtgtggttgagaggaagaacaggacgctaatcgacatggcgaggacgatgcttggagaatttaagacccccgagcggttttggtcggaagtcgtgaacacgggcttgccacgccatcaacagggtctaccttcaccgactcctcaagaagacgtcgcgtatagagtcttcaacaaatcattgggtttggttgaagtctctagcgacgttgtatttgatgagactaatggctctccaagagagcaagttgttgatcttgatgaagtagatgaagaagatgttccaacggccgccatacgaaccatggcgattggtgacgtgcgaccacaggaacaagatgagcaagatcaaccctcttcctcaactatggtgcattccccaacacaagacgatgaacaagttcatcaacaggaggcgtgtgatcaagggggagcacaagatgatcatgtgatggaggaagaagcgcaaccggcacctccaacccaagttcgagcgatgattcaaagggatcatcccgtcgaccaaattctgggtgacattagcaagggagtaactactcgatctcgattagttaatttttgtgaacattactcctttgtctcttctattgagcctttcagggtagaagaggccttgctagatccggactgggtgttggccatgcaagaggagttaaacaacttcaagcgcaatgaagtttggacactggtgcctcgtcccaagcaaaatgttgtgggaaccaagtgggtgttccgcaacaaacaggacgagcacggggtggtgacaaggaacaaggctcgacttgtggcaaaaggttatgcccaagtcgcaggtttggactttgaggagacttttgctcctgtggctaggctagagtcaattcgtatcttgctagcatatgccgctcaccattctttcaggttgttccaaatggatgtgaagagcgcattcctcaacgggccaataaaggaggaggtgtacgtggagcaaccccctggcttcgaggatgaacggtaccccgaccacgtgtgtaagctctctaaggcgctctatggacttaagcaagccccaagagcatggtatgaatgccttagagatttcttaattgctaatgctttcaaggttgggaaagccgatccaactctttttacaaagacttgtgatggtgatttatttgtgtgccaaatttatgtcgatgacataatatttggttctactaataaaaagtcttgtgaagagtttagcagggtgatgacgcagaaattcgagatgtcgatgatgggcgagttgaactacttccttgggttccaagtgaagcaactcaaggacggcaccttcatctcccaaacgaagtacacgcaggacctgctaaagcggtttgggatgaaggacgccaagcctgcaaagacaccgatgggaaccgacggacacaccgacctcaacaaaggaggtaagtccgttgatcaaaaagcataccggtcaatgatagggtcattactttacttatgtgctagtagaccggatattatgcttagcgtatgcatgtgtgctagatttcaatccgatcctaaggagtgtcacttagtggcggtgaagcgaattcttagatatttagttgctacgccttgcctcgggctctggtatccaaaggggtctacctttgacttgattggatactcagactccgattatgctggatgtaaggtcgataggaagagtacatcggggacgtgccaattcttaggaaggtccttggtgtcatggaaatctaagaaacaaacctccgttgccctatccaccgctgaggccgagtacattgccgcaggacagtgttgcgcgcaactactttggatgaggcaaaccctcagggactttggctacactctgagcaaagtcccactcctatgtgataatgagagtgctatccgcatggcggaaaatcctgttgaacacagccgcacaaagcacatagacatccggcatcactttttgagagaccaccagcaaaagggggatatcgaggtgtttcatgttagcaccgagaaccagctagccgatatctttaccaagcctctagatgagaagaccttctgcaggttgcgtagtgagctaaatgtcttagattcgcggaacttggattga

SEQ ID NO: 4808 - DNA, 4938 bp, Zea mays
  Clone ID: TF_ZM4330.C2.o1.fg
atggatcctaaggggaagggaatcatgatcaacgacaaggagaaggagtccttcgtcaacgagccaaaggatgacaagcctaccgactcgggctcgggccacagacgcaaagatgggaagaagaagaagacaagacgcatcaaggagatcatctactacgacgacagtgatgagttcacttcttcccaaaaggacaacaacgacgacgactacaagaaaaagaaaacggtcaattcaaacttttcttttgattactctcgtattcctcaaagtacaaatgctcatttattatctattccacttggtaaacctcctcattttgatggagaggactacggattttggagtcacaaaatgcgtagtcacttgttctctctccatcctagtatatgggagattgtagagagtggaatgcactttgatagtacggatagtcccatgtttattaatgagcaaattcataaaaatgcacaagctactactgttcttctagcttctttatgcagggatgaataccacaaagtgagcggcttggataacgccaagcaaatttgggacaccctcaagatctctcatgaggggaatgatgtcacaatgctcaccaagatggagttggtggaaggcgaactcgggagattcgctatgataaggggagaagagtcaactcaaacatacaaccagataaagacccttgtcaacaagataagaagctatggaagcacgtcttttactgtccttgatcctcatcttgtaaacaatattcgtgagaatcctaagtacaccaagatgacgcccgaggagatacttggaaagttcgtgagtgggcgaatgatgatcaaggaagaaagatacgtggacgacgcattgaatggtccaatcaatgagcctcaacctcttgctctcaaggcaacaagaagcaaggagacggtacctagtaaggtggcacaaattgaggctgccggacttaatgatgaagagatggctctcatcatcaagagattcaagacggcgctaaaaggttgcaaggggcagccaagcaagaccaagacaaaggggaagcgctcatgcttcaaatgtggtaagcttggtcattttattgctaactgtcccgacaatgatagtgatcaggatcaagggaacaagagggagaagaagaagaactataagaaggcaaagggcgaggcgcatctaggcaaggagtgggattcagattgctcctcttccgactccgacaatgaaggactcgccgccaccgccttcaacaagtcatccctcttccccaacgagcgtcacacatgccttatggcaagggagaagaaggtatgtactcgaaactctacttatgcttcctcaagtgaggacgaatctagtgatgaggatgaaatagattattcatgtttatttaagggtctagatagaaccaaggtagataaaattaatgaattgattgatgccttgaatgataagaatagacttttagaaaatcaagaggatttgttatatgaagaacacgacaaatttgtagaagcacaaaaatctcatgctttagaagttaaaagaaatgaagtactttcttgtgaattatcttcttgccatgaaacaatttctagcttaaggagcattaatgatgatttgaatgctaggttagaaatagctagtaaatcaacatcttgtgtagaaattgttgaaacttgcaataggtgtaaagactttgatattaatgcttgtagcaaacatctagtctcaatttctaaattaagtgatgaggtggctagtcttagtgcccaacttaaaactagcaagagtaattttgataaactaaaattttctagggatgcctacacggttggtagacacccctctattaaggatggacttggcttcaagagggaagccaagaacttaacaagccataaggctcccatctccgccaaggagaaagggaaggcccctatggcaagtagtactaaaaagaaccatgcttttatgtacaatgatagaagacagtcttataggagttgtaatgcttacaatgcttttgatgcacatgcctatgattcctatgctatgtttgcttctagttcttcctatatgcatggtagagatatgcctagaaagaatattgttcatgttgctaggaaagttatggatggtccttctacaatttatcatactttaaatgctttctttgctatttgtaaaaaggataggaagatagttgctaggaaattaggggcaaaatgcaagggtgataaaacttgcatttgggtccctaagacaattgtgactaaccttgtaggacccaacaagagttgggtttatgcatccgggggttcaagctggattatagacagcggatgcacaaaccatatgacgggggagaagaagatgttcacctcctacgtcaaaaacaaggattcccaagattcaataatattcggtgatgggaatcaaggcaaggataagtctgaaacccaagggaccctcaagcgcttcctaaggagagctcaaaatgagtttgagctcaaggtgaagaagataaggagcgacaacgggtccgagttcaagaaccttcaagtggaggagtttcttgaggaggaagggatcaagcacgagttctccgccccctacacaccacaacaaaatggtgtggtagagaggaagaacaggacgctcattgatatggcgaggacgatgcttggagagttcaagacccccgagtgcttttggtcggaagccgtaaacacggcttgccacgccatcaatagggtctaccttcatcacctcctcaagaagacgtcgtatgagctgctaaccggtaacaaacccaatgtatcgtactttcgtgtatttgggagcaaatgttacattctagtgaagaagggtagaaattctaagtttgctcccaaagctgttgaagggtttttgttaggttatgattcaaatacaaaggcgtatagagtcttcaacaaatcatcgagtttggttgaagtctctagcgacgttgtatttgataagactaatggctctccaagagagcaagttgttgattgtgatgatgtagatgaagaagatgttctgacggccgctatacgcaccatggcgattggagatgtgcggccacaggaacaaaagaagcaagatcaaccttcttcctcaactatggtgcaccccccaactcaagatgatgaacaggttcatcaacaagaggcgtgtgatcaagggggagcacaagatgatcatgtgatggaggaagaagcgcaaccggcacctccaacccaagttcgagcgatgattcaaagggatcatcccgtcgatcaaattctgggtgacataagcaagggagtaactactcggtctcgactagttaatttttgtgagcattactcctttgtctcttctattgagcctttcagggtagaagaggccttgctagatccggactgggtgttggccatgcaagaggagctcaacaacttcaagcgcaatgaagtttggacattggtgcctcgtcccaagcaaaacgttgtgggaaccaagtgggtgttccgcaacaaacaggacgagcacggggtggtgacgaggaacaaggctcgacttgtggcaaaaggttatgcccaagtcgcaggtttggactttgaggagacttttgctcctgtggctaggctagagtccattcgtattttgctagcatatgccactcaccattctttcaggttgttccaaatggatgtgaagagcgctttcctcaacgggccaatcaaggaggaggtgtacgtggagcaaccccctggcttcgaggatgaacggtaccccgaccacgtgtgtaagctctctaaggcgctctatggacttaagcaagccccaagagcatggtatgaatgccttagagatttcttaattgctaatgctttcaaggttgggaaagccgatccaactcttttcactaagacttgtgatggtgatatatttgtgtgccaaatttatgtcgatgacataatatttggttctactaataaaaagtcttgtgaagagtttagcagggtgatgacgcagaaattcaagatgtcaatgatgggcgagttgaactacttccttgggttccaagtgaagcaactcaaggacggcaccttcatctctcaaacgaagtacacgcaagacttgctgaagcggtttgggatgaaggatgccaagcccgcaaagactccgatggggaccgacggacacactgatctcaacaaaggaggtaagtccgttgatcaaaaggcataccggtcaatgatagggtcattactttacttatgtgctagtagaccggatattatgcttagcgtatgcatgtgtgctagatttcaatccgatcctaaggagtgtcacttagtggcagtgaagcgaatccttagatatttggttgctacgccttgcttcgggctctggtatccaaaggggtctacctttgacctaattggatattcagattccgactatgctggatgtaaggtcgataggaagagtacatcggggacatgccaattcttaggaaggtccctggtgtcatggaactctaagaaacaaacttccgttgccctatccaccgctgaggccgagtatgttgccgcaggacagtgttgcgcgcaactactttggatgaggcaaaccctcaaggactttggctacaatctgagcaaagtcccactcctatgtgataatgagagtactatccgcatggcggaaaatcctgttgaacacagccgcacaaagcacatagacatccggcatcactttttgagagaccaccagcaaaagggagatatcgaagtgtttcatgttagcaccgagaaccagttagccgatatctttaccaagcctctagatgagacgaccttttgcaggttgcgtagtgagctaaatgtcctagattcgtggaacttggattga

SEQ ID NO: 4809 - DNA, 5454 bp, Zea mays
  Clone ID: TF_ZM4333.C3.o1.fg
atggatcctaaagggaagggaatcgtgatcaacgacaaggagaaggagtccttcgtcaacgagccaagggatgacaagtccaacgactcgggctcgggccacagacgcaaagatgggaagaagaagaagacaagacgcatcaaggagatcgtctactacgacagcgatgagtctacttcctcccaaaaggacgacgaccacaacgaatacgagagaaagaaaccggtcaattcgaacttttcttttgattactctcgtattcctcaaagtactaatgctcatttattatctattccacttggtaaacctcctcatgttgatggagaggactacggattttggagtcacaaaatgcgtagtcacttgttctctctccatcctagcatatgggagattgtagaaagtggaatgcactttgatagtacggatagtcccatgtttattaatgaacaaattcataaaaatgcacaagctactactgtgttgttagcctctttgtgcagggacgagtaccataaggtgagcggcttggacaatgccaagcagatttgggacaccctcaagatctctcatgaggggaataatgtcaccttgctcaccaagatggagttggtggagggcgagcttggacgattcgcaatgataaggggcgaggagccgacacaaacatacaacaggctcaagacccttatcaacaaaataaggagctacgggagcacgcgatggacggaccacgacgtcgtccgcctaatgctaaggtcatttaccattcttgatcctcatttggtaaacaatatacgtgaaaatcccaggtacaccaagatgtcgcccgaagaagttcttgggaaattcgttagcgggcgaatgatgatcaaggaggcgaggtacgtggacgacgccttgaatggtccgatcaacgagccgcaaccccttgctctcaaggcaacacgaagcaaggaggcgctacctagcaaggtggcacaaattgaggcggccggacttaatgatgaagagatggctctcatcatcaaaagattcaagacggtgcttaaaggtcgcaagggacagccaagcaagaccaaagccaaggggaagcgctcatgcttcaaatgcggtaagcttggtcattttattgctaattgtcccgacaatgatagtgatcaggatcaagggaacaagagggagagaaagaagaactataagaaggcaaagggcgaggctcatcttggcaaggagtgggattcggactgctcttcgtccgactccgacaatgaaggactcgccgccactgctttcaacaagtcatccctcttccccaacgagcgacacacttgcctcatggcaagggagaagaaagtaagcactcataatactagtacttatgcttcttcaagtgaggatgagtctagtgatgatgatgagatagattactcatgcttattcaagggattagatagaaccaaggtagacaaaattaatgaattgattgatgccttgaatgataggaatatacttttagaaaagcaagaggatttgttgtatgaagaacatgataaatttgtagaagctcagaaatctcttgctctagaaattaagagaaatgaaatgctctctagtgaactatcttcttgtcatgaaactattgctaagttaaagagttttaatgatgatttaaatgctagactagaagtagctagtaaatctaattcttgtgtagaacatgttatggattgcactaggtgtaaagattttaatgttgatgcttgtagtgaacacctagtttcaatttctaaattgaatgatgaagtggctagtcttaatgcccaacttaagactagcaaaagtaattttgataaactaaaatttgcaagggattcctacacaattggtagacacccctcaattaaggatggacttggctacaagagggaagccaaggacttgacaagccataaggctcctatctccgccaaggagaaagggaaggctcctatggctagtagtgctaaaaagaaccatgcctttatgtaccatgataggagacatactagaaatgcaaatagaagttataatgtttttgattcatatgcttatgattctcatgacatgtttgcttctagttctttctatgtgcatggtaggaatgttggtaggagaaatgttgttcataatatgactaggagaaatgttgttaatgttcctaggaaagtcaatgaaccttctacaatatatcatgctttgaatgcttcctttgcaatttgtagaaaggatagaaaggtgattgctagaaagttaggggcaaaatgcaagggtgataaaacttgcatttggatccctaaggaaattgtgactaaccttgtaggacccaacaagagttgggtttatgcatccgggggttcaagctggattattgacagcggatgcacaaaccatatgacgggggagaagaagatgttcacctcctacgtcaagaataaagattcccaagatttaataatattcggtgatgggaatcaaggcaaggtaaaagggttagatgtgtctgtctttagaaggtgtgatggttcactagcttttaagggtattctagatggcaagctttacttagtggattttgcaaaagaagaggccggtctagatgcatgcttaatggctaagacttgcatgggctggctgtggcatcgccgcttagcacatgtggggatgaagaacctccacaagcttctaaagggagaacacgtgataggtctaaccaatgttcatttcgaaaaagatagaccttgtgcagcttgtcaagcagggaaacaggtgggaggctctcatcacaccaaaaatgtgatgacaacatcaagacccctggagctgctacatatggacctcttcggacccgtcgcctatctgagcataggaggaagtaagtatggtttagttattgttgatgacttttcccacttcacttgggtgttctttttgcaggataagtctgaaacccaagggaccctcaagcgcttcatcaggagagctcaaaatgagtttgagctcaaggtgaagaagataaggagcgacaacgggtctgagttcaagaaccttcaagtggaggagttccttgaggaggaagggatcaagcacgagttctccgctccctacacaccacagcaaaatggtgtggtagagaggaagaacaggacgctaatcgatatggcgaggacgatgcttggagaattcaagacccccgagtgtttctggtcggaagccgtgaacacggcttgccacgccatcaacagggtctaccttcatcgcctcctcaagaagacttcgtatgagctactaaccggtaacaaacccaatgtatcttactttcgtgtatttgggagcaagtgctacattctagtaaagaagggtagaaattctaagtttgctcccaaagctgtagaagggtttttgttaggttatgactcaaatacaaaggcgtatagagtcttcaacaaatcatcgggtttggttgaagtctctagcgacattgtatttgatgagactaatggctctccacgagagcaagttgttgattgtgatgatgtagatgaagaagatgttccgacggccgctatacgaaccatggcgattggagaagtgcggccacaggaacaagatgaacgagatcaaccttcttcctcaacaacggtgcattccccaactcaagacgatgaacaggttcatcaaaaggaggcgtgtgatcaagggggagcacaagatgatcacgtgatggaggaagaagcgcaaccggcacctccaacccaagttcgagcggtgattcaaagggatcatcccgtcgaccaaattctgggtgatattagcaagggagtaactactcgatctcgattagttaatttttgtgagcattactcttttgtctcttctattgagcctttcagggtagaagaggccttgctagatccagactgggtgttggccatgcaggaggagctaaacaacttcaaaaggaatgaagtttggacactggtgcctcgtcctaagcaaaatgttgtgggaaccaagtgggtgtttcgcaacaaacaagacgagcacggagtggtgacgaggaacaaggctcgacttgtggcaaaaggttatgcccaagtcgcaggtttggactttgaggagacttttgctcctgtggctaggctagagtccatttgtatcttgctagcatatgccgctcaccattctttcaggttgtaccaaatggatgtgaagagcgctttcctcaatgggccgatcaaggaggaggtgtacgtggagcaaccccctggctttgaggatgaacggtaccccgaccacgtgtgtaagctctctaaggcgctctatggacttaagcaagccccaagagcatggtatgaatgccttagagactttttaattgctaatgctttcaaggttgggaaagccgatccaactctttttactaagacatgtgatggtgatttgtttgtgtgccaaatttatgtcgatgacataatatttggttctactaaccaaaagtcttgtgaagagtttagcagggtgatgacgcagaaattcgagatgtcgatgatgggcgagttgaactacttccttgggttccaagtgaagcaactcaaggacggcaccttcatctcccaaacaaagtacacgcaagacttgctgaagcggtttgggatgaaggacgccaagcccgcaaagactccgatggggaccgacggacacaccgacctcaacaaaggaggtaagtccgttgatcaaaaagcataccggtccatgataggttctttgctttatttatgtgctagtagaccggatattatgcttagcgtatgcatgtgtgctagatttcaatccgatcctaaggagtgtcacttagtggcggtgaagcgaattcttagatatttagttgctacgccttgcttcgggatctggtatcctaaggggtctaactttgacttgattgggtactcagattccgactatgctggatgtaaggtcgataggaagagtacatcggggacgtgccaattcttaggaaggtccctggtgtcatggaactctaagaaacaaacctccgttgccctatccaccgctgaggccgagtacgttgccgcaggacagtgttacgcgcaactactttggatgaggcaaaccctccgggactttggctacaatctgagcaaagtcccactcctatgtgacaatgagagtgctatccgcatggcggaaaatcctgttgagcacagccgcacaaagcacatagacatccggcatcactttttgagagaccaccagcaaaagggagatatcgaagtgtttcatgttagcaccgagaaccagctagccgatatctttaccaagcctctagatgagaagaccttttgcaggttgcgtaatgagctaaatgtcttagattcgcggaacttggattga

SEQ ID NO: 4810 - DNA, 1996 bp, Zea mays
  Clone ID: TF_ZM4454.C3.o1.fg
atggatcctaaaggcaaggggatggtgatcaacgacaaggaaaaggagtccttcgtcaacgagcccaatgatgacaagctcaccgactcaggctcgggccacaaaagaaaagacgggagaaagaagaaggcaaggcgcatcaaggaaattgtctactacgacagcgacgaatcttcctcctcccaaaaggacgacgacgactacgataaacgaaagacggttaactcaaacttttctttcgattattcgcgcatcccgcatagttcaaatgctcaattgcttcccattccacttggcaagccccctcactttgatggagaggattacggattttggagccacaaaatgcgtactcacctgttttctctccatccaagcatttgggagattgtggaaagtggaatgaaatttgatagctcggatagccctatgtttattaatgaacagattcatagaaatgcacaagccactactgtattgctagcctctttgtgcagggacgagtatcacaaggtgagcggcttggacaatgccaagcagatctgggacaccctcaagatctctcatgagggaaacgacgtcaccttgctcaccaaaatggagttggtggaaggcgaacttggacggttcgcgatgataaggggggaggagccgacgcaaacatacaaccggctcaagacccttatcaacaaaataaggagctacgggagcacgcgatggacggaccacgacgtcgtccgcctaatgctaaggtcatttaccgttcttgatcctcatttggtgaacaatatacgtgaaaatcccaggtacaccaagatgtcgcccgaagaagttcttgggaaattcgttagtgggcgaatgatgattaaggaggcaaggtacgtggacgacgccttgaatggtccgatcaacgagccgcaaccccttgctctcaaagcaacacgaagcaaggaggcgctacctagcaaggtggcacagtttgaggcggccggacttaatgatgaagagatggctctcatcatcaaaagattcaagacggtgcttaaaggtcgcaagggacagccaagcaagaccaaagccaaggggaagcgctcatgcttcaaatgcggtaagcttggtcattttattgctaactgtcccgacaatgatagtgatcaggatcaagggaacaagagggagaaaaagaagaactataagaaggcaaagggcgaggctcatctgggcaaggagtgggattcggactgctctttatccgactccgacaatgaaggactcgccgccaccgccttcaacaagtcatccctcttccccaacaagcgtcacacttgcctcatggcaagggagaagaaagtaagcactcataatactagtacttatgcttcttcaagtgaggatgagtctagtgacgatgatgagatagattactcatgcttattcaagggattagatagaaccaaggtagacaaaattaatgaattgattgatgccttgaatgataggaatatacttttagaaaagcaagaggatttgttgtatgaagaacatgataaatttgtagaagctcagaaatctcttgctctagaaattaagaggaatgaaatgctctctagtgaattatcttcttgtcatgaaaccattgctactttaaagagtgttaatgatgacttaaatgctaaactagaagtagctagtaaatctaattcttgtgtagaacatgttgagatttgcactaggtgtaaagatttcgatgttgatgcttgtagtgatcatttagtttcaatttccaaattaactgaggaattggctagtcttaatgcccaacttaagactagcaagaatgaatttgataaactaaaatttgcaagggatgcctacacgatcggtagacacccctcaattaaggatggacttggcttcaagagggaagccaagaacttaacaagccataaggctcccattcccgctaaggagaaagggaaggcccctatggctacta

SEQ ID NO: 4811 - DNA, 1987 bp, Zea mays
  Clone ID: TF_ZM4496.C1.o2.fg
atggatcctaaggggaagggaattgtgatcaacgacaaggagaaggagtccttcgtcaacgagccaagggatgacaagtccaataactcgggctcgggccacaagcgaagagatgggaagaagaagaagacaagacgcatcaaggagatcgtctactacgacagcgatgagtcctcttcttcccaaaaggacgacgaccacgacaaacaaaggaaaccggttaattcgaacttttcatttgattattctcgtattccacatagttcgaattcgcatttgctttccattcctcttggtaaacctccacattttgatggggaggactacggattttggagtcacaaaatgcgtagtcatttattctctctccatccaagcatatgggagattgtagagaatggaatgaactttgatagctcggatagccctatgtttattaatgaacaaattcataaaaatgcacaagctactactgttctcttagcatctttgtgcagggaagaatacaataaggtgagcggcttggacaatgccaagcagatatgggacaccctcaagatctctcacgaggggaacgacatcaccatgctcaccaagatggagttggtggagggcgagcttggacggttcgcgatgataaggggcgaggagccaactcagacatacaaccggctcaagacccttatcaacaaaataaggagctacggaagcacgcgatggacggaccacgacgtcgtccgactaatgctcaggtcctttaccgttcttgatcctcatttggtgaataatattcgtgagaatcccaggtacaccaaaatgtcgcccgaagaagtcctaggaaaattcgtcagcgggcgaatgatgatcaaggaggcaaggtatgtggacgacgccttgaatggaccgatcaacgagccgcaaccttttgctctcaaagccacagggaacaaggaggcgctactcagcaaggtggcgcaaattgaggcggccggtcttaatgaagaagaaatggccctcattatcaagagattcaagacggtgctaaagggtcgcaatggacagccaagcaagaccaagaccaaggggaagcgctcatgcttcaaatgcggtaagcttggtcattttatcgctaactgtcccgataatgaaagtgaccaggaaaaggggaacaaaagagaaaagaagaagcaatacaagaaggcaaagggcgaggcgcatctaggaaaggagtgggactcggattgctcctcctccgactccgacaacgaaggactcgccgccactgccttcaacaaatcggctctcttccccaacgagcgtctcacatgtcttatggcaagggagaagaaggtgagtactcaagactccacttatgcttcttctagtgatagtgagtctagtgatgatgacatagattattcatgcttgttcaagggcttagatagatctaagatagataaaatcaatgaattgattgatgcattgaatgaaaaggataggcttttagaaaagcaggaggatttattgtatgatgaacatgataaatttgtagaggcacaaaaatcatatgctttagaagtaaaaagaaatgaaatgctttcttatgaactatctacttgtcatgaaaccatttctactttacaaggtgttaacaatgatttaaatgctaagttagaagtagcaaataaatctaattcttgtgtagaacatgttaagatttgcactaggtgtaaggatttcgatgttgatgcctgtagtgaacatctagttttaatttccaaattaaataaggaagtggctagtcttaatgcccaacttaagactagcaagaatgaagttgataaaataaaatttgcaagggatgcctatacggttggtagacacccctcaattaaggatggtcttggcttcaagagagaggccaagaacttaacaagccataaggctcccatcttcgtcaaggagaaagggaaggcccctatggcta

SEQ ID NO: 4812 - DNA, 2117 bp, Zea mays
  Clone ID: TF_ZM4496.C6.o4.fg
atggatcctaaggggaagggaattgtgatcaacgacaaggagaaggagtccttcgtcaacgagccaagggatgacaagtcaaatgactcgggctcgggccacaagcgaagagatgggaagaagaagaagacaagacgcatcaaggagatcgtctactacgacagcgatgagtcctcttcttcccaaaaggacgacgactacgacaaacaaaggaaaccggttaattctaacttttcttttgactactctcgtattccgcatagttcaaattcacatttgctttccattccactcggcaagcccccacactttgatggggaggactacggattttggagccacaaaatgcgtagtcacctattctctctccatcctagcatatgggagattgtagagaatggaatgaaatttgatagctcggatagccctatgtttatcaatgaacaaattcataaaaatgcacaagctactactgttctcttagcatctttgtgcagggaagagtacaataaggtgagcggcttggacaatgccaagcagatatgggacaccctcaagatctctcacgagggaaacgacatcaccatgctcaccaagatggagttggtggagggcgagcttggacgattcgccatgataaggggagaagagccaactcaaacttacaaccggctcaagacccttatcaacaagataaggagctacggaagcacgcgttggacggatcacgacgtcgtccgcctaatgctcaggtcatttaccgttcttgatcctcatctcgtgaacaatattcgtgagaaccccaggtacacgatgatgacgcccgaagaagtacttggaaaattcgtgagcgggcggatgatgatcaaggaggcaaggtacgtcgatgacgcgttgaacggtccaatccacgagcctcaacccattgctctcaaggcatcgaggagcaaggaggcactaccaagcaaggtggcgcaaattgaggcggccgggcttaatgatgaagaaatggctctcatcattaagcgcttcaagacggtgctaaagggtcgcaatggacagccgagcaagactaagaccaaggggaagcgatcatgcttcaaatgcggtaagcttggtcattttattgctaactgtcctgataatgaaagtgaccaggaaaagggaaacaagagggaaaagaagaagcattataagaaggcaaagggtgaggcgcatctaggcaaggagtgggactcggattgctcctcatccgactccgacaatgaaggactcgccgccaccgccttcaacaaatcaaccctcttccccaacgagcgtcacacatgccttatggcaagggagaagaaggtaggtactcgcaactctacctatgcttcttcaagtgaggaagaatctagtgatgaggatgaagtagattattcatgtttgttcaagggcttagatagatctaagatagacaaaattaatgagttaattgatgccttgaatgaaaagaatatacttttagaaaagcaagaggatttgttgtatgaagagcatgataaatttgttgaggcacaaaaatcctatgctttagaagttaaaagaaatgaaatgctttcttttgaactatctacttgtcatgaaaccatttctactttgaaaggtgtcaacaatgatttaaatgctaaattagaagtagcaaataaatccaattcttgtgtagaacatgttgaaatttgtactaggtgtaaagattttgacattaatgcttgtagtgaacacctagtttcaatttccaagcttaatgatgaactggctagtcttaatgctcaacttaagactagcaagaatgatttcgataagctaaaatttgcaagggatgcctatacaattggtagacacccctcaattaaggatggacttggcttcaagagagaagctaaggacttaacaagccataaggctcccattcccgccaaggagaaagggaaggcccctatggctagtaatgtgcaaaagaaccatgcttttatgtattatgataggagacaaactagaaatgcttataggagttataatgcttttgatgattttgactctcatgccatgtttgctcctagttcctcttatgt

SEQ ID NO: 4813 - DNA, 5010 bp, Zea mays
  Clone ID: TF_ZM4551.C4.o7.fg
atggatcctaaggggaagggtatagtgatcaacgacaaagagaaggaatccttcgtcaacgagccgaaggacgataagcctaccgactccggctcgggccaaagacggaaggaagggaagaagaagaagaccaggcgcatcaaggagatcgtctactacgacagcgacgagtctacttcttcccaaaaggacgaggaccacaacgactacgagagaagaaaaccggttaattcgaacttttcttttgattactctcgtattccgcaaagttcacattctcatttgctctccattccactcggcaagcccccacactttgatggagaggactacggattttggagccacaaaatgcgtagtcacctattctctctccatcctagtatatgggagattgtagagagtggaatgcattttgatagttcggatagtcccatgttcattaatgaacaaattcataagaatgcacaagctactactgttcttctagcttccttgtgcaggaatgaataccataaggtgagcggcttggataacgccaagcaaatctgggacaccctcaaaatttctcatgaggggaacgacgtcaccttactcaccaagatggagttggtggagggcgagcttggacggttcgcaatgataaggggccaggagccaacgcaaacatacaatcggctcaagacccttatcaacaagataagaagctacgggagcacgcgatggacggaccacgacgtcgtccgcctaatgctaaggtcatttaccgttcttgatcctcacttggtgaacaatatacgtgaaaatcccaggtacaccaagatgtcgcccgaagaagttcttgggaaatttgttagcgggcgaatgatgatcaaggaggcgagatatgtggacgacgccttgaatggtccgatcaacgagccgcaacctctcgctctcaaggcaacacgaagcaaggaggcgctacctagcaaggtggcacaaattgaggcggccggactcaacgatgaagagatggctctcatcatcaagagattcaagacggcgctaaatggtcgcaaggggcagccaagcaagaccaagaccaaggggaagcgctcatgcttcaaatgcggtaagcttggtcattttatcgctaactgtcccgataatgaaagtgaccaggaaaaggggaacaaaagagaaaagaagaagcaatacaagaaggcaaagggcgaggcgcatctaggaaaggagtgggactcggattgctcctcctccgactccgacaacgaaggactcgccgccactgccttcaataaatcggctctcttccccaacgagcgtctcacatgtcttatggcaagggagaagaaggtgagtactcaagactccacttatgcttcttctagtgatagtgagtctagtgatgatgacatagattattcatgcttgttcaagggcttagatagatctaagatagataaaatcaatgaattgattgatgcattgaatgaaaaggataggcttttagaaaagcaggaggatttattgtatgatgaacatgataaatttgtagaggcacaaaaatcctatgctttagaagttaagagaaatgaaatgctttcttttgaactatctacttgtcatgaaaccatttctactttgaaaggtgtcaacaatgatttaaatgctaaattagaagtagcaaacaaatccaattcttgtgtagaacatgttgaaatttgtactaggtgtaaagactttgacattaatgcttgtagtgaacacctagtttcaatttccaagcttaatgatgaactggctagtcttaatgctcaacttaagactagcaagaatgatttcgataagctaaaatttgcaagggatgcctacacaattggtagacacccctcaattaaggatggacttggcttcaagagagaagctaagaacttaacaagccataaggctcccattcccgccaaggagaaagggaaggcccctatggctactagtgctaaaaggaaccatgcatttttgtatcatgatagaagacaaactagaaatgtaagtcatgatgcttatgattcatatgtttatgattctcataccatgtttgctcctagttcctcttatgtgtatgatagaaatgttactaggagaaatgttgttcctaaaagaaatgctattcatcatgtgcctagaaggaatgttattcatgctcctaggaaaatagcaaatgaaccttccacaatttattatgctttaaatgcttcctttgctatttgtagaaaggataagaaaattgttgctaggaagttaggggcaaaatgcaagggagacaaaacttgcatttgggtccctaaggatatttgcactaaccttgtaggacccaacatgagttgggtttatgcatccgggggttcaagctggattattgacagcggatgcacaaaccatatgacgggggagaagaagatgttcacctcctacgtcaaaaataaggattcccaagattcaattatattcggtgatgggaatcaaggcaaggataagtctgaaacccaagggaccctcaagcgcttcctcaggagagctcaaaatgagtttgagctcaaagtgaaaaagataaggagcgacaacgggtccgagttcaagaactctcaagtggaggagttccttgaagaggaagggatcaagcacgagttctccgctccctacacaccacagcaaaatggtgtggtagagaggaagaacaggacgctcattgacatggcgaggacgatgctaggagagttcaagacccccgagtgcttttggacggaagccgtgaacactgcttgccacgccatcaacagggtctaccttcatcgcctcctcaagaagacgtcgtatgagcttctaaccggtaacaaacccaatgtatcttactttcgtgtatttgggagcaagtgctacattctagtgaagaaaggtagaaattctaagtttgctcccaaagctgtagaagggtttttgttaggttatgactcaaatacaaaggcgtatagagtcttcaacaaatcatcgggtttggttgaagtctctagcgacgttgtatttgatgagactaatggctctccaagagagcaagttgttgattgtgatgatgtagatgaagaagatgttccgacggccgctatacggaccatggcgattggagaagtacggccacaggaacaagatgaacgagatcaaccttcttcctcaactatggtgcaacccccaaccaaagatgacgaacaggtacctcaagtggaggcgcttgatcaagggggagcacaagatgatcaagtgatagaggaagaagcgcaaccggcacctccaacccaagttcgagcgatgattcaaagggatcatcccgtcgaccaaattctgggtgacattagcaagggagtaactactcgatctcgattagttaatttttgtgagcattactcctttgtctcttctattgagcctttcagggtagaagaggccttgctagatccggactgggtgttggccatgcaagaggagttaaacaatttcaagcgcaatgaagtttggacactggtgcctcgtccgaagcaaaatgttgtgggaaccaagtgggtgttccgcaacaaacaggacgagcacggggtggtgacgagaaacaaggctcgacttgtggcaaaaggttatgcccaagtcgcaggtttggattttgaggagacttttgctcctgtggctaggttagagtcaattcgaatcttgctagcatatgccgctcaccattccttcaggttgttccaaatggatgtgaagagcgctttcctcaacgggccaatcaaggaggaggtgtacgtggagcaaccccctggcttcgaggatgaacggtaccccgaccatgtgtgtaagctctctaaggcgctctatggacttaagcaagccccaagagcatggtatgaatgccttagagactttttacttgctaatgctttcaaggttgggaaggccgatccaactcttttcactaagacatgtgatggtgatttgtttgtgtgccaaatttatgttgatgacataatatttggttctactaaccaaaagtcttgtgaagagtttagcagggtgatgacgcagaaattcgagatgtcgatgatgggcgagttgaactacttccttgggttccaagtgaagcaactcaaggacggcaccttcatctcccaaacgaagtacacgcaagatctgctaaagcggtttgggatgaaggacgccaagcccgcaaagactccgatggggaccgacggacacaccgacctcaacaaaggaggtaagtccgttgatcaaaaagcataccggtcaatgataggttctttgctttacttatgtgctagtagaccggatattatgcttagcgtatgcatgtgtgctagatttcaatccgatcctaaggagtgtcacttagtggcggtgaagcgaattcttagatatttggttgctacgccttgcttcgggctctggtatccaaaggggtctacctttgacttagttggatactcagactccgactatgctggatgtaaggtcgataggaagagtacatcggggacgtgccaattcttaggaaggtccctggtgtcatggaactctaagaaacaaacttccgttgccctatccaccgctgaggccgagtatgttgccgcaggacagtgttgcgcgcaactactttggatgaggcaaacccttagggactttggctacaatctgagcaaagtcccactcctatgtgataatgagagtgctatccgcatggcggaaaatcctgttgaacacagccgcacaaagcacatagacatccggcatcactttttgagagaccaccagcaaaagggagatatcgaagtgtttcatgttagcaccgagaaccagctagccgatatcttcactaagcctctagatgagaagaccttttgcaggttgcgtagtgagctaaatgtcttagattcgcggaacctggattga

SEQ ID NO: 4814 - DNA, 4827 bp, Zea mays
  Clone ID: TF_ZM4576.C1.o3.fg
atggatcctaaggggaagggaatcgtgatcaacgataaggagaaggagtccttcgtcaacgagcccaaagatgacaagcctaccgactctggctcgggccatagacggaaggaagggaagaagaagaagataagacgcatcaaggagatcgtctactacgacgacagcgacgaatcttcctcttcccaaaaggacaacgacgacaacgactatgacaaacaaaagacggttaactcaaacttttcttttgattattcgcgcattccgcatagctcaaatgctcatttgctccccattccacttggcaagcctcctcactttgatggagaggactacggattttggagtcacaaaatgcgtactcacctattttctctccatccaagcatttgggagattgtggaaagtggaatgaaatttgatagctcggatagcccttcgtttattaatgaacagatccataaaaatgcacaagctactactgtgttgctagcctctttgtgcagggacgagtatcacaaggtgagcggcttggacaatgccaagcagatttgggacaccctcaagatctctcatgaggggaatgatgtcaccttactcaccaagatggagttggtggagggcgagctcggacgattcgcgatgataaggggcgaggagccgacacaaacatacaaccggctcaagatccttatcaacaaaataaggagctacggaagcacgcgatggacggatcacgacgtcgtccgcctaatgctaaggtcatttaccgttcttgatcctcacttggtgaacaatattcgtgaaaatcctaggtacatcaagatgtcgcccgaagaaattcttggaaaatttgtaagcgggcgaatgatgatcaaggaggcgaggagcaaggaggcgctacctagcaaggtggcgaaaattgaggcggccggtcttaatgatgaagagatggccctcatcatcaaaagattcaagacggcactaaagggtcgcaagggacagccaagcaagactaagaccaagggaaagcgatcatgcttcaaatgcggtaagcttggtcattttattgctaactgtcccgacaatgatagtgaccaggaacacaggagcaagagggaaaagaagaagcattacaagaaggccaagggcgaggcacacatcggaaaggagtgggattcggactgctcctcctccgactccgacaatgaagggcttgccgccaccgccttcaacaaatcaaccctcttccccaacgagcgtcacacatgccttatggcaagggagaagaagatgagtactcgagacaccacttatgtctcttctagtgatgatgagtctagtgatgaggaaatagattactctaacttgttcaagggattggatagaaataagattgataaaatcaataaattgattgatgccttgaatgagaaggatagactcttagagaaacaagaggatttattgtatgaagaacatgataaatttatagaagcacaaaaatcctatgctttagaagttaaaagaaatgaaatgctttcttttgaactatctacttgtcatgaaaccatttctactttaaaaggtgtcaacaatgatttaaatgctaaattagaagtagcaaataaatccaattcttgtgtagaacatgttgtaatttgtactaggtgtaaagattttgatattgatgcttgtagtgaacacctagtttcaatttccaagcttaatggtgaattggctagtctcaatgctcaacttaagactagcaagaatgatttcgataaactaaaatttgcaagggatgcctacacaattggtagacacccctcaattaaggatggacttggcttcaagagagaagccaagaacttaacaagccataaggctcccattcccgccaaggagaaagggaaggcccctatggctagtaatgtgcaaaagaaccatgcgtttatataccatgacaggagacaatctagaaatgcttataggaattataatgcttatgatgattttgactctcatgccatgtttgcttccagttcttcctatatgcatggtagaaatatgtctaggagaaatgctattcatcatgtgcctagaaagaatattattcatgctcctaggaaagtagtgaatgaaccttctacaatatatcatgctttgaatgcttcctttgcaatttgtagaaaggatagaaaggtttatgcatccgggggttcaagctggattattgacagcggatgcacaaaccatatgacgagggagaagaagatgttcacctcctatgtcaagaataaggattcccaagattcaatcatattcggtgatgggaatcaaggcaaggataagtctgaaactcaagggaccctcaagcgcttcctcaggagagctcaaaatgagtttgagcttaaggtgaagaagataaggagcgacaacgggtccgagttcaagaaccttcaagtggaggagtttcttgaagaggaagggatcaagcacgagttctccgctccctacacaccacagcaaaatggtgtggtagagaggaagaacaggacgctcattgacatggcgaggacgatgctaggagagttcaagacccccgagtgcttttggacggaagccgtgaacacggcttgccacgccatcaacagggtctaccttcatcgcctcctcaagaagacgtcgtatgagctactaaccggtaacaaacccaatgtatcttattttcgtgtatttgggagcaagtgctacattctagtgaagaagggtagaaattctaagtttgctcccaaagcagtagaagggtttctattaggttatgactcaaatacaaaggcgtatagagtcttcaacaaatcatcgggtttggttgaagtctctagcgacgttgtatttgatgagactaatggctctccaagagagcaagttgttgatcttgatgatgtagatgaagaagatgttccaacggccgctatgcgcaccatggctattggtgatgtgcgaccacaggaacacttggagcaagatcaaccttcttcctcaacaatggtgcatcccccaactcaagacgatgaacaggttcatcaacaggaggcgtgtgatcaagggggagcacaagatgatcatgtgatggaggaagaagcgcaaccggcacctccaacccaagttcgagcgatgattcaaagggatcatcccgtcgaccaaattctgggtgacattagcaagggagtaactactcggtctcgattagttaatttttgtgagcattactcctttatctcttctattgagcctttcagggtagaagaggccttgctagatccggactgggtgttggccatgcaagaggagctcaacaacttcaagaggaatgaagtttggacactggtgcctcgtccgaagcaaaatgttgtgggaaccaagtgggtgttccgcaacaaacaggacgagcacggggtggtgacaaggaacaaggctcgacttgtggcaaaaggttatgcccaagtcgcaggtttggactttgaggagacttttgctccggtggctaggctagagtccattcgtatcttgctagcatatgccgctcaccattctttcaggttgttccaaatggatgtgaagagcgctttcctcaacgggccaataaaggaggaggtgtacgtggagcaaccccctggcttcgaggatgaacggtaccccgaccacgtgtgtaagctctctaaggcgctctatggacttaagcaagccccaagagcatggtatgaatgccttagagatttcttaattgctaatgctttcaaggttgggaaagtcgatccaactcttttcactaagacatgtgatggtgatctgtttgtgtgccaaatttatgtcgatgacataatatttggttctactaataaaaagtcttgtgaagagtttagcagggtaatgacgcagaaattcgagatgtcaatgatgggcgagttgaactacttccttgggttccaagtgaagcaactcaaggacggcaccttcatctctcaaacgaagtacacgcaagatctgctgaagcggtttgggatgaaggacgccaagcccgcaaagactccgatgggaaccgacggacacaccgacctcaacaaaggaggtaagtccgttgatcaaaaagcataccggtcaatgatagggtctttactttacttatgtgctagtagaccggatattatgcttagcgtatgcatgtgtgctagatttcaatccgatcctaaggagtgtcacttagtggcggtgaagcgaattcttagatatttagttgctacgccttgcttcgggctctggtatccaaaggggtctacctttgacttgattggatattcagactccgattatgctggatgtaaggtcgataggaagagtacatcggggacgtgccaattcttaggaaggtccctggtgtcatggaattctaagaaacaaacctctgttgccctatccaccgctgaggccgagtatgttgccgcaggacagtgttgcgcgcaactactttggatgaggcaaaccctcagggactttggctacaatctgagcaaagtcccactcctatgcgataatgagagtgctatccgcatggcggaaaatcctgttgaacacagccgcacaaagcacatagacatccggcatcactttttgagagaccaccagcaaaagggggatatcgaagtgtttcatgttagcaccgagaaccagctagccgatatctttaccaagcctctagatgagaagaccttttgcaggctgcgtaatgagctaaatgtcttagatttgcggaacttggattga

SEQ ID NO: 4815 - DNA, 4518 bp, Zea mays
  Clone ID: TF_ZM4577.C6.o12.fg
atggatcctaaggggaagggaatcgtgatcaacgataaagagaaggagtccttcgtcaacaagcctaaggatgacaagcctatcgactcaggcttgggccacaaacacaaagatggaaagaagaagaagacaagacgcatcaaggagatcgtctactacgacgacagtgatgagtccacttcttcccataaggacaacgacgacaacgactacgacaaacgaaagacggtcaactcaaacttttcttttgattattcgcgtattcctcaaagttcaaattcacatttgctctccattcctctcggcaagcctccacactttgatggggaggactacggattttggagccacaaaatgcgtagtcacctgttctctctccatccaagcatatgggagattgttgagaatggaatgaaatttgatagctcgaatagtcctatttttattaatgaacagattcatagaaatgcacaagctactactgtgttgttagcctccttgtgcagggacgagtaccataaggtgagcggcttggacaatgccaagcaaatctgggacaccctcaggatctctcatgaggggaatgacgtcaccttgctcaccaagatggagttggtagaaggcgagctcggaagatttgcgatgataaggggcgaggagccaacccaaacatacaaccggctcaagacccttatcaacaaaataaggagctacggaagcacgcgatggacggaccacgacgtcgtccgcctaatgctaaggtcctttaccgttctcgatccacatttggtgaataatattcgtgagaatcccaggtacaccaagatgtcgcccgaagaagtccttgggaagttcgtaagcgggcgaatgatgatcaaggaggcgagatacgtggacgatacgttgaacggtccaatccatgagcctcaatccattgctctcaaggcaacgaggagcaaggaggcattacctagcaaggtggcgcaagttgaggcagcagggctcaatgatgaagagatggccctcatcatcaagcacttcaagacgacgcttaagggtcgcaagggacagccaagcaagaccaagacaaaggggaagcgctcatgcttcaaatgtggtaagcttggtcattttattgctaactgtcccgataatgatagtgaccaggaaaaaggaaacaagagggagaagaagaagaattacaagaagaccaagggcgaggcacatatcggaaaggagtgggattcggattgctcctcctccgactctgacaatgaaggactcgccgccactgctttcaacaagtcatccctcttccccaacgagcatcacacatgcctcatggcgaaggagaagaaggtatgtactcgggataccacttatgcttcttcaaatgatgatgattctagtgatgacgatgagatagactattctagtttatttaaaggtttggatagaattaaaattggcaaaattaatgagttaattgatgccttgaatgacaagaataggttactagaaaagcaagaggatttgttgtatgaagagcatgataaatttgtcagtgcacaaaattcacttgctttagaagttaaacgaaatgatatgctttcttgtgaaatatctacttgccatgagacaatttctagcttaaagagcataaatgatgatttaaatgctaagttagaaaaatctagtaaattaacatcttgtgtagaacatgttgtgatttgcactaggtgtaaagattttaatgttgatgcttgtagtgaacacctagattgcatttttaaaataaatgatgaagtagctagtcttaatgctcaacttaagactagcaagagtgaatttgacaaactaaaatttgcaagggatgcctacacaattggtagacacccctcaattaaggatggtcttggcttcaagagggaagccaagaacttgacaagccataaggcccccatctccgccaaggagaaagggaaggcccctatggctagtagtgtgcaaaagaaccatgcttttatgtaccatgataggagacaatctagaaatacttataggagttgtaatgcatatgatgcttttgattctcatgccatgtttgcttctagttcttcctatgtgcatgatagaaatgttgatgtgtctgtctttagaagatgtgatggttcactagcttttaagggtgtactagacggcaaactttatttggttgattttgcaaaagaagaagccggtctagatgcatgcttaattgctaagacttgcatgggctggctgtggcatcgccgcttagcacatgtggggatgaagaacctccacaagcttctaaagggagaacacgtgataggtctaactaatgtacacttcgaaaaagatagaccttgtgcggcttgtcaagcagggaaacaggaggaagataaatctgaaacccaagggaccctcaagcgcttcctcaggagagctcaaaatgagtttgagctcaaggtgaagaagataaggagcgacaacgggtccgaattcaagaatcttcaagtggaggagttccttgaggaggaggggatcaagcacgagttctccgctccctacacacctcaacaaaatggtgtggtagagaggaagaacaggacgctcatcgatatggcgaggactatgcttagagagttcaagacccccgagcgtttttggttggaagccgtgaacacggcttgccacgccatcaacatggtctatcttcaccgcctcctcaagaagacttcatatgagctgctaactggtaacaaacccaatgtgtcttattttcgtgtatttgggagtaagtgttatattcttgtgaagaaaggtagaacctctaaatttgctcccaaagctgtagaagggtttttattaggttatgattcaaatacaaaggcgtatagggtcttcaacaaatcatcggggttggttgaagtctctagcgacgttgtatttgatgagactaatggctctccaagagagcaagttgttgatcttgatgatgtagatgaagaagacgttccaacggccgcaatgcgcaccatggcgattggagatgtgaggccactagaacaaaaggagcaagatcaaccttcttcctcaactatggtgcatcccccaacccaagatgacaaacaggtacctcaagtggaggcgcatgatcaagggggagcacaggatgttcaagttgaagaggaagaagcacctcaggcacctccaacccaagttcgagcgacgattcaaagggatcatcccatcgaccaaatattgggtgatattagcaagggagtaactactcgttctagattagtaaatttctgtgagcattactcttttgtctcttctattgagcctttcagggtagaagaggccttgctagatccggactgggtgttggccatgcaggaggagctaaacaacttcaagcgtaatgaagtttggacactggacgagcacggtggtgacgaggaacaaggctcgacttgtggcaaaaggttatgcccaagtcgcaggttgtaccaaatggatgtgaagagcgctttcctcaacgggccgatcaaggaggaggtgtacgtggagcaaccccctggcttcgaggatgaacggtaccccaaccacgtgtgtaagctctctaaggcgctctatggacttaagcaagccccaagagcatggtatgaatgccttagagactttttaattgctaatgctttcaaggttgggaaagccgatccaactcttttcactaagacttgcgatggtgatctttttgtgtgccaaatttatgttgatgacataatatttggttctactaaccaaaagtcttgtgaagagtttagcaggcaactcaaggacggcaccttcatctcccaaacgaagtacacgcaagacttgctaaagcggtttgggatgaaggacgccaagcccgcaaagacgtcgatgggaactgacggacacaccgacctcaacaaaggagtcgctacgccttgcttcgggatctggtacccaaaggggtctaactttgacttgattggatactcagattccgactatgctagatgtaaggtcgataggaagagtacatcggggatgtgccaattcttagtaaggtccctggtgtcgtggaactctaagaaacaaacttccgttgccctatccaccgctgaggtcgagtatgttgccgcaggacagtgttgcgcgcaactactttggatgaggcaaaccctccgggactttggctacaatctgagcaaagtctcactcctatgtgacaatgagagtcctatccgaatagcggaaaatcctgttgagcacagccgcacaaagcacattgacatccggcatcactttttgagagaccaccagcaaaagggagatatcgaagtgtttcatgttagcaccgagaaccagctagccgatatcttcactaagcctttagatgaaaagaccttttgcaggctgcgtagtgagctaaatatcctagattcgcggaacttggattga

SEQ ID NO: 4816 - DNA, 1926 bp, Zea mays
  Clone ID: TF_ZM4581.C2.o1.fg
atggatcctaaggggaaaggaattgtgatcaacgacaaggagaaggagtccttcgtcaacgagccaagggatgacaagtccaacaactcgggctcgggacacaagcgaaaagatgggaagaagaagaagacaagacgcatcaaggagatcgtctactacgacagcgatgagtcctcttcttcccaaaaggacgacgacaacgactacaggaagacggttaattcgaacttctcatttgattattctcgtattccacatagttcgaattcgcatttactttccattcctcttggtaaacctccacattttgatggggaagactacggattttggagtcacaaaatgcgtagtcatttattctctctccatccaagcatatgggagattgtagagaatggaatgaaatttgatagctcggatagccctatgtttatcaatgaacaaattcataaaaatgcacaagctactactgttctcttagcatctttgtgcagggaagagtacaataaggtgagcggcttggacaatgccaagcagatatgggacaccctcaagatctctcacgaggggaacgacatcaccatgctcaccaagatggagttggtggagggcgagcttggacgattcgccatgataaggggagaagagccaactcaaacttacaaccggctcaagacccttgtcaacaagataaggagctatggaagcacgcggtggacggaccacgacgtcgtccgcctaatgctaaggtccttcactgttcttgatcctcatttggtgaataatattcgtgagaatcccaggtacaccaaaatgtcgcccgaagaaattcttggaaaatttgtaagcgggcggatgatgatcaaggaggcaaggtacgtcgatgacgcgttgaacggtccaatccacgagcctcaacccattgctctcaaggcatcaaggagcaaggaggcactaccaagcaaggtggcgcaaattgaggcggccgggcttaatgatgaagaaatggctctcatcattaagcgcttcaagacggtgctaaagggtcgcaatggacagccgagcaagactaagaccaaggggaagcgatcatgcttcaaatgcggtaagctaggtcattttattgctaactgtcctgataatgaaagtgaccaggaaaaggggaacaaaagggagaagaagaagcactacaagaaggcaaagggcgaggcacatctaggcaaggagtgggactcggattgctcctcttccgactccgacaatgaaggactcgccgccaccgccttcaacaaatcaaccctcttccccaacgagcgccacacatgccttatggcaagggagaagaaggtatgtactcgcaattctacctatgcttcttcaagtgaggacgaatctagtgatgaggatgaagtagattattcatgtttgttcaagggcttagatagatctaagatagacaaaattaatgaattaattgatgccttgaatgaaaagaatatacttttagaaaagcaagaggatttgttgtatgaagagcatgataaatttgttgaggcacaaaaatcctatgctttagaagttaaaagaaatgaaatgctttcttttgaactatctacttgtcatgaaaccatttctactttgaaaggtgtcaacaatgatttaaatgctaaattagaagtagcaaataaatccaattcttgtgtagaacatgttgaaatttgtactaggtgtaaagattttgacattaatgcttgtagtgaacacctagtttcaatttccaagcttaatgatgaactggctagtcttaatgctcaacttaagactagcaagaatgatttcgataagctaaaatttgcaagggatgcctacacaattggtagacacccctcaattaaggagtggacttggcttcaagagagaagctaa

SEQ ID NO: 4817 - DNA, 4854 bp, Zea mays
  Clone ID: TF_ZM4588.C1.o9.fg
atggatcctaagggaaaggggatggtggtcaacaacaacgagaaggagtctatcttcaacgagtcgaaggatgacaagcctaccgactcgggctcaggccacaagcgcaaagacaggaagaagaagaagacgaggcgcatcaaggagatcgtcgactacgacagcgacgaatcttcctcttcccaaaaggatgacgacgactacgagaaaaagaaaacggtcaattcgaacttttcttttgattactctcgtattcctcaaagtacaaatgctcatttagtatctattccacttggtaaacctcctcattttgatggagaggactacggattttggagtcacaaaatgcgtagtcacttgttctctctccatcctagtatatgggagattgtagagagtggaatgcactttgatagtacggatagtcccatgtttattaatgagcaaattcataaaaatgcacaagctactactgttcttctagcttcattgtgcagggatgaataccacaaagtgagcggcttggataacgccaagcaaatttgggacaccctcaagatctctcatgaggggaatgatgtcacaatgctcaccaagatggagttggtggaaggcgaactcgggagattcgctacgataaggggagaagagccaactcaaacgtacaaccggctaaagacccttgtcaacaagataagaagctatggaagcacgcgatggacagaccacgacgtcgtccgcctaatgctaaggtattttactgtccttgatcctcatcttgtaaacaacattcgtgagaatcctaggtacaccaagatgacgcccgaggagatacttggaaaattcgtgagcgggcgaatgatgatcaaggaagcaagatacgtggacgacacattgaatggtccaatcaatgagcctcaacctcttgctctcaaggcaacaagaagcaaggatacgctacctagcaaggtggcacaaatagaggcggccggacttaatgatgaagagatggctctcatcatcaaaagattcaagacggcgctaaaaggtcgcaaggggcagccaagcaagaccaagacaaaggggaagcgctcatgcttcaaatgtggtaaacttggtcattttattgctaactgtcccgacaatgatagtgatcaggatcaagggaacaagagggagaagaagaagaattataagaaggcaaagggcgaggcacatcttggaaaggagtgggattcggattgctcctcttccgactccgacaatgaaggactcgccgccaccgccttcaacaagtcatccctcttccccaacgagcgtcacacatgccttatggcaagggagaagaaggtatgtactcgaaacactacttatgcttcttcaagtgaggacgaatctagtgatgaggatgaaatagattattcatgtttatttaagggcctagatagaaccaaggtagataaaattaatgaactgattgatgccttgaatgataagaataggcttttagaaaagcaagaggatatgttgtatgaagaacatgacaaatttgtagaagcacaaaaatctcatgctctagaagttaaaagaaatgaaatgctttcttgtgaattatcttcttgccatgagacaatttctaacttaaggagcattaatgatgatttgaatgctaagttagaaatagctagtaaatcaacatcttgtgtagaaaatgatgttatttgcaataggtgtaaagattttgacattgatgcttgtagtgaacacatagcctctattgcaaaattaaatgatgaaattgctagtcttaatgcccaacttaagactagcaaaagtaaatttgacaaattaaaatttgcaagggatgcctacacaattggtagacacccctcaattaaggatggtcttggcttcaagagggaagtcaagaacttaacaagccataaggcttccatctccacaaaggagaaagggaaggcccctatggcgagtaatgcaaaaaagaaccatgccttcatgtaccatgatagaaaattttctagaaatgttcatgatgataggagttgtaatgcttataatgcttttgactctcatgccatgtttgcttctagttcttcctatatgcatggtagaaatgtgtttagaagaaatgttgttcatcatatgcctaggagaaatgttggtagtactcctaggaaagttaatgaaccttctacaatttatcatgcctgtgatgcttcatttgcaatttgtagaaaggatagaaaggtttatgcatccgggggttcaagctggattatcgacagcggatgcacaaaccacatgacgggggagaagaagatgttcacctcctacgtcaagaacaaggacacccaagattcaataatattcggtgatgggaaccaaggcaagttgagtcccttggatataatttactatctaagaagtgatggttcactagcttttaagggtgtattagacggcaaactttacttagttgattttgcaaaagaggaggccggtctagatgcatgcttaatagctaagactagcatgggctggatgtggcatcgccgcttagcacatgtggggatgaagaaccttcacaagcttttaaagggagaacatgtgataggtttaactaacgtgcaattcgaaaaagatagaccttgtgcagcatgtcaagcaggtaaacaggtgggaggagcacatcacagcaagaatgtgatgaccacatcaaggcccctggagctgctacatatggacctcttcggacccgtcgcttatctaagcatagggggaagtaagtatggtttagttattgtggatgacttttcccgcttcacttgggtattctttttgcaggataagtctgagacccaaggaaccctcaagcgcttcctaaggagagctcaaaacgagtttgagctcaaggtgaagaagataaggagcgacaacgggtcagagttcaagaaccttcaagtggaggagttctttgaggaggaagggatcaagcacgagttctccactccctacacaccacagcaaaatggtgtggtagagaggaagaacaggacgctaatcgatatggcgaggatgatgcttgaagaattcaagacccccgagcgtttttggtcggaagctgtgaacacggcttgccacgccatcaacagggtctaccttcaccgcctcctcaagaagacgtcatatgagcttctaaccggtaacaaacccaatgtatcttactttcgtgtatttgggagcaaatgttacattctagtgaagaagggtagaaattctaagtttgctccaaaagctgtagaagggtttttgttaggttatgattcaaatacaaaggcgtatagggtcttcaacaaatcatcgggtttggttgaagtctctagcgacgttgtatttgatgagactaatggctctccaagagagcaagttgttgatcttgatgatgtagatgaagaagatgttccgacggccgctatacgaaccatggcgattggtgaagtacgaccacaggaacaaaaggagcaagatcaaccttcttcctcaactatggtgcatcccccaactcaagacgatgaacagattcatcaacaggaggcgtgtgatcaagggggagcacaagatgatcatgtgatggaggaagaagcgcaaccggcacctccaacccaagttcgagcgatgattcaaagggatcatcccgtcgagcaaattttgggtgatattagcaagggagtaactactcgatctcgattagttaatttttgtgagcattactcctttgtctcttctattgagcctttcagggtagaagaggccttgctagatccggactgggtgttggccatgcaagaggagctcaacaacttcaagaggaatgaagtttggacgctggtgcctcgtcctaagcaaaatgttgtgggaaccaagttgttccaaatggatgtgaagagcgctttcctcaacgggccaatcaaggaggaggtgtacgtggagcaaccccctggcttcgaggatgaacggtaccccgaccacgtgtgtaagctctctaaggcgctctatggacttaagcaagccccaagagcatggtatgaatgccttagagatttcttaattgctaatgccttcaaggttgggaaagccgatccaactcttttcactaagacttgtgacggtgatctgtttgtgtgccaaatttatgtcgatgacataatatttggttctactaataaaaagtcgtgtgaagagtttagcagggtgatgacgcagaaattcgagatgtcaatgatgggcgagttgaactacttccttgggttccaagtgaagcaactcaaggacggcaccttcatctctcaaacaaagtacacgcaagtcttgctgaagcggtttgggatgaaggatgccaagcccgcaaagactccgatggggaccgacggacacaccgatctcaacaaaggaggtaagtccgttgatcaaaaagcataccggtctatgatagggtcgttactttatttatgtgctagtagaccggatattgtgcttagcgtatgcatgtgtgctagatttcaatctgatcctaaggagtgtcacttagtggcagtgaagcgaatccttagatatttagttgctacgccttgcttcgggctctggtatccaaatgggtctacctttgatctaattggatattcagattccgactatgctggatgtaaggtcgataggaagagtacatcggggacgtgccaattcttaggaaggtccctggtgtcatggaattctaagaaacaaacctctgttgccctattcaccgctgaggccgagtacgttgccgcaggatag

SEQ ID NO: 4818 - DNA, 5157 bp, Zea mays
  Clone ID: TF_ZM4592.C3.o1.fg
atggatcctaagggaaaggggatggtggtcgacaacaacgagaaggagtctatcttcaacgagccgaagaatgacaagtctaccgactcgggctcaagccacaagcgcaaagatgggaagaagaagaagacaaggcgcatcaaggagatcgtctactacgacagcgacgaatcctcttcttcccaaagggacgacgacaacgactacaggaagacggtcaattcaaacttttcatttgattattctcgtattccgcatagttcgaattcgcatttgctttccattcctcttggcaaacctccacaccttgatggggaggactacggattttggagtcataaaatgcgtagtcatttattctctctccatccaagcatatgggagattgtagaaaatggaatgaaatttgatagctcggatagccctatgtttattaatgaacagattcataaaaatgcacaagctactactgtgttgctagcctctttgtgcagggacgagtacaataaggtgagcggcttggacaatgccaagcaaatatgggacaccctcaagatttctcacgaggggaacgacatcaccatgctcactaaaatggagttggtggagggcgaacttggaaggtttgcgatgataaggggcgaggagccaacccaaacatacaaccgtctcaagacccttatcaacaaaataaggagctatggaagcacgcgatggacggaccatgacgtcgtccgactattactaaggtcctttaccattcttgatcctcatttggtgaataacattcgtgagaatcccaggtacaccaaaatgtcgcccgaagaagtcctaggaaaattcgtcagcgggcgaatgatgattaaggaagcaaggtacgtggacgacgccttgaatggaccgatcaacgagccgcaacctcttgctctcaaagcaacaagaagcaaggaggcgctaccgagcaaggtggcacaaattgaagcggccggacttaatgatgaagagatggccctcatcatcaaaagattcaagacggcgcttaagggtcgcaagggacagccaagcaagaccgaagccaaggggaagcgctcatgcttcaaatgcggtaagcttggtcattttattgctaactgtcccgacaatgatagtgaccaggaccaagggaacaaaagggagaagaagaagcattacaagaaggccaagggcgaggcacatatcggaaaggagtgggattcggattgctcctcctccgactccgacaatgaaggacttgccgccaccgccttcaacaaatcaaccctcttccccaacgagcgtcacacatgccttatggcaagggagaagaaggtatgtactcgaaactctacctatgcttcttcaagtgaggacgaatctagcgatgaggatgaagtagattactcatgtctgtttaagggcctagatagaaccaaggtagacaaaattaatgaattaattgatgccttgaatgataagaatatgcttttagaaaagcaagaggattttttgtatgaagaacatgataaatttgtagaagctcaaagatctcatgctctagaagttaaaagaaatgaaatgctttcttgtgaattatcttcgtgccatgagacaatttctaaattaaggagcattaatgatgatttgaatgctaagttggagattgctagtaaatctacctcttgtgtagaaaatgttgtaacgtgcactaggtgtaaagatattaacattgatgcttatagtgaacacctagcttgcatttctaaattaaatgaagaggtagctagtcttaatgcccaacttgagactagcaaaagtgattttgataagctaaaatttgcaagggatgcctacacaattggtagacacccctcaattaaggatggacttggcttcaagagagaagccaagaacttaacaagccataaggctcccattcccgccaaggagaaagggaaggcccctatggctagtagtgtgcaaaagaaccatgcgtttatgtaccatgataagagacaaactagaaatgcttataggagttacaatacttatgatgattttgattctcatgacatgtttgcttctagttctttctatgtgcataatagaaatgttggtaggagaaatgctgttcacaatatgcctaggagaaatgttgttaatgttcctaggagagttaatgaaccttctacaatatatcatgccttgaatgcttcctttgctatttgtagaaaggataggaaaatagttgctaggaagttaggggcaagatgcaagggagacaaaacttgcatttgggtccctaaggatatttgcactaaccttgtaggacccaacatgagttgggtttatgcatccgggggttcaagctggattatcgacagcggatgcacaaaccatatgacgggggagaagaagatgttcacctcctacgtcaagaataaggattcccaagattcaatcatattcggtgatgggaatcaaggcaaggtaaaagggttagatgtgtctgtctttagaagaagtgatggttcactagcttttaagggtgtattagacggcaaactttatttagttgactttgcaaaagaagaagccggtctagatgcatgcttaatagctaagactagcatgggctggctgtggcatcgccgcttagcacatgtggggatgaagaaccttcacaagcttctaaagggagaacacgtgataggtttgactaacgtgcaatttgaaaaagatagaccttgtgcagcttgtcaagcaggtaaacaagtgggaggagcacatcacagcaagaatgtgatgaccacttcaagacctctggagctgctacatatggacctcttcggacctgtcgcctatctgagcataggaggaagtaagtatggtctagttattgttgatgacttttcccgcttcacttgggtgttctttttgcaggataagtctgaaacccaagggaccctcaagcgcttcctcaggagagctcaaaatgagtttgagctcaaggtgaagaagataaggagcgacaacgggtccgagttcaagaatcttcaagtggaggagttccttgaggaggaagggatcaagcacgagttctccgctccctacacaccacagcaaaatggtgtggtagagaggaagaacaggacgctaattgatatggcgaggacgatgctaggagaattcaagacccccgagtgcttttggtcggaagccgtgaacacggcttgccacgccatcaacagggtctaccttcaccgcctcctcaagaagacgtcgtatgagctactaaccggtaacaagcccaatgtatcttactttcgtgtatttgggagcaagtgctacattctagtgaagaagggtagaaattctaagtttgctcccaaagctgtagaggggtttttattaggttatgactcaaatacaaaggcgtatagggtcttcaacaaatcatcgggtttggttgaagtctctagcgacgttatgaagaagatgttccgacggccgctatttgaaccatggcgattggagaagttcggccacaggaacaagatgaacgagatcaaccttcttcttcaactatggtgcatcccccaactcaagacgatgaacagggtagaagaggccttgctagatccggactgggtgttggccatgcaagaggagctcaacaacttcaaaaggaatgaagtttggacgctggtgcctcgtcccaagcagaatgttgtgggaaccaagtgggtgttccgcaacaaacaagacgagcacggagtggtgacgaggaacaaggctcgacttgtggcaaaaggttatgcccaagtcgcaggtttggactttgaggagacgtttgctcctgtggctaggctagagtccattcgtatcttgctagcatatgccgctcaccattctttcaggttgttccaaatggatatgaagagcgctttcctcaacgggccaatcaaggaggaggtgtacgtggagcaaccccctggcttcgaggatgaacggtaccccgaccacgtgtgtaagctctctaaggcgctctatggacttaagcaagccccaagagcatggtatgaatgccttagagatttcttaattgctaatgctttcaaggttgggaaagccgatccaactcttttcactaagacatgtgatggtgatttgtttgtatgccaaatttatgtcgatgacataatatttggttctactaataaaaagtcttgtgaagagtttagcagggtgatgacgcagaaattcgagatgtcgatgatgggcgagttgaactacttccttgggttccaagtgaagcaactcaaggacggcaccttcatctctcaaacgaagtacacgcaagatctgctgaagcggtttgggatgaaggacgccaagcccgcaaagactccgatgggaaccgacggacacaccgacctcaacaaaggaggtaagtccgttgatcaaaaagcataccggtcaatgatagggtcattactttacttatgtgctagtagaccagatattatgcttagcgtatgcatgtgtgctagatttcaatccgatcctaaggagtgtcacttagtggcggtgaagcgaatccttagatatttagttgctacgccttgcttcgggctctggtatccaaaggggtctacctttgacttgattggatattcagactccgactatgctggttgtaaggtcgataggaagagtacatcggggacgtgccaattcttaggaaggtccctggtgtcatggaactctaagaaacaaacttccgttgccctatccaccgctgaggccgagtatgttgccgcaggacagtgttgcgcgcaactactttggatgaggcaaaccctcagggactttggctacaatatgagcaaagtcccactcctatgtgataatgagagtgctatccgcatggcggaaaatcctgttgagcacagccgcacaaagcacatagacatccggcatcactttttgagagaccaccagcaaaagggagatatcgaagtgtttcatgttagcaccgagaaccagctagccgatatctttaccaagcctctagatgagaagaccttttgcaggctgcgtagtgagctaaatgtcttagattcgcggaacttggattga

SEQ ID NO: 4819 - DNA, 1762 bp, Zea mays
  Clone ID: TF_ZM4596.C2.o12.fg
atggatcctaaaggcaaggggatggtgatcaacgacaaggagaaggagtccttcgtcaacgagccaaatgatgacaagcccaccgactcaggctcgggccacaaaagaaaagacgggaggaagaagaagacaaggcgcatcaaggaaattgtctactacgacagcgacgaatcttcctcctcccaaaaggacaacgacgactacgatagacgaaagacggttaactcaaacttttctttcgattattcgcgcatcccgcatagttcaaatgctcaattgctccccattccacttggcaagccccctcactttgatggagaggattacggattttggagccacaaaatgcgtactcacctgttttctctccatccaagcatttgggagattgtggaaagtggaatgaaatttgatagctcagatagccctgtgtttattaatgaacagattcataaaaatgcacaagctactactgtgttgctagcttccttgtgcagggacgagtatcacaaggtgagcggcttggacaatgccaagcagatctgggacaccctcaagatctctcatgagggaaacgacgtcaccttgctcaccaaaatggagttggtggagggcgagcttggacggttcgcgatgataaggggcgaggagccgacacaaacatacaaccggctcaagacccttatcaacaaaataaggagctacgggagcacgcgatggacggaccacgacgtcgtccgcctaatgctaaggtcatttaccgttcttgatcctcatttggtgaacaatattcgtgaaaatcccaggtacaccaagatgtcgcccgaagaagttcttgggaaattcgttagcgggcgaatgatgatcaaggaggcgaggtacgtggacgacgccttgaatggtccgatcaacgagccgcaaccccttgctctcaaggcaacacgaagcaaggaggcgctacctagcaaggtggcacagtttgaggcggccggacttaatgatgaagagatggctctcatcatcaaaagattcaagacggtgcttaaaggtcgcaagggacaaccaagcaagaccaaagccaaggggaagcgctcatgcttcaaatgcggtaagcttggtcattttattgctaactgtcccgacaatgatagtgatcaggatcaagggaacaagagggagaaaaagaagaactataagaaggcaaagggcgaggctcatcttggcaaggagtgggattcggactgctcttcgtccgactccgacaatgaaggactcgccgccaccgccttcaacaagtcatccctcttccccaacgagcgtcacacttgcctcatggcaagggagaagaaagtaagcactcataacactagtacttatgcttcttcgagtgaggatgagtctagtgatgatgatgagatagattactcatgcttattcaagggattagatagaaccaaggtagacaaaattaatgaattaattgatgccttgaatgataggaatatactcttagaaaagcaagaggatttgttgtatgaagagcatgataaatttgtagaagctcagaaatctcttgctctagaaattaaaaggaatgaaatgctctccagtgaattatcttcttgtcatgaaactattgctaagttaaaaggttttaatgatgatttaaatgctaaactagaagtagcctgtaaatctaattcttgtgtagagattgttgaaacttgcaataggtgtaaagattttgacattgatgcttgta

SEQ ID NO: 4820 - DNA, 1332 bp, Zea mays
  Clone ID: TF_ZM4611.C3.o9.fg
atggatcccaagggcaaggggatcgtgatcaacgacaaggagaaggagtccttcgtcaacgagccgaaggatgacaagactactgactcgggctcaggccacaagcgcaaagacgggaagaaaaagaagacaaggcgcatcaaggagatcgtctactacgacgatagcgatgagtctacctcttcccaaaaggacgacgacaacgactacaggaagacggcaacaaggagcaaggaggcgctaccaagcaaggtggcgcaagttgaggcggccgggctaaataatgaggagatggccctcatcattaagcgcttcaagacggcgcttaaaggtcgcaagggacagccaagcaagaccaagacaaaggagaagcgctcatgcttcaaatgcggtaagcttggtcattttattgctaactgtcccgataatgaaagtgaccaggaacaagggagcaagagggagaagaagaaggcatacaagaaggcaaagggcgaggcacatctaggcaaggagtgggattcggattgctcctcctccgactccgacaatgaaggactcgccgccactgccttcaacaagtcatccctcttccccaacgagcatcacacatgccttatggcaagggagaagaaggtttatgcatccgggggttcaagctggattatcgacagcggatgcacaaaccatatgacgggggagaagaagatgttcacctcctacgtcaagaataaggattcccaagattcaataattttcggtgatgggaatcaaggcaaggataagtctgaaacccaagggaccctcaagcgcttcctcaggagagctcaaaatgagtttgagctcaaggtgaagaagataaggagcgacaacgggtccgagttcaagaaccttcaagtagaggagttccttgaggaggaagggatcaagcatgagttctccgctccctacacaccacagcaaaatggtgtggtagagaggaagaacaggacgctaatcgacatggcgaggactatgcttggagagttcaagacccccgagcgtttttggtcggaagccgtgaacacggcttgccacgccatcaacagggtctaccttcaccgcctcctcaagaagacgtcatatgagcttctaaccggtaacaaacccaatatgaagaagatgttccgacggcagccatacgaaccatggcgattggggaagtacggccacaggaacaagatgaacgagatcaaccatcttcctcaactacggtgctacccccaactcaagacgatgaacaggttcatcaacaggaggcggatgatcaaggggaagcacaagatgatcatgtga

SEQ ID NO: 4821 - DNA, 1575 bp, Zea mays
  Clone ID: TF_ZM4621.C2.o3.fg
atggatcctaagagaaaggggatggtggtcaacaacgagaaggagtctatcttcaatgagccgaaggatgacaagcctaccgactcgggctcaggccacaagcgcaaagacgggaagaagaagaagacaaggcgcatcaaggagatcgtctactacgacagcgacgaatcttcctcttcccaaaaggacgacgatgactacgagaaaaagaaaacggtcaattcgaacttttcttttgattactctcgtattcctcaaagtacaaatgctcatttattatctattccacttggtaaacctcctcactttgatggagaggactacggattttggagtcacaaaatgcgtagtcacttgttctctctccatcctagtatatgggagattgtagagagtggaatgcactttgatagtacggatagtcccatgttcattaatgagcaaattcataaaaatgcacaagctactactgttcttctagcttcattgtgcagggatgaataccacaaagtgagcggcttggataacgccaagcaaatctgggacaccctcaagatctctcatgaggggaatgacgtcacaatgctcaccaagatggagttggtggagggcgaactcgggagattcgctatgataaggggagaagagccaacccaaacgtataaccggctcaagacccttgtcaacaagataagaagctatggaagcacgcgatggacggaccacgacgtcgtccacctaatgctaaggtcttttactgtccttgatcctcatcttgtaaacaatattcgtgagaatcctaggtacaccaagatgacgcccgaggagatacttggaaagttcgtgagcgggcgaatgatgatcaaggaagcaagatacgtggacgacgcattgaatggtccaatcaatgagcctcaacctcttgctctcaaggcaacaagaagcaaggagacgctacctagcaaggtggcacaaattgaggcggccagacttaatgatgaagagatggctctcatcatcaagagattcaagacggtgctaaaaggttgcaaggggcagccaagcaagaccaagacaaaggggaagcgctcatgcttcaaatgtggtaagcttggtcattttattgctaactgtcccgataatgatagtgatcaggatcaagggaacaagagggagaagaagaagaactataagaaggcaaagggcgaggcgcatctaggcaaggagtgggattcggactgctcctcttccgactccgacaatgaaggactcgccgccaccgccttcaacaagtcatccctcttccccaacgagcgtcacacatgccttatggcaagggagaagaaggtatgtactcaaaactctacttatgcttcttcaagtgaggacaaaacgagtgatgaggatgaaatagattattcatgtttatttaagggcctagataaaaccaaggtagataaaattaatgaattgattgatgccttgaatgataagaataggcttttagaaaagcaagaggatttgttgtatgaagaacatgacaaatttgtagaagcacaaaatatcatgctctag

SEQ ID NO: 4822 - DNA, 2013 bp, Zea mays
  Clone ID: TF_ZM4626.C4.o4.fg
atggatcctaaggggaagggaattgtgatcaacgacaaggagaaggagtccttcgtcaacgagccaagggatgacaagtccaatgactcgggctcgggccacaagcgaaaagatgggaagaagaagaagacaagacgcatcaaggagatcgtctactacgacagcgatgagtcctcttcttcccaaaaggacgacgaccacgactataaaaagacgatatgggacaccctcaagatctctcacgaggggaacgacatcaccatgctcaccaagatggagttggtggagggcgagcttggacgattcgccatgataaggggagaggagccaactcaaacctacaaccggctcaagacccttatcaacaaaataaggagctacggaagcacgcgttggacggatcacgacgtcgtccgcctaatgctcaggtcctttaccgttcttgatcctcatctcgtgaacaatattcgtgagaatcccaggtacacgatgatgacgcccgaggaagtgcttggaaaattcgtgagcgggcggatgatgatcaaggaggcaagatacgttgacgacgcattgaacggtccactccacgagcctcaacccattgctctaaaggcaacgaggagcaaggagtcgcttcctagcaaggtggcgcaaattgaggcggccggtcttaatgaagaagaaatggccctcattatcaagagattcaagacggtgctaaagggtcgcaatggacagccgagcaagactaagaccaaggggaagcgatcatgcttcaaatgcggtaagcttggtcattttattgctaactgtcccgataatgatagtgaccaggaaaagggaaacaagagggaaaagaagaagcattacaagaaggcaaagggcgaggcgcatctaggcaaggagtgggactcggattgctcctcgtccgactccgacaatgaaggactcgccgccaccgccttcaacaaatcggctctcttccccaacgagcatcacacttgcctcatggcaagggaaaagaaggtttatgcatccgggggttcaagctggattatcgacaacggatgcacaaaccatatgacgggggagaagaaaatgttcacctcctacgtcaagaataaagattcccaagattcaatcatattcggtgatgggaatcaaggcaaggaaaagtccgaaacccaagggactctcaaacgcttcctcaggagagctcaaaatgagtttgagctcaaagtgaagaagataaggagcgacaacggatccgagttcaagaaccttcaagtggaggagttccttgaagaagaggggatcaagcacgagttctccgctccctacacaccacaacaaaatggtgtggtagagaggaagaacaggacgctcatcgatatggcaaggacgatgctaggagagttcaagacccccgaatgcttttggacggaagccgttaacactgcttgccacgccatcaacagggtctaccttcatcgcctcctcaagaagacgtcgtatgagctactaaccggtaacaaacccaatatgaagaagatgttccgacggccgctatacgaaccatggcgattggtgatgtgcgaccacaggaacaagaagagcaagatcaaccttcttcctcaactatggtgcatcccccaaccgaagatgacgaacaggttgttccaaatggatgtgaagagcgctttcctcaacgggccaatcaaggaggaggtgtacgtggagcaaccccctggcttcgaggatgaacggtaccccgaccattcttgtgaagagtttagcagggtgatgacgcagaaattcgagatgtcgatgatgggcgagttgaactacttccttgggttccaagtgaagcaactcaaggacggcaccttcatctcccaaacgaagtacacgcaagatctgctaaagcagtttgggatgaaggacgccaagcccgcaaagactccgatggggaccgacggacacaccgacctcaacaaaggagattttttgtga

SEQ ID NO: 4823 - DNA, 4542 bp, Zea mays
  Clone ID: TF_ZM4635.C5.o3.fg
atggatcctaaggggaagggtatagtgatcaacgacaaagaaaaggaatcctttgtcaacgagccgaaggacgataagcctaccgactccggctcgggccaaagacggaaggaagggaagaagaagaagaccaggcgcatcaaggagatcgtctactacgacagcgacgagtctacttcttcccaaaaggacgaggaccacaacgactacgagaaaagaaaaccggttaattctaacttttcttttgactactctcgtattccgcaaagttcacattctcatttgctctccattccactcggcaagcccccacactttgatggagaggactacggattttggagccacaaaatgcgtagtcacctattctctctccatccaagcatatgggagattgtagagaatggaatgaactttgatagctcagatagccctatgtttatcaatgaacaaattcataaaaatgcacaagctactactgttctcttagcatctttgtgcagggaagaatacaataaggtgagcggcttggacaatgccaagcagatatgggacaccctcaagatctctcacgaggggaacgacatcaccatgctcaccaagatggagttggtggagggcgagcttggacggttcgcgatgataaggggcgaggagccaactcagacatacaaccggctcaagacccttatcaacaaaataaggagctacggaagcacgcgatggacggaccacgacgtcgtccgactaatgctcaggtcctttaccgttcttgatcctcatttggtgaataatattcgtgagaatcccaggtacaccaaaatgtcgcccgaagaagtcctaggaaaattcgtcagcgggcgaatgatgatcaaggaggcaaggtatgtggacgacgccttgaatggaccgatcaacgagccgcaaccttttgctctcaaagccacagggaacaaggaggcgctacccagcaaggtggcgcaaattgaggcggccggtcttaatgaagaagaaatggccctcattatcaagagattcaagacggtgctaaagggtcgcaatggacagccgagcaagactaagaccaaggggaagcgatcatgcttcaaatgcggtaagcttggtcattttattgctaactgtcctgataatgatagtgaccaggaaaaggggaacaagagggaaaagaagaagcattacaagaaggcaaagggcgaggcgcatctaggcaaggagtgggactcggactgctcctcgtccgactccgacaatgaaggactcgccgccaccgccttcaacaaatcaaccctcttccccaacgagcgtcacacatgccttatggcaagagagaagaaggtatgtactcgcaactctacctatgcttcttcaagtgaggacgaatctagtgatgaggatgaagtagattattcatgtttgttcaagggcttagatagatctaagatagacaaaattaatgaattaattgatgccttgaatgaaaagaatatacttttagaaaagcaagaggatttgttgtatgaagagcatgataaatttgttgaggcacaaaaatcctatgctttagaagttaagagaaatgaaatgctttcttttgaactatctacttgtcatgaaaccatttctactttgaaaggtgtcaacaatgatttaaatgctaaattagaagtagcaaacaaatccaattcttgtgtagaacatgttgaaatttgtactaggtgtaaagactttgacattaatgcttgtagtgaacacctagtttcaatttccaagcttaatgatgaactggctagtcttaatgctcaacttaagactagcaagaatgatttcgataagctaaaatttgcaagggatgcctacacaattggtagacacccctcaattaaggatggacttggcttcaagagagaagctaagaacttaacaagccataaggcttccattcccgccaaggagaaagggaaggcccctatggctactagtgctaaaaggaaccatgcatttttgtatcatgatagaaaacaaactagaaatgtttatgcatccgggggttcaagctggattattgatagcggatgcacaaaccatatgacgggggagaagaagatgttcacctcctacgtcaagaataaggattcccaagattcaatcatattcggtgatgggaatcaaggcaaggtaaaagggctagatgtgtctgtctttagaagaagtgatggttcactagcttttaagggtgtattagacggcaaactttatttagttgattttgcaaaagaagaggccggtctagatgcatgcttaatggctaagacttgcatgggctggctgtggcatcgccgcttagcacatgtggggatgaagaacctccacaagcttctaaagggagaacatgtgataggtctaaccaatgttcatttcgaaaaagatagaccttgtgcagcttgtcaagcagggaaacaggtgggaggagcgcatcacagcaagaatgtgatgaccacttcaagacccctggagctgctgcatatggatctcttcggacccgtcgcctatctaagcatagggggaagtaagtatggtctagttattgttgatgacttttcccgcttcacttgggtgttctttttgcaggataagtctgaaacccaagggaccctcaagcgcttcctcaggagggctcaaaatgagtttgagctcaaagtgaaaaagataaggagcgacaacgggtccgagttcaagaaccttcaagtggaggagttccttgaagaagaagggatcaagcacgagttctccgctccctacacaccacagcaaaatggtgtggtagagaggaagaacaggacgctcatcgacatggcgaggacgatgctaggagagttcaagacccccgagtgcttttggacggaagccgtgaacacggcttgccacgccatcaacagggtctaccttcatcgcctcctcaagaagacgtcatatgagctactaaccgatgaagaagatgttccgacggccgctatacgaaccatggcgattggtgatgtgcgaccacaggaacaagaagagcaagatcaaccttcttcctcaactatggtgaatcccccaactcaagacgatgaacatgttcatcaacaggaggcgtgtgatcaagggggagcacaagatgatcatgtgatggaggaagaagcgcaaccggcacctccaacccaagttcgagcgatgattcaaagggatcatcccgtcgaccaaattctgggtgacattagcaagggagtaactactcgatctcgattagttaatttttgtgagcattactcctttgtctcttctattgagcctttcagggtagaagaggccttgctagatccggactgggtgttggccatgcaagaggagctaaacaacttcaagcgcaatgaagtttggacactggtgcctcgtccgaagcaaaacgtcgtgggaaccaagtgggtgttccgcaacaaacaggacgagcacggggtggtgacaaggaacaaagctcgacttgtggcaaaaggttatgcccaagtcgcaggtttggactttgaggagacttttgctcctgtggctaggctagaatcaattcgtatcttgctagcatatgctgctcaccattctttcaggttgttccaaatggatgtgaagagcgctttcctcaacgggccaatcaaggaggaggtgtacgtagagcaaccccctggcttcgaggatgaacggtaccccgaccatgtgtgtaagctctctaaggcgctctatggacttaagcaagccccaagagcatggtatgaatgccttagagactttttaattgctaatgctttcaaggttgggaaagccgatccaactctttttacaaagacatgtgatggtgatttgtttgtgtgccaaatttatgtcgatgacataatatttggttctactaaccaaaagtcttgtgaagagtttagcagggtgatgacgcagaaattcgagatgtcgatgatgggcgagttgaactacttccttgggttccaagggtctacctttgacttagttggatactcagactccgactatgctggatgtaaggtcgataggaagagtacatcggggacgtgccaattcttaggaaggtccctggtgtcatggaactctaagaaacaaacttccgttgccctatccaccgctgaggccgagtatgttgccgcaggacagtgttgcgcgcaactactttggatgaggcaaaccctcagggactttggctacaatctgagcaaagtcccactcctatgtgacaatgagagtgctatccgcatggcggagaatcctgttgagcacagccgcacaaagcacatagacatccggcatcactttttgagagaccaccagcaaaagggagatatcgaagtgtttcatgttagcaccgagaaccagctagccgatatcttcactaagcctctagatgagaagaccttttgcaggttgcgtagtgagctaaatgtcttagattcgcggaacctggattga

SEQ ID NO: 4824 - DNA, 4647 bp, Zea mays
  Clone ID: TF_ZM4646.C9.o8.fg
atggatcctaaagggaagggaatcgtgatcaacgacaaggagaaggaatccttcgtcaacgagccaagggatgacaagtccaacgactcgggctcgggccacagacgcaaagatgggaagaagaagaagacaagacacatcaaggagatcgtctactacgacagcgatgagtctacttcctcccaaaaggacgacgaccacaacgaatatgagagaaagaaaccggtcaattcgaacttttcttttgattactctcgtattcctcaaagtactaatgctcatttattatctattccaattggtaaacctcctcattttgatggagaggactacggattttggagtcacaaaatgcgtagtcacttgttctctctccatcctagcatatgggagattgtagaaagtggaatgcactttgatagtacggatagtcccatgtttattaatgaacagattcataaaaatgcacaagctactactgtgttgctagcctctttgtgcagggacgagtaccataaggtgagcggcttggacaatgccaagcagatctgggacaccctcaagatctctcatgagggaaacgatgtcaccttgctcaccaaaatggagttggtggaaggcgaacttggacggttcgcgatgataaggggggaggagccgacgcaaacatacaaccggctcaagacccttatcaacaaaataaggagctacgggagcacgcgatggacggaccacgacgtcgtccgcctaatgctaaggtcatttaccgttcttgatcctcatttggtgaacaatatacgtgaaaatcccaggtacaccaagatgtcgcccgaagaagttcttgggaaattcgttagtgggcgaatgatgatcaaggaggcaaggtacgtggacgacgccttgaatggtccgatcaacgagccgcaaccccttgctctcaaggcaacacgaagcaaggaggctctacctagcaaggtggcacagattgaggcggccggacttaatgatgaagagatggctctcatcatcaaaagattcaagacggtgcttaaaggtcgcaagggacagccaagcaagactaaagccaaggggaagcgctcatgcttcaaatgcggtaagcttggtcattttattgctaactgtcccgacaatgatagtgatcaggatcaagggaacaagagggagaaaaagaagaactataagaaggcaaagggcgaggctcatcttggcaaggagtgggattcggactactcttcgtctgactccgacaatgaaggactcgccgccactgccttcaacaagtcatccctcttccccaacgagcgacacacttgcctcatggcaagggagaagaaagtaagcactcataatactagtacttatgcttcttcaagtgaggatgagtccagtgatgatgatgagatagattactcatgcttattcaagggattagatagaaccaaggtagacaaaattaatgaattgattgatgccttgaatgataggaatatacttttagaaaagcaagaggatttgttgtatgaagaacatgataaatttgtagaagctcagaaatctcttgctctagaaattaagagaaatgaaatgctctctagtgaactatcttcttgtcatgaaactattgctaagttaaagagttttaatgatgatttaaatgctagactagaagtagctagtaaatctaattcttgtgtagaaattgttgaaacttgcaataggtgtaaagattttgacattgatgcttgtagtgaacacctagtttcaatttccaaacttaatgatgaattggctagtcttaatgctcaacttaagactagcaagagtaattttgataagctaaaatttgcaagggatgcctacacaattggtagacacccctcaattaaggatggacttggcttcaagagagaagccaagaacttaacaagccataaggctcccattcccgccaaggagaaagggaaggcccctatggctagtagtgtgcaaaagaaccatgcgtttatgtatcatgataagagacaaactagaaatactaatagaagttacaatgcttatgatgattttgattctcatgacatatttgcttctagttctttctatgtgcatgatagaaatgttggtaggaaaaatactgttcacaatatgcctaggagaaatgttgttaatgttcctaggagaattaatgaaccttctacaatatatcatgctttgaatacttcctttgctatttgtagaaaggataggaaaatagttgctaggaagttaggggcaaaatgcaagggagacaaaacttgcatttgggtccctaaggagatttgcactaaccttgtaggacccaacataagttgggtttatgcatccgggggttcaagctggattgtcgacagcggatgcacaaaccatatgacgggggagaagaagatgttcacctcctacgtcaagaataaggattcccaagattcaattatattcggtgatgggaatcaaggcaaggataagtctgaaacccaagggaccctcaagcgcttcctcaggagagctcaaaatgagtttgagctcaaggtgaagaagataaggagcgataacgggtccgagttcaagaactttcaagtggaagagttccttgaggaggaagggatcaagcatgagttctccgctccctacacaccacagcaaaatggtgtggtagagaggaagaacaggacgctaatcgacatggcgaggacgatgcttggagaattcaagacccccgagcgtttttggtcgaaagccgtgaacacggcttgccacgccatcaacagggtctaccttcatcgcctcctcaagaagacttcgtatgagctactaaccagtaacaaacccaatgtatcttactttcgtgtatttgggagcaagtgctacattctagtgaagaagggtagaaattctaaatttgctcccaaagctgtagaagggtttttgttaggttatgattcaaatacaaaggcgtatagagtcttcaacaaatcatcgggtttggttgaagtctctagcgacattgtatttgatgagactaatggctctccaagagagcaagttgttgattgtgatgatcctttcagggtagaggaggccttgctagatccagattgggtattggccatgcaggaggaactcaacaacttcaagcgcaatgaagtttggacactggtgcctcgtcccaagcaaaatgttgtgggaaccaagtgggtgttccgcaacaaacaggacgagcacggggtggtgacgaggaacaaggctcgacttgtggcaaaaggttatgcccaagtcgcaggtttggactttgaggagacgtttgctcctgtggctaggctagaatcaattcgtatcttgctagcatatgccgctcaccattctttcaggttgtaccaaatggatgtgaagagcgctttcctcaatgggccaatcaaggaggaggtgtatgtggagcaaccccctggcttcgaggatgaacggtaccccgaccacgtgtgtaagctctctaaggcgctctatggacttaagcaagccccaagagcatggtatgaatgccttagagatttcttaattgctaatgctttcaaggttgggaaagccgatccaactctttttacaaagacatgtgatggtgatttgtttgtgtgccaaatttatgtcgatgacataatatttggttctactaaccaaaagtcttgtgaagagtttagcagggtgatgacgcagaaattcgagatgtcgatgatgggcgagttgaactacttccttgggttccaagtgaagcaactcaaggacggcaccttcatctcccaaacaaagtacacgcaagacttgctgaagcggtttgggatgaaggacgccaagcccgcaaagactccgatggggaccgacggaaacaccgacctcaacaaaggaggtaagtccgttgatcaaaaagcataccggtcaatgataggttctttgctttatttatgtgctagcagaccggatattatgcttagcgtatgcatgtgtgctagatttcaatccgaccctaaggagtgtcacttagtggcggtgaagcgaattcttagatatttggttgctacgccttgcttcgggctctggtatccaaaggggtctacttttgacttggttggatactcagactccgactatgctggatgtaaggtcgataggaagagtacatcggggacgtgccaattcttaggaaggtccctggtgtcatggaactctaagaaacaaacttccgttgccctatccaccgctgaggccgagtatgttgccgcaggacagtgttgcgcgcaactactttggatgaggcaaaccctccgggactttggctacaatctgagcaaagtcccactcctatgtgataatgagagtgctatccgcatggcggaaaatcctgttgaacacagccgcacaaagcacattgacatccgacaccactttttgagagaccaccagcaaaagggagatatcgaagtgtttcatgttagcaccgagaaccagctagccgatatctttaccaagcctctagatgagaagaccttttgcaggttgcgtagtgagctaaatgtcttagattcgcggaacatggattga

SEQ ID NO: 4825 - DNA, 4989 bp, Zea mays
  Clone ID: TF_ZM4683.C5.o10.fg
atggatcctaaggggaagggaatcgtgatcaacgataaggagaaggagtccttcgtcaacgagcccaaagatgacaagcataccgactcaggctcgggccatagacggaaggaagggaagaagaagaagacaaggcgcatcaaggaaatcgtctactacgacgacagcgacgaatcttcctcttcccaaaaggacaacgacgacaacgactatgacaaacaaaagacggttaactcaaacttttcttttgattattcgcgcattccgcatagctcaaatgctcatttgctccccattccacttggcaagcctcctcactttgatggagaggactacggattttggagtcacaaaatgcgtactcacctattttctctccatccaagcatttgggagattgtggaaagtggaatgaaatttgatagctcggatagcccttcatttattaatgaacagatccataaaaatgcacaagctactactgtgttgctagcctctttgtgcagggacgagtatcacaaggtgagcggcttggacaatgccaagcagatttgggacaccctcaagatctctcatgaggggaatgatgtcaccttactcaccaagatggagttggtggagggcgagctcggacgattcgcgatgataaggggcgaggagccgacacaaacatacaaccggctcaagatccttatcaacaaaataaggagctacggaagcacgcggtggacggatcacgacgtcgtccgcctaatgctaaggtcatttaccgttcttgatcctcacttggtgaacaatattcgtgaaaatcctaggtacatcaagatgtcgcccgaagaaattcttggaaaatttgtaagcgggcgaatgatgatcaaggaggcgaggtacgtggacgacgcattgaatggcccaatccatgagcctcaacccattgctcttaaggcaacgaggagcaaggaggcgctacccagcaaagtggcgcaaattgaggcggctggtcttaatgatgaagagatggccctcatcatcaaaagattcaagacggcgcttaaaggtcgcaagggacagccaagcaagaccaaagccaaggggaagcgctcatgcttcaaatgtggtaagcttggtcattttattgctaactgtcccgacaatgatagtgatcaggaccaagtgaacaagagggaaaagaagaagcactacaagaaggcaaagggcgaggcacatctaggcaaggaatgggactcggattgctcctcttccgactccgacaatgaaggactcgccgccaccgccttcaacaaatcaaccctcttccccaacgagcgtcacacatgccttatggcaagggagaagaaggtatgtactcggaactctacctatgcttcttcaagtgaggacgaatctagtgatgaagatgaagtagattactcatgtttgtttaagggtctagatagaaccaaggtagacaaaattaatgaattgattgatgctctaaatgagaagaacatgcttttagagaaacaagaggatttattgtatgaagaacatgataaatttatagaagctcaaaaatcctatgctttagaagttaaaagaaatgaaatgctttcttttgaactatctacttgtcatgaaaccatctctactttaaaaggtgtcaacaatgatttaaatgctaaattagaagtagcaaataaatccaattcttgtgtagaacatgtcgcaatttgttctaggtgtaaagattttgatattaatgcttgtagtgaacacttagtttctatttcaaaattaaatgatgaattagctagtcttaatgcacaacttaagactagcaagagtgattttgataaactgaaatttgctagggatgcctacactgttggtagacacccctccattaaggatggacttggcttcaaaagggaagccaagaacttaacaagccataaggctcccattcccgcaaaggagaaagggaaggcccctatggctactagcactaaaaagaaccatgcttttttatatcatgatagaagacaatctagaagtgcttataggggttataatgcttttgattctcatcatatgattgcttctagctcttcttatatgcatggtagaaatatgtctaggagaaatgctattcatcatgtgcctagaaagaatgttagtcatgctcctaggaaagtagtaaatgaattttctacagtatatcatgctttgaatgcttcctttgcaatttgtagaaaggatagaaaagtaattgctaggaagttaggggctaaatgcaagggtgataaaacttgcatttgggtccctaagaagatttgtgctaaccttgtaggacccaacatgagttgggtttatgcatccgggggttcaagctggattatagacagcggatgcacaaaccatatgacgggggagaagaagatgttcacctcctacgtcaagagtaaggattcccaagattcaattatattcggtgatgggaatcaaggcaaggataagtctgaaacccaagggaccctcaagcgcttcctcaggagagctcaaaatgagtttgagctcaaggtgaagaagataaggagcgacaacgggtccgaattcaagaaccttcaagtggaggagttccttgaagaggaagggatcaagcacgagttctccgctccctacacaccacagcaaaatggtgtggttgagaggaagaacaggacgctaatcgacatggcgaggacgatgcttggagaatttaagacccccgagcggttttggtcggaagtcgtgaacacggcttgccacgccatcaacagggtctaccttcaccgactcctcaagaagacgtcgtatgaactactaaccggtaacaaacccaatgtatcttactttcgtgtatttgggagcaagtgctacattctagtgaagaagggtagaaattctaaatttgctcccaaagctgtagaaggttttttgttaggttatgactcaaatacaaaggcgtatagagtcttcaacaaatcattgggtttggttgaagtctctagcgacgttgtatttgatgagactaatggctctccaagagagcaagttgttgatcttgatgaagtagatgaagaagatgttccaacggccgccatacgaaccatggcgattggtgacgtgcgaccacaggaacaagatgagcaagatcaaccctcttcctcaactatggtgcattccccaacacaagacgatgaacaagttcatcaacaggaggcgtgtgatcaagggggagcacaagatgatcatgtgatggaggaagaagcgcaaccggcacctccaacccaagttcgagcgatgattcaaagggatcatcccgtcgaccaaattctgggtgacattagcaagggagtaactactcgatctcgattagttaatttttgtgaacattactcctttgtctcttctattgagcctttcagggtagaagaggccttgctagatccggactgggtgttggccatgcaagaggagttaaacaacttcaagcgcaatgaagtttggacactggtgcctcgtcccaagcaaaatgttgtgggaaccaagtgggtgttccgcaacaaacaggacgagcacggggtggtgacaaggaacaaggctcgacttgtggcaaaaggttatgcccaagtcgcaggtttggactttgaggagacttttgctcctgtggctaggctagagtcaattcgtatcttgctagcatatgccgctcaccattctttcaggttgttccaaatggatgtgaagagcgcattcctcaacgggccaataaaggaggaggtgtacgtggagcaaccccctggcttcgaggatgaacggtaccccgaccacgtgtgtaagctctctaaggcgctctatggacttaagcaagccccaagagcatggtatgaatgccttagagatttcttaattgctaatgctttcaaggttgggaaagccgatccaactctttttacaaagacttgtgatggtgatttatttgtgtgccaaatttatgtcgatgacataatatttggttctactaataaaaagtcttgtgaagagtttagcagggtgatgacgcagaaattcgagatgtcgatgatgggcgagttgaactacttccttgggttccaagtgaagcaactcaaggacggcaccttcatctcccaaacgaagtacacgcaggacctgctaaagcggtttgggatgaaggacgccaagcctgcaaagacaccgatgggaaccgacggacacaccgacctcaacaaaggaggtaagtccgttgatcaaaaagcataccggtcaatgatagggtcattactttacttatgtgctagtagaccggatattatgcttagcgtatgcatgtgtgctagatttcaatccgatcctaaggagtgtcacttagtggcggtgaagcgaattcttagatatttagttgctacgccttgcctcgggctctggtatccaaaggggtctacctttgacttgattggatactcagactccgattatgctggatgtaaggtcgataggaagagtacatcggggacgtgccaattcttaggaaggtccttggtgtcatggaaatctaagaaacaaacctccgttgccctatccaccgctgaggccgagtacattgccgcaggacagtgttgcgcgcaactactttggatgaggcaaaccctcagggactttggctacactctgagcaaagtcccactcctatgtgataatgagagtgctatccgcatggcggaaaatcctgttgaacacagccgcacaaagcacatagacatccggcatcactttttgagagaccaccagcaaaagggggatatcgaggtgtttcatgttagcaccgagaaccagctagccgatatctttaccaagcctctagatgagaagaccttctgcaggttgcgtagtgagctaaatgtcttagattcgcggaacttggattga

SEQ ID NO: 4826 - DNA, 4479 bp, Zea mays
  Clone ID: TF_ZM4791.C3.o3.fg
atggatcctaaagggaagggaatcgtgatcaacgacaaggagaaggagtccttcgtcaacgagccaagggatgacaagtccaacgactcgggctcgggccacagacgcaaagatgggaagaagaagaagacaagacgcatcaaggagatcgtctactacgacagcgatgagtctacttcctcccaaaaggacgacgaccacaacgaatacgagagaaagaaaccggtcaattcgaacttttcttttgattactctcgtattcctcaaagtactaatgctcatttattatctattccacttggtaaacctcctcattttgatggagaggactacggattttggagtcacaaaatgcgtagtcacttgttctctctccatcctagcatatgggagattgtagaaagtggaatgcactttgatagtacggatagtcccatgtttattaatgaacagattcataaaaatgcacaagctactactgtgttgctagcctctttgtgcagggacgagtaccataaggtgagcggcttggacaatgccaagcagatctgggacaccctcaagatctctcatgaggggaatgatgtcaccttgctcaccaaaatggagttggtggagggcgagcttggacggttcgcgatgataaggggcgaggagccgacacaaacatacaatcggctcaagaccctcatcaacaaaataaggagctacgggagcacgcgatggacggaccacgacgtcgtccacctaatgctaaggtcatttaccattcttgatcctcatttggtaaacaatatacgtgaaaatcccaggtacaccaagatgtcgcccgaagaagttcttgggaaattcgttagcgggcgaatgatgatcaaggaggcgaggtacgtggacgacgccttgaatggtccgatcaacgagccgcaaccccttgctctcaaggcaacacgaagcaaggaggcgctacctagcaaggtggcacagattgaggcggccggacttaatgatgaagagatggctctcatcatcaaaagattcaagacggtgcttaaaggtcgcaagggacaaccaagcaagaccaaagccaaggggaagcgctcatgcttcaaatgcggtaagcttggtcattttattgctaactgtcccgacaatgatagtgatcaggatcaagggaacaagagggagaaaaagaagaactataagaaggcaaagggcgaggctcatcttggcaaggagtgggattcggactgctcttcgtccgactccgacaatgaagcactcgccgccaccgccttcaacaagtcatccctcttcctcaacgagcgacacacttgcctcatggcaagggagaagaaagtaagcactcataatactagtacttatgcttcttcaagtgaggatgagtctagtgatgatgatgagatagattactcatgcttattcaagggattagatagaaccaaggtagacaaaattaatgaattgattgatgccttgaatgataggaatatacttttagaaaagcaagaggatttgttgtatgaagaacatgataaatttgtagaagctcagaaatctcttgctctagaaattaagagaaatgaaatgctctctagtgaactatcttcttgtcatgaaactattgctaagttaaagagtcttaatgatgatttaaatgctagactagaagtagctagtaaatctaattcttgtgtagaaattgttgaaacttgtaataggtgtaaagattttgacattgatgcttgtagtgaacacctagtttcaatttccaaacttaatgatgaattggctagtcttaatgctcaacttaagactagcaaaagtaattttgataagctaaaatttgcaagggatgcctacacaattggtagacacccctcaattaaggatggacttggctacaagaaggaagccaagaacttgacaagccataaggctcccatctccgccaaggagaaagggaaggcccctatggctagtagtgtgcaaaagaaccatgcctttatgtaccatgatagaagacaatctagaaatgcttataggagatgtaacgcatatgacgcttttgattctcatgacatgtttgcttctagttcttcttatgtgcataatagaaatgttggtaggagaaatgttgttcataatatgcctaagagaaatgttgttaatgttcctaggaaagtttatgcatccgggggttcaagctggattatcgacagtggatgcacaaaccatatgacgggggagaagaagatgttcacctcctacgtcaagaatagggattcccaagattcaattatattcggtgatgggaatcaaggcaaggataagtctgaaacccaagggaccctcaagcgcttccttaggagagctcaaaatgagtttgagctcaaggtgaagaagataaggagcgacaacgggtctgagttcaagaaccttcaagtggaggagttccttgaggaggaagggatcaagcacgagttctccgctccctacacaccacagcaaaatggtgtggtagagaggaagaacaggacgctaatcgatatggcgaggacgatgcttggagaattcaagacccccgagcgtttttggtcggaagccgtcaacatggcttgccacgccatcaacagggtctaccttcaccacctcctcaagaagacgtcgtatgagcttctaaccggtaacaaacccaatgtatcttactttcgtgtatttgggagcaaatgctacattctagtgaagaagggtagaaattctaagtttgctcccaaagccgtggaagggtttttgttaggttatgactcaaatacaaaggcgtatagagtcttcaacaaatcatcgggattggttgaagtctctagcgacgttgtatttgatgagactaatggatctccaagagagcaagctgttgatcttgatgatgtagatgaagaagatgttccgacggccgctatacgaaccatggtgattggtgatatacgaccacaggaacaaaaggagcaagatcaaccttcttcctcaactttgatgcatcccccaactcaagacgatgaacaggttcatcaacgagaggcgtgtgatcaagggggagcacaagacgatcatgtgatggaggaagaagcgcaaccggcaccaccaacccaagttcgagcgatgattcaaagggatcatcccgtcgaccaaattctgggtgatattagcaagggagtaactactcgatctcgattagttaatttttgtgagcattactcctttgtctcttctattgagcctttcagggtagaagaggccttgctagatccggactgggtgttagccatgcaggaggaactcaacaacttcaagcgcaatgaagtttggacactggtgcctcgtcccaagcaaaacgttgtgggaaccaagtgggtattccgcaacaaacaggacgagcacggggtggtgacgaggaacaaggctcgacttgtggcaaaaggttatgcccaagtcgcaggtttggactttgaggagacgtttgctcctgtggctaggctagaatcaattcgtatcttgctagcatatgccgctcaccattctttcaggttgttccaaatggatgtgaagagcgctttcctcaacgggccaatcaaggaggaggtgtacgtggagcaaccccctggcttcgaggatgaacggtaccccgaccacgtgtgtaagctctctaaggcgctctatggacttaagcaagccccaagagcatggtatgaatgccttagagactttctaattgttaatgctttcaaggttgggaaagccgatccaactctttttactaagacatgtgatggtgatttgtttgtgtgccaaatttatgtcgatgacataatatttggttctactaaccaaaagtcttgtgaagagtttagcagggtgatgacgcagaaattcgagatgtcgatgatgggcgagttgaactacttccttgggttccaagtgaagcaactcaaagacggcaccttcatctcccaaacgaagtacacacaagatctgctaaagcggtttgggatgaaggacgccaagcccgcaaagactccgatggggaccgacggacacaccgacctcaacaaaggagggtctttactttatttatgtgctagtagaccggatattatgcttagcgtatgcatgtgtgctagatttcaatccgatcctaaggagtgtcacttagtggcggtgaagcgaattcttagatatttggttgctacgccctgcttcgggctctggtatccaaaggggtctacctttgacttggttggatactcagattccgactatgctggatgtaaggtcgataggaagagtacatcagggacgtgccaattcttaggaaggtccctggtgtcgtggaactctaagaaacaaacctccgttgccctatccaccgctgaggccgagtatgttgccgcaggacagtgttga

SEQ ID NO: 4827 - DNA, 1990 bp, Zea mays
  Clone ID: TF_ZM4796.C7.o1.fg
atggatcctaaggggaagggaatcgtgatcaacgacaaggagaaggagtctttcgtcaacgagccaaaggatgacaagcctactgactcgggcttgagccacaagcgcaaagacgggaagaagaagaagacaaggcgcatcaaggagatcgtctactacgacagcgacgaatcttcctcttcccaaaaggacgacgacgactacgagaaaaagaaaacggtcaattcgaacttttcttttgattactctcgtattcctcaaagtacaaatgctcatttattatctattccacttggtaaacctcctcattttgatggagaggactacggattttggagtcacaaaatgcatagtcacttgttctctctccatcctagtatatgggagattgtagagagtggaatgcactttgatagtacggatagtcccatgttcatcaatgagcaaattcataaaaatgcacaggctactactgttcttctagcttcattgtgcagggatgaataccacaaagtgagcggcttggataacgccaagcaaatctgggacaccctcaaggtctctcatgaggggaatgacgtcacaatgctcaccaagatggagttggtggagggcgaactcgggagattcgctatgataaggggagaagagccaacccaaacgtacaaccggctcaagacccttatcaacaagataagaagctatggaagcacgcgatggacggaccacgacgttgttcgcctaatgctaaggtcttttactgtccttgatcctcatcttgtaaacaatattcgtgagaatcctaggtataccaagatgacgcccgaggagatacttggaaagttcgtgagcgggcgaatgatgatcaaggaagcaagatatgtggacgacgcattgaatggtccaatcaatgagcctcaacatctagctctcaaggcaacaagaagcaaggagacgctacctagcaaggtggcacaaattgaggcggccagacttaatgatgaagagatggctctcatcatcaagagattcaagacggcgctaaaaggtcgcaaggggcagccaagcaagaccaagacaaaggggaagcgctcatgcttcaaatgtggtaagcttggtcattttattgctaactgtcccgacaattatagtgatcaggatcaagggaacaagagggagaagaagaagaactataagaaggcaaagggcgaggcgcatctaggcaaggagtgggattcggattgctcctcttccgactccgacaatgaaggactcgccgccaccgccttcaacaagtcatccctcttccccaacgagcgtcacacatgccttatggcaagggagaagaaggtatgtactcgaaactctacttatgcttcttcaagtgaggacgaatctagtgatgaggatgaaatagattattcatgtttatttaagggcctagatagaaccaaggtagataaaattaatgaattgattgatgccttgaatgataagaataggcttttagaaaagcaagaggatttgttgtatgaagaacatgacaaatttgtagaagcacaaaaatctcatgctctagaagttaaaagaaatgaaatgctttcttgtgaattatcttcttgccatgagacaatttctaacttaaggagcattaatgatgatttgaatgctaagttagaaatagctagtaaatcaacatcttgtgtagaaattgttgcaacttataataggtgtaaagattttgacattgatgcttgtagtgaacacctagcttcaatttccaaacttaatgatgaattggctagtcttaatgctcaacttaagactagcaagagcgaatttgataagctaaaatttgcgacggatgcctacatgattggtagacacccctcaattaaggatggacttggcttcaagagggaagccaagaacttaacaagccataaggtccctatccccgccaaggagaaagggaaggctcctatggcaa

SEQ ID NO: 4828 - DNA, 3709 bp, Zea mays
  Clone ID: TF_ZM4824.C5.o1.fg
atggatcctaaggggaagggaatcgtgatcaacgataaggagaaggagtccttcgtcaacgagcccaaagatgacaagcctaccgactccggctcgggccatagacggaaggaagggaagaagaagaagacaaggcgcatcaaggagatcgtctactacgacagcaacgaatcttcctcttcccaaaaggacaacgacgacaacgactatgacaaacaaaagacggttaactcaaacttttcttttgattattcgcgcattccgcatagctcaaatgctcatttgcttcccattccacttggcaagcctcctcactttgatggagaggactacggattttggagtcacaaaatgcgtactcacctattttctctccatccaagcatttgggaggttgtggaaagtggaatgaaatttgatagctcggatagcccttcatttattaatgaacagatccataaaaatgcacaagctactactgtgttgctagcctctttgtgcagggacgagtatcacaaggtgagcggcttggacaatgccaagcagatttgggacaccctcaagatctctcatgaggggaatgatgtcaccttactcaccaagatggagttggtggagggtgagctcggacgattcgcgatgataaggggcgaggagccgacacaaacatacaaccggctcaagatccttatcaacaaaataaggagctacggaagcacgcgatggacggatcacgacgtcgtccgcctaatgctaaggtcatttaccgttcttgatcctcacttggtgaacaatattcgtgaaaatcctaggtacatcaagatgtcgcccgaagaaattcttggaaaatttgtaagcgggcgaatgatgatcaaggaggcgaggtacgtggacgacgcgttgaatggcccaatccatgagcctcaacccattgctctcaaggcaacaaggagcaaggaggcgctacccagcaaggtggcgcaaattgaggcggccggtcttaatgatgaagagatggccctcatcatcaaaagattcaagacggcactaaagggtcgcaagggacagccaagcaagactaagaccaagggaaagcgatcatgcttcaaatgcggtaagcttggtcattttattgctaactgtcccgacaatgatagtgaccaggaacacgggagcaagagggaaaagaagaagcattacaagaaggccaagggcgaggcacatatcggaaaggagtgggattcggattgctcctcctccgactccgacaatgaaggactcgccgccactgccttcaacaagtcatccctcttccccaacgagcgtcacacatgccttatggcaagggagaagaaggtatgtaatcaaaacaatgtcacttatgattcttccagtgatgatgagtctagtgatgatgaaatagattactctagtttgttcaagggattggatagaactaaagtagataaaattaatgaattaattgatgccttgaatgaaaaagatagactcttagaaaaacaagaggaccttttgtatgaagagcatgacaaatttgtagaggcacaaaaatcttatgctttagaagttaaaagaaatgaagtgctttctagtgaactatcttcttgtcatgaaaccattgctactttaaagagtgttaatgatgacttaaatgctaaactagaagtagctagtaaatctaattcctgtgtagaacatgttgagatttgcactaggtgtaaagatttcgatgttgatgcttgtagtgatcatttagtttcaatttccaaattaactaaggaattggctagtcttaatgcccaacttaagactagcaagaatgaatttgataaactaaaatttgcaagggatgcctacacgatcggtagacacccctcaattaaggatggacttggcttcaagagggaagccaagaacttaacaagccataaggctcccattcccgccaaggagaaagggaaggcccctatggctagtagtgtgcaaaagaaccatgcttttatgtatcatgataggagacaaactagaaacgcttataggagtttcaatgcttatgatgattttgactttcatgccatgtttgcttctagttcttcctatatgcatggtagaaatatgtctaggaaaaatgctattcatcatatgcctagaaagaatgttattcatgctcctaggaaagtagtgaatgaaccttctataatttattgtgctttaaatgcttcctttgctatttgtagaaaggataggaaaatagtcgctaggaagttaggggcaaaatgcaagggagacaaaacttgcatttgggtccctaaggatatttgcactaaccttgtaggacccaacatgagttgggtttatgcatccgggggttcaagctggattatcgacagcggatgcacaaaccatatgacgggggagaagaaaatgttcacctcctacgtcaagaataaggattcccaagattcaattatattcggtgatgggaatcaaggcaagataaaagggctagtagagtctcttggatataatttgctatcggataagtctgaaacccaagggaccctcaagcgcttcctcaggagagctcaaaatgagtttgagctcaaggtgaagaagataaggagcgacaacgggtccgaattcaagaaccttcaagtggaggagttccttgaggaagaaggaatcaagcacgagttctccgctccctacacaccacaacaaaatggtgtggtagaaaggaagaacaggacgctcatcgatatggcgaggacgatgctaggagagttcaagacccccgagtgcttttggacggaagccgtgaacacggcttgccacgccatcaacagggtctaccttcatcgcctcctcaagaagacctcatatgagctactaaccggtaacaaacccaatgtatcttactttcgtgtatttgggagcaagtgctacattctggtaaagaagggtagaaattctaagtttgctcccaaagctgtagaagggtttttgttaggttatgactcaaatacaaaggcgtatagagtcttcaacaaatcatcgggtttggttgaagtctctagcgacgttgtatttgatgagactaatggctctccaagagagcaagttgttgattgtgatgatgtagatgaagaagatgttccgacggccgctatacgaaccatggcgattggagaagttcggccacaggaacaagatgaacgagatcaaccttcttcctcaactatggtgcatcccccaactcaagacgatgaacaggttcatcaacaggaggcgtgtgatcaagggggagcacaagatgatcacgtgatggaggaagaatcgcaaccggcacctccgacccaagttcgagcgatgattcaaagggatcatcccgtcgaccaaattctgggtgacattagcaagggagtaactactcgatctcgattatttaatttttgtgagcattactcctttgtctcttctattgagccgttcagggtagaggaggccttgctagatccggattgggtattggccatgcaagaggagctcaacaacttcaagcgcaatgaagtttggacactggtgcctcgtcctaagcaaaatgttgtgggaaccaagtgggtgtttcgcaacaaacaggacgagcacggggtggtgacgaggaacaaggctcgacttgtggcaaaag

SEQ ID NO: 4829 - DNA, 4641 bp, Zea mays
  Clone ID: TF_ZM4868.C4.o4.fg
atggatcctaaaggcaaggggatggtgatcaacgacaaagaaaaggagtccttcgtcaacgagccaagggatgacatgtccaacgactcgagctcgggccacaaaagaaaagatgggaggaagaagaagacaaggcgcatcaaggaaattgtctactacgacagcgacgaatcttcctcctcccaaaaggacgacgacgactatgatagacgaaagacgcgcatcccgcatagttcaaatgctcaattgcttcccattccacttggcaagccccctcactttgatggagaggattacggattttggagccacaaaatgcgtactcacctgttttctctccatccaagcatttgggagattgtggaaagtggaatgaaatttgatagctcggatagccctatgtttattaatgaacaaattcatagaaatgcacaagctactactgtattgctagcctctttgtgcagggacgagtatcacaaggtgagcggcttggacaatgccaagcagatctgggacaccctcaagatctctcatgagggaaacgacgtcaccttgctcaccaaaatggagttggtggaaggcgaacttggacggttcgcgatgataaggggggaggagccgacgcaaacatacaaccggctcaagacccttatcaacaaaataaggagctacgggagcacgcgatggacggatcacgacgtcgtccgcctaatgctaaggtcatttaccgttcttgatcctcatttggtgaacaatatacgtgaaaatcccaggtacaccaagatgtcgctcgaagaagttcttgggaaattcgttagtgggcgaatgatgattaaggaggcaaggtacgtggacgacgccttgaatggtccgatcaacgagccgcaaacccttgctctcaaagcaacacgaagcaagaaggcgctacctagcaaggtggcacagtttgaggcggccggacttaatgatgaagagatggtcctcatcatcaaaagattcaagacggcgctaaagggtcgaaagggacagccaagcaagactaagaccaagggaaagcgatcatgcttcaaatgcggtaagcttggtcattttattgctaattgtcccgacaatgatagtgaccaggaacacgggagcaagagggaaaagaagaagcattacaggaaggccaagggcgaggcacatatcggaaaggagtgggattcggattgctcctcctccgactccgacaatgaaggactcaccgccactgccttcaacaagtcatccctcttccccaacgaacgtcacacatgccttatggcaagggagaagaaggtatgtaatcaaaacaatgtcacttatgattcttctagtgacgatgagtctagtgatgatgaaatagattactctagtttgttcaagggattggatagaactaaagtagataaaattaatgaactgattgatgccttaaatgaaaaagatagactcttagaaaaacaagaggatcttttgtatgaagagcatgacaaatttgtagaggcacaaaaatcttatgctttagaagttaaaagaaatgaagtgctttctagtgaactatcttcgtgtcatgaaaccattgctactttaaagagtgttaatgatgacttaaatgctaaactagaagtagctagtaaatctaattcttgtgtagaacatgttgagatttgcactaggtgtaaagatttcgatgttgatgcttgtagtaatcatttagtttcaatttccaaattaactgaggaattggctagtctcaatgcccaacttaggactagcaagaatgaatttgataaactaaaatttgcaagggatgcctacacgattggtagacacccctcaattaaggatggacttggcttcaagagggaagccaagaacttaacaagccataaggctcccattcccgctaaggagaaagggaaggcccctatggctactagtgctaaaaagaaccatgcctttttgtactatgatagaagacaacctagaaatgcttataggagttgtaatgcatataatgcctttgactctcatgccatgtttgcttctagttcttcatatgtgcatgatagaaatgttggtagaaggaatgttgttcataatatgcctagaagagatgttgttaatactcctaggaaagttaatgagccttctacaatatatcatgctttgaatgcttcctttgcaatttgtagaaaggatagaaaggtttatgcatccgggggttcaagctggattattgatagtggatgcacaaaccatatgacgggggagaagaagatgttcacctcctacgtaaagaataaggattcccaagattcaattatcttcggtgatgggaatcaaggcaaggataagtctgaaacccaagggaccctcaagcgcttcctcaggagagctcaaaatgagtttgagctcaaggtgaagaagataaggagcgacaacgggtccgagttcaagaaccttcaagtggaggagtttcttgaggaggaagggatcaagcacgagttctccgctccctacacaccacagcaaaatggtgtggtagagaggaagaacaggacgctaatcgatatggcgaggacgatgcttggagaattcaagacccccaagtgtttctggtcggaagccgtgaacacggcttgccacgccatcaacagggtctaccttcatcgcctcctcaagaagacttcgtatgagctgctaaccggtaacaaacccaatgtatcttactttcgtgtatttgggagcaagtgctacattctagtaaagaagggtagaaattctaagtttgctcccaaagttgtagaagggtttttgttaggttatgactcaaatacaaaggcgtatagagtcttcaacaaatcatcgggtttggttgaagtctctagcgacgttgtatttgatgagactaatggctctccaagagagcaagttgttgattgtgatgatgtagatgaagaagatgttccgacggccgctatacgaaccatggcgattggagtagtgcggccacaggaacaagatgaacgagatcaaccttcttcctcaacaatgatgcatcccccaactcaaaacgatgaacagcctttcagggtagaggaggccttgctagatccggactgggtgttggccatgcaggaggagctcaacaacttcaagcgcaatgaagtttggacactggtgcctcgtccgaagcaaaatgttgtgggaaccaagtgggtgttccgcaacaaacaggacgagcacggggtggtgacgaggaacaaggctcgacttgtggcaaaaggttatgcccaagtcgcaggtttggactttgaggagacgtttgctcctgtggctaggctagaatcaattcgtatcttgctagcatatgccgctcaccattctttcaggttgttccaaatggatgtgaagagcgccttcctcaacgggccaatcaaggaggaggtgtacgtggagcaaccccctggcttcgaggatgaacggtaccccgaccacgtgtgtaagctctctaaggcgctctatggacttaagcaagccccaagagcatggtatgaatgccttagagactttttacttgctaatgctttcaaggttgggaaagccgatccaactctgttcactaagacatgtgatggtgatttgtttgtgtgccaaatttatgtcgatgacataatatttggttctactaaccaaaagtcttgtgaagagtttagcagggtgatgacgcagaaattcgagatgtcgatgatgggcgagttgaactacttccttgggttccaagtgaagcaactcaaggacggcaccttcatctcccaaacaaagtacacgcaagacttgctgaagcggtttgggatgaaggacgccaagcccgcaaagactccgatgggaaccgacggacacaccgacctcaacaaaggaggtaagtctgttgatcaaaaagcataccggtcaatgatagggtctttactttatttatgtgctagtagaccgaacattatgcttagcgtatgcatgtgtgctagatttcaatccgatcctaaggagtgtcacttagtggcggtgaagcgaattcttagatatttggttgctacgccttgcttcgggctctggtatccaaaggggtctacctttgacttggttggatactcagactccgactatgctggatgtaaggtcgataggaagagtacatcagggacgtgccaattcttaggaaggtccctggtgtcgtggaactctaagaaacaaacctttgttgccctatccaccgctgaggccgagtatgttgccgcaggccagtgttgcgcgcaactactttggatgaggcaaaccctcagggactttggctacaatctgagcaaagtcccactcctatgtgataatgagagtgctatccgcatggcggaaaatcctgttgagcacagccgcacaaaacacatagacatccagcatcactttttgagagaccaccagcaaaagggagataacgaattgtttcatgttagcaccgagaaccagctagccgatatctttaccaagcctctagatgagaagaccttttgcaggctgcgtagtgagctaaatgtcttagatttgcggaacttggattga

SEQ ID NO: 4830 - DNA, 642 bp, Zea mays
  Clone ID: TF_ZM4875.C4.o12.fg
atggatcctaagggcaaggggatggtgatcaacgataaggagaaggagtccttcgtcaacgagcccaaagatgacaagcctaccgactcgggctcgggccacaagcgaaaagatggaaagaagaagaagacaagacgcatcaaggagattgtctactacgacgacagcgacgagtcctcttcttcccaaaaggacaacgacgactacgacagacgaaagacggcaacaaggagcaaggaggcgctacctagcaaggtggcgcaaattgaggcagccggacttaatgatgaagagatggccctcatcatcaaaagattcaagacggcgctaaaggatcgcaagggacagccaagcaagaccaagaccaagggaaagcgctcatgcttcaaatgcggtaagcttggtcattttattgctaactgtcccgacaatgatagtgatcaggaacaagggaacaagagggagaagaagaagaactataagaaggcaaaaggcgaggcgcatctaggcaaggagtgggattcggattgctcctcttccgactccgacaatgagggactcgccgccaccgccttcaacaaatcggccctcttccccaatgagcgtcacacatgccttatggcaagggagaagaaggtgtaa

SEQ ID NO: 4831 - DNA, 2097 bp, Zea mays
  Clone ID: TF_ZM4885.C4.o3.fg
atggatacccataggccaccacacttcgacggcactaacttcccatattatagtgctagaatggcttgctacctagaggccgttgatctaggtgtttggagagtcactcgtgacgggatgaaacccctcaagaatcccgagaaaccaaccacgagtgaggaaaaagaaattcacttaaatgctagagccaaaaattgcttgtatgaatctcttagcatggatatttttaatcaagtatttaccttgaaaactgctaatgagatttggctaaaattgcatgagctccatgacggcacatccaatgtccgtgagcaaaaacattgcctagtcttaaatgagtataattcttttgctatgaaagatgatgagcttgttagagacatgtattctcgtttgaatctaattatcaatgagctcaattctattggcattaataagctaggtgatgcggacattgtgaggaagattatctccctactaccacaacgaagatatgggagcatcatcactatccttcacaacatggaggacttgggtaacatgaccccaaccattgtaattggaaaaatcgcgacttttgagatgtcgcgaaaaatgtgtcggggagaggagccaacttcctcaaggccatatgcttttgcatgtgatgaaaggaagggcaaaaagaaggctcccactccaagttcctcaagtgaagaagaggaggaagaagaaattgatgatgatgaagataatcaaccatgcacatcatcctccgaggacgaagaaacaatccgacgcgtcggaaaggtaatggggatgatccgcaagattaatctaatgggtgtgcccctgcaggtcgaagatcttctctttaacattgacaggaaaaagcaaaggaagagaggatgcttcacatgtggggagaagggccacttcagggacaactgtccaactatggccgaacccaaaaaggagaggagcaaaggcaaggcgctaacaagtgttagaacttgggatgactcttcaagtgaagatgaacctccaaggacgcgcagccaccggtcctcatcacggtcatcacacaaatgccttatggcaagaggtaacaaaagcattccatactctagtgatgaaagtggtagtgatgatgaaggtgagggaaagccctctgtagatgagcttgcgaatgccgtagaatttttccaggatgtttgcactaagcaaaaagctcaacttaaaactttgaaaaataagttggttagctctcaaaatgactacaaaggtttgctagaaaaatttgaaacttttgcaaacttaaatagtgagctatcaactaaaattgagctattagaatctagtgctccatccactgctaccgatgacaaccttattaaaaagaatgaaaaacttaaggctaagttagctagctcccaagaagctattgaaaatttgctagagaaaatggaaattcttagcatacacaataatgagctaactactaagctagaaaacattggtagcaccccagcaacatctttagttgaaatacctgaaataattaagaaagatgcttctacttcctgctttgatttaattgatgattctaacccctgcaaccaagtcgttgttgagaatattgttgtagagacatgttcggatgaggttgcaaaggaaaatgaacaattaaagcaagaagtggctcgccttggcaaggctttgtatgacaagaaaggcaaagccaaacaaatccgacctccacaggataacaccactgcgggagtgaacaagcctgtagagggagaaactatgatttgtaggctatgccacatggaaggccacaagtctttccaatgcaaggcgatgaccgggaataaacaaaggcaaaagctcaagcaaaagccatcaagcaaaatctccaacacctacatcaaaaaggtgaacaaaaaggatgctacaccatatttgatcaagaagaaaaagaatggaaaggtgatagcaatcaaggccaacaagcaagccaacaaaggaaaaggggccaaacgcatatgggtgccaaaggagataatttcaaccatgaaaagcaccaagaaggtttggatcccgaaagggaagtga

SEQ ID NO: 4832 - DNA, 2337 bp, Zea mays
  Clone ID: TF_ZM4885.C4.o5.fg
atggatcctaaaggcaaggggatggtgatcaacgacaaggaaaaggagtccttcgtcaacgagcccaatgatgacaagcccaccgactcaggctcgggccacaaaagaaaagacgggagaaagaagaaggcaaggcgcatcaaggaaattgtctactacgacagcgacgaatcttcctcctcccaaaaggacgacgacgactacgatagacgaaagacggttaactcaaacttttctttcgattatttgcgcatcccgcatagttcaaatgctcaattgcttcccattccacttggcaagccccctcactttgatggagaggattacggattttggagccacaaaatgcgtactcacctgttttctctccatccaagcatttgggagattgtggaaagtggaatgaaatttgatagctcggatagccctatgtttattaatgaacagattcatagaaatgcacaagccactactgtattgctagcctctttgtgcagggacgagtatcacaaggtgagcggcttggacaatgccaagcagatctgggacaccctcaagatctctcatgagggaaacgacgtcaccttgctcaccaaaatggagttggtggaaggcgaacttggacggtacaccaagatgtcgcccgaagaagttcttgggaaattcgttagcgggcgaatgatgatcaaggaggcaaggtacgtggacgacgccttgaatggcccgatcaatgagccgcaaccccttgctctcaaggcaacacgaagcaaggaggcgctacctagcaaggtggcacagtttgaggcggcaggacttaatgatgaagagatggctctcatcatcaaaagattcaagacggtgcttaaaggtcgcaagggacagccaagcaagaccaaagccaaggggaagcgctcatgcttcaaatgcggtaagcttggtcattttattgctaactgtcccgacaatgatagtgatcaggatcaagggaacaagagggagaaaaagaagaactataagaaggcaaagggcgaggctcatcttggcaaggagtgggattcggactgctcttcgtccgactccgacaatgaaggactcgccgccaccaccttcaacaagtcatccctcttccccaacgagcgacacacttgcctcatggcaagggagaagaaagtaagcactcataatactagtacttatgcttcttcaagtgaggatgagtctagtgatgatgatgagatagattactcatgcttattcaagggattagatagaaccaaggtagacaaaattaatgaattgattgatgccttgaatgataggaatatacttttagaaaagcaagaggatttgttgtatgaagaacatgataaatttgtagaagctcataaatctcttgctctagaaattaagaggaatgaaatgctctctagtgaattatcttcttgtcatgaaactattgccaagttaaagagttttaatgatgatttaaatgctaaactagaagtagcgagtaaatctaattcttgtgtagaaattgttgaaacttgtaataggtgtaaagatattgacattgatgcttgtagtgaacacctagtttcaatttccaaacttaatgatgaattggctagtcttaatgctcaacttaagactagcaagagtaattttgataagctaaaatttgcaagggatgcctacacaattggtagacacccctcaattaaggatggacttggctacaagagggaagccaaggacttgacaagccataaggctcctatctccgccaaggagaaagggaaggctcctatggctagtagtgctacaaagaaccatgcttttatgtatcatgataggagacatactagaaatgcaaatagaagttataatgtttttgattcatatgtttatgattctcatgacatgtttgcttctagttctttctatgtgcatgataggaatgttggtaggagaaatgttgttcataacatgcctaggagaaatgttgttaatgttcctaggaaagtcaatgaaccttctacaatatatcatgctttgaatgcttcctttgcaatttgtagaaaggatagaaaggtgattgctaggaagtttggggcaaaatgcaagggtgataaaacttgcatttggatccctaaggaaattgtgactaaccttgtaggacccaacaagagttgggtttatgcatccgggggttcaagctggattatagacagcggatgcacaaaccatatgacgggggaaaagaagatgttcacctcctacgtcaagaataaggattcccaagactcaataatattcggtgatgggaatcaaggcaag

SEQ ID NO: 4833 - DNA, 4830 bp, Zea mays
  Clone ID: TF_ZM4929.C1.o1.fg
atggatcctaaggggaagggaattgtgataaacgacaaggagaaggagtccttcgtcaacgagccaagggatgacaagtccaatgactcgggctcgggccacaagcgaagagatgggaagaagaagaagacaagacgcatcaaggagatcgtctactacgacagcgatgagtcctcttcttcccaaaagaacgacgaccacgacaaacaaaggaaaccggttaattcgaacttttcatttgattattctcgtattccacatagttcgaattcgcatttgctttccattcctcttggtaaacctccacattttgatggggaggactacggattttggagtcacaaaatgcgtagtcatttattctctctccatccaagcatatgggagattgtagagaatggaatgaaatttgatagctcggatagccctatgtttatcaatgaacaaattcataaaaatgcacaagctactactgttctcttagcatctttgtgcagggaagagtacaataaggtgagcggcttggacaatgccaagcagatatgggacactctcaagatctctcacgaggggaacgacatcaccatgctcaccaagatggagttggtggagggcgagcttggacgattcgccatgataaggggagaagagccaactcaaacttacaaccggctcaagacccttatcaacaagataaggagctacggaagcacgcgttggacggatcacgacgtcgtccgcctaatgctcaggtcatttaccgttcttgatcctcatctcgtgaacaatattcgtgagaaccccaggtacacgatgatgacgcccgaagaagtacttggaaaattcgtgagcgggcggatgatgatcaaggaggcaaggtacgtcgatgacgcgttgaacggtccaatccacgagcctcaacccattgctctcaaggcatcgaggagcaaggaggcactaccaagcaaggtggcgcaaattgaggcggccgggcttaatgatgaagaaatggctctcatcattaagcgcttcaagacggtgctaaagggtcgcaatggacagccgagcaagactaagaccaaggggaagcgatcatgcttcaaatgcggtaagcttggtcattttattgctaactgtcctgataatgaaagtgaccaggaaaagggaaacaagagggaaaagaagaagcattataagaaggcaaagggtgaggcgcatctaggcaaggagtgggactcggattgctcctcatccgactccgacaatgaaggactcgccgccaccgccttcaacaaatcaaccctcttccccaacgagcgtcacacatgccttatggcaagggagaagaaggtatgtactcgcaactctacctatgcttcttcaagtgaggacgaatctagtgatgaggatgaagtagattattcatgtttgttcaagggcttagatagatctaagatagacaaaattaatgaattaattgatgccttgaatgaaaagaatatacttttagaaaagcaagaggatttgttgtatgaagagcatgataaatttgttgaggcacaaaaatcctacgctttagaggttaaaagaaatgaaatgctttcttttgaactatctacttgtcatgaaaccatttctactttgaaaggtgtcaacaatgatttaaatgctaaattagaagtagcaaataaatccaactcttgtgttgaacatgttgaaatttgcactaggtgtaaggatgttgatattaatgcctgtagtgaacacttagtttccatttcaaaattgagtgatgaagtagctagtcttaatgctcgacttaagactagcaaaagtgattttgaaaaactaaaatttgctagggatgcctacacggttggtagacacccctcaattaaggatggacttggcttcaagagggaagccaagaacttaacaagtcataaggctcccattcccgccaaggagaaagggaaggcccctatggctactagtgctaaaaggaaccatgcctttttgtatcatgataaaagacaaactagaaatagaagttatgatgcttttgattcatatgtttatgattctcatgccataaaggatagaaaagtaattgctaggaagttaggggcaaaatgcaaaggtgataaaacttgcatttgggtccctaaggaaattgtgactaaccttgtaggacccaacaagagttgggtttatgcatccgggggttcaagctggattatcgacagcggatgcacaaaccatatgacgggggagaagaagatgttcacctcctacgtcaagaataaagattcccaagattcaattgtattcggtgatgggaatcaaggcaaggataagtctgaaacccaagggaccctcaagcgctttctcaggagagctcaaaatgagtttgagctcaaggtgaagaagataaggagcgacaacgggtccgagttcaagaaccttcaagtggaggagttccttgaagatgaagggatcaagcacgagttctccgctccctacacaccacagcaaaatggtgtggtagagaggaagaacaggacgctcatcgacatggcgaggacgatgctaggagagttcaagacccccgagtgcttttggacagaagccgtgaacacggcgtgccacgccatcaacagggtctaccttcatcgcctcctcaagaagacgtcgtatgagctactaaccggtaacaaacccaatgtatcgtactttcgtgtatttgggagtaaatgctacattctagtaaagaagggtagaaattctaagtttgctcccaaagctgtagaagggtttttgttaggttatgactcaaatacaaaggcgtatagagtcttcaacaaatcatcgggtttggttgaagtctctagcgacgttgtatttgatgagactaatggctcttcaagagagcaagttgttgattgtgatgatgtagatgaagaagatgttccgacagccgctatacgaaccatggcgattggagaagtgcggccacaggaacaagatgagcaagatcaaccctcttcctcaattatggtgcatcccccgactcaagacgatgaacaggttcatcataaggaggcgtgtgatcaagggggagcacaagataatcatgtgatggaggaagaagtgcaaccggcacctccaacccaagttcgagcgatgattcaaagggatcatcccgtcgaccaaattctgggtgacattagcaagggagtaactactcgatctcgattagttaatttttgtgagcattactcttttgtctcttctatagagcctttcagggtagaggaggccttgctagatccggactgggtgttggccatgcaagaggagctaaacaacttcaagcgcaatgaagtttggacactggtgcctcgtccgaagcaaaatgttgtgggaaccaagtgggtgttccgcaacaaacaggacgagcacggggtggtgacgaggaacaaggctcgacttgtggcaaaaggttatgcccaagtcgcaggtttggactttgaggagacctttgctcctgtggctaggctagagtccattcgtattttgctagcatatgccgctcaccattctttcaggttgtaccaaatggatgtgaagagcgctttcctcaacgggccaatcaaggaggaggtgtacgtggagcaaccccctggcttcgaggatgaacggtaccccgaccatgtgtgtaagctctctaaggcgctctatggacttaagcaagccccaagagcatggtatgaatgccttagagactttttaattgctaatgctttcaaggttgggaaagccgatccaactctttttacaaagacatgtgatggtgatttgtttgtgtgccaaatttatgtcgatgacataatatttggttctactaaccaaaagtcttgtgaagagtttagcagggtgatgacgcagaaattcgagatgtcgatgatgggcgagttgaactacttccttgggttccaagtgaagcaactcaaggaaggcaccttcatctcccaaacgaagtacacgcaagatctgctaaagcggtttgggatgaaggacgccaagcccgcaaagacgccaatggggaccgacggacacaccgacctcaacaaaggaggtaagtccgttgatcaaaaagcataccggtcaatgataggttctttgctttacttatgtgctagtagaccggatattatgcttagcgtgtgcatgtgtgctagatttcaatccgatcctaaggagtgtcacttagtggcggtgaagcgaattcttagatatttggttgctacgccttgcttcgggctctggtatccaaaagggtctacctttgacttagttggatactcagactccgactatgctggatgtaaggtcgataggaagagtacatcggggacgtgccaattcttaggaaggtccctggtgtcatggaactctaagaaacaaacatccgttgccctatccaccgctgaggccgagtacgttgccgcaggtcagtgttgcgcgcaactactttggatgaggcaaactctccgggactttggctacaatctgagcaaagtcccactcctatgtgacaatgagagtgctatccgcatggcggagaatcctgttgagcacagccgcacaaagcacatagacatccggcatcactttttgagagaccaccagcaaaagggagatatcgaagtgtttcatgttagcaccgagaaccagctagccgatatcttcactaagcctctagatgagaagaccttttgcaggttgcgtagtgagctaaatgtcttagattcgcggaacctggattga

SEQ ID NO: 4834 - DNA, 2595 bp, Zea mays
  Clone ID: TF_ZM4951.C1.o9.fg
atggatcctaaggggaagggtatcgtgatcaacgaaaaagagaaggaatccttcgtcaacgagccgaaggacgacaagcctaccgactccggctcgggccatagacggaaggaagggaagaagaagaagacaaggcgtattaaggagatgtctactacgacgacagtgatgagtccacttcttcccacaaggacaacgacgacaacgactacgacaaacaaaagacgggatgaatatcacaaagtgagcggcttggataacgccaagcagatctgggacaccctcaagatttcacatgaggggaacgatgtcaccttgctcaccaagatggagttggtggagggcgagcttggacgattcgcgatgataaggggcgaggagccgacacaaacatacaaccggctcaagacccttatcaacaaaataaggagctacggaagcacgcggtggacggaccacgacgttgtccgactgatgctaaggtcctttaccgttcttgatcctcatttggtgaataatattcgtgagaatcccaggtacaccaaaatgtcgcctgaagaagtccttgggaaattcgtaagcgggcgaatgatgatcaaggaggcgaggtacgtggacgacgccttgaatggtccgatcaacgagccgcaaccccttgctctcaaggcaacaagaagcaaggaggcgctacctagcaaggtggcacaaattgaggcggccggacttaatgatgaagagatggccctcatcatcaagagattcaagacggcgctaaagggtcgcaaggggcggccaagcaagaccaagacaaaggggaagcgctcatgcttcaaatgtggtaagcttggtcattttattgctaattgtcccgataatgatagtgatcaggaccaagggaacaagagggagaagaagaagaactataagaaggcaaagggcgaggcacatctaggaaaggagtgggattctgattgctcctcctccgactccgacaatgaaggactcgccgccaccgccttcaacaagtcatccctcttccccaacgagcgtctcacatgccttatggcaagggagaagaaggtatgtagtcgaaactctacttatgcttcttcaagtgaggacgaatctagtgatgaggatgaaatagattattcatgtttgtttaagggcctagatagaacaaaggtagataaaattaatgaattgattgatgccttgaatgataagaataggcttctagaaaaacaagaggacttgttgtatgaagaacatgataaatttttagaagcacaaaaatctcatgccttagaagttaagagaaacgaaatgctttcgtgtgaattatcttcttgccatgagacaatttctagcttaaggagcattaatgatgatttgaatgctaagttagaaatggctaggaaatcaacaacttgtgtagaaaatgttgctatttgcaatagatgtaaagattttgatattgatgcttgtagtgaacacatagcttctattgcaaaattaaatgatgaaatggctagtcttaatgcccaacttaaggctagcaaaagtgattttgataaactaaaatttgctagggatgcctactcgattggtagacacccctccattaaggatgagcttggcttcaagagggaagccaagaacttaacaagccataaggctcccatctccaccaacgagaaagggaaggcccctatggcaagtagtactaaaaggaaccatgcttttatgtacaatgatagaagacagtctcataggagttgtaatgcttttgattcacatgcctatgattcttatgctatgtatgcttccagttcttcctatatgcattgtagagatatgcctaggaaaaatattcatcatgtgcctagaaagaattttgttcatgctcctaggaaagtttatgcatccgggggctcaagctggattatcgacagcggatgcacaaaccatatgacgggggagaagaagatgttcacctcctacgtcaagaataaggatttccaagattcaatcatattcggtgatgggaaccaaggcaaggtgaaagggttaggcaagattgcaatatccaatgagcactctatctctaatgtgtttttagttgagtctcttggatataatttattatctgtcagtcaattatgtaatatgggatataattgtctatttacaaatgtagatgtgtctgtgtttagaagatgtgacggttcactagcttttaagggtgtactagacggcaaactttatttggttgattttgcaaaagaagaggccggtctagatgcatgcttaatggctaagacttgcatgggctggttgtggcatcgccgcttagcacatgtggggatgaagaacctccacaagcttctaaagggagaacacatgataggtctaaccaatgttcatttcgaaaaagatagaccttgtgcagcttgtcaagcaggtaaacaagtgggaggagcacatcacagcaagaatgtgatgaccacgtcaagacctctggagctgctgcatatggacctcttcggacccgtcgcctatctgagcatagggggaaggttgaaagttgcctag

SEQ ID NO: 4835 - DNA, 1497 bp, Zea mays
  Clone ID: TF_ZM4956.C1.o12.fg
atggatcctaagggcaaggggatggtgatcaacgacaaggagaaggagaccttcgtcaacgagctcaatgatgacaagcccaccgactcaggctcgggccacaaaagaaaagacgggaggaaaaagaagacaaggcgcatcaaggaaattgtctactacgacagcgacgaatcttcctcctcccaaaaggacgacgacgaccacgatagacgaaagacggttaactcaaacttttctttcgattattcgcgcatcccgcatagttcaaatgctcaattgcttcccattccacttggcaagccccctcactttgatggagaggactacggattttggagccacaaaatgcgtactcacctgttttctctccatccaagcatttgggagattgtggaaagtggaatgaaatttgatagctcggatagccctgtgtttattaatgaacagattcataaaaatgcacaagctactactgtgttgctagcctctttgtgcagggacgagtatcacaaggtgagcggcttggacaatgccaagcagatctgggacaccctcaagatctctcatgagggaaacgacgtcaccttgctcaccaaaatggagttggtggaaggcgagcttggacggttcgcgatgataaggggcgaggagccgacacaaacatacaaccggctcaagacccttatcaacaaaataaggagctacgggagcacgcgatggacggaccacgacgtcgtctgcctaatgctaaggtcatttaccgttcttgatcctcatttggtgaacaatattcgtgaaaatcccaggtacaccaagatgtcgcctgaagaagttcttgggaaattcgttagcgggcgaatgatgatcaaggaggcgaggtacgtggacgacgccttgaatggtccgatcaacgagccacaaccccttgctctcaaggcaacacgaagcaaggaggcgctacctagcaaggtggcacaggttgaggcggccggacttaatgatgaagagatggctctcatcatcaaaagattcaagacggtgcttaaagatcgcaagggacagccaagcaagaccaaagccaaggggaagcgctcatgcttcaaatgcggtaagcttggtcattttattgctaactgtcccgacaatgatagtgaccaggatcaagggaataagagggagaaaaagaagaactataagaaggcaaagggcgaggctcatcttggcaaggagtgggattcggactgctcctcgtccgactccgacaatgagggactcgccgccactgccttcaacaagtcattcctcttccccaacgagcgtcacacttgcctcatggcaagggagaagaaagtaagcactcctaatactagtacttatgcttcttcaagtgaggatgagtctagtgatgatgatgagatagattactcatgcttattcaagggattagatagaactaaggaatatactgttagaaaagcaagaggatttgttgtatga

SEQ ID NO: 4836 - DNA, 4830 bp, Zea mays
  Clone ID: TF_ZM4957.C1.o6.fg
atggatcctaaggggaagggaattgtgataaacgacaaggagaaggagtccttcgtcaacgagccaagggatgacaagtccaatgactcgggctcgggccacaagcgaagagatgggaagaagaagaagacaagacgcatcaaggagatcgtctactacgacagcgatgagtcctcttcttcccaaaagaacgacgaccacgacaaacaaaggaaaccggttaattcgaacttttcatttgattattctcgtattccacatagttcgaattcgcatttgctttccattcctcttggtaaacctccacattttgatggggaggactacggattttggagtcacaaaatgcgtagtcatttattctctctccatccaagcatatgggagattgtagagaatggaatgaaatttgatagctcggatagccctatgtttatcaatgaacaaattcataaaaatgcacaagctactactgttctcttagcatctttgtgcagggaagagtacaataaggtgagcggcttggacaatgccaagcagatatgggacaccctcaagatctctcacgaggggaacgacatcaccatgctcaccaagatggagttggtggagggcgagcttggacgattcgccatgataaggggagaagagccaactcaaacttacaaccggctcaagacccttatcaacaagataaggagctacggaagcacgcgttggacggatcacgacgtcgtccgcctaatgctcaggtcatttaccgttcttgatcctcatctcgtgaacaatattcgtgagaaccccaggtacacgatgatgacgcccgaagaagtacttggaaaattcgtgagcgggcggatgatgatcaaggaggcaaggtacgtcgatgacgcgttgaacggtccaatccacgagcctcaacccattgctctcaaggcatcgaggagcaaggaggcactaccaagcaaggtggcgcaaattgaggcggccgggcttaatgatgaagaaatggctctcatcattaagcgcttcaagacggtgctaaagggtcgcaatggacagccgagcaagactaagaccaaggggaagcgatcatgcttcaaatgcggtaagcttggtcattttattgctaactgtcctgataatgaaagtgaccaggaaaagggaaacaagagggaaaagaagaagcattataagaaggcaaagggtgaggcgcatctaggcaaggagtgggactcggattgctcctcgtccgactccgacaatgaaggactcgccgccaccgccttcaacaaatcaaccctcttccccaacgagcgtcacacatgccttatggcaagggagaagaaggtatgtactcgcaactctacctatgcttcttcaagtgaggacgaatctagtgatgaggatgaagtagattattcatgtttgttcaagggcttagatagatctaagatagacaaaattaatgaattaattgatgccttgaatgaaaagaatatacttttagaaaagcaagaggatttgttgtatgaagagcatgataaatttgttgaggcacaaaaatcctatgctttagaggttaaaagaaatgaaatgctttcttttgaactatctacttgtcatgaaaccatttctactttgaaaggtgtcaacaatgatttaaatgctaaattagaagtagcaaataaatccaactcttgtgttgaacatgttgaaatttgcactaggtgtaaggatgttgatattaatgcctgtagtgaacacttagtttccatttcaaaattgagtgatgaagtagctagtcttaatgctcgacttaagactagcaaaagtgattttgaaaaactaaaatttgctagggatgcctacacggttggtagacacccctcaattaaggatggacttggcttcaagagggaagccaagaacttaacaagtcataaggctcccattcccgccaaggagaaagggaaggcccctatggctactagtgctaaaaggaaccatgcctttttgtatcatgataaaagacaaactagaaatagaagttatgatgcttttgattcatatgtttatgattctcatgccataaaggatagaaaagtaattgctaggaagttaggggcaaaatgcaaaggtgataaaacttgcatttgggtccctaaggaaattgtgactaaccttgtaggacccaacaagagttgggtttatgcatccgggggttcaagctggattatcgacagcggatgcacaaaccatatgacgggggagaagaagatgttcacctcctacgtcaagaataaagattcccaagattcaattgtattcggtgatgggaatcaaggcaaggataagtctgaaacccaagggaccctcaagcgctttctcaggagagctcaaaatgagtttgagctcaaggtgaagaagataaggagcgacaacgggtccgagttcaagaaccttcaagtggaggagttccttgaagaagaggggatcaagcacgagttctccgctccctatacaccacagcaaaatggtgtggtagagaggaagaacaggacgctcatcgacatggcgaggacgatgctaggagaattcaagacacccgagtgcttttggacggaagccgttaacactgcttgccacgccatcaacagggtctaccttcatcgcctcctcaagaagacgtcgtatgagctactaaccggtaacaaacccaatgtatcgtactttcgtgtatttgggagtaaatgctacattctagtaaagaagggtagaaattctaagtttgctcccaaagctgtagaagggtttttattaggttatgactcaaatacaaaggcgtatagagtcttcaacaaatcatcgggtttggttgaagtctctagcgacgttgtatttgatgagactaatggctctccaagagagcaagttgttgattgtgatgatgtagatgaagaagatgttccgacggccgctatacggaccatggcgattagagaagtacggccacaggaacaagatgatcaagatcaaccctcttcctcaattatggtgcatcccccgactcaagatggtgaacaggttcatcaaaaggaggcatgtgatcaagggggagcacaagataatcatgtgatggaggaagaagcgctaccggcacctccaacccaagttcgagcgatgattcaaagggatcatcccgtcgaccaaattctgggtgacattagcaagggagtaactactcgatctcgattagttaatttttgtgagcattactcctttgtctcttctattgagcctttcagggtagaagaggccttgctagatccggactgggtgttggccatgcaagaggagttaaacaacttcaagcgcaatgaagtttggacactggtgcctcgtccaaagcaaaatgttgtgggaaccaagtgggtgttccgcaacaaacaggacgagcacggggtggtgacgaggaacaaggctcgacttgtggcaaaaggttatgcccaagtcgcaggtttgaatttcgaggagacctttgctcctgtggctaggctagagtcaattcgaatcttgctagcatatgccgctcaccattctttcaggttgtaccaaatggatgtgaagagcgctttcctcaacgggccaatcaaggaggaggtgtacgtggagcaaccccctggctttgaggatgaacggtaccccgaccatgtgtgtaagctctctaaggcgctctatggacttaagcaagccccaagagcatggtatgaatgccttagagactttttacttgctaatgctttcaaggttgggaaggccgatccaactctttttacaaagacatgtgatggtgatttgtttgtgtgccaaatttatgtcgatgacataatatttggttctactaaccaaaagtcttgtgaagagtttagcagggtgatgacgcagaaattcgagatgtcgatgatgggcgagttgaactacttccttgggttccaagtgaagcaactcaaggacggcaccttcatctcccaaacgaagtacacgcaagatctgctaaagcggtttgggatgaaggacgccaagcccgcaaagactccgatggggaccgacggacacaccgacctcaacaaaggaggtaagtccgttgatcaaaaagcataccggtcaatgataggttctttgctttacttatgtgctagtagaccagatattatgcttagcgtatgcatgtgtgctagatttcaatccgatcctaaggaatgtcacttagtggcggtgaagcgaattcttagatatttagttgctacgccttgcttcgggctctggtatccaaaggggtctacctttgacttagttggatactcagactccgactatgctggatgtaaggtcgataggaagagtacatcggggacgtgccaattcttaggaaggtccctggtgtcatggaactctaagaaacaaacctccgttgccctatccaccgctgaggccgagtatgttgccgcaggacagtgttgcgcgcaactactttggatgaggcaaaccctcagggactttggctacaatctgagcaaagtcccactcctatgtgacaatgagagtgctatccgcatggcggagaatcctgttgaacacagccgcacaaagcacatagacatccggcatcactttttgagagaccaccagcaaaagggagatatcgaagtgtttcatgttagcaccgagaaccagctagccgatatcttcactaagcctctagatgagaagaccttttgcaggttgcgtagtgagctcaatgtcttagattcgcggaacttggattga

SEQ ID NO: 4837 - DNA, 1497 bp, Zea mays
  Clone ID: TF_ZM4958.C1.o3.fg
atggatcctaagggcaaggggatggtgatcaacgacaaggagaaggagaccttcgtcaacgagctcaatgatgacaagcccaccgactcaggctcgggccacaaaagaaaagacgggaggaagaagaagacaaggcgcatcaaggaaattgtctactacgacagcgacgaatcttcctcctcccaaaaggacgacgacgaccacgatagacgaaagacgattcataaaaatgcacaagctactactgtgttgctagcctctttgtacagggacgagtatcacaaggtgagcggcctggacaatgccaagcagatctgggacaccctcaagatctctcatgagggaaacgacgtcaccttgctcaccaaaatggagttggtggaaggcgagcttggacggttcgcgatgataaggggcgaggagccgacacaaacatacaaccggctcaagacccttatcaacaaaataaggagctacgggagcacgcgatggacggaccacgacgtcgtccgcctaatgctaaggtcatttaccgttcttgatcctcatttagtgaacaatattcgtgaaaatcccaggtacaccaagatgtcgcccgaagaagttcttgggaaattcgttagcgggcgaatgatgatcgaggaggcgagatacgtggacgacgccttgaatggtccgatcaacgagccgcaacctcttgctctcaaggcaacacgaagcaaggaggcgctacctagcaaggtggcacagattgaggcggccggacttaatgatgaagagatggctctcatcatcaaaagattcaagacggtgcttaaagatcgcaagggacaaccaagcaagaccaaagccaaggggaagcgctcatgcttcaaatgcggtaagcttggtcattttattgctaactgtcccgacaatgatagtgatcaggatcaagggaacaagagggagaaaaagaagaactataagaaggcaaagggcgaggctcatcttggcaaggagtgggattcggactgctcctcgtccgactcagacaatgaaggactcgccgccactgccttcaacaagtcatccctcttccccaacgagcgtcacacttgcctcatggcaagggagaagaaagataagtctgaaacccaagggaccctcaagcgcttcctaaggagagctcaaaatgagtttgagctcaaagtgaaaaagataaggagcgacaatgggtccgagttcaagaaccttcaagtggaggaatttcttgaggaggaggggatcaagcacgaattctccgctccctacacacctcagcaaaatggtgtgatgaagaagatgttccgacggccgctatacgaaccatggcgattggagaagtgcggccacaggaacaagatgaacgagatcaaccttcttcctcaacaacagtgcatcccccaactcaagacgatgaacaggttcatcaaaaggaggcgtgtgatcaagggggagcacaagatgatcacatga

SEQ ID NO: 4838 - DNA, 5496 bp, Zea mays
  Clone ID: TF_ZM4960.C1.o7.fg
atggatcctatgggaaaggggatggtggtcaacaacaacgagaaggagtctatcttcaacgagccgaaggatgacaagcctaccgactcgggctcgagccacaagcgcaaggacgggaagaagaagaagacaaggcgcatcaaggagatcgtctactacgacagcgacgaatcttcctcttcccaaaaggacgacgacgactacgagaaaaagaaaacggtcaattcgaacttttcatttgattactctcgtattcctcaaaatacaaatgctcatttattatctattccacttggtaaacctcctcattttgatggagaggactacggattttggagtcacaaaatgcgtagtcatttgttctctctccatccaagcatatgggagatagttgagaatggaatgcattttgatagtagtgataatcccatgtttatcaatgagcaaattcataaaaatgcacaagctactactgttcttctagcttctttgtgcagggatgaataccacaaagtgagcggcttggataacgccaagcaaatttgggacaccctcaagatctctcatgaggggaatgatgtcacaatgctcaccaagatggagttggtggaaggcgaactcgggagattcgctatgataaggggagaagagccaactcaaacgtacaaccggctaaagacccttgtcaacaagataagaagctatggaatctatggaagcacgcgatggacggatcacgacgtcgtctgcctaatgctaaggtcttttactgtccttgatcctcatcttgtaaacaatattcgtgagaatcctaggtacaccaagatgacgcccgaggagatacttggaaagttcgtgagcgggcgaatgatgatcaaggaagcaagatacgtggacgacgcattgaatggtccaatcaatgagcctcaacctcttgctctcaaggcaacaagaagcaatgagacgctacctagcaaggtggcacaaattgaggcggccggacttaatgatgaagagatggctctcatcatcaagagattcaagacggcgctaaaaggtcgcaaggggcagccaagcaagaccaagacaaaggggaagcgctcatgcttcaaatgtggtaagcttggtcattttattgctaactgtcctgacaatgatagtgatcaggatcaagggaacaagagggaaaagaagaagaactataagaaggcaaagggcgaggcgcatctaggcaaggagtgggattcgaattgctcctcttccgactccgacaatgaaggactcgccgccaccgccttcaacaagtcatccctcttccccaacgagcgtcacacatgccttatggcaagggagaagaaggtatgtactcgaaacactacttatgcttcttcaagtgaggacgaatctagtgatgaggatgaaatagattattcatgtttatttaagggcctagatagaaccaaggtagataaaattaatgaactgattgatgccttgaatgataagaataggcttttagaaaagcaagaggatttgttgtatgaagaacatgacaaatttgtagaagcacaaaaatctcatgctctagaagttaaaagaaatgaaatgctttcttgtgaattatcttcttgccatgagacaatttctaacttaaggagcattaatgatgatttgaatgctaagttagaaatagctagtaaatcaacatcttgtgtagaaaatgatgttatttgcaataggtgtaaagattttgacattgatgcttgtagtgaacacatagcctctattgcaaaattaaatgatgaaattgctagtcttaatgaccaacttaagactagcaaaagtgaatttgacaaattaaaatttgcaagggatgcctacacaattggtagacacccctcaattaaggatggtcttggcttcaagagggaagtcaagaacttaacaagccataaggcttccatctccacaaaggagaaagggaaggcccctatggcgagtaatgctaaaaagaaccatgcctttatgtaccatgatagaaaattttctggaaatgttcatgatgataggagttgtaatgcttataatgcttttgactctcatgccatgtttgcttctagttcttcctatatgcacggtagaaatgtgtttagaagaaatgttgttcatcatatgcctaggagaaatgttgtcaatatacctaggaaagttaatgaaccttctacaatttatcatgcttgtgatgcttcatttgcaatttgtggaaaggatagaaaggtttatgcatccgggggttcaagctggattatcgatagcggatgcacaaatcatatgacaggggagaagaagatgttcacctcctacgtcaagaacaaggattcccaagattcaattatattcggagatgggaatcaaggcaaggtgaaaggattaggcaaaattgcaatatctaatgagcactctatatctaatgtgtttttagttgagtctcttggatataacttgctatctgttagtcaattatgcaatatgggatataattgtctatttacaaatgtagatgtgtctgtctttagaagaagtgatggttcactatcttttaagggtgtattagacggcaaactttatgtagttgattttgcaaaagaggaggccggtctagatgcatgcttaattgctaagactagcatgggctggctgtggcatcgccacttagcacatgtggggatgaagaaccttcacaagcttctaaagggagaacacgtgataggtctaaccaatgttactttcgaaaaagatagaccttgtgcagcttgtcaagcaggtaagcaagtgggaggagcgcatcacagcaagaatgtgatgaccacatcaagacccctggagctgctacatatggacctcttcggacccgtcgcctatctaagcataggaggaagtaagtatggtctagttattgttgatgacttttcccgcttcacttgggtgttctttttgcaggataagtctgaaacccaagggaccctcaagcgcttcctaaggagagctcaaaatgagtttgagctcaaggtgaagaagataaggagcgacaacgggtccgaattcaagaaccttcaagtggaggagtttcttgaggaggaagggatcaagcacgagttctccgctccctacacaccacaacaaaatggtgtggtagagaggaagaacagaacgctcatcgatatggcgaggacgatgcttggagagttcaagacccccgagtacttttggtcggaagccgtgaatacggcttgccacgccatcaatagggtctaccttcatcgcctcctcaagaagacgtcgtatgagctgctaaccggtaacaaacccaatgtatcgtactttcgtgtatttgggagtaaatgctacattctagtgaagaagggtaggaattccaaatttgctcccaaagctgtagaagggtttttgttaggttatgactcaaatacaaaggcgtatagagtcttcaacaaatcatcaggtttggttgaagtctctagcgacgttgtatttgatgagactaatggctctccaagagagcaagttgttgatcttgatgatgtagatgaagaagatgttccgacggccgctatacgaaccatggcgattggtgatgtacgaccacaggaacaaaaggagcaagatcaaccttcttcctcaaccatggtgcatcccctaactcaagacgatgaacaggttcatcaacaggaggcgtgcaatgaagggggagcacaagatgatcatatgatggaggaagaaactcaaccggcacctccaacccaagttcgagcgatgattcaaagggatcatcccgtcgatcaaattcttggtgatattagcaagggagtaactactcgatctcgattagttaatttttgtgagcattactcttttgtctcttctattgagcctttcagggtagaggaggccttgctagatccggactgggtgttggccatgcaagaggagctcaacaacttcaagcgcaatgaagtttggacacttgtgccttgtcccaagcaaaatgttgtgggaaccaagtgggtgttccgcaacaaacaagacgagcacggagtggtgacaaggaacaaggctcgacttgtggcaaaaggttatgcccaagtcgcaggtttggactttgaggagacttttgctcctgtggctaggctagagtcaattcgtattttgctagcatatgccgctcaccattctttcaggttattccaaatggatgtgaagagcgctttcctcaacgggccaatcaaggaggaagtgtacgtggagcaaccccctggcttcgaggatgaatggtaccccgaccacgtgtgtaagctctctaaggcgctctatggacttaagcaagccccaagagcatggtatgaatgccttagagatttcttaattgctaatgctttcaaggttgggaaagtcgatccaactcttttcactaagacttgtgacggtgatctatttgtgtgccaaatttatgtcgatgacataatatttggttctactaataaaaagtcttgtgaagagtttagcagggtgatgacgcagaaattcgagatgtcgatgatgggcgagttgaactacttccttgggttccaagtgaaacaactcaagaacggcaccttcatctctcaaacgaagtacacacaagacttgctaaagtggtttgggatgaaggacgccaagcccgcaaagactccgatggggaccgacggacacactgacctcaacaaaggaggtaagtctgttgatcaaaaggcataccggtcaatgatagggtcattactttacttatgtgctagtagatcggatattatgcttagcgtatgcatgtgtgctagatttcaatccgatcctaaggagtgtcacttagtggcagtgaagagaatccttagatatttagttgctacaccttgcttcaggctctggtatccaaaggggtctacctttgacctaattggatattcagattctgactatgctggatgtaaggtcgataggaagagtacatcggggacgtgccaattcttaggaaggtccctggtgtcatggaactctaagaaacaaacttccgttgccctatccaccgctgaggccgagtacgttgccgcaggacagtgttgcacacaactactttggatgaggcaaaccctcagggactttggctacaatctgagcaaagtcccactcctatgtgataatgagagtgctatccgcatggcggaaaatcctgttgagcacagccgcacaaagcacattgacatccgacatcactttttgagagaccaccagcaaaagggagatatcgaagtgtttcatgttagcaccgagaaccagctagccgatatctttaccaagcctctagatgagaagaccttttgcaggttgcgtaattttggtgaggcaatggggttcttgggccaagattcatcccgttttggtatttga

SEQ ID NO: 4839 - DNA, 3324 bp, Zea mays
  Clone ID: TF_ZM4986.C2.o2.fg
atggatcctaaaggcaaggggatggtgatcaacgacaaggagaaggagtccttcgtcaacgagccaaataatgacaagcccaccgactcaggctcgggccacaaaagaaaagacgggaggaagaagaagacaaggcgcatcaaggaaattgtctactacgacagcgacgaatcttcctcctcccaaaaggacgacgacgactacgatagacgaaagacgattcataaaaatgcacaagctactactgtgttgctagcttctttgtgcagggacgagtatcacaaggtgagcggcttggacaatgccaagcagatctgggacaccctcaagatctctcatgagggaaacgacgtcaccttgctcaccaaaatggagttggtggagggcgaacttggacggttcgcgatgataaggggcgaggagccgacacaaacatacaaccggctcaagacccttatcaacaaaataaggagctacgggagcacgcgatggacggaccacgacgtcgtctgcctaatgctaaggtcatttaccgttcttgatcctcatttggtgaacaatattcgtgaaaatcccaggtacaccaagatgtcgcccgaagaagttcttgggaaactcgttagcgggcgaatgatgatcaaggaggcaaggtacgtggacgacgccttgaatggtccgatcaacgagccgcaaccccttgctctcaaggcaacacgaagcatggaggcgctacctagcagggtggcacagtttgaggcggccggacttaatgatgaagagatggctctcatcatcaaaagattcaagacggtgcttaaaggtcgcaagggacaaccaagcaagaccaaagccaaggggaagcgctcatgcttcaaatgcggtaagcttggtcatttcattgctaactgtcccgataatgaaagtgaccaggaaaaggggaacaaaagggagaagaagaagcattacaagaaggccaagggcgaggcacatatcggaaaggagtgggattcggattgctcctcctccgactctgacaatgaaggactcgccgccacagccttcaacaagtcatccctcttcccaacgagcgtcacacttgcctcatggcaagagagaagaaagaatatacttttagaaaagcaagaggatttgttgtatgaagagcatgataaatttgtagaagctcagaaatctcttgctctagaaattaagaggaatgaaatgctctctagtgaattatcttcttgtcatgaaactattgctaagttaaaaagttttaatgacgatttaaatgctaaactagaagtagctagtaaatctaattcttgtgtagaaattgttgaaacttgtaataggtgtaaagattttgacattgatacttgtagtgatcatttagtttcaatttccaaattaaatgatgagttagctagtcttaatgcccaacttaagactagcaagaatgaatttgacaagctaaaatttgcaagggatgcctacacgattggtagacacccctcaattaaggatggacttggctacaagagggaagccaagaacttgacaagccataaggctcccatctccgccaaggaaaaagggaaggcccctatggctagtagtgtgcaaaagaaccatgcctttatgtaccatgatagaagacaatctagaaatgcttataggagttgtaatgcatataatgtctttgattctcatgccatgtttgcttctagttcttcttatatgcatgataagaatgttggtaggagaaatgttattcataatatgcctaggaaaaatgttgttaatattcctaggaaagtttatgcatccgggggttcaagctggattatcgacagcggatgcacaaaccatatgacgggggagaagaagatgttcacctcctacgtcaagaataaggattcccaagattcaataatattcggtgatgggaatcaaggcaaggtaaaagggttagttgagtctcttggttataacttgctatctgttagtcaattatgcaatatgggatataactgtctattcacaaatgtagatgtgtctgtctttagaaggtgtgatggttcactagcatttaagggtgtattagacggcaaactttatttagttgattttgcaaaaggggaggccggtctagatgcatgcttaattgctaagactagcatgggctggttgtggcatcgccgtttagcacatgtagggatgaagaaccttcacaagcttctaaagggagaacacgtgataggtttgactaacgtgcaattcgaaaaagatagaccttgtgcagcttgtcaagcaggtaaacaagtgggaggagcgcatcacagcaagaatgtgatgaccacttcaagacccctggagctactacatatggacctcttcggacccgtcgcctatctaagcataggaggaagtaagtacggtctagttattgttgatgacttttcccgcttcacttgggtattctttttgcaggataagtctgaaacccaagggaccctcaagcgcttcctaaggagagctcaaaatgagtttgagctcaaggtgaagaagataaggagcgacaacgggtccgagttcaagaaccttcaagtggaggagttccttgatgaggaagggatcaagcacgagttctccgctccctacacaccacaacaaaatggtgtggtagagaggaagaacaggacgctcatcgatatggcgaggacgatgcttggagagttcaagacccccgagtgcttttggtcggaagccgtgaacacggcttgtcacgccatcaacagggtctaccttcatcgcctcctcaagaagacttcgtatgagctactaaccggtaacaaacccaatgtatcttactttcgtgtatttgggagcaagtgctacattctagtgaagaagggtagaaattctaagtttgctcccaaagctgtagaagggtttttgttaggttatgactcaaatacaaaggcgtatagagtcttcaacaaatcatcgggtttggttgaagtctctagcgacgttgtatttgatgagactaatggctctccaagagagcaagttgttgatcttgatgatgtagatgaagaagacgttccaacggccgccatgcgcaccatggcgattggtgatgtgcgaccacaggaacaagtggagcaagatcaaccttcttcctcaacaatggtgcatcccccaactcaagacgatgaacaggttcatcaaaaggaggtgtgtgatcaagggggagcacaagatgatcacgtgatggaggaagaagcgcaaccggcacctccaactgagagcacctag

SEQ ID NO: 4840 - DNA, 2121 bp, Zea mays
  Clone ID: TF_ZM4986.C3.o1.fg
atggatcctaaagggaagggaatcgtgatcaacgacaaggaaaaggagtccttcgtcaacgagccaaaagatgacaaatccaacgactctggctcgggccacagacgtaaagatgggaagaagaagaagacaagacgtatcaaggagatcgtctactacgacagcgacgagtctacttcttcccacaaggacgacgactacgacaaacataagacagttaactcatacttttcttttgattattcgcgcattccgcacagctcaaatgctcatttgctccccattccacttggcaagcctcctcactttgatggagaggactacggattttggagtcacaaaatgcgtacacacctattttctctccatccaagaatttgggagattgtggaaagtggaatgaaatttgatagctcggatagtccttcgtttattaatgaacagatccataaaaatgcacaagctactactgtgttgctagcctctttgtgcagggacgagtatcacaaggtgagcggcttggacaatgccaagcaaatttgggacaccctcaagatctctcatgaggggaatgatgtcaccttactcaccaagatggagttggtggagggcgagctcggacgattcgcgatgataaggggcgaggagccgacgcaaacatacaaccggctcaagatccttatcaacaaaataaggagctacggaagcacgcgatggacggatcacgacgtcgtccgcctaatgctaaggtcatttaccgttcttgatcctcatctcatgaacaatattcgtgggaatcccaggtacacgaagatgacgcccgaggaggtactcggaaaattcgtaagcgggcgaatgatgatcaaggaggcaagatacgtggacgacgccttgaatggaccgatcaacgagcctcaaccccttgctctcaaggcaacaaaaagcaaggaggcgctacctagcagggtggcacaaattgaggcggccgaacttaatgatgaagagatggccctcatcatcaaaagattcaagacggcgcttaaaggtcgcaagggacagccaagcaagaccaaagccaaggggaagcgttcgtgcttcaaatgcggtaagcttggtcattttattgctaactgtcccgacaatgatagtgatcaggaccaagggaacaagagggagaagaagaagaattataagaaggcaaagggcgaggctcatcttggcaaggagtgggattcggactgctcctcgtctgactccgacaatgagggactcgccgccactgcattcaacaagtcatccctcttccccaacgagcgtcacacttgcctcatggcaagagagaaggtaatcactcgtaatgatatcacttatgattcttctagtgacgatgagtctagtgatgatgaaatagattactctagtttgttcaagggattggataaaaataaaattgataaaatcaatgaattgattgatgccttgaatgaaaaggataggcttttagaaaagcaagaggatttgttgtatgatgaacatgataagtttatagaggcacaaaaatcctatgctttagaagttaaaagaaatgaagtgctttctagtgaattatcttcttgtcatgaaaacattgctactttaaagagtgttaatgatgacttaaatgctaaactagaagtagctagtaaatcaacatcttgtgtagaaattgttgaaacgtgcactaggtgtaaagatcttaatgttgatgcttgtagtaaacatctagtttcaatttctaaattgaatgatgaagtggctagtcttaatgctcaacttaaggctagcaaaagcgaatttgataaactaaaatttgcaagggatgcctacacgatcggtagacacccctcaattaaggatggacttggcttcaagagggaagccaagaacttaacaagccataaggctcccattcccgctaaggagaaagggaaggcccctatagctactagtgctaaaaagaaccatgcctttttgtatcatgataggagacaaactagaaatgcttataggagttataatgcttacgatgatttttctcatgctatgtttgcttctagttcttcatatgtgcatgatagaaat

SEQ ID NO: 4841 - DNA, 4719 bp, Zea mays
  Clone ID: TF_ZM4988.C1.o3.fg
atggatcctaagggcaaggggatggtgatcaacgacaaggagaaggagaccttcgtcaacgagctcaatgatgacaagcccaccgactcaggctcgagccacaaaagaaaagacgggaggaagaagaagacaaggcgcatcaaggaaattgtctactacgacagcgacgaatcttcctcctcccaaaaggacgacgacgaccacgatagacgaaagacggttaactcaaacttttctttcgattattcacgcatcccgcatagttcaaatactcaattgctccccattccacttggcaagccccctcactttgatggagaggactacggattttggagccacaaaatgcgtactcacctgttttctctccatccaagcatttgggagattgtggaaagtggaatgaaatttgatagctcggatagtcctgtgtttattaatgaacagattcataaaaatgcacaagctactactgtgttgctagcctctttgtgcagggacgagtatcacaaggtgagcggcttggacaatgccaagcagatctgggacaccctcaagatctctcatgagggaaacgacgtcaccttgctcaccaaaatggagttggtggaaggcgagcttggacggttcgcaatgataaggggcgaggagccaacacaaacatacaaccggctcaagacccttatcaacaaaataaggagctacgggagcacgcaatggacggaccacgacgtcgtccgcctaatgctaaggtcatttaccgttcttgatcctcatttagtgaacaatattcgtgaaaatcccaggtacaccaagatgtcgcccgaagaagttcttgggaaattcgttagcgggcgaatgatgatcaaggaggcgagatacgtggacgacgccttgaatggtccgatcaacgagccgcaacctcttgctctcaaggcaacacgaagcaaggaggcgctacctagcaaggtggcacagattgaggcggccggacttaatgatgaagagatggctctcatcatcaaaagattcaagacggtgcttaaaggtcgcaagggacagccaagcaagaccaaagccaaggggaagcgctcatgcttcaaatgcggtaagcttggtcattttattgctaactgtcccgacaatgatagtgaccaggatcaagggaataagagggagaaaaagaagaactataagaaggcaaagggtgaggctcaccttggcaaggagtgggattcggactgctcctcgtccgactccgacaatgagggactcgccaccactgccttcaacaagtcatccctcttcccaaacgagcatcacacttgcctcatggcaagggagaagaaagtaagcactcctaatactagtacttatgcttcttcaagtgaggatgagtctagtgatgatgatgagatagattactcatgcttattcaagggattagatagaactaaggtagacaaaattaatgaattgattgatgccttgaatgataggaatatactgttagaaaagcaagaggatctgttgtatgaagaacatgataaatttgtagaagctcagaaatctcttgctctagaaattaagaggaatgaaatgctctctagtgaattatcttcttgtcatgaaactattgctaagttaaaaatttttaatgatgatttaaatgctaaactagaagtagttagtaaatctaactcttgtgtagaaattgttgaaacttgtaataggtgtaaagattttgacattgatgcttgtagtgatcatttagtttcaatttctaaattaaatgaggaattagctagtcttaatgcccaacttaagactagcaagaatgaatttgacaagctaaaatttgcaagggatgcctacacgattggtagacacccctcaattaaggatggacttggctacaagagggaagccaagaacttgacaagccataaggctcccatctccgccaaggagaaaggaaaagcccctatggctagtagtgtgcaaaagaaccatgcttttatgtaccatgataggagacaatctagaaatgcttataggagttgtaatgcatataatgtctttgattctcatgccatgtttgcttctagttcttcttatgtgcatgatagaaatgttggtaggagaaatgctattcataatttgcctaggagaaatgttgttaatgttcctaggaaagtttatgcatccgggggttcaagctggattatcgacagcggatgcacaaaccatatgacgggggagaagaagatgttcacctcctacgtcaaaaacaaagattcccaagattcaataatattcggtgatgggaatcaaggcaaggataagtctgaaacccaagggaccctcaagcgcttcctcgggagagctcaaaatgagtttgagctcaaggtgaagaagataaggagcgataacgggtccgagttcaagaactttcaagtggaagagttccttgaggaggaagggatcaagcatgagttctccgctccctacacaccacagcaaaatggtgtggtagagaggaagaacaggacgctaatcgacatggcgaggacgatgcttggagaattcaagacccccgagcgtttttggtcggaagccgtgaacacggcttgccacgccatcaacagggtctaccttcatcgcctcctcaagaagacttcgtatgagctactaaccggtaacaaacccaatgtatcttactttcgtgtatttggaagcaagtgctacattctagtgaagaagggtagaaattctaaatttgctcccaaagctgtagaagggtttttgttaggttatgactcaaatacaaaggcgtatagagtcttcaacaaatcatcgggtttggttgaagtctctagtgacgttgtatttgatgagactaatggctctccaagagagcaagttgttgattgtgatgatgtagatgaagaagatgttccgacagccgctatacgaaccatggcgattggagaagtgcggccacaggaacaagatgaacgagatcaaccttcttcctcaactatggtgcatcccccaaccgaagatgacgaacaggtacctcaagtggaggcgcttgatcaagggggagcacaagatgatcaagtgatggaggaagaagcgcaactggcacctctgacccaagttcgagcgatgattcaaagggatcatcccgtcgaccaaattctgggtgatattagcaagggagtaactactcgatctcgattagttaatttttgtgagcattactcctttgtctcttctattgagcctttcagggtagaagaggccttgctagatccggactgggtgttggccatgcaggaggaactcaacaacttcaagcgcaatgaagtttggacactggtgcctcgtcctaagcaaaatgttgtgggtgtttcgcaacaaacaagacgagcacggagtgatgacaaggaacaaggctcgacttgtggcaaaaggttatgcccaagtcgcaggttgtaccaaatggatgtgaagagcgctttcctcaatgggccgatcaaggaggaggtgtacgtggagcaaccccctggtttcgaggatgaacggtaccccgaccacgtgtgtaagctctctaaggcgctctatggacttaagcaagccccaagagcatggtatgaatgccttagagactttctaattgttaatgctttcaaggttgggaaagccgatccaactctttttacaaagacatgtgatggtgatttgtttgtgtgccaaatttatgtcgatgacataatatttggttctactaaccaaaagtcttgtgaagagtttagcagggtgatgatgcagaaattcgagatgtcgatgatgggcgagttgaactacttccttgggttccaagtgaagcaactcaaggacggcaccttcatctcccaaacgaagtacacgctagacctgctgaagcggtttgggatgaaggacgccaagcccgcaaagactccggtggggaccgacggacacaccgacctcaacaaaggaggtaagtccgttgatcaaaaagcataccggtcaatgatagggtctttactttatctatgtgctagtagaccggatattatgcttagcgtatgcatgtgtgctagatttcaatccgatcctaaggagtgtcacttagtggcggtgaagcgaattcttagatatttggttgctacgccttgcttcgggctctggtatccaaaggggtctacctttgacttggttggatactcagattccgactatgctggatgtaaggtcgataggaagagtacatcggggacgtgccaattcttaggaaggtccctggtgtcgtggaactctaagaaacaaacttctgttgccctatccaccgttgaggccgagtatgttgccgcaggacagtgttgcgcgcaactactttggatgaggcaaaccctccgggactttggctacaatctgagcaaagtcccactcctatgtgataatgagagtgctatccgcatggcggaaaatcctgttgaacacagccgcacaaagcacattgacatccggcatcactttttgagagaccaccagcaaaagggagatatcgaagtgtttcatgttagcaccgagaaccagctagccgatatctttaccaagcctctagatgagaagaccttttgcaggttgcgtagtgagctaaatgtcttagattcgcggaacttggattga

SEQ ID NO: 4842 - DNA, 1302 bp, Zea mays
  Clone ID: TF_ZM4989.C9.o3.fg
atggatcctaagggaaaggggatggtggtcaacaacaacgagaaggagtctatcttcaacgagccgaaggatgacaagcctaccgactcggtctcgagccacaagcacaaagacgggaagaagaagaagacaaggcgcatcaaggagatcgtgtactatgacagcgacgaatcttcctcttcccaaaaggacgacgactacgagaaaaagaaaacggtcaattcgaacttttcttttgattactctcgtattcctcaaagtacaaatgctcatttattatctattccacttggtaaacctcctcattttgatggagaagactacggattttggagtcacaaaatgcgtagtcacttgttctctctccatcctagtatatgggagattgtagagagtggagtgcactttgatagtacggatagtcccatgttcattaatgagcaaattcataaaaatgcacaagctactactgttcttctagcttcattgtgcagggatgaataccacaaagtgagcggcttggataacgccaaacaaatttgggacaccctcaagatctctcatgaggggaatgacgtcacaatgctcaccaagatggagttggtggagggcgaactcgggagattcgctatgataaggggagaagagccaacccaaacgtacaaccggctcaagacccttgtcaacaagataagaagctatggaagcacgcgatggacggaccacgacgtcgtccgcctaatgctaaggtcttttactgtccttgatcctcatcttgtaaacaatattcgtgagagtcctagtgggcgaatgatgatcaaggaagcaagatacgtggacgacgcattgaatggtccaatcaatgagcctcaacctcttgctctcaaggcaacaagaagcaaggagacgctacctagcaaggtagcacaaattgaggcggtcggacttaatgatgaagagatggctctcatcatcaagagattcaagacggcgctaaaaggtcgcaaggggcagccaagcaagaccaagacaaaggggaagcgctcatgcttcaaatgtggtaagcttggtcattttattgctaactgtcccgataatgatagtgatcaggatcaagggaacaagagggagaagaagaagaactataagaaggcaaagggcgaggcgcatctaggcaaggagtgggattcggattgctcctcttctgactccgacaatgaaggactcgccgccaccgccttcaacaagtcatccctcttccccaacgagcgtcacacatgccttatggcaagggagaagaag

SEQ ID NO: 4843 - DNA, 5229 bp, Zea mays
  Clone ID: TF_ZM4990.C4.o2.fg
atggatcctaaggggaagggaattgtgatcaacgacaaggagagggagtccttcgtcaacgagccaagggatgacaagtccaacgactcaagctcgggccacagacgcaaagatgggaagaagaagaagacaagacgcatcaaggagatcgtctactacgacagcgatgagtctacttcttcccaaaaggatgaggacaacgactacaaacaaaagacggttaactcgaacttttcatttgattattctcgtattcctcaaagttcgaattcgcatttgctttccattccactcggcaagcccccacactttgatggagaagactacggattttggagccacaaaatgcgtagtcacctattctctctccatccaagcatatgggagattgtagagagtggaatgaaatttgatagctcggatagtcctgtgattataaatgaacaaattcatagaaatgcacaagctactactgttctcttagcatctttgtgtagggaagagtacaataaggtgagcggcttggacaatgccaagcaaatatgggacaccctcaagatctctcacgagggcaacgacgtcaccatgctcaccaagatggagctggtggagggcgaacttgggagatttgctatgataaggggggaggagccaacccaaacatacaatcggctcaagacccttgtcaacaaaataaggagctacgggagcacgcgatggacggatcacgacgtcgtccgcctaatgctaaggtcttttaccattcttgatcctcatttggtgaacaacattcgtgaaaatcctaggtacaccaagatgtcgcctgaagaaattcttgggaagttcgtaagcgggcggatgatgattaaggaggcaagatatgtggacgacgcgttgaacggtcctattcatgagcctcaacccgttgctctcaaggcaacaaggagtaaggaggcgctaccaagcaaggtggcgcaagttgaggcggccgggctaaataatgaggagatggccctcatcataaagcgcttcaagacggcgcttaaaggtcgcaagggacagccaagcaagaccaaagccaaggggaagcgctcatgcttcaaatgcggtaagcttggtcattttattgctaactgtcccgacaatgatagtgatcaggaccaagggaacaagagggaaaagaagaagcactacaagaaggcaaagggcgaggcgcatctaggcaaggaatgggactcggattgctcctcttccaactccgacaatgaaggactcgccgccaccgccttcaacaaatcaaccctcttccccaacgagcgtcacacatgcctgatggcaagtgagaagaaggtatgtactcggaactctacctatgcttcttcaagtgaggacgaatctagtgatgaagatgaagtagattactcatgtttgtttaagggtctagatagaaccaaggtagacaaaattaatgaattgattgatgctctaaatgagaagaacatgcttttagagaaacaagaggatttattgtatgaagaacatgataaatttatagaagctcaaaaatcctatgctttagaagttaaaagaaatgaattgctttcttttgaactatctacttgtcatgaaaccatctctactttaaaaggtgtcaacaatgatttaaatgctaaattagaagtagcaaataaatccaattcttgtgtagaacatgtcgcaatttgttctaggtgtaaagattttgatattaatgcttgtagtgaacacttagtttctatttcaaaattaaatgatgaattagctagtcttaatgcacaacttaagactagcaagagtgattttgataaactgaaatttgctagggatgcctacactgttggtagacacccctccattaaggatggacttggcttcaaaagggaagccaagaacttaacaagccataaggctcccattcccgcaaaggagaaagggaaggcccctatggctactagcactaaaaagaaccatgcttttttatatcatgatagaagacaatctagaagtgcttataggggttataatgcttatgatgattttgattctcatcacatgattgcttctagctcttcatatatgcatggtagaaatatgtctaggagaaatgctattcatcatgtgcctagaaagaatgttagtcatgcttctaggaaagtagtaaatgaaccttctacaatttattgtgctttaaatgcttcctttgctattcgtagaaaggataagaaaattgttgctaggaagttaggggcaaaatgcaagggtgacaaaacttgcatttgggtccctaaggatatttgcactaaccttgtaggacccaacatgagttgggtttatgcatccgggggttcaagctggattatcgacagcggatgcacaaaccatatgacgggggagaagaaaatgttcacctcctacgtaaaaaataaagattcccaagattcaattatattcggtgatgggaatcaaggcaaggtaaaaggtttagatgtgtctgtctttagaagaagtgatggttcactagcttttaaaggtgtattagacggcaaactttatttagttgattttgcaaaagaagaggccggtctagatgcatgcttaatagctaagactagcatgggctggctgtggcatcgccgcttagcacatgtggggatgaagaacctccataagcttctaaagggagaacacgtgataggtctaactaatgttcaattcgaaaaagatagaccttgtgcagcttgtcaagcagggaaacaggtgggaggctctcatcacaccaaaaatgtgatgacaacatcaagacccttggagatgctgcatatggacctcttcggacccgtcgcctatctgagcataggaggaagtaagtatggtttagttattgttgatgacttttcccgcttcacttgggtgttctttttacaggataagtctgaaacccaagggaccctcaagcgcttcctcaggagagctcaaaatgagtttgagctcaaagtgaagaagataaggagcgacaacgggtccgagttcaagaaccttcaagtggaggagttccttgaagaggaagggatcaagcacgagttctccgctccctacacaccacagcaaaatggtgtggtagagaggaagaacaggacgctcatcgacatggcgaggacgatgctaggagagttcaagacccccgagtgcttttggacggaagccgttaacacggcttgccacgccatcaacagggtctaccttcatcgcctcctcaagaagacgtcgtatgagctactaaccggtaacaaacccaatgtatcttactttcgtgtatttgggagcaagtgctacattctagtgaagaagggtagaaattctaaatttgctcccaaagctgtagaagggtttttgttaggttatgactcaaatacaaaggcgtatagagtcttcaacaagtcatcgggcttggttgaagtctctagcgacgttgtatttgatgagactaatggctctccaagagagcaagttgttgatcttgatgatgtagatgaagaagatgttccaacggccgctatgcgcaccatggcgattggtgatgtgcgaccacaggaacacttggagcgagatcaaccttcttcctcaactatggtgcatcccccaactcaagacgatgaacagcctttcagggtagaggaggccttgctagatccggactgggtgttggccatgcaggaagagctcaacaacttcaagaggaatgaagtttggacgctggtgcctcgtccgaagcaaaatgttgtgggaaccaagtgggtgttccgcaacaaacaggacgaacatggggtggtgacgagaaacaaggctcgacttgtggcaaaaggttatgcccaagtcgcaggtttggatttcgaggagacttttgctcctgtggctaggctagagtccattcgaatcttgctagcatatgccgctcaccattctttcagattgtaccaaatggatgtgaagagcgctttcctcaacgggccaataaaggaggaagtgtacgtggagcaaccccctggcttcgaggatgaacggtaccccgaccacgtgtgtaagctctctaaggcgctctatggacttaagcaagccccaagagcatggtatgaatgccttagagatttcttaattgctaatgctttcaaggttgggaaagccgatccaactctttttacaaagacttgtgatggtgatttatttgtgtgccaaatttatgtcgatgacataatatttggttctactaataaaaagtcttgtgaagagtttagcagggtgatgacgcagaaattcgagatgtcaatgatgggcgagttgaactacttccttgggttccaagtgaagcaactcaaggacggcaccttcatctcccaaacgaagtacacgcaggacctgctaaagcggtttgggatgaaggacgccaagcctgcaaagacaccgatgggaaccgacggacacaccgacctcaacaaaggaggtaagtccgttgatcaaaaagcataccggtcaatgatagggtcattactttacttatgtgctagtagaccggatattatgcttagcgtatgcatgtgtgctagatttcaatccgatcctaaggagtgtcacttagtggcggtgaagcgaattcttagatatttagttgctacgccttgcctcgggctctggtatccaaaggggtctacctttgacttgattggatattcagactccgactatgctggatgtaaggtcgataggaagagtacatcggggacgtgccaattcttaggaaggtccctggtgtcatggaactctaagaaacaaacctccgttgccctatccaccgctgaggccgagtatgttgccgcaggacagtgttgcgcgcaactactttggatgaggcaaaccctcagggactttagctacaatctgagcaaagtcccgctcctatgtgataatgagagtgctatccgcatggcggaaaatcctgttgaacacagccgcacaaagcacatagacatccggcatcactttttgagagaccaccagcaaaagggagatatcgaagtgtttcatgttagcaccgagaaccagctagccgatatctttaccaagcctctagatgagaagaccttttgcaggctgcgtagtgagctaaatgtcttagattcgcggaacctggattga

SEQ ID NO: 4844 - DNA, 4509 bp, Zea mays
  Clone ID: TF_ZM5007.C1.o5.fg
atggatcctaaggggaagggaatcgtgatcaatgacaaggagaaggagtcccttgtcaacgagccgaaggatgacaagcctaccgactcgggctcgggccacaagcgcaaagacgggaagaagaagaagacaaggcgcatcaaggagatcgtctactatgacagcgacgaatcttcctcttcccaaaaggacgacgacgactacgagaaaaagaaaacggtcaattcgaatttttcttttgattactctcgtattcctcaaagtacaaatgctcatttattatctattccacttggtaaacctcctcactttgatggagaggactacggattttggagtcacaaaatgcgtagtcatttgttctctctccatccaagcatatgggagatagttgagaatggaatgcattttgatagtagtgatagtcccatgtttatcaatgagcaaattcataaaaatgcacaagctactactgttcttctagcttccttgtgcagggatgaataccacaaagtgagcggcttgggtaacgccaagcaaatttgggacaccctcaagatctctcatgaagggaatgatgtcacaatgctcaccaagatggagttggtggaaggcgaactcgggagattcgctatgataaggggagaagagccaactcaaacgtacaaccggctcaagacccttgtcaacaagataagaagctatggaagcacgcgatggacggaccacgacgttgtccgcctaatgctaaggtcttttactgttcttgatcctcatcttgtgaacaatattcgtgagaatcctaggtacaccaagatgacgcccgaggagatacttggaaagttcgttagcgggcgaatgatgatcaaggaagcaagatacgtggacgacgccttgaatggtcctatcaacgagccgcaaccccttgctctcaaggcaacaagaagcaaggaggcgctacctatcaaggtggcacaaattgaggcggccggacttaatgatgaagaaatggcccttatcatcaaaagattcaagacggcgctaaaaggtcgcaagggacaaccaagcaagatcaagacaaaggggaagcgctcatgcttcaaatgtggtaagcttggtcattttattgctaactgtcccgacaatgatagtgatcaggatcaagggatcaagagggagaaaaagaagaactataagaaggcaaagggcgaggcacatcttggcaaggagtgggattcggattgctcttcgtccgacttcgacaatgaaggactcgccgccaccgccttcaacaagtcatccctcttccccaacgagcgtcacacatgccttatggcaagagagaagaaggtatgtactcaaaactctacttatgcttcttcaagtgaggacgaatctagtgatgaggatgaaatagattattcatgcttatttaagggactagatagaaccaaggtagataaaattaatgaattgattgatgccttgaatgataagaacaggcttttagaaaaacaagaggacttgttgtatgaagaacatgacaaatttgtagaagcacaaaaatctcatgctctagaagttaaaagaaatgaaatgctttcttgtgaattatcttcttgccatgagacaatttctagcttaaggagcattaatgatgatttgaatgctaagttagaaacagctagtaaatcaacatcttgtgtaaaaattgttgaaacttgcaataggtgtaaagatattgatattgatgcttgtagtgaacacatagcctctattgcaaaattaaatgatgaagttgctagtcttaatgcccaacttaagactagcaaaagtgaatttgacaaattaaaatttgcaagggatgcctacacaattggtagacacccctcaattaaggatggtcttggcttcaagagagaagtcaagaacttaacaagccataaggcttccatctccataaaggagaaagggaaggcccctatggtgagtaatgctaaaaagaaccatgccttcatgtaccatgatagaaaattttctagaaatgttcatgatgataggagttgtaatgcttataatgcttttgactttcatgccatgtttgcttctagttcttcctatatgcatgcatccggaggttcaagctggattatcgacagcggatgcacaaaccatatgacgggggagaagaagatgttcacctcctacgtcaagaataaggattcccaagattcaataattttcggtgatgggaaccaaggcaaggataagtctgaaacccaagggaccctcaagcgcttcctaaggagagctcaaaatgagtttgagctcaagaggaagaacaggacgcttatcgatatggcgaggacgatgcttggagagttcaagaccccagagtgcttttggtcggaagccgtaaacacggcttgccacgccatcaacagggtctaccttcatcgcctcctcaagaagacgtcgtatgagctgctaaccggtaacaaacccaatgtatcttactttcgtgtatttgggagcaaatgctacattctagtgaagaagggtagaaattctaagtttgctcccaaagttgtagaagggtttttgttaggttatgattcaaatacaaaggcgtatagggtcttcaacaaatcatcgggtttggttgaagcctctagcgacgttgtatttgatgagactaatggctctccaagagagcaagttgttgatcttgatgatgtagatgaagaagatgttccgacggccgctatacgcaccatggagattggagaggtgcgaccacgggaacaaaatgagcgagatcaaccttcttcctcaactatggtgcatcccccaactcaagacgatgaacaggttcatcaacaggaggcgtgtgaccaagggggagcacaagatgatcatgtgatggaggaagaagcacaaccggcacctccaacccaagttcgagcgatgattcaaaggaatcaccccgtcgatcaaattctgggtgatattagcaagggagtaactactcgatctcgattagttaatttttgtgagcattactcctttgtctcttctattgagcctttcagggtagaagaggccttgctagatccggactgggtgttggccatgcaagaggaactcaataacttcaagaggaatgaagtttggacactggtgcctcgtcctaagcagaatgttgtgggaaccaagtgggtgttccgcaacaaacaagacgagcacggagtggtgacaaggaacaaggctcgacttgtggcaaaaggttatgcccaagtcgcaggtttggactttgaggagacttttgctcctgtggctaggctagagtccattcgtatcttgctagcatatgccgctcaccattctttcaggttgtaccaaatggatgtggagagcgctttcctcaatgggccgatcaaggaggaggtgtacgtggagcaaccccctggcttcgaggatgaacggtaccctgaccacgtgtgtaagctctctaaggcgctctatggactcaagcaagccccaagagcatggtatgaatgccttagagatttcttaattgctaatgctttcaaggttgggaaagccgatccaactcttttcactaagacttgtaacggtgatctttttgtgtgtcaaatttatgtcgacgacataatatttggttctactaataaaaagtcttgtgaagagtttagcagggtgatgacgcagaaattcgagatgtcgatgatgggcgagttgaactacttccttgggttccaagtgaagcaactcaaggatggcaccttcatctctcaaacgaagtacacgcaagacttgctgaagcggtttgggatgaaagacgccaagcccgcaaagactccgatggggaccgacggacacacagacctcaacaaaggaggtaagtccgttgatcaaaaggcataccggtcaatgatagggtctttactttatttatgtgctagtagaccggatattatgctaagcgtatgcatgtgtgctagatttcaatccgatcctaaggagtgtcacttagtggcagtgaagcgaatccttagatatttagttgctacgccttacttcggactctggtatccaaaggggtctacctttgacctaattggatatttagattccgactatgctggatgtaaggccgagtatgttgccgcaggacagtgttgcgcgcaactactttggatgaggcaaaccctcagggactttggctacaatctgagcaaagtcccactcctatgtgataatgagagtgctatccgcatggcggaaaatcctgttgagcacagccgcaccaagcacatagacatccgacatcactttttgagagaccaccagcaaaagggtgatatcgaagtgtttcatgttagctccgagaaccagctagccgatatctttaccaagcctctagatgagaagaccttttgcaggttgcgtagtgagctaaatgtagcacccaaaatcctattttag

SEQ ID NO: 4845 - DNA, 2015 bp, Zea mays
  Clone ID: TF_ZM5054.C3.o1.fg
atggatcctaaggggaagggaattgtgatcaacgacaaggagaaggagtccttcgtcaacgagccaagggatgacaagtccaatgactcgggctcgggccacaagcgaaaagatgggaagaagaagaagacaagacgcatcaaggagatcgtctactacgacagcgatgagtcctcttcttcccaaaaggacgacgaccacgacaaacaaaagacggttaactcaaacttttcttttgattattcgcgcattccatatagctcaaatgctcatttgctccccattccacttggcaagcctcctcactttgatggagagaactacggattttggagtcacaaaatgcgtactcacctattttctctccatccaagcatttgggagattgtggaaagtggaatgaaatttgatagctcggatagcccttcattcattaatgagcaaatccataagaatgcacaagctaccactgttcttctagcttcattgtgcagggatgaatataacaaagtgagcggcttggataacgccaaacagatctgggacaccctcaagatctctcatgaagggaatgacgttaccttgctcaccaaaacggagttggtggaaggcgagcttggacggttcgcgatgataaggggcgaggagccaactcagacatacaaccggctcaagacccttatcaacaaaataaggagctacggaagcacgcgatggacggaccacgacgtcgtccgactaatgctcaggtcctttaccgttcttgatcctcatttggtgaataatattcgtgagaatcccaggtacaccaaaatgtcgcccgaagaagtcctaggaaaattcgtcagcgggcgaatgatgatcaaggaggcaaggtatgtggacgacgccttgaatggaccaatcaacgagccgcaaccttttgctctcaaagccacaaggaacaaggaggcgctacccagcaaggtggcgcaaattgaggcggccggtcttaatgatgaagaaatggccctcattatcaagagattcaagacggtgctaaagggtcgcaatggacagccgagcaagactaagaccaaggggaagcgatcatgcttcaaatgcggtaagcttggtcattttattgctaactgtcctgataatgaaagtgaccaggaaaaggggaacaaaagggagaagaagaagcactacaaaaaggccaagggcgaggcgcatataggcaaggagtgggattcggattgctcctcctccgactccgacaatgagggactcgccgccaccgccttcaacaaatcggccctcttccccaacgagcgtcacacgtgtctcatggctaaggagaagaaagtaagtactcgaaactctacttatgcttcttctagtggtgatgattctagtgacgatgatgaaatagactattctagtttatttaaaggtctagatagaattacgattggcaaaattaatgaattaattgatgcattgaatgagaaggataaactcttagagaaacaagaggatttattgtatgaagagcatgataaatttttagaagctcaaaaatctcatgctctagaagttaaaagaaatgaaatgcttacttgtgaattatcttcatgccatgagacaatttcaaaattaaagagcattaacgatgagttgaatgctaagatagaaatagctagtaaatcaacaacttgtgtagaaaatgttgttatttgcaatagatgtaaagactttgatattgatgcttgtagtgaacacatagcttctattgcaaagttaaataatgaagtggctagtcttaatgcccaacttaagactagcaaaagtgaatttgataagttaaaatttgcaagggatgcttacacaataggaagacatccctcaattaaggatgggcttggcttcaagagggaagccaagaacttaacaacccataagactcccatctccaccaaggagaaagggaaggctcctatggctaatagtgttaagaagaatcatgctttcat

SEQ ID NO: 4846 - DNA, 1110 bp, Zea mays
  Clone ID: TF_ZM5059.C8.o5.fg
atggatcctaaggggaagggaatcgtgatcaacgacaaagagaaggaatccttcgtcaacgagccgaaggacgacaagcctaccgactccggctcgggcaatagacggaaggaagggaagaagaagaagacgaggcgcatcaaggagatcgtctactacgacgacaacgatgagtctacttcttcccaaaaggatgacgaccacaacgactacgagagagggaaaccggaggcaaggtacgtggacgacgcattgaatggtccaatcaacgagcctcaaccccttgctctcaaggcaacaagaagcaaggaggcgctacctagcaaggtggcacaatttgaggcagccggacttaatgatgaagagatggccctcatcatcaagagattcaagacggcgctaaagggtcacaaggggcagccaagcaagaccaagacaaaggggaagcgctcatgcttcaaatgtggtaagcttggtcattttattgctaactgtcccgacaatgatagtgaccaagaaaaaggaaacaagagggagaagaagaaaaattacaagaaggccaagggcgaggcacatatcggaaaggagtgggattcggattgctcctcctccgactctgacaatgaaggactcgctgccactgccttcaacaagtcatccctcttccccaacgagcatcacacatgcctcatggcgaaagagaagaaggggagaagaagatgttcacctcctacgtcaaaaatgaggatccccatgattcaattatattcggtgatgggaaccaaggcaaggataagtctgaaacccaagggaccctcaaacgcttcctcaggagagctcaaaatgaaggtgaagaagataagaagcgacaacaggtctgaattcaagaatcttcaagtggaggagtttcttgaggaggaggggatcaagcacgagttctccgctccctacacacctcagcaaaatggtgtggtagagaggaagaacaggacactcattgatatggcaaggactatgctaggagaattcaagacccccgagtgtttttggtcggaagccgtgaacacggcttgccacgccatcaacagggttgtcggggaccataattag

SEQ ID NO: 4847 - DNA, 1834 bp, Zea mays
  Clone ID: TF_ZM5066.C9.o1.fg
atggatcctaagggaaaggggatggtggtcgacaacaacgagaaggagtctatcttcaacgagccaaagaatgacaagtctaccgacttgggctcaagccacaagcgcaaagatgggaagaagaagaagaagacgaggcgcatcaaggagatcgtctactacgacagcgacgaatcctcttcttcccaaaaggacgacgacaacgactacaggaagacggtcaattcgaacttttcatttgattattctcgtattccacatagttcgaattcgcatttgctttccattcctcttggcaaacctccacactttgatggggaggactacggattttggagtcacaaaatgcgtagacatttattctctctccatccaagcatatgggagattgtagagaatggaatgaaatttgatagctcggatagccccatgtttattaatgaacagattcataaaaatgcacaagctactactgtgttgctagcctccttgtgcagggacgagtacaacaaggtgagcggcttggacaacgccaagcagatctgggacaccctcaagatttctcatgagggaaatgacgttaccttgcttaccaaaacggagttggtggaggccgagcttggacggttcgcgatgataaggggcgaggagccaactcaaacatacaaccggctcaagacccttattaacaaaataaggagctacggaagcacgcgatggacggaccacgacgtcgtccgactaatgctaaggtcctttaccattcttgatcctcatttggtgaataatattcgtgagaatcccaggtacaccaaaatgtcgcccgaagaagtcctaggaaaattcgtcagcgggcgaatgatgattaaggaagcaaggtacgtggacgacgccctgaatggaccaatcaatgagccgcaacctcttgctctcaaagccacaagaagcaaggaggcgctacctagcaaggtggcacaaattgaagcggccggacttaatgatgaagagatggccctcatcatcaaaagattcaagacgtcgcttaagggtcgcaagggacagtcaagcaagaccaaagccaaggggaaacgctcatgcttcaaatgcggtaagcttggtcattttattgctaactgtcccgataatgatagtgatcaggacgaagggaataaaagggagaagaagaagcattacaagaaggccaagggcgaggcacatatcggaaaggagtgggattcagattgctcctcctccgactccgaccatgaaggactcgccgccaccgccttcaacaagtcatctctcttccccaacgagcgtcacacatgcctgatggcaagagagaagaaggtgagtactcgagactccacttatgcttcctctagtgataatgagtctagtgatgatgatgacatagactattcatgcttattcaagggattagatagatctaagatagacaagataaatgaactcattgatgcattgaatgagaaggataaactcttagagaaacaagaggatttattgtatgaagagcatgataaatttgtagaagctcaaagatctcatgctctagaagttaaaagaaatgaaatgctttcttgtgaattatcttcttgccatgagacaatttctaaattaaggagcattaatgatgatatgaatgctaagttagaaatagcaaataaatctaattcttgtgtagaacatgttatgagttgcactaggtgtaaagattttgatattgatgcttgtagtgaacatctagtttcaatttccaaattaaaagatgaattggctagtcttaatgcccaacttaagactagcaaaa

SEQ ID NO: 4848 - DNA, 4494 bp, Zea mays
  Clone ID: TF_ZmC119_1202
ttaaggagatctagggaaaaggtggggaaaatctatacgaagctcttcttctctttcccaagttgcttcatcttcactgtggtggctccattgcactttgcacatctttataaccttattcctcgtaactcgagtcaatgtatccaaaatcttgatggggtactcagcatacgtcaggtcatcttgaacattaaggtcttccgttggtaattgctcctcaggtaccctgagacatttcttcagctgagatacatgaaatacatcatgaacatccgcaagatgatctggtaactccaattgatatgcaacctcacccactcgctttaagatcaagaagggtccaataaagcgaggggacagctttcctttaactttaaatctcctcataccccggagtggcgacaccttcaaatagacctgatcaccctccttaaactccagtagccttctcctattatcagcatagctcttttgcctggattgtgcaatcctcaaattttctcttatcattcgaacttgttcttctgcctcttgaataagttcaggcccaaagaactgtctttcaccagtttgatcccaatacagtggtgtcctgcatcttctgccatatagagcctcaaacggtgacatcttcaaactggcttggtagctattattataagaaaactcagcatatggtaagctcttctcccaactgccaccatgcttgagagcacaagctcttaacatatcctccagcacttgattagtcctctctgtctgtccatcagtctggggatggtaggctgaactaaaattcaactttgtatccaagctctcatgcaacttcttccaaaaccgagaagtaaactgtgatcctcgatcagacacgatctttttaggtactccatgtaaacaaactatccgagtcatatacaattctgctagcttggctcccgtgtaattagtcctcaccggtataaaatgagccacttttgtcaatctgtccacaattacccaaatagagtcatatcctgctggagtgcggggtagtccaacaataaaatccataccaatttcctcccatttccactcgggtatcttcagtgggtgcaataatccggctggcctctggtgttcagctttaactctttggcatacatcgcacatagccacatgtgcagccacatctctctttagtccataccaccaatacttttgcttcaaatcctgatacatcttagtactcccaggatggatagaataaactgaatcatgtgcctccttcaatatagtttcccgaagactttcaatgtcgggaacacagatccgattcttgaaccaaatcgtgccttgttcatcctccgtgaactccgggcctctaccctctgttatcagatccttgatctcctggattttggcatcaccaatctgacctttacgaatttcttgctccaaggtaggttccaatttaatagtcactccttccgtatgtgtaacaattcccaggttgagtctctcaaaatcttttgctaattcatcaggtagctgggcaacgaaagcggagtgaacatgttctttccgactcaaggcatctgcaaccaaattcgccttgcctgggtgataatgaatctccaagtcataatccttaatgagctccaaccaacggcgttgcctcaggttgagatccttctgagtgaatatatacttcaaactcttatggtccgtgtatacttggcacttagttcccataatgtagtgtctccaaatcttaagtgcatgcacaacggcagccaactctaagtcatgggtggggtagttcaattcatgcttcctcaactgacgagatgcataggcaatcacatgaccatcttgcataagcacacatccaagtccttggccacatgcatcacagtaaatgtcaaatcccttctgcagatctggcataatcaatactggtggagacatcaatctctccttcaattgatcaaagctctcttggcacttctcatcccacttgaattctcttcctttctccaaaagcgatgtcatgggcttagcaatcttagaaaatccttcaataaatctccgataatatcctgcgagtcccaagaaactccgaatctccgtaactgtagtgggcactctccactccattatctcctttactttagcaggatccacagctattcctccattagaaataatatgaccaaggaatggcaccctgtcaatccaaaactcgcacttgctgaacttagcatagagttgattatctcgtaacttctgtagcaccaaccttagatgttgctcatgatcactttcattcttagaatagataagaatatcgtcgataaacaccacgacgaatctgtccaaatactccataaacactttgttcatcaaattcatgaaataagctggtgcattggttaatccaaatgacataacagtaaactcatataatccgtatcgagtcgagaaagccgtcttgggaatatccgatggtctaatcttcatctgatggtaacccgatcggagatcaatcttcgagaataccctagcacctctcatctgatcaaataaatcctcaatacggggcaacgggtacttgttcttcactgtaacatcattaagagatctataatccacacacatccgctgcgatccatccttcttctgtacaaacagaaccggtgctccccaaggtgaggaactcggacgaatgtaaccagcctcttgtaactccgtcaactgcttcttcagttccttcaactcctctacggacatcctatatggccgtttagaaataggggcggttccaggtaagagatcaataacaaactcgacttctctctcaggtggcatccctggtaactcttctggaaagacatctggaaaatctctaaccacccggatgttatcaccaacaaactcctcaggcataaagaacattgcacgcatggatgaggaggttactgcaatattaacttgaaacctttctcccttagtagtagtgagttctacggtacctctaccacatgctataacggcctttgcctttcttagccatgacataccaaggatcaaatctatactgcttgactccaaaattatagcagtagctccaaattctctacccataatggttaatgtcaatctacgtgtcatttgattcgcctcaacaggccctttaggtgtaattactatcatgggttttctcatatttagcagtggtatttcatttgtgttggcatatctagcagacatgaatgaatgtgtagcaccagaatcaaataatattgttgcaggaattgcattaacataaaacataccaatcacgaggtcaccaccatcaggagtatcatcaatgctgacttgattcaccctggctatagaatatcccttgccaggggtctgttgcttgttctgagctggagtagtagcaatcctctgtgggcagacatttgcataatgaccagtcttcccacacttgaaacattgagtgcccggactctgtcctgcaaactttgtcggggtgcccgtgggagtagcctgtcgaggaggtggagtcctcagtggtgattgctgaactgggcgtggtcctccgggtcgagtcggtgtaccctgtggtgaactgtagcgaggacgaacactgctgctaccctgtccttgtgagatggccttcctcttcaaatcacccagttgaatacgcttgtgttcaatagcaagagccttatcaagtagcctctgaaatgatggaaaggtgtgtgcaaccagtgcatactgcaagggtccattaagcccttcaatgaagtgctcctgtttcctctcatcctcagcaacttcctccggagcatatctcgacaactgaatgaatttgtctctgtactcgctgaccgacatgttgccttgcttcaatgacagaaactccttcttcttgatctttatcataccagctggaatatggtagttcctgaattgtgtgctgaactctgcccaagtaatagtatcagcagcatcatgggcagcagtataagaatcccaccagtcagcagcaggacccgtcagacgtccagaagcatataaaaccttctcccggtcagtgcattgtgcaatattcagcatcttctcaattgacttcagccaatcatctgcgtccagtggatcaggtgagctagcgaatgtaggtggcttatgactcataaactcccggtgcttatcacgaggtggaaccggtggtggtggtggaggcaatggcacttgttgctgctgttgctgttgttgcatttgctgttgcagctgctgctgttgcgccctcctttcttggcgtatctcatctctctcctggcgcaactcctggcgtatgtcttctctttcctgacgcatctcttggcgttcttgctgcatctgggcacgcatatcagccatagtgtccgccatttgctgcatcaccgccatctgagcagcaaccagcgggtcaactccgcctggtggaggattagggggattcat

SEQ ID NO: 4849 - DNA, 4485 bp, Zea mays
  Clone ID: TF_ZmC119_1226
ttaagatgaactagagaaaaggtggggaaaatctatacgaagctcttcttctctttcccaagttgcttcatcttcactgtggtgactccattggactttgcacatctttatcaccttatttcttgtaactcgagtcaatgtatccaaaatcttgatcgggtactccgtgtaagtcaaatcaccttgaacactgagctcttccaagggtaactgttcctcgggaacacggagacacttcttaagttgagacacatggaacacattatgcacatccgatagactatccggtaactcgagttggtatgccatctccccaactcttctaaagatcaagaatggtccaatatagcgaggggacaatttgcccttaactttaaatctcctcattccacgcagtggtgacaccttgaggtacacataatctccttcttcaaattccagtggcctccttctattatcagcatagctcttttgcctggtttgagccactctcaaattctctcgaattatacgaacttgttcttctgcttcttgaatcagttcaggcccaaagaactgtctttctccagtctgatcccaatatagaggagtcctgcacttcctcccatataaagcttcaaaaggtgacatcttcagactggcctgatagctattattataagagaactcagcataaggtagacttttatcccaactccctccatgctgaagggcacatgctctcaacatatcttccaatacttgattagtcctttcggtctgtccatcagtctgagggtgataagctgtactgaaattcaacttcgtgctcatgttctcatgaaagcttctccaaaatcttgaggtaaactgcgaacctcgatcagacacgatcttctttggtactccatgtaaacacacaatccgagccatatataactctgctagctgagaacctttataagtagtcttgacaggaataaagtgagccactttagtcaatctatccacaatcacccatattgcatcatatcctttctgggtgcgaggcaatccagtaatgaaatccataccaatctcttcccatttccactcgggtatcttcagtggatgcagtagtccagctggcctctggtgttcagccttgactctttgacatacatcacacatagccacatgtgcagccacatctctcttcaatccataccaccaatactttcgcttcaaatcctggtacatcttggtactaccaggatgaatagagtaatctgaatcatgggcctctttcaatatagtctctcgaaggcttttaatatcaggaacacacattctatccttgaaccatacagtgccttgctcatcttccgtgaactccggaactcgaccttcagtaatcagatccttaatctcttttattttagcatcaccaatttgtcctttgcggatctcctgctccaaagtaggttccacatcaatagtaactccttcagtatgagcaactatccccaggttaagtctcctgaaatcctcaacaatctcatcgggtagctgggcaacaatagctgaatgaacatgctccttgcgactcaaggcatctgcaaccaaattggccttgcccgggtgatagtgaatctccaaatcataatcctttataagctccaaccaacgacgttgcctaaggttgagatccttctgagtgaatatatacttcaaactcttatgatccgtatatacttggcacttagtccccataatgtagtgtctccaaatcttaagtgcatgcacaactgctgctagttccaagtcatgagtggggtagttcagttcatgcttccgcaactgacgagatgcataggcaatcacatgtccttcttgcatgagcacacatccaagtccttggccacatgcatcacaataaatgtcaaaccccttctgtaggtctggcataaccaataccggtggcgacatcaacctcttcttcaatagatcaaagctgtcttgacacttctcgtcccacttaaattcttttcccttctccaaaagtgaagtcataggcttagcaatcttagaaaatccttcaataaatctccgataatagcctgctaatcccaagaaactccgaatctcagtaactgtagtgggtactctccactccattatctccttaactttagcaggatccactgctattcctccattagaaataatatgaccaagaaatggcacttcgccaatccaaaactcgcacttgctgaacttagcatagagttgattatctcgtagcttctgtagcaccatcctcagatgttcctcgtgatcactttcactctgagaataaataagaatatcgtcgatgaataccacgacgaatctgtccaaatactccataaacaccttgttcattaagttcataaaataggctggtgcgttagtcaatccaaacgacataactgtgaactcatataatccatatctagtcgagaaagccgtcttgggaatatccgatggtctaatcctcatctgatgataaccggatcggagatcaatcttcgagaatactcttgcacccctcatctgatcaaataaatcctcaatacggggcaacggatacttgttcttcaccgtaacatcattaagagatctataatccacacacatccgttgcgatccatccttcttctgtacaaacaagaccggtgctccccaaggtgaggaactcggacgaatgtacccagcctcttgtaactcagttaactgcttcttaagttccttcaactcctctacggacatcctatatggccgtttagaaataggggcggttccaggtaagaggtcaataacaaactcaacttctctatcaggtggcatccctggtaactcctctggaaagacatccggaaaatctctaaccacccggatattgtcaccaacaaactcctcaggcataaagaacattgcacgcatagatgaggatgttactgcaatattaacttgaaacctttctcctttagtagtagtgagttctacggtacctctaccacatgctataacggcctttgcctttcttagccatgacataccaaggatcaaatctatactgcttgactccaatattatggcagtagctccaaattctctacccataatggttaatgtcaatctacgtgtcatttggttcgcctcaacaggccctttaggtgtaattactatcaggggttttctcatgtttagcagtggtatttcatttgtgttggcatatctagcagacatgaatgaatgtgtagcaccagaatcaaataatatggttgcaggaattgcattaacataaaacataccaagtacgaggtcccctccatccggagtagcatcaacgctgacttgattaactttggcaatagaatatcccttgccagttcctggagtttgctgcttgttctgaactggagtagtagcaatcctctgtgggcagacatttgcataatgacccatcttcccacacttgaaacattgagtgcccggactctgtcctgcaaacttcgtcggggtgccagtaggggtagcctgccgaggaggtggagtcctcagtggtgattgcggaactgggcgtggtcctccgggtcgagtcggtgtaccctgtggtgagctatagcgaggacgaacaatgctgcttccttgtgcttgagatattgcctttctcttcaaatctcccagctgaacacgcttgtgttcaatagcaagtgccttatccaacagtctctgaaatgatggaaatgtgtgtgccactagagcatactgcaggggtccattaagtccttcaataaaatgctcctgcttcctctcgtcttcagcaacttcttcaggggcatatctggataactgaataaacttgtcgcggtactcgctgactgacatacccccttgcttcagcgatagaaattccttcttcttgatctttatcatcccagctggaatatggtagttcctgaactgtgtactgaactctgcccaagtaatagtatccgcagcatcatgggcagcagtataagaatcccaccagtccgcagcaggaccagtcagacgtcccgaagcatataaaaccttctcccgatcagtgcactgtgcaatattcagcatcttctcaacagacttcagccaatcatccgcgtccagtggatcaggtgagctagcgaatgtaggtggcttatgactcatgaactctctatgcttgtcccggggtggaactggtggtggtggtggaggcagtggcacttgttgctgctgttgctgttgttgttgctgctgttgtgccctcctttcctggcgtatctcatcccgctcctggcgcaactcttgccgtatatcttctctttcctgacgcatctcttggcgttcctgctgcatctgggcacgcatatcagccatagtgtctgccatttgctgcatcaccgccatctgagcagcaaccagtgggtcaactccgcctggtggaggattaggaggatccat

SEQ ID NO: 4850 - DNA, 2805 bp, Zea mays
  Clone ID: TF_ZmC10872_3
atgtcgggagaactcgccaagaaggagatggagaccggcaacaagcccgctacaagccacgggaaggcttcatcgggagagtcccgcaacaaggagaagaagagggagaagaagaaggagaagaagacttcttctcacaagtcgcatcggagtggcgacaaaataaagaagatgaggaaggtggtctactacgagaccgacacttcatcaccttctaccttcggctccgacgcgccctccataacttctaagcgccatgagcgcaagaagtttagtaagatccccttacattatcctcatacctctagacatactccattactttccgttccattaggcaaaccgccaacctttgacggtgaagattatgctaggtggagtgatttaatgaaatttcatctaacctcactccacaaaagtatatggaatgttgttgagtttggagcacaggaaccatccgtaggggatgaggattatgatgaggacgaggtggcccaaatcgagcacttcaactcccaagccacaaccatactcctcgcctctctaagtagggaggagtacaacaaggtgcaaggactaaaaaacgccaaggaagtttgggacgtgctcaaaacggcgcacgagggtgatgaactcaccaagatcaccaagcgggaaacgatcgagggggagctcggtcgcttccgtcttcgccaaggggaggagccacaagatatgtacaaccggctcaagaccttggtgaatcaagtgcgcaacctcgggagcaaaaagtgggatgaccacgaggtggttaaggttattctaagatcacttattttccttaaccccactcaagtacaattaattcgtggcaacccaagatatacactaatgacccccgaggaagtaatcgagaattttgtgagctttgaatttatgatcaagggctcacgaaagatcaacgagcttgacggcccctccatgtccgaagcacaaccggtcgcattcaaggcgacggaggagaagaaggaggagtctacatcgagtagaacacccatcgacgcctccaagctcgacaacgaggaaatggtgctcgtcatcaagagcttccaccaaatcctcaaacaaaggagggggaaagattacaagccccgctccaagaaggtttgctacaaatgtggtaagcccggtcactttatagctaaatgtcctatttctagtgacagtgacaggggtgacgacaagaaggggagaagaaaggagaagaagagatactacaagaagaagggcggcgatacccatgtttgtcgcgagtgggactccgacgaaagctctagcgactcctcctccgacgaggacgccgccaacatcgccgtcaccaagggacttctctttcccaacgtcggccacaagtgcctcatggcaaaggacggcaaaaagaagaaggttaaatctaaatcctccactagatatgaatcctctagtgatgaaaatgctagtgatgaggaagataacttgcgcactctttttgccaacttaaacatgcaacaaaaggagaaattaaatgaactaataagtgccatccatgagaaggatgatctcttggactcccaagaggacttcctaatcaaggaaaacaaaaagcatgttaaagttaaaaatacttatgctctagaagttgaaaaatgtgaaaaattatctagtgagctaagcacttgccatgagactatagacaaccttagaaatgagaattctaatttgttagctaaggttgattctattgcttgtaatgtttcaattcccaatcttagaaatgataatgatgatttgcttgctaagattgaagaattgaacatatcttttgttagccttagaaaggaaaatgaaaaattaattgctaaggctaaagattttgatgtttgcaatgttacaatttccgatcttagagataagaatgatatattgcgtgctaagattgttgaacttaattcttgcaaaccctctacatctatcgtagaacataccactatttgtactacatgtagagatgttaacattgatgctatacatgatcacatggctttaattaaacaacaaaatgatcatatagctaaattagatgctaaaattgccgagcatgacttagagaacgaaaaatttaaatttgctagaagcatgctctatagagggagacgccccggcattaaggatggcattggcttccaacagggaggcaatgtcaaacttaatgcccctcctaagaaattgtctaattttgttaagggcaaggctcccatgcctcaggataacgagggttacattttgtaccctgtcggctatcccgaggacaaaattaggaaaattcattctaggaagtctcactctggccctaaccatgctttcatgtataagggtgagacatctagctctaggcaaccaacccgtgctaagttgcctaagaagaaaattcctaatgcatcaaatgaacatagtttttcattcaaaacttttgatgcatcttatgttttgactaacaaatctggcaaggtttatgcatccgggggctcaagttggattatcgacagcgggtgcacaaaccacatgataggggagaagaagatgttctcctcctatgagaaaaaccaagatccccaacgagctatcacattcggggatggaaatcaaggtttggtcaaaggattgggtaaaattgctatatctcctggtcactggatgttaccaaatacccttcccactaaacttatgcaacacaagaaatggaatagagagagaaaatattgcaaaatctggcaacacctcccttga

SEQ ID NO: 4851 - DNA, 3089 bp, Zea mays
  Clone ID: TF_ZmC119_1222
gccagcaggtcgactccctcttgcatcaagacatagcctaaactactgcctgatgcgtcacaatacacatcaaaaggcttttcaatgtccggttgagctaatatcggagcagaggtcaataacaccttcagctgctcgaaggcttcattgcatcttgaggaccaattaaattttgtgtggttcttcaataaacttgtgattggcttcacaagcttggaaaaatccgggataaatcggcggtaataaccagccaatccaaggaaacttcggacttgatgtacagtggttggcggtttccactctaaaatatccttgaccttaatgggatcaactgcaatccctttggcagacaatacgtgtcccaaaaattgaatttcctccagccagaacgcgcacttgctgaacttggcatatagctgatgttcccttaggcgcgtcaatacaatccgtaaatgctgagcatggtcttcttcattcttggaatatatcaagatatcatcaatgaagactaccacgaacttgtccaattcaggcatgaataccgagttcattagataagtgaaatgggcaggagcatttgtgagcccgaaagacattaccaaatattcaaacaatccatatcgcgtagtaaacgcggtcttcggtatatcctcgggccgaatacggatttgatgatagcccgacctgagatcaattttggaaaataccctcgccccagtcaattgatcaaataagatgtcgatccggggaagggggtacttattcttgatggtgacctcatttaggggtcgataatccacgcacattctcaaggtttgatccttcttcttaacaaaaatggcgggacaaccccacggggacgagcttggccggataaatcccttattcagcaggtcttgtaattgaatcttcaattcgggctttagctcaattacgaattctacatctctttcacggggcagtccaggcaaatcttccggaaatacatctagaaactcacatactaccggaatgttcttgatctccggtacaatggcttcatagactctaccagaagttttggccggattggttgcggggagagtcaaaagaatctcttcttggttataactcaacctgacggttctgaattcagtgttgagaattgccttgtgttgagttaaccaattcatacccaagattacatctatatcctggcctttcagaacgatcatattagcaggaaagttccgtccggccattgttactggcactccataggccacttctttagtataaatatgtcccccaggtgaatgaattttaaatccctcctttgattcatggtatgcaatatgatgttgttccacaaacttcttgctaataaatgtatgtgaagcaccagaatcaaaaagaataattgctgggtgactggctacgggaaacgtacccatcatcaccggctctccctctggtgtggtagccacttgcatataatatactcgccccgttttcttggtattcttgcccgaagtacttcccttgcctggagctgaatttcccgatccttgcgaagcattggattgattttgcctaggatatgggcagtccttgatgaagtgtcccgacttgccgcaattaaagcacccagttgaagaactaggcaaggcaggaaatcgagtgcctggggcacccggctgctttggggtagtgggggcattgttggggcggataataataggctgcttgaagggaaatgaaggtggacgagaaaaagggcgattttgggttgagggtcgaatcacaaaccgtggtttcttcgcctggccctgattaggccgctcaccaccgaatcccttagtctttccagaatttccatatttggcctccacagataaggctgtgctgacagcctttccataagtaagatcaatacatgcagccatttttcgctgcattcggtcgttcagtcctctcataaaacaattcttctttttcaaatccgtattcacctgatcaattgcgtattgtgacaggtgattgaacttgttgagatattgattaacagtatctcctccttgcttcagtttcatgaactcttcttgtttcatgtgcagcactccctcaggaatgtaatgctcgcggaatgctgctttgaactcgttccatgtaatttgatggttgtccggctggatggccacaaagttcccccaccaagtactggcaggtcctcggagttgctgtgctgcaaacagtggcttctgtacttccgaacagcgtagaaggccaaacttctgctctatgacccgtatccattcgtcggcctcgagcgggtcttctgctttgatgaagagaggcggacgagtctcagagaaatctagataagtggtctcacggggaccttgttggaatcctcttcccgcttgttgttgaagctgttgctgacccgccatcaccctcaggaagcgggtgttgtcggctgtggcgttcaccaaggtagcaattgcctcggcaagcgtgggtggaacgggaggcggattcggggtaacgtcccgacccccggatgttccggatgcatcctgtgcacgagtcctcaaagaaggaggaggctcaaaaaggtctaactccccacccagcgcacgtcccgcaacgtgagatggtccagcttctgcctcagcaggtggtgcaggctcacttgggtgtagttgtgagtataatacatggacttcctcgtgcaacgtgttgcagtaaacctgcaggtcatcaacagtcgagctaagttctttaattcgggcctgagcccttgcttccttagcacacattagcaaacgagactgcacagcccagtcaagtgctaagtctcgatcagcgagttgatcctgcaagtgtcggatgtcccttctcagttcgttgattctatcaccgtcagcgacccaagcatcagtcctttgttgcagtgctgcctgaagtcgactcacacgagcttcaaggtctccgatggggtcgttactcccactactgctgctttcatgtcggggagccaattgatgccgaggcaccccaattggtcccgtggacttgcgtgccgttagcctggtacgtggcggcat

SEQ ID NO: 4852 - DNA, 4833 bp, Zea mays
  Clone ID: TF_ZmC119_1413
tcaatcaggaactcgaaggcacttcttcaattgagatacatggaacacattatgcactgtagacaatgtttcgggtagttgaagtcggtatgctactagtctgtatctttcaagaataagaaacaggccaatatactcgggtgccagttttccttttaccccgaaacggttcacacctttcattggtgatactttcaagtatacatgatcattgacttgaaagaccaaaggttgacgtcgcttatccgcataattcttttgccgagcttgtgcctctttcaagttgtgtatgattcgttggactttttctttcgtctctttaaccatgttgggcctgaaaaaccatctttcttcgggttcagaccaatttaagggtgtccgacatcgtcgtccatacagtgcttcgaatggtgccatctttatgctctcttgatagctattattataagaaaattctgccaatggcagacattcatcccatttttgcggaaactccaggacacatgcctgcaacatgtcttcaagtatttgatttactctctcagtttgtccacttgtttgaggatgatatgccgagctgtggagtagtttagtacccaagaatttctgcagttcactccaaaatttggatacaaattgtggtccacgaaccgacactatcgtttttggaactccgtgcaaactaagaatacaagcaatgtataactgggcatagacaacaactgggtgatcggtcttgacgggcagaaaatgtgctatcttggtaagtcgatcaacaatcacccaaatagagtcatatccttttgcggtcctgggcaatcccacaatgaagtccatgcttatgtcttcccatttccatgttggtattgataatgactgcaatggaccggcagttttcatgtgtatggccttgacacgtctacaagtgtcacatttagccacatagcgtgcaatttcaatcttcatttttgtccaccagtaatgttgctttaagtcttgatacatcttagtgcttccgggatgaatagaataacgactaagatgtgcctcatccagaatttgctggcggagctcttcgttctttggcacaactatgcggtttttaaaccatatcacaccttgatcgtcttctttgaaacacttggctgttccagcccttatcttttctcgtatgtgcttcatacccagattatccttttgagcatcaattattctttgcaaaatgattgactcaagccttaactgatttagagttccttgttgaatgatccccaggtttagcttttccatttcttgacataaagtgttctcgaagatctttgccataagacagtggcaggaagtcttacgactcaatgcatctgccaccacattggccttgcctgggtgataatggatctccaattcatagtctttaatgagctcaagccatcgtctttgcctcatatttaactctgactgggtgaagatgtacttcaaacttttatgatctgtatatatgtgacagatatttcccagcagatagtgacgccaaatctttagggcatgaaccacagcagctaactccagatcatgagttggatagtgctcctcatgtcggcgcaactgccttgaagcatacgcaatcactcggccctcttgcatcagtacacagccgagcccactgccagatgcatcacaatacacatcgaaaggcttagtgatgtccggttgagctaataccggagcagtggtcaatagtgtcttcagttgctcaaaggcttcattgcacttagaagaccaattgaacttagtatcattcttcaacaaacttgtgattggcttcacaagcttagaaaaatctgatatgaatctgcggtaatacccagctagtccaagaaaactccggacttggtgaacagtcgttggaggtttccactccagaatatctttgaccttgctaggatctaccgcaattcctttagctgataatacgtgccccaaaaattgaatttcttccagccagaatgcgcacttactgaacttggcataaagctgatgttccctgaggcgcgtcaatacaatccgtaaatgctgagcatggtcttcttcattcttggaatatatcaagatatcatcaatgaagactaccacgaacttgtccaattcaggcatgaataccgagttcattaaataagtgaaatgggcaggagcatttgtgagcccaaaagacattaccaagtattcaaataatccataccgcgtagtaaacgcggtcttcggtatatcctcgggccgaatacggatctgatgatagcccgacctgagatcaattttagaaaataccctcgccccagttagttgatcaaataagatgtcgattcttggaagagggtacttattcttgatggtgacctcatttaggggtcgataatccacgcacattctcaaggtttgatccttcttcttaacaaagatggcgggacaaccccacggggacgagcttggccggataaatcccttattcagtaggtcttgtaattgaatcttcaattctgccaattcattagggggcatacggtacgatcttcgggaaatcggagccgtaccgggctttagctcaatcacaaattctacatctctttcagggggcagtccaggcaaatcttccggaaatacatctggaaactcacatactaccggaatgttcttgatctccggtaccatagcttcatagactctaccagaagctttggctggattggttgcggggagagtcaagagaatctcttcttggttataactcaacctgacagttctgaattcagtgttgaggattgccttgtattgggttaaccagttcatacccaagattacatctatatcctggcctttcagaacgatcatattagcaggaaagttccgtccggccattgttactggcactccataggccacttctttagtataaatgtgtcccccaggtgaatgaattttaaatccctcttttgattcatgacatgcaatatgatgttgctccacaaatgtcttgctaatgaaggtatgcgaagcaccagaatcaaaaagaattattgcagggtgactggccacagggaacgtacccatcatcaccggctctccctccggtgtggtagccacttgcgtataatatactcgccccgttttcctggtattcttgcccgaagtacttcccttgcctggagctgaatttcccgatccttgctgattattagtctgattttgccttggatagggacaatctttaataaaatgcccagatttgccacagttaaaacatccagttgaagaacttggcagcgcagggaatcgagtgcctggggcacccgactgttttggggtagtgggggcattgttggggcggataataataggttgcttgaagggaaatgaaggtggacgagaaaaagggcgattttggtttgagggtcgaatcacaaaccgtggtttcttcgcctggccctgattaggccgatcaccactgaatcccttagtctttccagaatttgcatatttggcctccacagataaggctgtgctgacagcctttccataagtaagatcaatacatgcagccatttttcgctgcatccggtcgttcagtcctctcataaaacaattcctctttttcaaatccgtattcacctgatcaattgcgtactgtgacaggtgattgaacttgttgagatactgattaacagtatctcccccttgcttcagtttcataaactcttcttgtttcatgtgcagcactccctcaggaatgtaatgctcgcggaatgctgctttgaactcgttccatgtaatttgatggttgtccggctggatggccacaaagttcccccaccaagtactggcaggtcctcggagttgctgtgctgcaaacagtggcttctgtacttccgaacagcgtagaaggccaaacttctgctctatgacccgtatccattcgtcggcctctaaaggatcttctgctttgacgaatagaggcggacgagtctcagagaaatccagataagtggtctcacggggaccttgttgaaatcctcttcctgcttgttgttgaagctgttgctgacccgccatctccctcaggaagcgggtgttgtcggctgtggcgttcaccaaggcagcaattgcctcggcaagcgtgggtggaacgggaggtggattcggggtaacgtcccgacccccagatgttccggctgcatcctgtccacgagtcctagtcggcatctgaggcaaaaacatttgaaataaacataatgtgccagagaaaaccttccattttacattactcaaagaaggaggaggctcaaaaaggtctaactccccacccagcgcacgtcccgcaacgtgagatggtccagcttgtgcctcagcaggtggtgcaggctcacttgggtgtagttgtgagtataatatatggacttcctcgtgcaaagtgttgcagtaaacctgcaggttatcaacagtcgagctaagttctttaactcgggcctgagcccttgcttccttagcacacattagcaaacgagactgaacggcccagtcaagagctaagtctcgatcagcgagttgatcctgcaagtgtcggatgtcccttcgtagttcgttgattcgatcaccgtcagcgacccaagcatcagtcctatgttgaagtgctgcttgaagtcgactcacacgagcttcaaggtctccgatcgggtcgttgcttccactgctgctactttcatgttggggagccaattgatgccgaggcaccccaattggtcccgtagacttgcgtgccgttagcctggtacgtggcggcat

SEQ ID NO: 4853 - DNA, 3461 bp, Zea mays
  unsure (1)..(3461): unsure at all n locations
  Clone ID: TF_ZmC119_1839
tcacctattcaccccccctctaggtgctctcaggaacgtacccatcatcaccggttcgccttccggtgttgtggccacttgagtgtaatagatccgtctcgttttccttgtatttttggccgcggtattggttgccgcatttcccttagaactcccagaactctgttgattatttgattgattctgcctcgggtatggacagtccttaataaaatgcccggactttccacagttgaagcagcctgttgatgagctgggaagagcagggaaacgagtgccaggggcacccgactgatttgtagaggtgggggcagcggtaggacggatgaaaactggttgcttgaaagggaaggagggtgggtgcaatgaagaacaattcggattgaaaggctggatgaccaacttttgtctcttttcaggcccctggttgggcctgtcgcctccaattccctttgatttgccggagcctgcatatttagcttctactgccagcgccgtgctgacagcccttccataggtaagatcgatgcaggtggccatctttctttgcatccgatcattcaagcctctcatgaagcaattcctcttctttatatccgtgttgacttgatcgattgcatattggtataagtggttgaatttattgagatactgggtgacagtatccccgccttgcttcagcttcataaactcctcctgcttcatatggaggactccttcaggtatataatgctctctgaaggccaacttgaactcatcccatgtgatttgatgaccagccggctgcaagttatcaacagctgagctaagctcttccacgcaagctcgagctctagcttcctttgcccaggctggtgaacgagagttcacagcccagtcgagcgctagatcctgatccactagctggtcttgcaggtggtggatttctgttctcaattcattggttctttcgccatccgcaacccatagatcgttcctatgtcggagttctgcacgaagctgatcaacttgtgcttctagatccccaatcggatcgttactaccactgctgctaccatgggaggcaaaaactcctccccaaatagatagtaaaaagtttttaatggggggccttccctccgcagccctagtcttggtgctcgtctttgggtaccacctttgaacagaagcaacaaaaatttgccgcttcctcaccgagagcacagatacaccaccgtccagcctcttgccacggagggtacactctactctcgccaccgctccacgcccatttcgtgttatcttattctggccttagtctgcccgaggcaaggcttacccatgacgaggcatgtgaccagttaaagggtccgcggttagcacaccntacatacacgttcaatctttaatcaacctgggtagaacatcactcgttcctaacccaagtcccgatttaagtatttccacccttaggattgtttgttttccttaggatgaaaagagcatcatagggaactttgcagtaagatcccaccatgctcccaatgaaaatataaccttgcaggtagaagtcatctttcctcaggataacccctgagcaaggccttaacgcaaaagacaacctctatccacaagatctaagcagggctaagcatttttgtaaatcaaattttgatacttccaaagaagtatctataacaggtatggatatcaaggaaggaaatgcatcaaagggtttcaagcaactcctataaacctaatgcacatttcactagacttaaagtgtgcgaaaagtatttaaaaacacaaggaaggggttgcatgcaccggggcttgcctgagtaacactaggttagtgtttgttaggcgaccacttgacgatcatccttatcctagcacttgatcaggcaggttcgttcatcagcatctccatgcagagtagtccgcgcttggggtcgacttggctcgtcttccgcattacgcgatcaattatcgtacctaattgagatgcacgatgcacatgaatgcatataaacaggaatattacaaacctaaatagtactatgcgatagcgaattaactcctagcggcgaggcgttgaacaatttcatacagagatacntaattatcgtcgtacaattaagcgcaataattacgcttcttgaacttatcgcaaacatcacgaacaacaaactatacacatgaaatacaattagcctaatcacaatttatcagttaattaattaaattctgaactaatcccttgccttataaattatactacatctttataaatgattaaaatattttatcattacacatgcctactaaaattctactcggttcactaattcagctaagtgaccagaatagcgaaataattcgccatagctgaatctggctcgataatcgcaagaactgcgaagtcgacgagagtttcgtgacttacgcaatttatcgagcaacttaatgagtatcacactagtacattaatttatttaatgattgaaccattctaaacaatttatcagcttagcgtttccacatcagacacgaatccgcgagatcggtagcgattttccgatccaggcaatttatcgagcgcttagggaatatcgcgctgctagcttcgtcttcacccgattcttgggttttcttgctgacgcgcggaacgacgatggtcctaattcaggcgttttgtcgagcaccaagcaagcattgcacggcatgatgacgtcgaggcgaggatcaaagatggacaaccggcacggcgcgatggcagcttgagccttgaacagagacgagaccgacggcgaggttgaagctggacggggagccgatggcgctggggcaagggggtgaggccgagcgccatggggcaagctggaggacgagctcgggcgtggagatagcagaggggcgagcaccacggccaggcgagcttcggcaagcgcagctggacgcgagcagaggcagggattcgagctgggggctggggcgagttcgccagggagcagaggaaatccgagcgcaaggaggaagaaacagctgggctgggcgcgcagagaaatcggctggggagtgagggggaagcagctgcgtgcagcgaggaggttccaggggcgcgcccgcgcggcaccagggggaagacgagggcgcagggagccatggagaggacgccgagaatctgagttgaggctggacaccgcgaggaagaagacgtgggcgcttggcttcggaacttctgccgacgagcagggtttttaacagtgcggcggctgagatcttttccaaagataagatcggctggaaaaatccaagctgcgggcggctggagtggaggataggatcgcgctggatttttccacggatccagaacggcggccggatgaagatgagcagaaaaatcacggcagaaaaaatcaaagggagggaagagagcccctgtaccaacacatgaacgaggaattttccccttttta

SEQ ID NO: 4854 - DNA, 4977 bp, Zea mays
  Clone ID: TF_ZmC119_769
ttacaatttacatgaggctaggaagcctgggaaattcttatctaaaaagtcttgggtttcccatgtagcctcatcttccgaatgttggttccactgtatcttgtagaacttgagagtctttcttcgggtgaccctgtccttttgatccagaactcgaagaggatgttccgagtatgttaagtctggttccaggacaacatcagtcacttcaacggttcgatcaggaacccgaagacatttctttaattgtgacacgtggaacacattgtgcacagcagacaatgtttcggggagctgaagtcgatacgccactggcccatatctttctagaataagaaaaggaccaatatatcgtggtgcaagttttcctttaactccgaaacgcgatacgcccttcattggtgagaccttcaagtagacatagtctccttccaggaaatataagggcattcgccgtttgtctgcataactcttttgccgtgcttgagctttcttcatattatggataattctctgaaccttttcttcaacctctttcaccatatcaggtctaaagaagtatctttctccaggttcagaccaatttaacggagttcgacaccgacgtccatataaagcttcaaagggtgccatcttgatactttcttggtaactgttattgtatgaaaattccgctaggggtaaacattcatcccattttggtgagaaatccaggacacatgcccgcagcatatcttctagtatttggttcaccctctcagtctgcccactggtttgaggatgataagccgaactgtggagtaatttagtacccaaggagttgtgaagtgcttcccaaaacttggctacaaattggggtccacgatccgacacaatggtcttcggaacaccatgcagactaagaatacgagcaatgtacaattgggcgtagacagtaaccggggaatttgtcttgaccggcagaaagtgagcaatctttgtaagtcgatcaacaatcacccagatagagtcatatccttttgcggtcctgggcaatcccacaatgaagtccatgcttatgtcttcccatttccatgttggtattgataatgactgcaatggaccggcagttttcatgtgtatggccttgacacgtctgcaggtgtcgcatttagccacatagcgtgcaatttcaatcttcatttttgtccaccagtaatgttgctttaagtcttgatacatcttagtgcttccgggatgaatagaataacgactaagatgtgcctcatccagaatttgctggcggagctcttcgttctttggcacaactatgcggtttttaaaccatatcacaccttgatcgtcttctttgaaacacttggctgttccagcccttatcttttctcgtatgtgcttcatacccagattatccttttgagcatcaattattctttgcaaaatgattgactcaagccttaactgatttagagtcccttgttgaatgatccccaggtttagcttttccatttcttgacacaaagtgttctcggaagtcttcgccataagacagtggcaggcaaccttacggctcagtgcatctgccaccacattggccttgcccgggtgataatggatctccagttcgtagtctttaatgagctcaagccatcgtctttgcctcatatttaactctgactgggtgaagatgtacttcaaacttttatgatctgtatatatatgacagatatttcccagcagatagtgacgccaaatctttagggcatgaaccacagcagctaactccagatcatgagttggatagtgctcctcatgtcggcgtaactgccttgaagcatacgcaatcactcggccctcttgcatcagtacacagccgagcccactgcccgatgcatcacaatatacgtcaaaaggtttagtgatgtccggttgagctaataccggagcagtggtcaatagtgtcttcagttgttcaaaggcttcattgcacttagaagaccaattgaacttagtatcattcttcaacaaacttgtgattggcttcacaagcttagaaaaatctggtatgaatctgcggtaatacccagctagtccaagaaaactccggacttggtgaacagttgttgggggtttccattccagaatatctttgaccttgctaggatctaccgcaattcctttagctgataatacgtgccccaaaaattgaatttcttccagccagaatgcgcacttactgaacttggcataaagctgatgttccctgaggcgcgtcaatacaatccgtaaatgctgagcatggtcctcttcattcttagaatatattaagatatcgtcgatgaagactaccacgaatttgtccaactcgggcatgaacaccgagttcattaaataagtgaaatgggcaggagcatttgtgagcccgaaagacatcaccaagtattcaaacaatccataccgcgtagtgaatgcggtcttcggtatatcctcgggccgaatacggatctgatgatagcccgacctgagatcaattttagaaaataccctcgccccagttagttgatcaaataagatgtcgattcttggaagagggtacttattcttgatggtgacctcattcaggggccgatagtccacgcacatacgcaaggtttgatccttcttcttcacaaagatggcgggacaaccccacggggacgagcttggccggataaatcccttattcagtagatcttgcaattgagtcttcagttccgccaattcatttgggggcatacggtacgatctgcgggagatgggagccgtaccgggctttagctcaattacgaattctacatctctttcagggggcaatccaggcaaatcttccggaaatacatctggaaactcacatactaccggaatgttcttgatctccggtacaatggcttcatagactctaccagaagttttggccggattggttgcggggagagtcaagagaatctcttcttggttataactcaacctgacggttctgaattcagtgttgaggattgccttgtattgggttaaccaattcattcccaaaattacatctatatcctggccctttagaacaatcatgttagcaggaaagttccgtccggccattattacgggcactccataggccacttctttagtaaaaatatgtcccccaggtgaatgaattttaaatccctcctttgattcatggtatgcaatatgatgttgttccacaaacttcttgctaataaatgtatgtgaagcaccagaatcaaaaagaattattgcagggtgactggccacagggaacgtacccatcatcaccggctctccctccggtgtggtagccacttgcgtataatatactcgccccgttttcttggtattcttgcccgaagtacttcccttgcctggagctgaatttcccgatccttgcgaagcattagattgattttgccttggatagggacaatctttaataaaatgcccagatttgccacagttaaaacatccagttgaagaacttggcaaggcagggaatcgagtgcctggggcacccggctgttttggggtagtgggagtattattggggcggataataataggctgcttgaagggaaatgaaggtggacgagaaaaagggcgattttggtttgagggtcgaatcacaaaccgtggcttcttcgcctggccctgattaggccgctcaccaccgaatcccttagtctttccggaatttgcatatttggcctccacagataaggctgtgctgacagcctttccataagtaagatcaatacatgcagccatttttcgctgcatccggtcgttcagtcctctcataaaacaattcttctttttcaaatccgtatttacctgatcaattgcgtactgtgacaggtgattgaacttgttgagatactgattaacagtatctcccccttgcttcagtttcataaactcttcttgtttcatgtgcagcactccctcaggaatgtaatgctcatggaatgctgctttgaactcgttccatgtaatttgatggttgtctggctggatggccacaaagttcccccaccaagtactggcaggtcctcggagttgctgtgctgcaaatagtggcttctgtacttccgaacagcgtagaaggccaaacttctgctctatgacccgtatccattcgtcggcctcgagcgggtcttctgctttgatgaagagaggcggacgagtctcggagaaatccagataagtggtctcacggggaccttgttggaatcctcttcctgcttgttggtgaagctgttgctgacccgccatctccctcaggaagcgggtgttgtcggctgtggcgtttaccaaggcagcaattgcctcggcaagcgtgggtggaacgggaggcggattcggggtaacgtcccgacccccggatgttccggctgcatcctgtgcacgagtcctcaaggaaggaggaggctcaaaaaggtctaactccccacccagcgcacgtcccgcaacgtgagatggtccagcttctgcctcagcaggtggtgcaggctcacttgggtgtagttgtgagtataatatatggacttcctcgtgcaaagtgttgcagtaaacctgcaggttatcaacagtcgagctaagttctttaactcgggcctgagcccttgcttccttagcacacattagcaaacgagactggacggcccagtcaagagctaagtctcgatcagcgagttgatcctgcagatgtcggatgtcccttcgtagttcgttgattctatcaccgtcagcgacccaagcatcagtcctatgttgaagtgctgcttgaagtcgactcacacgagcttcaaggtctccgatcgggtcgttgcttccactgctgctactttcatgtcggggagccaattgatgccgaggcaccccaattggtcccgtggacttgcgtgccgttagcctggtacgtggcggcat

SEQ ID NO: 4855 - DNA, 5433 bp, Zea mays
  unsure (1)..(5433): unsure at all n locations
  Clone ID: TF_ZmC119_785
ttacaatttacaagaggctaagaagcctgggaaattcttattcaaaaagtcttgggtttcccatgtagcctcatcttccgaatgctggttccactgtatcttgtagaacttgagagtctttcttcgggtgaccctgtccttttgatccagaactcgaataggatgctccgagtatgttaaatctggttccaggacaacatcagtcacttcaacggttcgatcaggaacccgaagacacttcttcagttgtgacacgtggaatacattatgcacagcagacaatgtttcggggagctgaagtcgatacgccactagcccatatctttccagaataagaaaaggaccaatatatcgtggtgcaagttttcctttaactccgaaacgcgatacgcccttcattggtgagaccttcaagtagacatagtctccttccaggaaatataagggcattcgccgtttgtctgcataactcttttgtcgtgcttgagctttcttcatattatggataattctctgaaccttttcttcaacctctttcaccatatcaggtctaaagaagtatctttctccaggttcagaccaatttagcggagtccgacaccgtcgtccatataaggcttcaaagggtgccatcttgatactttcttggtagctattattatatgaaaactccgctaaaggtagacattcatcccattttagtgagaaatccaggacacatgcccgtagcatatcttcaagtatttggttcaccctctcagtctgcccactggtttgaggatgataagccgaactgtggagtaatttagtacccaaggatttatgaagttcttcccaaaacttggatacgaattgaggtccacgatccgacactatggtctttggaacaccatgcagactaagaatacgagcaatgtacaattgggcgtagacagtcaccggggaatttgtcttgaccggcagaaagtgagcaatctttgtaagtcgatcaacaatcacccaaatagagtcatatccttttgcggtcctgggcaatcccacaatgaagtccatgcttatgtcttcccatttccatgttggtattgataatgactgcaatggaccggcagttttcatgtgtatggccttgacacgtctgcaggtatcgcatttagccacatagcgtgcaatttcaatcttcatttttgtccaccagtaatgttgctttaaatcttggtacatcttagtgcttccgggatgaatagaataacgactaagatgtgcctcatccagaatttgctggcggagctcttcgttctttggcacaactatgcggtttttaaaccatatcacaccttgatcgtcttctttgaaacacttggctgttccagcccttatcttttctcgtatgtgcttcatacccagattatccttttgagcatcaattattctttgcaaaatgattgactcaagccttaactgatttagagttccttgttgaatgatccccaggtttagcttttccatttcttgacataaagtgttctcgaagatctttgccataagacagtggcaggaagtcttacgactcaatgcatctgccaccacattggccttgcctgggtgataatggatctccagttcatagtctttgatgagctcaagccatcgtctttgcctcatatttaactctgactgggtgaagatgtacttcaaacttttatgatctgtatatatatgacagatatttcccagcagatagtgacgccaaatctttagggcatgaaccacagcagctaactccagatcatgagttggatagtgctcctcatgtcggcgtaactgccttgaagcatacgcaatcactcggccctcttgcatcagtacacagccgagcccactgcccgatgcatcacaatatacgtcaaaaggtttagtgatgtccggttgagctaataccggagcagtggtcaatagtgtcttcaattgctcaaaggcttcattgcacttagaagaccaattgaacttgatgtcatttttcaacaaacttgtgattggcttcacaagcttagagaaatctggtatgaatctgcgataatacccagctagtccaagaaaactccggacttggtgaacagttgttgggggtttccactccagaatatctttgaccttgctaggatctaccgcaattccttttgctgataatacgtgccccaaaaattgaatttcttccagccagaacgcgcacttgctgaacttggcatatagctggtgttcccttaggcgcgtcaatacaatccgtaaatgctgagcatggtcttcttcattcttggaatatatcaagatatcatcaatgaagactaccacgaacttgtccaattcaggcatgaatactgagttcattagataagtgaaatgggcaggagcatttgtgagcccgaaagacattaccaagtattcaaacaatccatatcgcgtagtaaacgcggtcttcggtatatcctcgggccgaatacggatctgatgatagcccgacctgagatcaattttagaaaataccctctccccagttagttgatcaaataagatgtcgattcttggaagagggtacttattcttgatggtgacctcatttaggggccgatagtccacgcacatgcgcaaggtttgatccttcttcttcacaaagatggcgggacaaccccacggggacgagcttggccggataaatcccttattcagcaggtcttgtaattgaatcttcaattctgccagttcattagggggcatacggtacgatcttcgggaaatcggagccgtaccgggctttagctcaatcacaaattctacctctctttcagggggtagtccaggcaaatcttccggaaatacatctggaaactcacatactaccggaatgttcttgatctccggtacaatggcttcatagactctaccagaagctttggctggattggttgcggggagagtcaagaaaatctcttcttggttatagctcaacctgacggttctgagttcagtgttgaggattgccttatattgggttagccaattcattcccaaaattacatctatatcctggcccttcagaacaatcatgttagcaggaaagttctgtccgaccattgttactggcactccataggccacttctttagtataaatgtgtcccccaggtgaatgaattttaaatccctcctttgattcatggtatgcaatatgatgttgttccacaaacttcttgctaataaatgtatgtgaagcaccagaatcaaaaagaataattgctgggtgactggccacgggaaacgtacccatcatcaccggctctccctccggtgtggtagccacttgcgtataatatactcgccccgttttcttggtattcttgcccgaagtacttcccttgcctggagctgaatttcccgatccttgcgaagcattagattgattttgccttggatagggacaatctttaataaaatgcccagatttgccacagttaaaacatccagttgaagaacttggcaaggcagggaatcgagtgcctggggcacccggctgttttggggtagtgggggcattgttggggcggataataataggctgcttgaagggaaatgaaggtggacgagaaaaagggcgattttgggttgagggtcgaatcacaaaccgtggtttcttcgcctggccctgattaggccgctcaccaccgaaccccttagtctttccagaatttgcatatttggcctccacagataaggctgtgctgacagcctttccataagtaagatcaatacatgcagccatttttcgctgcatccggtcgttcagtcctctcataaaacaattcttctttttcaaatccgtattcacctgatcaattgcgtactgtgacaggtgattgaacttgttgagatactgattaacagtatctcccccttgcttcagtttcataaactcttcttgtttcatgtgcagcactccctcggggatgtaatgttcacggaaagctgctttgaactcgttccatgtaatttgatggttgtccggctggatggccacaaagttcccccaccaagtactggcaggtcctcggagttgctgtgctgcaaatagtggcttctgtacttccgaacagcgtagaaggccaaacttctgctctatgacccgtatccattcgtcggcctcgagcgggtcttctgctttgatgaagagaggcggacgagtctcagagaaatccagataagtggtctcacggggaccttgttggaatcctcttcctgcttgttgttgaagctgttgctgacccgccatctccctcaggaagcgggtgttgtcggctgtggcgttcaccaaggcagcaattgcctcggcaagcgtgggtggaacgggaggcggattcggggtaacgtcccgacccccggatgttcctgctgcatcctgtccacgagtcctggtcggcatctgtggcaaaatcatttgaagtaaacataatgtgccagagaaaaccttccattttacattactcaaggaaggaggaggctcaaaaaggtctaactccccacccagcgcacgtcccgcaacgtgagatggtccagcttctgcctcagcaggtggtgcaggctcacttgggtgtagttgtgagtataatatatggacttcctcgtgcaaagtgttgcagtaaacctgcaggttatcaacagtcgagctaagttcattaactcgggcctgagcccttgcttccttagcacacattagcaaacgagactgtacagcccaatcaagtgctaagtctcgatcagcgagttgatcctgcagatgtcggatgtcccttcgtagttcgttgattctatcaccgtcagcgacccaagcatcagtcctatgttgaagtgctgcttgaagtcgactcacacgagcttcaaggtctccaatcgggtcgttgcttccactgctgctactttcatgtcggggagccaattgatgccgaggcaccccaattggtcccgtggacttgcgtgccgttagcctggtacgtggcggcatcttttctaaggaggaaaatgttattagtaagattcttagcatgatgcatgtataattacagaatcagccttagtcgattcaaccttctatatgttgcactcttcctatctggtctttaagatagactcttcagaatacttaggtaagaagagaaaagaatttttttttttttttagttaagacttttgaaaattcttttgaagatgcctcataatatctgcaaaaaagggctacgctccgataccagctgtgacggtacctcccaagtaattaggcccaccttcagttgtccttgtctaacggacatcaaacaaccctgtaggtgcccctgaactacttgacaagttaggtatccttcctttccttaccaggaacgtatancac

SEQ ID NO: 4856 - DNA, 1660 bp, Zea mays
  Clone ID: TF_ZmC119_832
ccatcatcaccggctctccctccggtgtggtagccacttgcgtataatatactcgccccgttttcttggtattcttgcccgaagtacttcccttgcctggagctgaatttcccgatccttgcgaagcattagattgattttgccttggatagggacaatctttaataaaatgcccagatttgccacagttaaaacatccagttgaagaacttggcaaggcagggaatcgagtgcctggggcacccggctgttttggggtagtgggggcattgttggggcggataataataggctgcttgaagggaaatgaaggtggacgagaaaaagggcgattttggtttgagggtcgaatcacaaaccgtggtttcttcgcctggccctgattaggccgctcaccaccgaatcccttagtctttccagaatttgcatatttggcctccacagataaggctgtgctgacagcctttccataagtaagatcaatacatgcagccatttttcgctgcatccggtcgttcagtcctctcataaaacaattcttctttttcaaatccgtattcacctgatcaattgcgtactgtgacaggtgattgaacttgttgagatactgattaacagtatctcccccttgcttcagtttcataaactcctcttgtttcatgtgcagcactccttcagggatgtaatgctcgcggaaagctgctttgaactcgttccatgtaatttgatggttgtccggctggatggccacaaagtttccccaccaggtactggcaggtcctcggagttgctgtgctgcaaacagtggcttctgtacttccgaacagcgtagaaggccaaacttctgctctatgacccgtatccattcgtcggcctcgagcgggtcttctgctttgatgaagagaggcggacgagtctcagagaaatctagataagtggtctcacagggaccttgttggaatcctcttcctgcttgttgttgaagctgttgctgacccgccatctccctcaggaagcgggtgttgtcggctgtggcgttcaccaaggcagcaattgcctcggcaagcgtgggtggaacgggaggcggattcggggtaacgtcccgacccccggatgttccggctgcatcctgtgcacgagtcctcaaggaaggaggaggctcaaaaaggtctaactccccacccagcgcacgtcccgcaacgtgagatggtccagcttctgcctcagcaggtggtgcaagctcacttgggtgtagttgtgagtataatatatggacttcctcgtgcaaagtattgcagtaaacctgcaggttatcaacagtcgagctaagttctttaactcgggcctgagcccttgcttccttagcacacattagcaaacgagactgcacggcccagtcaagtgctaagtctcgatcagcgagttgatcctgcaagtgtcggatgtcccttcgcagttcgttgattctatcaccatcagcgacccaagcatcagtcctatgttgaagtgctgcttgaagtcgactcacacgagcttcaaggtctccgatcgggtcgttgcttccactgctgctactttcatgtcggggagccaattgatgccgaggcaccccaattggtcccgtggacttgcgtgccgttagcctggtacgtggcggcat

SEQ ID NO: 4857 - DNA, 3022 bp, Zea mays
  Clone ID: TF_ZmC3310_2
atgtcggaagaacacgccaagaaggagatggaaaccggcgaaaagcccactacaagccacgggaaggcttcatcggaagagtcccgcaaaatgcgataatgtgagcagtagaaagactcaaatggagaacattctggtcactttaggtctccttatcctgttcggttaccaagaatgatggcatatttgttagtcccactgcttgcagcgacgaagcaggtaaaggagggtatatgtttccacaagatgggaaaccagatcatatatgcaggaactatgaaatactgaatgataaaaatgtctcatttaggtaccatccataggggatgaggattatgatgaggacaaggtggcccaaatcgagcacttcaactcccaagctacaaccatactcctcgcctctctaagtagggaggagtacaacaaggtgcaaggattaaaaagcgccaaggaagtttgggacgtgctcaagaccgcgcacgaaggtgatgaactaaccaagatcaccaagcgggaaacgatcgagggggagctcggtcactttcgtcttcgccaaggggaggagcctcaagacatgtacaaccggctcaaaaccttggtgaatcaagtgcgcaacctcgggagcaagaaatgggatgaccacgaggtggttaaggttattttaagatcacttattttccttaaccttactcaagtccaattaattcgtggcaatcctagatacacactaatgactcatgaggaagtaatcggaaattttgtgagctttgagtttatgattaaaggctcaaggaagatcaacgagcttgacggcccctccacgtccgaagcacaatcggtcgcatttaaggcgacggaggagaagaaggaggagtctacaccgagtagaacacccatcgacgcctccaagctcgacaacgaggaaatggcgcttgtcatcaaaagctttcgccaaatcctcaagcaaaggagggggaaagactacaaaccccgctccaagaaggtttgctacaagtgtggtaagcccggtcactttatagcaaaatgtcctatttctagtgacaggggcgacgacaagaaggggagaagaaaggagaagaagaaatactacaagaagaagggcggcaatgcccatgtttgtcgcgagtgggactccgacgaaagctctagcgactccttcgacgacgaggatgccgccaacatcgccatcaccaagggacttctcttccccaacgtcggccacaagtgcctcatggcaaaggacggcaaaaagaagaaggttaaatccaaatcctccactagatatgagtcttctagcgataataatgctagtgatgaggaagataatttgcgtactctttttgccaacttaaacatgcaacaaaaagagaaattaaatgaattgattagtgctatccatgagaaggatgatctcttggactcccaagaggacttccttattaaagaaaacaagaagcatgttaaggttaaaaatgcttattctctagaagtagaaaagtgcgaaaaattatctaggaaatgtgcccttgggtcatttctaagtattttggtgattgagtgccaacacaagtgcttaaatgtgaatctatgcccatggatgaacaaagtgcaaatcaagagtaaaggtgctctcacaattcccaatcttagaaatgataatgataatttgattgctaagattgaagaattaaacattactcttgctagccttaggaatgaaaatgaaaaattgcttgctaaggctaaagaacttgatgtttgcaatgctaccatttccgaccttagaagtaaaaatgacatgttacatgctaaggttgaagaattaaatgtttacaaaccctctacatctatcgttagtcatgtctctatttgcactagatgtagagatgttaatattgatgctatccatgatcacattgctatgattaaacaacaaaaagatcatatagcaaaattagatgctaaaattgccgagcatgaactagagaatgaaaaatttaaatttgctcgtagtatgctttatagtgggagacgtcctggcatcaaggatgtcattggcttccaacagggaggaaatgtcaagcttaatgcccctaaaagattgtctaattttgttaagggcaaggctcccatgcctcaggataacgagggctatattttatatcctgctggttatcctgaggataagattaggagaattcatgctaaaaagactcatcctatttctcaccatgcttttatttataagaatgaggcttctagctctaggcgttctacccatgttaaaatgcctaaaaagaaatctcctattgcatcaaataatcataacatttcatttaagacttttgatgcttcttatgtgcttactaacaaataaggcaaagtagttgccaaatatgttgggggcaaacacaaggggtcaaagacttgtgtttgggtacccaaagttcttgtttctaatgccaaaggacccaaaaccatttgggtttatgcatccgggggctcaagttggataatcgacagcgggtgcacaaaccacatgacaggggagaagaagatgttctcctcctacgagaaaaacgaagatccccaaagagcgatcacattcggggatggaaatcaaagtttggaaggattggataaaattgctatatctcctgaccattctatttctaatgtttttcttgtagattcattagattacaatttgctttccgtttctcaattatgtcaaatgggctacaactgtctttttactgatgtaggtgtcactgtctttagaagaagtgatgattcaatagcatttaagggagtgttagaaggtcagctatacttagtagattttgatagagctaaactcgacacttgcttaattgctaagactagtccatgttggctctggcaccgccgactagtccatgttgggatgaagaatcttcataagcttctaaagggagagcacattttaggattaacaaatgttcattttgagaaagacagg

SEQ ID NO: 4858 - DNA, 1647 bp, Zea mays
  Clone ID: TF_ZmC7465_22
atgtcgggagatcacgccaagaaggagatggagaccggcgaaaagcccactacaagccacgggagcacttcatcggaagagtcccgcaccaagaggaaggagaagaaggactcctcgaaacggaaggagaaaaagtcttcctcctctcaccacaaagagaagaaggaaaaatcttcttcccacaagccgcatcggaaaggcgacaagcacaagaggatgaggaaggtggtctactacgagaccgacacttcatcaacatcgacctccgactccgatgcgccctccgtcacttctaagcgccaagagcgcaagaagtatagggatgagaactatgatgaggatgaggtggcccaaatcgagcacttcaactctcaagcaacaacaatactcctagcctctttgagtagagaagagtataacaaagttcaagggttgaagaatgcaaaggagatttgggatttactcaagaccgcgcatgaaggtgatgagctcaccaagatcaccaagcgggaaacgatcgagggggagctcggtcggttccggcttcgcaaaggggaggagccacaacacatgtacaaccggctcaagacattggtgaatcaagtgcgcaacctcgggagcgtaaagtgggatgaccacgaggtggttaaggttattctaagatctcttattttccttaaccctactcaagttcaattaattcgtggtaatcctagatatactaaaatgacccccgaggaagttatcgggaattttgtaagttttgagtgcatgatcgaaggctcgaggaagatcaacgagcttgatgatgccaccacatccgaagctcaacccgttgcattcaaggcaacggaggagaagaaggaggagtctacaccaagtcgacaaccaatagacgcctccaagctcgacaatgaggaaatggcgctcgtcatcaagagcttccgccaaatcctcaagcaaaggagggggaaggattacaagtcccgctccaagaaggtttgctacaaatgtggtaagcccggtcattttattgctaaatgtcccatatctagtgacagtgaccgaggcgacgacaagaaggggagaagaaaggagaagaagagatactacaagaagaagggtggcgatgcccatatttgtcgggagtgggattccgacgaaagctcaagcgactcctccgacgacgaggacgccgccaacatcgccgtcaccaagggactcctctttcccaacgtcggccacaagtgcctcatggcaaaggacggcaaacggaagaagtgagagagctccaccgactcctcctccgacgaggacgccgccaacatcgctgtcaccaagggactcctcttccccaacgtcggccacaagtgcctcatggcaaaggacggcaaaaggaagaaggtaaaatcaagatcctccactaaatatgaaacctctagtgatgaggatgatgctagcaatgaggaggataacttgcgcgttctttttgccaaccttaacatggaacagaaggaaaaactaaatgagctaattagtgccatccatgaaaaggatgacctcttggactcccaagaggacttcctaatcaaagaaaataaaaagcatgttaaggttaaaaatgcttatgctctagagtcgacctgc

SEQ ID NO: 4859 - DNA, 1029 bp, Zea mays
  Clone ID: TF_ZmC7465_26
atggagaccggcgacaagcccactacaagccacgggagcacttcatcggaagagtcccgcaccaagaggaaggagaagaagaagagctcctccaacaaagggaaggagaagaaatcttcttctcaccacaaagagaagaaggaaaaatcttcttcccacaagccgcatcggagtggggacaagcacaagagaatgaggaaagtggtctactacgagaccgacacttcatcaacatcgacctccggctccgatgcgccctccgtaacttctaaacgccaagagcgggatgaggattatgatacggacgaagtggcccaaatcgagcacttcaactcccaagccacaaccatactcctcgcctctttaagcaaggaggaatacaacaaagtgcaagggttgaagaatgcaaaggagatttgggaccttctcaagaccgcgcacgagggtgatgaactcaccaagatcaccaagcgggaaacgatcgagggggagctcggtcgcttccgtcttcgccaaggggaggagccacaagatatgtacaaccggctcaaaaccttggtgaaccaagagcgcaacctcgggagcaaaaagtgggacgaccatgaggtggttaaggttattctaagagctctcatttttcttaaccccactcaagttcaattaattcgtggtaatcctagatacccactaatgacccccgaggaagttatcgagaattttgtgagctttgaatgtatgattaaaggatcaaagaagatcaacgagcttgacgaaccctccacgtccgaggcgcaaccagtggccttcaaggcgacggaggaaaagaaggaggagtctacaccaagtagacaaccaattgacgcctccaagctcgacaatgaggagatggctttaatcatcaaaagctttcgccaaatcctcaagcaacggagggggaaggactacaaaccccgctccaagaaagtgtgttacaaatgtggtaagcccggtcatttcattgcaaaatgtcctatatctagtgacagttga

SEQ ID NO: 4860 - DNA, 2691 bp, Zea mays
  Clone ID: TF_ZmC951_305
ttagtgggcccaggggatatctatcccccacactttggcattagaaacaagaactttgggtacccaaacacaagtcttggagcccttgtgtttgcccccaacaaacttggcaactaccttgccggatttgtcagtcaaaacataagatgcatcaaaagtcttaaatgaaatgctatgatcatttgatgcattaggagttttcttcttaggcaacttggcacgggttggttgcctagagctagatgtctcacccttatacataaaagcatgattagggccagagtgagacttcctagaatgagttctcctaattttgctctcgggataaccggcagggtacaaaatgtaaccctcgttatcctgaggcatgggagctttgcccttaacaaagttagacaagttcttagggggagcattaagtttgacattgtctcccctttggaagccaatgccatccttaatgccagggcgcctcccattatagagcatacttctagcaaatttaaacttttcattctctaagttatgctcggcaattttagcatctaataatgctatatgatcattttgttgtttaattaaagtcatgtgatcatgaatagcattgatatcaacatctctacatctagtacaaatagaagtgtgctcaacggtagatgtagagggtttgcaagattttagttctacaaccttagcatgcaacatatcattcttagttctaaggtcggaaatagtagtattgcaaacatcaaaatctttagccttagcaatcaaattttcattttctactctaaggctatcaagagaatcattcaattccttaatcttagcaagcaaatcatcattatcatttctaagatttggaattgagacatcacatacatgagaatcaaccttagcaattaatctagcattttcatttctaaggttgtcaatagtgtcatggcatgtgcttagcttactagataatttgttacatttttctacctctagagcataagcatttttaaccttaacatgctttttgttttccttaataaggaagtcctcttgagagtccaagagatcatccttctcatgaatagcactaatcaattcatttaatttttccttttgttgcatgttaagatcggcaaaaagggtacgcaaattattctcctcatcactagcattatcatcactagaggattcatatttagtagaggatttagatttaaccttcttccttttgccgtcctttgccatgaggcacttgtggccgatgttggggaagaggagtcccttggtgacggcgatgttggcggcgtcctcgtcggaagaggactcggtggagctctcgtcggagtcccactcccggcaaacatgggcatcgccgcccttcttcttgtagtacttcttcttttctctcctctttcccttcttgtcgttgcccctgtcactgtcactagatataggacattttgcaataaaatgaccgggcttaccacatttgtagcacactttcttggagcgaggtttgtagtccttccccctccgttgcttgaggatttggcgaaagcttttgatgattaaagccatttcctcattgtcgagcttggaggcgtcaattggttgtctactcggtgtagactcctccttcttctcctccgtcgccttaaatgccactggttgtgcttcggacgtggagggttcgtcaagctcgttgatcttctttgatcccttgatcatatattcaaagctcacaaaattcccgattacttcctcgggagtcattagtgtgtatctaggattaccacgaattaattgaacttgagtggggttaaggaaaataagagatcttagaataaccttaaccacctcgtggtcatcccacttcttactcccgaggttgcgcacttggttcaccaaggttttgagccggttgtacataccttgtggctcctccccttggcgaagacgaaagcgaccgagctccccctcgatcgtttcccgcttggtgatcttggtgagttcatcaccctcgtgcgcggtcttgagaaggtcccaaatttcctttgcattcttcaacccttgcaccttgttgtattcctccttgcttagagaggcgaggagtatggttgtagcttgggagttgatgtgctcgatttgggccacttcgtccgtatcataatcctcatcccctatggatggtacctgtgctccaaactcaacaacattccatatacttttgtggagtgaggttagatgaaatttcattaaatcactccacctagcataatcttcgccatcaaaagttggcggtttgcctaatggaacggaaagtaatggagtatgtctagatgtacgagaatagtgtgaggggatcttactgaacttcttgcgctcttggcgcttagaagttacggacggcgcatcggagtcggaggtcgatgttgatgaagtgtcggtctcgtagtagaccaccttcctcatcctcttgtgcttgtcgcctttccgatgcgacttgtgggaagaagatttttccttcttctctttgtggcgtgaggaagaagatcttttctccttccgtttggaggagtccttcttcttctccttcctcttggtgcgggactcttccgatgaagtgctcccttggctcgtagtgggcttgtcgccggtctccatctccctcttggtgtgatctcccgacat

SEQ ID NO: 4861 - DNA, 5031 bp, Zea mays
  Clone ID: TF_ZmC951_312
tcatttctccccctttttggcatgaatcgccaaaaacggaaccattagagccctcgaagtgctatcttcccctcccgtgtcgaggtcgagatgcccattagttcccatgggtgtcttgatgggtttggcatccttcatcccaaacttggttagaatgtcttgagtgtactttgtttggctaatgaaggtgccctcttggagttgtttgacttggaatcctagaaaatacttcaactcccccatcatagacatctcgaatttctgtgtcatgatcctactaaactcttcacatgtagactcgttagtagacccaaatataatatcatcaacataaatttggcatacaaacaagtcattttcaagtgttttagtaaagagtgtaggatcagctttgccgactttgaatccatttgcaataagaaaatctctaaggcattcataccatgctcttggggcttgcttgagcccataaagcgccttagagagcttatagacatggttaggatactcactgtcttcaaagccgggaggttgctcaacatagacttcttccttgattggtccattgaggaaggcacttttcacgtccatttgataaagcttaaagccatggtaagtagcataggctaataatatgcgaattgactcaagcctagctacgggtgcataggtttcaccgaaatccaaaccttcgacttgggagtaccctttggccacaagtcgagctttgttccttgtcaccacaccatgctcatcttgcttgttgcggaagacccatttggttcctacaacattttgattaggacgtggaactaaatgccatacctcatttctagtgaagttgttgagctcctcttgcatcgccaccacccaatccgaatcttgaagtgcttcctctaccctgtgtggctcgatagaggaaacaaaagagtaatgttcacaaaaatgtgcaacacgagatctagtagttacccccttatgaatgtcgcctaggatggtgtcgacggggtgatctcgttgaattgcttggtggactcttgggtgtggcggcctttgttcctcttcctccttgtcttcctcatttgcatctcccccttgatcattgccattatcttgaggtggctcatttgcttgatcttctacttcatcaacttgagcttcatcctcattttgagttggtggagatacttgcgtggaggaggaaggttgatcttgtgcatttggaggctcctcggattccttaggacacacatccccaatggacatgtttcttagtgcgatgcatggagcctcttcttcacctatctcatcaagatcaacttgctctacttgagagccgttagtttcatcaaacacaacgtcacatgagacttcaactagtccagtggacttgttaaagaccctatatgcccttgtgtttgagtcataaccaagaaaaaaaccttctacagtcttaggagcaaatttagattttctacctcttttaacaagaataaagcatttgctaccaaagactctaaaatatgaaatgttgggctttttaccggttaggagttcatatgatgtcttcttgaggattcggtgtagatataaccggttgatggcgtagcaagcagtgttgaccgcctcggcccaaaaccgatccgaagtcttgtactcatcaagcatggtccttgccatatccaatagagttctattcttcctctccactacaccattttgttgtggagtgtagggagaagagaactcatgcttgatgccctcctcctcaaggaagccttcgatttgagagttcttgaactccgttccgttgtcgcttcttattttcttgatccttaagccgaactcattttgagcccgtctcaagaatccctttaaggtttcttgggtttgagatttttccctgtctttctcaaaatgaacatttgttagtcctaagatgtgttctccctttagaagtttatgaagattcttcatcccaacatgagccagtcggcggtgccagagccaacccatgttagtcttagcgattaagcaagtgtcgagttcagctctatcaaaatctaccaagtatagctgaccctctaacactcccttaaatgctattgaatcatcacttcttctaaagacagtgacaccaatatcagtaaaaagacagttgtagcccatttgacataattgagatacagagagcaagttgtaatctttgaccaaaccttgatttccatccccgaatgtgatcgctctttggggatcttggtttttctcatatgaggagaacatctttttctccccagtcatgtggtttgtgcacccgctgtcgagtatccaacttgagcccccggatgcataaacccaaatggttttgggtcctttggcattagacacaagaactttgggtacccaaacacaagtcttggagcccttgtgcttgcccccaacgtatttggcaactaccttgccggatttgttagtcaaaacataagatgcatcaaaggttttaaatgaaatgctatgttcatttgatgcaataggagttttctttctaggcaactttgcatgggttggttgcctagagctagatgtctcacccttatacataaatgcatgattagggccagagtgagacttcctagaatgaattctcctaattttgctctcaggataaccggcagggtataaaatgtaaccctcgttatcctgaggcatgggagccttgcccttaacaaagttggacaatcttttaggaggggcactaattttgacattgtctcccctttggaagccaatgccatccttgatgcccgggcgtctcccgttataaagcatgctacgagcaaatttaaatttctcattttctaagttgtgctcggcaattttagcatctagttttgctatatgatcattttgttgtttaattaaagccatatgatcataaatagcattgatatcaacatctctacatctagtacaaatagatacatgctcaacaatagatgtagagggtttgcaagaattaagttcaacaatcttagcatgaagaatatcatttttatctctaagattggaaatggtagcattgcaaacatctagttctttagccttagcaattaaatcttcattttctactttaaggctagcaagagaaatgtttaattcttcaatcctagcaagcaaattatcattattatctctaggattgggaattgaaacattacaaacatgtgaatcaaccttagcatttaaactagcattttcattcctaaggttgtcaatcatctcacggcaagtgcttagctcacaagatagtttttcacatttttctacttctaaagcataagcctttttaaccttaacatgtttcttgttttctttaattagacaatcctcttgggaatccaagaggtcatccttttcatgaatagcactaattaattcatttaatttttccttttgttctatgttaaggttggcaaaaagagtacgcaagttatcctcctcatcactagcattatcatcactagaagactcatatttagtggaggagttggatttaaccttcttccgtttgacgtcctttgccatgaggcacttgtggccgacgttggggaagagaagtcccttggtgacggcgatgttggcggcgtcctcgtcgtcggaggagtcgctggagctttcgtcggaatcccattcccgacaaacatgggcatcgccgcccttcttcttgtagtacctcttcttctcctttcttctccccttcttgtcgtcgcctcggtcactgtcacttgatataggacatttagcaataaaatgaccgggcttaccacatttgtagcaaaccttcttggagcgggacttgtagtctttccccctcctttgtttgaggatttggcggaagctcttgatgacgagcgccatttcctcattgtcgagcttggaggcgtctattggttgtcgagttggtgtagcctcctccttcttttcttccgtcgccttgaatgcgacaggttgagcttcggatgtggatggatcatcaagctcgttgatcttcctcgagccttcgatcatgcactcaaaacttacaaaattcccgataacttcctcgggggtcattttagtatatctaggattaccacgaattaattgaacttgagtaggattaaggaaaatgagagatcttagaataaccttaaccatttcgtggtcgtcccactttacgctcccgaggttgcgcacttggttcaccaaggtcttgagccggttgtacatgtgttgtggctcctctcctttgcgaagccggaaccgaccgagctccccctcgatcgtttcgcgcttggtgatctttgtgagttcgtctccctcgtgcgcggttttgagcacatcccaaacttctttggcgctcttcaacccttgaactttgttatactcctctctacttaaagaggcgaggagtattgttgtcgcttgagagttgaagtgctcgatttgggccacctcatcctcatcataatctttgtcccctacggatggtacctgtgcaccaaactcaacaacatcccatatacttttgtggagtgaggttagatgaaatcgcattaaatcactccacctagcataatcttcaccatcaaaagttggtggtttgcctaatgggacggaaagtaaaggtgcatgtttagaaatgcgagggtagtgtagggggatcttactaaacttcttacgctcttggcgtttagaagttacggagggcgcgtcggagccggaggtcgatgttgatgaagtgtcggtctcgtagtagaccactttcctcatcctcttttgcttgtccttactccgatgcggcttgtgggaagaagacttttccttcttctctttgtggtgagaagaagatttcttctccttccctttgttggaggagatcttcttcttctccttcctcttggtgcgggactcttccgatgaagtgctcccttggcttgtagtgggcttttcgccggtctccatctccttcttggcgtgatctcccgacat

SEQ ID NO: 4862 - DNA, 4659 bp, Zea mays
  Clone ID: TF_ZmC951_325
tcacccccccccctctaggcgactatcacattcataccatgctcttggggcttgcttgagctcataaagcgccttagagagcttataaacatggttagggtactcactatcttcaaagccgggaggttgctcaacatagacctcttccttgattggtccattgaggaaggcacttttcacgtccatttgataaagcttgaagccatggtaagtagcataggccaataatatttgaattgactcaagcctagctacgggtgcataggtttcactgaaatccaaaccttcgacttgggagtatcccttggccacaagtcgagctttgttccttgtcaccacaccatgctcatcttgcttgttgcggaagacccatttggttcctacaacattttgattaggacgtggaactaaatgccatacctcattcctagtgaagttgttgagctcctcttgcatcgccaccacccaatccgaatcttgaagtgcttcctctaccctgtgtggctcaatagaggaaacaaaagagtaatgctcacaaaaatgtgcaacacgagatctagtggttacccccttatgaatgtcgccgagaatggtgtcgacggggtgatctcgttggattgcttggtggactcttgggtgtggcggccttggttcttcatcctccttgtcttgatcatttgcatctcccccttgatcattgtcgtcatcttgaggtggctcatttgcttgatcttctcctttatcaacttgagcctcatcctcattttgagtcggtggagatgcttgcgtagaggaggatggttgatcttgtgcatttggaggctcttcggattccttaggacacacatccccaatggacatgttccttagcgcgatgcatggagcctcttcaatacctatctcatcaagatcaacttgctctacttgagagccgttagtctcatcaaacacaacatcacaagaaacttcaacttgcctagaggacttgttaaagactctatatgcccttgtgtttgagtcatatcctagtaaaaagccttctacagtcttaggagcaaacttagattttctacctcttttaacaagtataaagcatttgctaccaaagactctaaaatatgaaatattgggctttttaccggttaggagttcatacgatgtcttcttgaggattcggtgaagatataaccggttgatggcgtaacaagcggtgttgaccgcctcggcccagaaccgatccgaagtcttgtactcatcaagcatggttcttgccatgtccaatagagttctattcttcctctccactacaccattttgttgtggggtgtagggagaagagaactcatgcttgatgccctcctcctcaaggaagccttcaatttgtgagttcttgaactccgtcccgttgtcgcttctaattttcttgatccttaagccgaactcattttgagcccgtctcaagaatccctttaatgtttcttgggtatgagatttttcttgcaaaaagaacacccaagtgaagcgagaataatcatccacaataacgagacagtacttactcccgtcgatgcttatgtaagcgatcgggccgaataggtccatgtgtaggagctccagtggcctgtcggtcgtcatgatgttcttgtgtggatgatgggcaccaacttgctttcctgcttggcatgcgctacatatcctgtctttctcaaaatgaacatttgttaatcctaaaatgtgttctccctttagaagcttatgaagattcttcatcccaacatgggctagtcggcggtgccagagccaacccatgttagtcttagcaattaagcaagtgtcgagttcagctctatcaaaatctaccaagtatagctgaccctctaacactcccttaaatgctactgaatcatcacttcttctaaagaaagtgacacctttgaccaaaccttggtttccatcctcgaatgtgatagctcgttggggatcctggtttttctcataggaggagaacatcttcttctcccctgtcatgtggtttgtgcacctgctgtcgataatccaacttgagcccccggatgcataaacccaaatggttttgggtcctttggcattagaaacaagaactttgggtacccaaacacaagtctttgaccccttgtgcttgcccccaacatatttggcaactactttgccggatttgttagttaaaacataagatgcatcaagagttttaaatgaaatgtcatgttcatttgatgcactaggagttttcttcttaggcaacttagcatgggttggttgcctagaactagatgtctcacccttatatataaaagcatggttagggccagagtgagacttcctagagtgaattctcctaattttgctctcgggataaccggcagggtataaaatgtaaccctcgttatcctgaggcatgggagtcttgcccttaacaaagttggacaatttcttaggaggggcattaagtttgacattgcctccctgttggaagccaatgccatccttaatgccagggcgtctccctctatagagcatgcttctagtaaatttaaatttttcattttctaagtcatgctcggcaatcctagcatctagttttgctatatgatcattttgttgtttaattaaagtcatgtgatcatgaataacattaacatcaacatctctacatctagtacatatagaagtgtgcttagcatgcaatatatcatttttagttctaaggtcggaaatagtagcattgcaaacatcaaaatccttagccttagcaagcaatttttcattctcaatcctaaggctagcaagagatatgttcaattcttcaatcttagcaagccaatcatcattatcattcttaagattgggaattgaagtatcacaaacatttgaatcaaccttagctaataaattagcattttcatttctaaggttgtcgattgtctcatggcaagtgcttagctcactagataatttttcacatttttcaacttctagagcataagcatttttaattttaacatgctttttgttttccttgattaggaagtcctcttgggagtccaagagatcatccttctcatggatggcactaattaattcatttaatttctccttttgttgtatgtttaagttgacaaaaagagtgcgcaagttatcttcctcatcactagcattttcatcactagaggattcatatctagtggaggatttagatttaaccttcttctttttaccgtcctttgccatgaggcacttgtggccgacgttggggaagagaagtcccttggtgacggcgatgttggcggcgtcctcgtcgtcggaggagtcgctagagctttcatcggagtcccactcacgacaaacatgggcatcgccgcccttcttcttgtagtacctcttcttctcctttcttctccccttcttgtcatcacccctgtcactagaaataggacatttagctataaagtgaccgggcttaccacatttgtagcaaaccttcttggagcggggcttgtaatccttccccctcctttgcttgaggatttggcgaaagcttttgatgacaagcgccatctcctcgttgtcgagcttggaggcgtcgatgggtgttctactcggtgtaggctcctccttcttctcttccgtcgctttgaatgcgaccggttgagcttcggacgtggaaggaccgtcgagctcgttgatcttccgtgagcccttgatcataaattcaaagctcacaaaattcccgattacttcctcgggagtcattagtgtatatcttggattaccacgaattaattgtacttgagtagggttaaggaaaataagagatcttagaataaccttaaccacctcgtggtcatcccactttttgctctcgaggttgcgcacttggttcaccaaggttttgagccggttgtacatgtcttgtggctcctccccttggcgtagacggaagcgaccgagctccccctcgatcgtttcccgcttggtgatcttggtgagttcatcaccctcgtgcgcggttttgagcacgtcccaaacttccttggcgctctttaatccttgcaccttgttgtactcctccctacttagagaggtgaggagtattgttgtggcttgggagttgaagtgctcgatttgggccacctcgtcctcatcataatcctcatcccctatggatggtacctgtgctccaaactcaacaacattccatatacttttgtggagtgaggttagatgaaatttcattaaatcactccacctagcataatcttcaccgtcaaaggttggcggtttgcctaatgaaacggaaagtaatggagtatgtttagaagtacgaggatagtgtaaggggatcttactaaacttctttcgctcatggcgcttagaagtcatggagggcgcgtcggagccggaggtggaaggtgatgaagtgtcggtctcgtagtagaccaccttcctcatcttctttatcttgtcgccactccgatgcgacttgtgggaagaagtcttcttttccttcttcttctccttcttcttctccttgttgcgggactctcccgatagagctttctcgttgcttgtagtgggcttttcgccggtctccatctccttcttggcgtgatctcccgacat

SEQ ID NO: 4863 - DNA, 4866 bp, Zea mays
  Clone ID: TF_ZmC951_330
ttagatggtggtgcggtccttttgctttgggctaatactttctccccctttggcatgaatcgccaaaaatggagtcattagagccctcagaattattctctcacccttttgatccacggaattaccttccgtgtcgaggtcgagatgcccatttgttcccatgggtgtcttgatgggtttggcatccttcatcccaaacttgcttagaatatcttgagtatacttcgtttggcttaggaaggtgccctcttggagttgcttcacttgaaatcctaagaaatacttcaactcccccatcatagacatctcgaactttcgtgtcatgatcctactaaactcttcacatgtagactcgttagtagacccaaatataatatcatcaacataaatttggcatacaaacaagtcattttcaagtgttttggtaaagagcgtaggatcgacttttccaactttgaagccattagtgataagaaaatctctaaggcattcataccatgctcttggggcttgcttgagcccataaagcgccttagagagtttatacacatggttagggtactcactatcttcaaagccggggggttgctcaacatagacctcttccttgattggtccattgaggaaggcacttttcaagtccatttggtaaagcttgaagccatggtaagtagcataggccaataatatacgaattgactcaagcctagctacgggtgcataggtttcaccgaaatccaaaccttcgacttgggagtatcccttggccacaagtcgagctttgttccttgtcaccacaccatgctcgtcttgctcattcctggtgaagttgttgagctcctcttgcatcgccaccacccaatccgaatcttgtagtgcttcctctaccctgtgtggctcaatagaggaaataaaagagtaatgctcacaaaaatgtgcaacacgagatctagtggttacccccttatgaatgtcgccgagaatggtgtcgacggggtgatctcgttggattgcttggtggactcttgggtgtggaggccttggttcatcatcctccttgtcttgatcatttgcatctcccccttgatcattgccgtcatcttgaggtggctcatttgtttgatcttctccttcatcaacttgagcctcatcctcattttgagttggtggacatgcttgcgtggaggaggatggttgatcttgtgcatttggaggctctttggattctttaggacacacatccccaatggacatgctccttagcgcgatgcacggagcctcttcatcacctatctcatcaagatcaacttgctctacttgagagccgttagtctcatcaaacacaacgtcacaagaaacttcaacttgtccagaggacttgttaaagactctatatgcctttgtgtttgaatcatatcctagtaaaaaaccttctacagtcttaggagcaaatttagattttctacctcttttaacaagaataaagcatttgctaccaaagactctaaaatatgaaatattgggctttttaccggttaggagttcgtatgatgtctttttgaggattcggtgtagatacaaccggttgatggcgtagcaagcggtgttaaccgcctcggcccaaaaccgatccgaattcttgtactcatcaagcatggttcttgccatgtccaataaagttctattcttcctttccactgcaccattttgttgtggcgtgtagggagaggataactcatgcttgatgccctcctcctcaaggaagccttcaatttgagagttcttgaactccgtcccgttgtcgcttctaatctttttgatcctcaagccgaactcattttgagcccgtctcaagaatccttttaaagtctcttgggtatgagacttttcctgtaaaaagaatacccaagtgaagcgagaataatcatccacaataactagacagtacttactcccgccgatgcttatgtaagcgatcgggccgaatagatccatgtgtaggagctctagtggcatgtcagtcgtcatgatgttcttatgtggatggtgagcaccaacttgcttccctgcttggcatgcgctacaaatcctgtctttctcaaaatgaacatttgttaatcttaaaatgtgttctccctttagaagcttatgaagattcttcatcccaacatgggctagtcggcggtgccatagccaacccatgttagtcttagcaattaagcatgtgtcgagttcagctctataaaaatctactaagtatagctgaccctctaacacacccttaaatgctattgaatcatcacttcttctaaagacagtgacaccttgatttccatccccgaatgtgatagctcgttggggatcttggtttttctcataggagaacattttcttatcccctgtcatgtggtttgtgcatccgctgtcgatgatccaacttgagcccccggatgcataaaccttgccggatttgttagtcaacacatatgatgcatcaaaagttttgaatgaaatatcatgatcatttgatgcactaggagttttcttcttaggcaacttagcacgggttggttgcctagaactagatgtctcacccttatacataaaagcatgattaggcccagagtgagacttcctagaatgaattctcctaattttgctctcaggatagccgacagggtataaaatgtaaccctcgttatcctgaggcatgggagccttgcccttaacaaaattagacaatttcttaggaggggcattaagtttgacattgtcccccttttggaagccaatgccatccttgatgccagggcgtctcccactataaagcatactacgagcaaatttaaaatttttattttcaagttcatgctcggcaattttagcatctaattttgctatatgatcattttgttgtttaattaaagccatgtgatcatgaatagcattaatatcaacatctctacatctagtacaaatagaagtgtgttcaacggtagatgtagaaggtttgcaagaattaagttcaacaatcttagcacgcaatatattatttttgtctctaagatcggaaatggaaatattgcaaacatctaattctttagccttagcaagcaatttttcattttcaatcctaaggctagcaagagatatgtttaattcttcaatcttagcaagcaaatcatcattatcatttctaagattgggaattgaaacattacaagcaatataatcaaccttagctaacaaattagaattctcatttctaaggttgtctatagtctcatggcaagtgcttagctcactagataatttttcacatttttcaacttctagagcataatcatttgtaactttaacatgttttttgttttccttgattaggaagtcctcttgagagtccaagagatcatccttctcatggatggcactaattaattcatttaatttatcttcttctttttgccgtcctttgccatgaggcattttgtggccgacgttggggaagagaagtcccttggtgacggcgatgttggcgccgtcctcgtcgtcggaagagtcgctagagctttcgtcggagtcccactcgcgacaaacatgggcatcgccgcccttcttcttgtagtacctcttcttctcctttcttctccccttcttgtcgtcgcccctgtcactgtcactagatataggacattttgcaataaagtgaccgggcttaccacacttgtagcaaaccttcttggagcggggcttgtaatctttccccctcctttgcttgaggatttggcgaaagcttttgatgacaagcgccatttcctcgttgtcgagcttggaggcgtcgatgtgtgttctactcggtgtagactcctccttcttctcttccgtcactttgaatgcgactggttgagcttcggacgtagaaggaccgtcaagctcgttgatcttccgtgagcccttgatcataaattcaaagctcacaaaattcctgataacttcctcgggggtcattagtgtatatcttgggttgccacgaattaattgtacttgagtagggttaaggaaaataagtgatcttagaataaccttaaccacctcgtggtcatcccatttcttgctcccgaggttgcgcacttggttcaccaaggttttgagccggttgtacatatcttgtggctcctccccttggcgaagacggaagcgaccgagctccccctcgatcgtttctcgcttggtgatcttggtgagttcatcaccctcgtgtgcggtcttgagcacgtcccacacttccttggcgctttttaatccttgcaccttgttgtactcctccctacttagagaggcgaggagtatggttgtggcttgggagttgaagtgctcgatttgggccacctcgtcctcatcataatcctcatccccgacggatggtacctgtgctccaaattcaacaacattccatatacttttgtggagtgaggttagatgaaatttcattaaatcactccacctagcataatcttcaccgtcaaaggttggcggtttgcctaatggaacggaaagcaatggagtatgtctagaggtgcgagggtagtgtaaggggatcttactaaacttcttgcgctcatggcgcttagaagttacggagggcgcgtcggagccggaggtggaaggtgatgaagtgtcggtctcgtagtagaccaccttcctcattttctttttcttgtcgccactccgatgcgacttgtgggaagaggctttcttctccttcccctttccctttttgcgggactcttcggatgaagccttcccgtggcttgtagcgggcttgtcgtcggtctccatctccttcttggcgtgttctcccgacat

SEQ ID NO: 4864 - DNA, 4122 bp, Zea mays
  Clone ID: TF_ZmC951_332
tcagctttggcagtagaaagagctatggaattttgcttctttgaagcccaagacaccagagaccttcccaagaactggcaagtccccgatgtgctctttcttttgatctacggatttacctcccgtgtcgaggtcgagatgcccattggttcccatgggtgtcttgatgggtttggcatccttcgtcccaaacttgtttgaaatgtcttgaatatactttgtttggctaatgaaggtgccctcttggagttgcttcacttgaaatcccaagaagtacttcaactcccccatcatagacatctcgaatttttgtgtcatgatcctactaaactcttcacatgtagattcgttagtagatccaaatatgatatcatcaacataaatttggcatacaaacaaaccattttcaagtgttttagtaaagagtgtaggatcggcctttccaactttgaagccattagtgataaggaaatctcttagacattcataccatgctcttggggcttgcttgagcccataaagcgccttagagagtttatatacatggttagggtactcactatcttcaaagccgggaggttgctcaacatagacctcctccttgattggtccattgaggaaggcacttttcacatccatttggtaaagctcattcctagtgaagttgttgagctcctcttgcattgccaccacccaatccgaatcttgaagtgcttcctctaccttgtgtggctcaatagaggaaacaaaagagtaatgttcacaaaaatgagcaacacgagatcgagtaattacccccttttgaatatcgccgaggatggtgtttacggggtgatctcgttggattgcttggtggactcttgggtgtggcggtctttgaacttgttcatcttcctcatcttgatcatgggcatctcccccttgatcattgctctcctcttgaggtggctcaacttcttgatcttctccttcatcattttgagcctcatcctcatcttgagttggtggagatgcttgcatggaggaagatggttgatcttgtgcttgtggaggctcttcggattccttaggacacacaacaccaatggacatgttccttagcgcgacgcacggagcctcttcatcatctagctcatcaagatcaatttgctctacttgagagccgttagtctcatcaaacacaatgtcacaagaaacttcaactagtccagtggacttgttaaagactctatatgcccttgtgtttgaatcatatcctagtaaaaagccttctacagtcttaggagcaaatttggattttctacctcttttaacaagaataaagcatttgctaccaaagactctaaaatatgaaacattgggctttttaccagttaggagttcgtatgatgtcttcttgaggattcggtgtagatataaccggttgatggcgtaacaggcggtgttgaccgcctcggcccaaaaccgatccgaagttttgtattcatcaagcatggttcttgccatgtccaatagagttcgattattcctattcactacaccattttgttgtggcatgtagggagaagagaactcatgcttgatgccctcctcctcaaggaagccttcgatttgtgagttcttgaactccgtcccgttgtcgcttcttattttcttgatccttaagtcaaactcgttttgagcccgtctcaagaatccctttaaggtctcttgggtatgagatttttcctgcaaaaagaacacccaagtgaagcgagaatagtcatccacaataactagacagtacttactcccgccgatgcttatgtaagcaatcgggccgaatagatccatgtgtaggagctcgagtggcctgtcagttgtcatgatgttcttgtgtggatgatgaacaccaacttgcttccctgtctgacatgcgctacaaaccctgtctttctcaaaatgaacatttgttagtcccaaaatgtgttctccctttagaagcttgtgaagattcttcattccaacatgtgctagtcggcgatgccagagccagcccatgttagtcttagcaattaagcaagtgtcgagttcagctctatcaaaatctactaagtatagctgaccctctaacactcccttaaatgctactgaatcatcacttcttctaaagacagtaacaccttgatttccatccccgaatgtgatagcttgttggggatcttggtttttctcataggaggagaacatcttcttctcccctgtcatgtggtttgtgcacccgctatcgatgatccaacttgagcccccggatgcataaaccctcgttatcctgaggcatgggagccttgcccttaacaaaattagacaatcttttaggagggcattaagtttgacattgtctcccttttggaagccaatgccatccttgatgccaaggcatctcccactatagagcatgcttctagcaaatttaaatttttcattttctaagtcatgctcattaagttttgcattaagttgagctatgtgattattttgtttcttaattaaagctaggtgatcatgaatagcatcaacattaatatctctacatctagtgcaaatgaaaacatgctcaacggtagatgtagagggtttgcaagattttagttcaacaatgttagcatgtaaaatgtcattttcatttctaagattggaaatggtaatattgcaaacatctaagttcttagccttagcaattaatttttcattctcatttctaaggctagcaagagagacattcaattcttcaatcttagcaagtaaactaacattatcatctctaagattgggaattgaaacatcacaaacatttgaatcaatcttagcaattattttagcattttcatttctaaggttggcaataatatcatggcaagtgcttagctcactagatagtttttcacatttctctagttctagagcgtaagcattcttaaccttaacatgcttcttgttttctttaattaggaagtcctcttgagagtccaagagttcatccttctcatgaatagaactaattaattcatttaatttttctttttgttgcatgtttaggttggcaaaaagggcgcgcaaattatcctcctcatcacaagagttatcctcatcacttcttccttttgccgtcttttgccatgaggcacttgtggccgacgttgggaagaggagccctttggtgacggcgatgttggcggcgtcctcgtcggaggaggagtcggaggagttctcatcagagttccactcgcggcacacatgggcatcgccacccttcttctcgtagtatctcttcttttctctcctctttcccttcttgtcatctcccctgtcactgtcacttgatattggacattttgcaataaagtgaccgggcttaccacacttgtagcacactttcttggagcgggacttgtagtccttccctctcctttgcttgagaatttggcggaagctcttgatgatgagcgccatttcctcgttgtcgagcttggaggcgtcgatggggagtctacttgatgtagacccttccttcttctcctccgtcgccttgaccatttcatggtcatcccattttttgctcccgaggttgcgcacttggttcaccaaggtcttgagccgattgtacatctcttgtggctcctccccttggcgaagccggaagcgaccgagctccccctcgatcgtctcccgcttggtgatcttggtcaccgcgtctccttcgtgcgcggtcttgttatactcctctcgacttagagaggtgaggagtatagtggtggcttgggagttgaagtgcacgatttgggccacctcgtcctcatcataatcttcatccctacggatggtactacacttcttgcgctcttggcgcttagaagtgacagacgcggtgtcggatccggatgtagagggcaaggaagaatcggtctcgtagtataccactttcttcattttcttcttcttctcgccactcttgtgcgatcgaatgcgtgaaggggatccatccttcttcttgttggcggactcccttgatggagccttcccgtggcttgtagcggacttatcatcgccgatcaccatcttcttggcgtgatctcccgacat

SEQ ID NO: 4865 - DNA, 5097 bp, Zea mays
  Clone ID: TF_ZmC951_334
ttagagtgtccggtgcgccagcatgggcgggtctgacttctgcgcgtgctggcgcgcatttaatgcgctgcaggtagccgttggcgccgaagtatccgttgtttcgatgtcacaccggacagtccggtgtacaccggacatgtccggtgaattatagcggactagccgttgcgaattcccgaagctggcgagttccagagccgctcttccttggagcaccggacactgtccggtgtacaccggacagtccggtgaattatagcggagcgcctctggattttcccgaaggtgacgagttcgacttggagtcctctggtgcaccggacactgtccggtggcacaccggacagtccggtgcgccataccagaggtgccttcggttgtccctttgctcttttgttgaacccaatacttggtctttttattggctaagtgtgaacctttgacacctccctcgtcgaggtcgagatgcccattggttcccatgggtgtcttgatgggtttggcatccttcattccaaacttgcttagaatatcttgagtgtactttgtttggcttaggaaggtgccttcttggtgttgcttcacttggaatcctaagaagtactttaactcccccatcatagacatctcgaatttttgtgtcatgatcctactaaattcttcacatgtagactcgttagtagacccaaatataatatcatcaacataaatttggcatacaaacaagtcattgtcaagagttttagtgaataaagtaggatcagcctttctgactttgaatccattagtgataaggaaatccctaaggcattcataccatgctcttggggcttgcttgagcccataaagcgccttagagagtttataaacatggttagggtactcactatcttcaaagccgggaggttgctcaacatagacctcttccttgattggtccattgaggaaggcacttttcacgtccattttataaagcttaaagccatggtaagtagcataggccaataatatacgaattgacttaagcctagctacgggtgcataggtttcaccgaaatccaaaccttcgacttgggaatatcctttggccacaagtcgagctttgttccttgtcaccacaccatgctcatctttcttgttgcggaagacccatttggttcctacaacattttgattaggacgtggaactaaatgccatacctcattcctagtgaagttgttgagctcctcttgcatcgccaccacccaatccgaatcttgtagtgcttcctctaccctgtgtggctcaatagaggaaacaaaagagtaatgctcacaaaaatgtgcaacacgagatctagtggttacccccttatgtatgtcaccgaggatggtgtcgacgggatgatctcgttggattgcttggtggactcttgggtgtggcggcctttgttcttcatcctccttgtcttgatcatttgcatctcccccttcatcctcattttgagtcggtggagatgcttgcgtggaggaggatggttgatcttgtgcatttggagactcttcggattcattaggacacacatccccaatggacatgttccttagcgcggtgcatggagcctcttcatcacctatctcatcaagatcaacttgctctacttgagagccgttagtctcatcaaacacaacgtcacaagaaacttcaacttgtccggaggacttgttaaagactctatatgttcttgtgtttgaatcatatcctagtaaaaagccttctacagtcttaggggcaaatttagattttctaccggttaggagttcataggatgtcttcttgaggattcggtgtagatataaccggttgatggcgtagcaggcggtgttgaccgcctcggcccaaaacattttgttgcggggtgtagggagaagagaactcatgcttgatgcctcctcctcaaggaagccttcaatttgtgagttcttgaactccgtcccgttgtcgcttctaattttcttgatccttaagtcgaactcattttgagctcgtctcaagaatccctttaaggtctcttgggtttgagatttttccctgtctttctcaaaatgaacattggttagtcctaaaatgtgctctccctttagaagcttatgaagattcttcatcccagcatgggctagtcggtggtgccagagccaacccatgttagtcttagcaattaagcaagtgtcgagttcagctctatcaaaatctaccaagtatagttgaccctccaacactcccttaaatgctattgaatcatcacttcttctaaagacagtgacacccaatcctttgaccacacattggtttccatccccgaatgtgatcgctcgttggggatcttgatttttctcgtaggaggagaacatttccttctccccagtcatgtggtttgtgcacccgctatcgatgatccaacttgagcccccggatgcataaacccaaacggttttgggtcctttggcattagaaacaagaactttgggtacccaaacacaagtcttggagcccttgtatttgcccccaacaaatttggcaactactttgccggatttgttagtcaaaacataggatgcatcaaaagttttaaatgaaatgtcatgatcatttgatgcactaggagttttccttttaggcaacttagcatgggttggttgcctagagctagatttctcacccttatacatgaaagcatggttagggccagagtgagacttcgtagagtgaatcctcctaattttgctctcgggataaccggaagggtacaaaatgtaaccctcgttatcctgaggtatgggagccttgccctttacaaaattagacaaccttttaggaggggcattaattttgacattgtctcccctttgtaagccaatgccatccttgatgccagggcgtctcccattataaagcatactacgagcaaatttaaacttttcattctctaagttatgctcggcaattttagcatctaattttgctatatgatcattttgttgtttaattaaagccatgtgatcatgaatagcattaacatcaacatctctacatctagtacaaatagcagtgtactcaacggtagatgtagagggtttgcaagattttaattctacaaccttagcatgtaatatatcattttcacttctaaggttagaaatagtaatattgcaaacattaaaatctttagccttagcaagcaatttctcattttcaatcctaaggctagcaagagaaacattcaactcatcaatcctagcaagtaaatcaacattatcatctctaggattggaagttgaagcattacaaacatgagaatcaaccttagcaattaatttgacattttcatttctaaggttgttaatagtttcatggcaagtgcttagctcactagatagtttttcacatttttctacttcaagagcataagcatttttaaccttaacatgcttcttattttctttaattaggaagtcctcttgggaatccaaaaggtcatccttctcatgaatgatactaattaattcatttaacttttccttttgttccatgttaaggttggcaaaaagggtacgcaaactatcttcctcatcactagaagattcatatttagtggaggattttgatttaaccttcttccttttgccgtcctttgccgtgaggcacttgtggccgacgttggggaagagaagtcccttggtgacagcgatgttggcggtgtcctcgtcggaggaggagtcggtggagctctcgtcggagtcccactcccggcaaacatgggcatcaccgcccttcttcttgtagtacctcttcttttctctcctcttgcccttcttgtcgtcgcccctgtcactgtcactagatattggacattttgcaataaaatgaccgggcttaccacatttgtagcacactttcttggagcggggcttgtaatctttccctctcctttgcttgaggatttgacggaagctcttgatgatgagcgccatctcctcgttgtcgagcttggaagcatcgatgggttgtctacttgatgtagactcctccttcttttcctccgtcgccttgaatgcgaccggttgtgcttcgggtgtgaaggaggtgccttgctcgatgattttctttgagcctttaatcattagctcaaagctcacaaattttcctataacttcctcgggagacattagcttatatctaggatcatctcgaattaattgaacttgtgtagggttaagaaatacgagggatctaagaataaccttgaccatctcatggtcatcccatttttcgctcccgaggttgcgcacttggttcaccaaggtcttcaagcggttgtacatagcttgtggatcctccccttggtgaagcatgaagcgaccgagctccccctcgatcgtttcccgcttggtgatctttgtcacctcgtctccttcgtgcgcggtcttgagtacgtcccaaatttccttcacactttttaacccttgcaccttattatactcctctcgacttagagaggcgaggagtatagtagtggcttgggagttaaagtggtgaatttgggccgcctcgtccgagtcgtggtcttcatcccctacggatggtacctgtacaccaaactcaacaacattccatatgcttgtgtggagtgaggttagatgatgcctcattttgtcactccacatattataatctccaccgtcaaaaactggtggtttgcctaatggaacggagagcaaaggagtacgttttgaaacatggggatagcgtagaggaatcttactatacttcttgcgctcttggcgcttagaagtaacggacggtgcatcggagtcggaggtcgatggtgatgaagagttggtctcgtagtagaccactttcctcatcctcttgtgtttgtcgcctctccgatccgacttgtgggaagaagatttcttctccttccccttccctttgttggaagagtttttcttctccttcctcttgttgcgggactcttccgatgaagtcgacccgtggcttgtagcgggcttgtcgccggtctccatctccctcttggcgagttctcccgacat

SEQ ID NO: 4866 - DNA, 5358 bp, Zea mays
  Clone ID: TF_ZmC951_337
tcatttctccccctttttggcatgaatcgccaaaaacggaatcattagagcccttgaagtaatttcttcccctttggtcataagaaaatgagttaagattataccaaagacgaggtccggtccttttgcttttgagcttttactctctccctcaaggatgaagtccttttccttgatgctcatttctcccccaaagaagagagagttgctcggagtgatggcgaagtatgagttacggagtggaagcctttttcttcgccgaagactccaattccctttcaatatacctatgacttggtttgaaatagacttttgatccacggacttacctcccgtgtcgaggtcgagatgcccatttgttcccatgggtgtcttgatgggtttggcatccttcatcccaaacttagcaagaatgtcttgagtgtacttcgtttgactaatgaaggtgccctcttggagttgcttgacttggaatcctagaaaatacttcaactcccccatcatcgacatctcaaatttctgtgtcatgatcctactaaactcttcacatgtagactcgttagtagacccaaatataatatcatcaacataaatttggcatacaaacaagtcattttcaagagttttagtaaagagtgtaggatcggccttgccaactttgaagccattagcaataaggaaatctcttaggcattcataccatgctcttggggcttgcttgagcccataaagcgccttagagagcctatagacatggttagggtactcactgtcttcaaagccgggaggttgctcaacatagacctcttccttgatcggtccgttgaggaaggcacttttcacgtccatttgataaagcttaaagccatggtaagtagcataggctaataatatgcggattgactcaagcctagctacgggtgcataggtttcaccgaaatccaaaccttcgacttgtgaataccctttggccacgagtcgagctttgttccttgtcaccacaccatgctcatcttgcttgttgcggaagacccatttggttcctacaacattttgattaggacgtggaactaaatgccatacctcgtttctagtgaagttgttgagctcctcttgcatcgccaccacccaatccgaatcttgaagagcttcctctaccctgtgtggctcaatagaggaaacaaaagagtaatgttcacaaaaatgagcaacacgagatctagtggttacccccttatgaatatcgccaaggatggtgtcgacggggtgatctcgttggattgcttggtggactcttgggtgtggcggtcttggttcttcctcatcctcctgttcttgatcatttgtatctcccccttgatcattgctatcatcttgaggtggcttgtcttcttgattttgctcttcatcattttgagcctcatcctcattttgagttggtggagatgcttgcatggaggaggatggttgatcttgtgtacttggaggctcttcggattccttaggacacacatccccgatggacatgttccttagcgcgatgcatggagcctgttcttcacctatctcatcaagatcaacttgctctacttgagagccgttagtttcatcaaacacaacgtcacaagagacttcaactagtccagtggacttgttaaagaccctatatgcccttgtgtttgagtcataaccaagtaaaaagccttctacagttttaggagcaaatttagattttctacctcttttaataagaatgaagcatttgctaccaaaaactctaaaatatgaaatgttgggctttttaccggttaggagttcatatgatgtcttcttgaggattcggtgaagatataaccggttgatggcgtagcaggcggtgtttaccgcttcggcccaaaaccggtccggtgtcttgtactcatcaagcatggttcttgccatgtccaatagagttcgattctttctctccactacaccattttgttgaggtgtgtatggagaagagaactcatgcttgatgccctcctcctcaaggaagctttcaatttgagagttcttgaactccgttccgttgtcgcttcttattttcttgatccttaaggcgaactcattttgagcctgtctcaagaatccctttaaggtctcttgggtttgagatttttcaagacaatacttactcccgccgatgcttatgtaggcaatcgggccgaatagatccatgtggagtagctcaagcggcctgtcggtcatcatgatgttcttgtgtggatgatggactccaacttgcttccccgcctggcatgcgctacaaatcctgtctttctcaaaatgaacatttgttaatcctaaaatgtgctctccctttagaagcttatgaagattcttcatcccaacatgggctagtcggcggtgccagagccaacccatattagtcttagcaattaagcaagtgtcgagttcagctctatcaaaatctaccaagtatagctgaccctctaacactcccttaaaagctattgaatcatcacttcttctaaagacagtgacaccttgatttccatccccgaatgtgatagctcgttggggatcttggtttttctcatatgaggagaacatccttttctcccctgtcatgtggtttgtgcacccgctgtcgagtatccaacttgagcccccggatgcataaacccaaactgttttgggtcctttggcattagatacaagaactttgggtacccaaacacaagtcttggagcccttgtgtttgttcccaacaaacttggcaacgaccttgccggatttgttagtaagcacataagaagcatcaaaagttttaaatgcaatgctatgttcatttgatgcattagaaattttctttctaggcaacttggcacgggttggttgcctagagctagatgtctcacccttatacataaaggcatgattggggccagagtgagacttcctagaatgaattttcctaattttgctctcgggataaccggcagggtacaaaatgtagccctcgttatcctgaggcatgggagctttgcccttaacaaagttagacaaatttttaggaggggcattaagtttgacattgtctcccctttggaagccaatgccatccttgatgccagggcgtctcccattataaagtatgctacgagcaaatttaaatttctcattttctaggttgtgctcggcaatttttgcatctaattttgctatatgatcattttgttgtttaattaaggccatatgatcaagaatagcattaacatcaatatctctacatttagtgcaaatagaaacatgctcaagattagatgtagagggtttgcaagatttaagttctacaaccttagcatgcaacatttcattcttagttctaaggtcggaaatagtagcattgcaaacatcaaaatttttagccttagcaattaaattttcattctctaatctaaggctagcaagagatgcattcaattcatcaatcttagcaagcaagtcaatgttatcatctctaagattgggaattgaaacattacaaacatgtgaatcaaccttagcatttaaaatagcattttcatttctaaggttgtcaatcatctcacggcaagtgcttagctcactagacaatttttcacatttttctacttctagtgcataagcctttttaaccttaacatgtttcttgttttctttaattagacaatcctcttgggagtccaaaaggtcatccttttcatgaatagcactaatcaattcatttagtttttctttttgctccatgttaagattggcaaagagaatacgcaaattatcctcctcatcactagcattatcatcactagacgattcatatttagtggaggagttggatttaaccttcttctttttgccgtcctttgccatgaggcacttgtggccgacgttggggaagaggagtcccttggtgacggcgatgttggcggcgtcctcatcgtcggaggagtcgcttgagctttcgtcggaatcccattcccgacaaacatgggcatcgccgcccttcttcttgtaataccttttcttctcctttcttcttcccttcttgtcgtcgcctcggtcactgtcactagatataggacatttagcaataaaatgaccgggcttaccacacttgtagcaaaccttcttggagcgggacttgtagtccttccccctcctttgcttgaggatttggcggaagctcttgatgacgagcgccatttcctcattgtcgagcttggaggcgtctattggttgtctacttggtgtagactcctccttcttctcctccgttgccttgaatgcaacgggttgggcttcggatgggtcgccaagctcgttgattttcctcgagccttctatcatgcactcaaaacttacaaaatgcccgataacttcctcgggggtcattttagtatatctaggattaccacgaatcaattgaacttgagtgggattaagaaaaatgagagatcttaaaataacatttaccacttcgtggtcatcccacttcttgctcccgaggttgcgcacttggttcaccaaagtcttgagccggttgtacatatgttgtggctcctcccctttgtgaagccggaaccgaccgagctccccctcgatcgtttcccgcttggtgatcttggtgagctcatctccctcgtgcgcggttttgagtacatcccaaatctcctttgcatttttcaacccttgcactttgttgtattcttccttgcttagagaggcaaggagtatggttgcggcttgagagttgaagtgctcgatttgggctacctcatcctcatcataattctcatcccctattgatggtacctgtacaccaaactcaacaacatcccatatacctttgtggagcgagattagatgaaattgcattaaatcgctccacctagcgtaatcttcaccatcaaaagttggtggtttgcctaatgggacggaaagtaaaggtgtatgtttggaaatgcgagggtagcgtagggggatcttactgtacttcttgcgctcttggcgcttagaagtgacggagggcgcatcggagtcggacgtagaagttgatgaagtgtcggtctcgtagtagaccactttcctcatccttttgtgcttgtcgcctttccgatgtggcttgtgggaagaagatttttccttcttctctttgtggtgagaagaagatttcttctccttccctttgttggaggagctcttcttcttctccctccttttggtgcgggactcttccgatgaagtgctcccgtagcttgtagtgggcttttcgccggtctccatctccttcttggcgtgatctcccgacat

SEQ ID NO: 4867 - DNA, 5139 bp, Zea mays
  Clone ID: TF_ZmC951_339
tcaatcaaaattccgagaatcaagaatatttagctcattcctaagtttgcaaaaggtcttctcatctaatggcttggtgaagatatcagctaattgatctttggtgttaatataggctatcttgatatcccccctttgttggtgatccctcaaaaagtgatactgaatgtcgatgtgtttagtgcggctgtgttcaacgggattctccgtcatgcggatagcactctcattgtcacataggagagggactttgctcaatttgtagccatagtccctgagggtttgcctcatccaaagcaattgcacacaataatggcctgcggcaatatactcggcttcggcggttgataaggctactgagttttgtttctttgaagcccaagaccccagggatctccccagaaactgacaaatccttgacgtgctcttcctatcaattttacatcctgcccaattggcatcggaatatcctcccgtgtcgaggtcgagatgtccatttgttcccatgggtgtcttgatgggcttggcatccttcattccaaacttcttaagaatgtcttgaatgtatttggtttggctgatgaaggtgccatcttggagttgcttgatttgaaatcctaagaaatatctcaactcccccatcattgacatctcaaatttctgtatcatgatcctactaaactcttcacaagtagatttgttagtagacccaaatataatatcatcaacataaatttggcatacaaacaaatcatttgcaacagttttagtaaagagcgtaggatcggcttttccgactttgaagccattagtgataaggaaatctcgcaagcattcataccatgctcttggggcttgcttgagcccataaagcgcctttgagagtttataaacatggttagggtactcactatcttcaaagccgggaggttgctcaacatagacctcttccttgattggtccattgaggaaggcactcttcacgtccatttgataaagcttgaagccatggtaagtagcataggctaataatatatgaattgactcaagcctagctacaggtgcataggtttcatcgaaatccaaaccttcgacttgggagtatcccttggccacaagtcgtgctttgttccttgtcaccacaccatgctcgtcttgcttgttgcgaaagacccatttggttcctacaacattttgattacgacgtggaactaaatgccatacctcattcctagtgaagttgttgagctcctcttgcatcgccaccacccaatccgaatcttgaagtgcttcctctatcctgtgtggctcaatagaggaaacaaaagagtaatgctcacaaaaatgtgcaacacgagatctagtggttacccccttatgaatgtcgccgaggatggtgtcgacggggtgatctcgttggattgcttggtggactcttgggtgtggcggcctttgctcttcatcctccttgtcttgctcatttacatctcccccttgattattgtcgtcatcttgaggtggcttatttgcttgatcttctccttcatcaacttgagcatcatcctcattttgtgttggtggagatgcttgcgtggaggaggatggttgatcttgtgcatttggaggctcttgggattccttaggacacacatccccaatggacatgttccttagcgcgatgcacggagcctcttcatcacctatctcatcaagatcaacttgctctacttgagagccgttagtctcatcaaacacaacgtcacaagaaacttcaacttgtccagtggacttgttaaagactctatatgcccttgtgtttgaatcatatcctagtaaaaagccttctacagtcttaggagcaaatttagattttctacctcttttaataagaataaagcatttgctaccaaagactctaaaatatgaaatgttgggctttttaccggttaggagttcatacaatgtcttcttgaggattcggtgtagatacaaccggttgatggcgtagcaggcggtgttgaccgcctcggcccaaaaccgatccgaagtcttgtactcatcaagcatggttcttgccatgtccaatagagttctattcttcctctccactacaccattttgttgtggcatgtagggagaagagaactcatgcttgatgccctcctcctcaaggaagccttcgatttgagagttcttgaactccgtcccattgtcgcttctaattttcttgatcctcaagccgaactcattttgagcccgtcttaagaatccctttaaggtctcttgggtgtgagatttttcatcagtgaatagacagttgtagcccatttgacataattgagatacggaaggcaaattgtaatctaaagaatcttgatttccatccccgaatgtgatagctcgctggggatcttggtttttctcgtaggaggagaacaacttcttctcccctgtcatgtggtttgtgcacccgctatcgataatccaacttgagcccccggatgcataaacccaaatggttttgggtcctttggcattagatataagaactttgggtacccaaacacaagtctttgaccccttttgcttgcccccaacatatttggcaactatcttgccggatttgttagttaaaatataagatgcatcaaaagttttaaatgaaaagttatgctcatttgatgcactaggagttttcttcttaggcaacttagcatgggtttgttgcctagaactagatgtctcacccttatacataaaagcatgattagggccagagtgagacttcctagagtgaattctcctaattttgctctcggaataaccggcagggtataaaatgtgaccctcgttatcctgaggcatgggagctttgcccttaacaaaattagacaacttcttaggaggggcattaattttgacattgcctccctgttggaagccaatgtcatccttaatgccagggcgtctcccactatagagcatacttctagcaaatttaaatttttcgttttctaaattatgctcagcaattttagcatctaattttgctatatgatcattttgttgtttaattaaagccatgtgatcatgtatagcatcaatgttaacatctctacatctagtacaaatggtagtatgttcaacggtagatgtagaggatttgcaagaattaagttcaacaatcttagaatgcaatatatcatttttgtctctaagatcggaaatagtagcattgcaaacatcaaaatctttagccttagcaatcaatttttcattttcatttctaaggctagcaagagaaatgtttagttcttcaatcatagcaagcaaatcatcattatcatttctaggattgggaattaaaacattacaagcatttgaatcaaccttagctaacaatttagtattttcatttctaaggttgtcaatagtttcatggcaagagcttagctcactagaaagtttttcacatttttctacttctagagcgtaagcatttttgaccttaacatgtttcttattttctttaataaggaagtcctcttgggtgtccaagagatcatccttttcatgaatggcactaatcaattcattaagtttctctttttgttgcatgttgaggttggcaaaaagagtgcgtaagttatcttcctcatcactagcattttcatcactagaagactcatatctagtggaggatttggatttaaccttcttctttttgccgtcctttgccatgaggcgcttgtggccgacattggggaagagaagtcccttggtgatggcgatgttggcggcgtcctcgtcgtcggaggagtcgctagagctttcgtcggagtcccactcccgacaaacatgggcatcgccgcccttcttcttgtagtacatcttcttctcctttcttctccccttcttgtcgtcacccctgtcactgtcactagaaataggacatttagctataaagtgaccgggcttaccacatttgtaacaaaccttcttggagcggggcttgtaatctttccccctcctttgtttgaggatttggcggaagctcttgatgacgagcgccatttcctcgttgtcgagcttggaggcgtcgatgggtgttctactcggtgtagactcctccttcttctcctccgtcgccttgaatgcgattggttgtgcctcggacgtggaggggccatcaagctcgttgatctttcgtgagccttggatcataaattcaaagctcacaaaattcctgataacttctttgggggtcattagtgtatatcttgggttgccacgaattaattgtacttgagtagggttaaggaaaataagtgatcttagaataaccttaaccacctcgtggtcatcccatttcttgctcccgaggttgcgcacttgattcaccaaggttttgagccggttgtacatatcttgtggctcctccccttgccgaagacggaagcgaccgagctccccctcgatcgtttcccgcttggtgatcttggtgagttcatcaccctcgtgcgcggtcttgagcacgtcccaaacttccttggcgctcttcaatccttgcaccttgttgtactcctccctacttagagaggcgaggagtattgttgtggcttgggagttgaagtgctcgatttgggccacttcatcctcatcataatcctcatcccctacggatggtacctgtgctccaaactcaacaacattccatatacttttgtggagtgaggttagatgaaatttcattaaatcactccacctagcataatcttcaccgtcaaaggttggcggtttccctaatggaacggaaagtaatggagtatgtctagaagtacgaggataatgcaaggggatcttactaaacttcttgcgctcatggcgcttagaagttatggagggtgcgtcggagccggaggtagatggtgatgaggtgtcggtctcatagtagaccaccttcctcatcttctttattttgtcaccactctgatgcgacttgtgagaagaagtcttcttctccttcttcttctccttcttcttctccttgttgtgggactctcccgatgaagccttcccgtggcttgtagcgggcttgtcgccggtctccatctccttcttggcgagttctcccgacat

SEQ ID NO: 4868 - DNA, 5784 bp, Zea mays
  Clone ID: TF_ZmC951_344
ctagcaaaagaaatttctagaatcaagaatattgagctcatgcctaagtctggtaaaagattgttcatcaagtggcttggtaaagatatcggctaattgatctttagtattaatgtaagaaatctcgatatcccccttttgttggtgatccctaagaaaatgataccgaatggctatgtgcttagtgcggctatgctcgacgggattgtcggccattttaattgcactctcattatcacatagcaaagggactttggttaatttgtaaccgtagtcccgcagggtttgcctcatccaaagcaattgcgcgcaacaatgtcctgcggcaatgtactcggcttcggcggtggaaagagcgaccgaattttgcttctttgaagcccaagacaccaaggatcttcccaagaactggcaagtccctgatgtgctcttcctattaattttgcaccccgcccaatcggcatccgaataaccaatcaaatcaaatgtggatccccgagggtaccaaagcccaaacttaggtgtataagccaaatatctcaaaattcgttttacggccgtaaggtgggattccttagggtcggattggaatcttgcacacatgcaaacagaaagcataatgtccggtcgagatgcacataaataaagcaatgagccaatcatcgaccggtataccttttgatccacggacttacctcccgtgtcgaggtcgagatgcccattagttcccatgggtgtcttgatgggtctggcatccttcatcccaaacttagcaagaatgtcttgagtgtacttcgtttggctaatgaaggtgccctcttggagctgcttgacttggaatcctagaaaatacttcaactcccccatcattgacatctcgaatttctgtgtcatgatcctactaaattcctcacaagtagattcgttagtagacccaaatatgatatcatcaacataaatttggcatacaaacaaatcattgtcaagagttttagtgaatagagtaggatcggccttgccaactttgaagccattagcaataaggaaatctcttaggcattcataccatgctcttggggcttgcttgagcccataaagcgccttagagagcctatagacatggttaggatactcactgtcttcaaagccgggaggttgctcaacatagacctcttccttgattggtccgttgaggaaggcacttttcacgtccatttgatagagcttaaacccatggtaagtagcataggccaataatatgcgaattgactcaagcctagctacgggtgcataggtttcaccaaaatccaaaccttcgacttgtgaataccctttggccacgagtcgagctttgttccttgtcaccacaccatgctcatcttgcttgttgcggaagacccatttggttcctacaacattttggttaggacgtggaactaaatgccagacctcattcctcgtgaaattgttgagctcctcttgcatcgccaccacccaatccgaatcttggagagcttcctctaccctgtgtggctcaatagaggaaacaaaagagtaatgttcacaaaaatgagcaacccgagatcgagtagttacccccttatgaatgtcgccgaggatggtgtcgacggggtgatctcgttggattgcttggtggactcttgggtgtggcggtcttggttcttcctcatcctccttttcttgatcatttgtatctcccccttgatcattgctatcatcttgaggtggctcgtcttcttgattttgctcttcatcattttgagcctcatcctcattttgagttggtggagatgcttgcatggaggaggatggttgatcttgtgtacttggaggctcttcggattccttaggacacacatccccgatggacatgttccttagcgcgatgcatggagcctgttcttcacctatctcatcaagatcaacttgctctacttgagagccgttagtttcatcaaacacaacgtcacaagagacttcaactagtccagtggacttgttaaagaccctatatgcccttgtgtttgagtcataaccaagtaaaaagccttctacagttttaggagcaaatttagattttctacctcttttaataagaatgaagcatttgctaccaaaaactctaaaatatgaaatgttgggctttttaccggttaggagttcatatgatgtcttcttgaggattcggtgaagatataaccggttgatggcgtagcaggcggtgttgaccgattcggcccaaaaccggtccggtgtcttgtactcatcaagcatggttcttgccatgtccaatagagttcgattcttcctctccactacaccattttgttgtggcgtgtagggagaggagaactcatgcttgatgccctcctcctcaaggaagccttcaatttgagagttcttgaactccgtcccgttgtcgcttcttattttcttgatccttaagccgaactcattttgagctcgtctcaagaatccctttaaggtctcttgggtttgagatttttcctgtaaaaagaatacccaagtgaagcgagaataatcatccacaataacaagacaatacttactcccgccgatgcttatgtaagcaatcgggccgaatagatccatgtggagtagctcaagcggcctgtcggtcgtcatgatgttcttgtgtgggtgatggactccaacttgcttccccgcctggcatgcgctacaaatcctgtctttctcaaaatgaacatttgttaatcctaaaatgtgctctccctttagaagcttgtgaagattcttcatcccaacatgggctagtcggcgatgccagagccaacccatgttagtcttagcaattaagcatgtgtcgagttcagctctattaaaatccactaagtatagctgaccctctaacacacccttaaatgctattgaatcatcacttcttctaaagacagtgacacctttgaccaacccttgatttccatccccgaatgtgatagctcgttggggatctttgtttttctcatatgaggagaacatccttttctccccggtcatgtggtttgtgcacccgctgtcgagtatccaacttgagcccccggatgcataaacccaaactgttttgggtcctttggcattagatacaagaactttgggtacccaaacacaagccttggagcccttgtgtttgcccccaacaaacttggcaacgaccttgccggatttgttagtcaaaacatatgatgcatcaaaagtcttaaatgaaatgctatgttcatttgatgcattaggaattttcttcttaggcaacttggcacgggttggttgcctagaactagatgtctcacccttatacatgaaagcatgattggggccagagtgagacttcctagagtgaattctcctaattttgctctcaggataactggcagggtacaaaatgtaaccctcgttatcctgaggcatgggagctttgcccttaacaaagttagacaaatttttaggaggggcattaagtttgacattgtctcccctttggaagccaatgccatccttgatgccagggcgtctcccattatagagcatacttctagcaaatttaaatttttcattttctaagttatgctcggcaattttagcatctagttttgctatatgatcattttgttgtttaattaaagccatatgatcatgaatagcatcaatatcaacatttctacatctagtacaaatagatacatgctcaacaatagatgtagatggtttgcaagaattaagttcaacaatcttagcatgaagaatatcatttttatctctaagattggcaatggtaactttgcaaacatcaaaatctttagccttagcaatcaaactttcattctctaatctaaggctagcaagggaaatgtttaattcttcaatcctagcaagcaaatcatcattattatctctaggattgggaattgaaacattacaaacatgagaatcaaccttagcatttaaactagtattttcatttctaaggttgtcaatcatctcacggcaagtgcttagctcactagataatttttcacatttttctacctctagagcataagcctttttaaccttaacatgtttcttgttttctttaattagacaatcctcttgggagtccaaaaggtcatccttttcatgaatagcactaactaattcatttaatttttctttttgagctatgttgaggttggcaaaaagggaacgcaaattatcttcctcatcactagcattgtcatcactagaggattcatatttagtggaggatttagatttaaccttcttctttttgccgtcctttgccatgaggcacttgtggccgacgttggggaagaggagtcccttggtgacggcgatgttggcggcgtcctcgtcgtcggaggagtcgcttgagctttcgtcggaatcccattcccgacaaacatgggcatcgccgcccttcttcttgtagtatcttttcttttcctttcttctccccttcttgtcgtcgcctcggtcactgtcactagatataggacatttagcaataaaatgaccgggcttaccacacttgtagcaaaccttcttggagcgggacttgtagtctttccccctcctttgtttgaggatttggcggaagctcttgatgacgagcgccatttcctcattgtcgagcttggaggcgtcgattggttgtcgacttggtgtagcctcctccttcttctcctccgttgccttgaatgcaacgggttgggcttcggatgagtcgccaagctcgttgattttcctcgagccttctatcatgcactcaaaacttacaaaatgcccgataacttcctcgggggtcattttagtatatctaggattaccacgaatcaattgaacttgagtgggattaagaaaaatgagagatcttaaaataacatttaccacttcgtgatcgtcccacttcttgctcccgaggttgcgcacttggttcaccaaagtcttgagccggttgtacatgtgttgtggctcctcccctttgtgaagccggaaccgaccgagctccccctcgatcgtttcccgcttggtgatcttggtgagctcatctccctcgtgcgcagttttgagcacatcccaaatctcctttgcatttttcaacccttgcactttgttgtattcttccttgcttagagaggcaaggagtatggttgtggcttgagagttgaagtgctcgatttgggccgcctcatcctcatcatagttttcatcccctacggatggtacctgcgcaccaaactcaacaacatcccatatgcttttgtggagcgagattagatgaaatcgcattaaatcgctccacctagcgtaatcttcaccatcaaaagttggtggtttgcctagtgggacggaaagtaaaggtgtatgtttggaaatgcgagggtagcgtagagggatcttactatacttcttgcgctcttggcgcttagaagtgacggagggcgcatcggagtcggaggtcgatgttgatgaagtgtcggtctcgtagtagaccaccttcctcatcctcttgtgcttgtcgcctttccgatgcggcttgtgggaagaagatttttccttcttctctttgtggtgagaagaagatttcttctccttccctttgttggaggagctcttcttcttctccctccttttggtgcgggactcttccgatgaagtgctcccgtagcttgtagtgggcttttcgccggtctccatctccttcttggcgtgatctcccgacat

SEQ ID NO: 4869 - DNA, 4233 bp, Zea mays
  Clone ID: TF_ZmC951_345
ttacttgacttgaaatcctaggaaatacttcaactccctcatcatagacatctcaaatttttgtatcatgatcccactaaactcttcacaagtggatttgttagtagacccaaatatgatatcatcaacataaatttggcatacaaacaaatcttttgcaatagttttagtaaagagtgtaggatcggctttttcgactttgaagccattagtgataaggaaatctcgcaggcattcataccatggtcttggggcttgcttgagaccataaagcgtctttgagagtttatacacatggttagggtactcactatcttcaaagccgggaggttgctcaacatagacctcttccttgattgatccattgaggaagacacttttcacatccatttggtaaagcttaaagccatggaaagtagcataggcaagtaatatacgaattgactcaagcctagctacgggtgcataagtttcaccaaagtccaaaccttcgacttgtgaataacctttggccacaagtcgggctttgttccttgtcaccacaccatgctcatcttgctcgttgcagaatacccactcattcctcgtgaagttttgagttcctctttcattgtcagcaccaaatctgaatctcttagtgcattctccaccccccttatgaatgtcaccgaggatggagttgatggggtgatctcgttgaattgcttgatggactcttgggtgtcgcgatctttgaccctgaatttcttgatcatctttcttgtcttgatcaacttcatctcccccttgatccttgtcctcctcttgaggtggctcatcctcttgatgttcatcttcattgtcttgagcctgatcctcatcttccgttggagatgcttggttggaagatgacggttgatcttgtgcttgagtgggctcttcggattccttaggacacacatccccaatggacatgttccttagcgcgacgcacggaacctcttcatcatctagttcatcaagatcaacttgctccacttggtagccattagtctcatcaaacacaatgtcacaagaaacctcaactaatccagtggatttgttgaagactctatatgcccttgtgtttgagtcatatcctagtaaaaagccttctacagtcttagaagcaaatttagattttctacatcttttaacaagaataaaacatttgcttccaaagaatttaaaatatgaaacattaggctttttactggtaaggagttcgtatgatgtcttcttgaggatttggtgaagatatagccggttgatggagtagcaagcagtgttgattgcttccgcccaaaaccgatccggtgtcttgtactcatcaagcatggtccttgccatatccagtagatttcgattcttcctctcaactacaccattttgttgaggtgtgtagggagaagataactcatgcttcatgccctcatcctcaagaaatccttctatttgagaattattgaactccatcccattttcgcttcttattttcttgatccttaatccgaactcattttgagcccgtctcaagagtccctttaaagtctcttgggtttgagatttttcatccccgaatgtgatagctcgttggggatcttcgtttttctcataggaggagaacattctcttctcccctgtcatgtggtttgtgcatccgctatcaattatccaacttgagcctccggatgcataaaccttgccggatttgttagttaacacataagatgcatcaaaagttttaaatgaaatgctatgttcatttgatgcactaggagttttcttcttaggcaacttagcacgtgttggttgcctagaactagatgtctcacccttatatttaaaagcatggttagggccatagtgagacttcctagaatgaattctcctaattttgctctcggggtaaccgacagggtacaaaatgtaaccctcgttatcctgaggcatgggagccttgcccttaacaaagttggacaatttcttaggaggggcattgagtttgacattgcctccctgttggaagccaatgccatccttaatgccagggcgtctccctctatagagcatactacgagcaaacttaaatttttcattttctagttcatgctcggcaattttagcatctagtttagctatatgatcattttgttgtttaattaaagccatgtgatcatgaatagcattaatatcaacatctctacatctagtgcaaatagtgacatgctccgtggtagatgtagagggtttgcaagattttaattctacaaccttagcatgtaatatatcatttttacttctaaggtcgaaaatggaagcattgcaaacatcaagttctttagccttagcaagcaattttttattttcatttctaaggctagcaagagtaatgtttaattcttcaatcttagcaagcaaattatcattattatttctaagattgggaattgaaacatcacaaacatttgaatcaaccttagctaacaaattagcattctcatttctaaggttgtctatagtctcatggcaagtgcttagctcactagatagtttttcacattttctacttctagagcgtaagcattttttaactttaacatgcttcttattttctttaataaggaagtcctcttgggcgtccaagagatcatccttttcatggatagcactaatcaattcatttaatttctctttttgttgcatgtttaagttggcaaaaagagtacgcaaattatcttcctcatcactagcattatcatcgctagaggactcatatctagtggaggatttggatttaaccttcttctttttgccgtcctttgccatgaggcacttgtggccgacgtttgggaagagaaggcccttgttgatggcgatgttggcggcgtcctcgtcggaggaggagtcggaggagctctcgtctgagtcccactcgcggcatacatgggcgtcgccacccttcttcttgtagtatttcttcttctcctttcttctccccttcttgtcgtcgcccctgtcactgtcactagaaataggacattttgctataaagtgaccgggcttaccacacttgtagcaaaccttcttggagcggggcttgtaatctttccccctcctttgcttaagaatttggcggaagctcttgatgacgagtgccatttcctcattgtcgagctttgaggcgtcgattggttgtctacttgatgtagactcctccttcttctcctccgttgccttgaatgcaaccgtttgtgcttcggatgtggagggatcatctagctcattgattttctttgagcccttgatcatatactcaaagctcacaaaattcccaattacttccgcgagagtcattagtatatatctaggattaccacgaattaattgaacttgagtagggttaaggaaaataagtgatctaagaataaccttaaccatctcgtggtcatcccactttttgctcccgaggttgcgcacttggttcaccaaggttttgagccggttgtacatgtcttgtggctcttcccctttgtgaagccggaagcgaccgagctccccctcgatcgtctcccgcttggtgatcttggttagttcatctccctcgtgcgcggtcttgagcacgtcccaaacttccttggccctctttaatccttgcacgttgttatactcctctcgacttagagaggcgaggagtatagttgtggcttgggagttgaagtgctcgatttgggctacctcgtcctcatcataatcctcatcccctacggatggtacctgtgctccaaactcaacaacattccatatacttttgtggagtgaggttaggtgaaatttcatcaaatcactccacctagcgtaatcttcaccgtcaaaggttgacggtttgcctaatggaacagaaagtaatggagtatgtttagaaatgcgagggtagcgtaggggaatcttactaaacttcttgcgctcatggctcttagaagtaatggatggcgcgtcggagccggaggtggaaggtgatgaagtgtcggtctcgtagtagaccaccttcctcatcttctttttcttgtcgccactctgatgcgacttgtgggaagaggctttcttctccttccccttccccttgttgtgggactcttccgatgaagctttctcgtggcttgtagtgggcttgtcgccggtcttcatctccttcttggcgtgatctcccgacat

SEQ ID NO: 4870 - DNA, 5304 bp, Zea mays
  Clone ID: TF_ZmC951_350
ctaatgatctcttttctcaattgtggaacttggagaggtttgaaagctttgaatgtgtcttggaatggattgctagctcttgtattgaatgttgaaggttggaatgcttggatgaagtgaatggaggtggttggggttgtatttatagccaccaaccacttcctagccgttgctccttttctgctgagcgcggacggtccgccctcctggtgcggacggtccgcccctatagatcaacggcgaccggacggtccgcgcctgaggccggacggtccgcgcgagggctcggacggtcttcgcttttcctccggacagtctgtagtggaaacttgtgtttttgcattggttctgtccgaggggtatcccgatgtcgcggacggtccgccgcaagagcccggacggtccgcgcttggcctgtttttccaaaaagcttctcctgtccggaataatcttttgatccacggacttacctcccgtgtcgaggtcgagatgcccattagtgcccatgggtgtcttgatgggtttggcatccttcatcccaaacttagcaagaatgtcttgagtgtacttcgcttggctaatgaaggtgccctcttggagttgcttgacttggaatcctagaaaatacttcaactcccccatcatcgacatctcgaatttctgtgtcatgatcctactaaactcttcacatgtagactcgttagtagacccaaatataatgtcatcaacataaatttggcatacaaacaagtctttttcaagagttttagtgaataaagtaggatcggccttgccgactttgaagccatttgcaataaggaaatctcttaggcattcataccatgctcttggggcttgcttgagcccataaagcgccttagagagcctatagacatggttagggtactcactgtcttcaaagccgggaggttgctcaacatagacctcttccttgattggtccgttgaggaaggcacttttcacgtccatttgatagagcttaaagccatggtaagtagcataggccaataatatgcggattgactcaagcctagctacgggtgcataggtttcaccgaaatccaaaccttcgacttgggagtatcctttggccacgagtcgagctttgttccttgtcaccacaccatgctcatcttgcttgttgcggaagacccatttggttcctacaacattttggttaggacgtggaactaaatgccagacctcattcctcgtgaaattgttgagctcctcttgcatcgccaccacccaatccgaatcttggagtgcttcctctaccctgtgtggctcaatagaggaaacaaacgagtaatgttcacaaaaatgtgcaacacgagatctagtggttacccccttataaatatcgccgaggatggtgtcgacggggtgatctcgttggattgcttggtggactcttgggtgtggcggtcttggttcttcctcatcctccttttcttgatcatttgtatctcccccttgatcattgctatcatcttgaggtggctcgtcttcttgattttgctcttcatcattttgagcctcatcctcattttgagttggtggagatgcttgcatgggggaggatggttgatcttgtgtacttggaggctcttcggattccttaggacacacatccccaatggacatgttcctaagcgctatgcatggagcctgttcttcacctatctcatcaagatccatttgctctacttgagagccgttagtttcatcaaacgcaacgtcacaagagacttcaactagtccagtggacttgttaaagaccctatatgcccttgtgtttgagtcataaccaagtaaaaagccttctacagttttaggagcaaatttagattttctacctcttttaataagaatgaagcatttgctaccaaaaactctaaaatatgaaatgttgggctttttaccggttaggagttcatatgatgtcttcttgaggattcggtgaagatataaccggttgatggcgtagcaggcggtgttgaccgcttcggcccaaaaccggtccggtgtcttgtactcatcaagcatggttcttgccatgtccaatagagttcgattcttcctctccactacaccattttgttgtggagtgtagggagaagagaactcatgcttgatgccctcctcctcaaggaagccttcaatttgagagttcttgaactccttcccgttgtcgcttcttattttcttgatccttaagccgaactcattttgagctcgtctcaagaatccctttaaggtctcttgggtttgagatttttcaagacaatacttactcccgccgatgcttatgtaagcaatcgggccgaatagatccatgtggagtagctcaagcggcctgtcggtagtcatgatgttcttgcgtggatgatggactccaacttgcttccctgcctggcatgcgctacaaatcctgtctttctcaaaatgaacatttgttaatcctaaaatgtgctctccctttagaagcttatgaagattcttcatcccaacatgggctagtcggcggtgccagagccaacccatgttagtcttagcaattaagcatgtgtcgagttcagctctatcaaaatccactaagtatagctgaccctctaacacacccttaaatgctattgaatcatcacttcttctaaagacagtgacaccttgatttccatccccgaatgtgatagctcgttggggatcttggtttttctcatatgaggagaacatccttttctcccctgtcatgtggtttgtgcacccgctgtcgagtatccaacttgagcccccggatgcataaaccttgccggatttgctagtaagcacataagatgcatcaaaagttttaaatgaaatggcatgatcatttgatgcattagtggttttctttctaggcaacttggcatgggttggttgcctagatctagatgtctcacccttatacatgaaagcatgattagggccagagtgagacttcctagaatgaattttcctaattttgtcctcgggatagccggcagggtataaaatgtaaccctcgttatcctgaggcatgggagccttgccctttacaaaatttgacaatcttttaggaggggcactaagtttgacattgtctcccctttggtagccaatgccatccttaatcccagggcgtctcccattataaagcatgctacgagcaaatttaaatttctcattttctaagttgtgctcggcaattttagcatctagtttagctatatgatcattttgttgcttaattaaaatcatgtgatcatgaatagcatcaacattaatgtctctacatctagtacaaatagtaacatgctcaatggtagatgtagagggtttgcaagaattaagttcaacgatcttagcatgaagtatgtcattcttatctctaagatcggcaattgtaactttgcaaacatcaaaatctttagccttagcaatcaaattttcattctctaatctaaggctagcaagagaaatgtttaattcttcaatcctagcaagcaactcatcattattatctctagaattgggaattgaaacattacaaacatgagaatcaaccttagcatttaaactagcattttcatttctaaggttgtcaatcatctcacggcaagtgcttagctcactagataatttttcacatttctcaacttctagagcataagcctttttcaccttaacatgtttcttgttttctttaattagacaatcctcttgggaatccaagaggtcatccttttcatgaatagcacttactaattcatttaatttttccttttgagctatgttaaggttggcaaaaagggaacgcaagctatcttcctcatcactagcattgtcatcactagaagattcatatttagtggaggagttggatttaaccttcttctttttgccgtcctttgccatgaggcacttgtggccgacgttggggaagaggagtcccttggtgacggcgatgttggcggcgtcctcgtcgtcggaggagtcgcttgagcttttgtcggaatcccattcccgacaaacatgggcatcgccgcccttcttcttgtagtattttttcttttcctttcttctccccttcttgtcgtcgcctcggtcactgtcactagatataggacatttagcaataaaatgaccgggcttaccacatttgtagcaaaccttcttggagcgggacttgtagtctttccccctcctttgtttgaggatttggcggaagctcttgatgacgagcgccatttcctcattgtcgagcttggaggcgtcgattggttgtcgacttggtgtagcctcctccttcttctcctccgttgccttgaatgcaacgggttgggcttcggatgagtcgccaagctcgttgattttcctcgagccttctatcatgcactcaaaacttacaaaatgcccgataacttccacttcgtggtcatcccacttcttgctcccgaggttgcgcacttggttcaccaaagtcttgagccggttgtacatatgttgtggctcctcccctttgagaagccggaaccgaccgagctccccctcgatcgtttcccgcttggtgatcttggtgagctcatctccctcgtgcgcggttttgagtacatcccaaatctccttggcgttcttcaacccttgtactttgttatactcctctttacttagagaggcgaggagtattgttgttgcttgagagttgaagtgctcgatttgggccacctcatcctcatcatagtcctcatcccctacggatggtacctgcgcgccaaactcaacaacatcccatatgcttttgtggagcgaggttagatgaaatcgcattaaatcgctccacctcgcgtaatcttcaccatcaaaagttggtggtttgcctaatgggacggagagtaaaggtgtatgtttggaaatgcgagggtagcgtagggggatcttactatacttcttgcgctcttggcgcttagaagtgacggagggcgcatcggagtcggaggtcgatgttgatgaagtgtcggtctcgtagtagaccaccttcctcatcctcttgtgcttgtcacctttccgatgcggcttgtgggaagaagatttttccttcttctctttgtggtgagaagaagatttcttctccttccctttgttggaggagctcttcttcttctccctccttttggtgcgggactcttccgatgaagtgctcccgtagcttgtagtgggcttttcgccggtctccatctccttcttggcgtgatctcccgacat

SEQ ID NO: 4871 - DNA, 7456 bp, Zea mays
  Clone ID: TF_ZmC951_351
cttcgacttgggagtatcccttggccacgagtcgagctttgttcctagtcaccacaccatgctcgtcttgtttgttgcggaagacccacttggttcctacaacattttggttaggacgtggaactaaatgccatacctcgttcctcaagaagttgttgagctcttcttgcatcgccatcacccaatccgaatcttgaagtgcttcctctatcctgtgtggctcaatagaggaaacaaaagagtaatgctcacagaaatgtgcaacccgagatcgagtggttacccccttatgaatgtcgccgaggatggtgtcgacggggtgatctcgttggattgcttggtggactcttgggtgtggcggccttggttgttcatcctccttgtcttgatcacttgcatctcccccttgatcattgccattatcttgaggtggctcatctctttgatcttctccttcatcaacttgagcctcgtcctcattttgagttggtggagatgcttgcgtggaggaggatggttgatcttgtgtatttggaggctcttcgaattccttagggcacacatccccaatggacatgttccttagcgcgatgcacggagcctgttcttcacctatctcatcaagatcaacttgctctacttgagagccgttagtttcatcaaacacaacgttacaagaaacttcaactagtcctgaggacttgttaaagactctatatgcccttgtgtttgaatcatatcctagtaaaaagccttctacagttttaggagcaaatttagattttctacctctcgcctcggcccaaaaccgatccggtgtcttgtactcatcaagcatggttctagccatgtccaatagagttcgattcttcctctccactacaccattttgttgtggcgtgtagggagaagagaactcatgcttgatcccctcctcctcaaggaaaccttctatttgtgagttcttgaactccgtcccgttgtcgcttcttattttcttgatccttaagccgaactcattttgagcccgtctcaagaatccctttaaggtctcttgggtttgagatttttccaagtatagctgaccctctaacactcccttaaatgctattgaatcatcacttcttctaaagacagtgacaccttgatttccatccccgaatgtgatagctcgttgggaatcttggtttttctcataagaggagaacatcttcttttcccctgtcatgtggtttgtgcacccgctgtcgagtatccaacttgagcccccggatgcataaaccttgccggatttgttagttaaaacatatgatgcatcaaaagttttaaaagaaatgtcatgctcatttgatgcactaggagttttcttcttaggcaacttagcacgggttggttgcctagagctagatgtctcacccttatacataaaagcatggttagggccagagtgagacttcctagagtgaattttcctaattttgctctcaggataaccggcagggtataaaatgtaaccctcgttatcctgaggcatgggagccttgcccttaacaaaatttgacaatcttttaggaggggcactaagtttgacattgtctcccctttggtagccaatgccatccttaatgccagggtgtctcccattatagagcatacttctagcaaatttaaacttttcattttctaagttatgctcggcaatttttgcatctaatattgctatatgatcattttgttgtttaatcaaagtcatgtgatcatgaatagcattaatatcaacatctctacatctagtacaaatggaaacatgctcaacactagatgtagagggtttgcatgaattaagttcaacgatcttagcacgcaagatatcattattatctctaagatcggaaattgtaacattgcaaacatctagttctttagccttagcaattaaattttcattttctactctaaggctagcaagagaaatgtttaattcttcaatcttagcaagcaaatcatcattatcatttctaagattgggaattgaaacattacaaacatgtgagtcaaccttagcatttaaactagcattttcatttctaaggttggtaatagtatcatggcaagtacttagctcactagataatttctcacatttttctacatgctttttattttccttgattaggaagtcctcttgggagtccaagaggtcatccttttcatggatggcactaattagctcatttagtttttccttttgttccatgttaaggttggcaaaaagggtacgcaaattattctcctcatcactagcattatcatcactagaggattcatatttcgtggaggacttagatttaaccttcttccttttgccgtcctttgccatgaggcacttgtggccgacgttggggaagagaagtcccttggtgacggcgatgttggcggcgtcctcgtcggaagaggactcggtggagctctcgtcggagtcccattcccggcaaacatgggcatcgccgcccttcttcttgtagtacttcttcttttctctcctctttcccttcttgtcgtcgcccctgtcactgttgaaagtcgccttttgatccacggacttacctcccgtgttgaggtcgagatgcccatttgttcccatgggagtcttgatgggcttggcatccttcattccaaacttggttagaatgtcttgagtgtactttgtttgacaaatgaaggtgccctcttggagttgcttcacttgaaatcctaagaaatacttcaactcccccatcatagacatctcgaatttctgtgtcatgatcctactaaattcaaacaaatcattgtcaagagtcttagtgaatagagtaggatcggccttgccgactttgaagccattagcgataaggaaatctctaaggcattcataccatgctcttggggcttgcttgagcccataaagcgccttagagagcttatagacatggttagggtacttactatcttcaaagccgggaggttgctcaacatagacctcttccttgattggtccattgaggaaagcacttttcacgtccatttgataaagcttaaagccatggtaagtagcataggctaataatatgcgaattgactcaagcctagctacgggtgcataggtttcaccgaaatccaaaccttcgacttgggagtatcctttggccacaagtcgagctttgttccttgtcaccacaccatgctcatcttgcttgttgcggaagacccatttggttcctacaacattttggttaggacgtggaactaagtgccatacctcgttccttgtgaaattgttgagctcctcttgcatcgccaccacccaatccgaatcttgtagtgcttcctctaccctgtgtggctcaatagaggaaacaaaagagtaatgctcacaaaaatgtgcaacacgagatcgagtggttacccccttatgaatgtcaccgagaatggtgtcgacggggtgatctcgttggattgcttggtggactcttgggtgtggcggccttggttgttcgtcctccttgtcttcatcatttgcatctcccccttgatcgttgccgtcatcttgaggtggctcatccttttgatcctctccttcatcaacttgagcctcgtcctcatcatgggttggtggagatgcttgcgtggaggaggatggttgatcttgtgtatttggaggctcttcgaattccttagggcacacatccccaatggacatgtttcttagcgcgatgcacggagcctgttcttcacctatctcatcaagatcaacttgctctacttgagagccgttagtctcatcaaacacaacgtcacatgagacttcaactagtccagtggacttgttaaagactctatatgcccttgtgtttgagtcatagccaagtaaaaggccttctacagtcttaggagcaaatttagattttctacctcttttaacaagaataaagcatttgctaccaaaaactctaaaataggaaatgttgggctttttaccggttaggagttcataggatgtcttcttgaggattcggtgtagatataaccggttgatggcgtagcaagcggtgttgaccgcctcggcccaaaaccgatccggtgtcttgtactcatcaagcatggttctagccatgtccaagagagttcgattcttcctctccacttctatttgtgagttcttgaactccgtcccattgtcgcttctaattttcttgatccttaagccgaactcattttgagcccgtctcaagaatccctttaaggtctcttgggtatgagatttgtcctgcaaaaagaatacccaagtgaagcgagaataatcatccacaataactagacagtacttactcccgccgatgcttatgtaagcaatcgggccgaatagatccatgtgtaggagctccagtggcctgtcggtcgtcatgatgttcttgtgtggatgatgagctccaacttgcttccctgcctggcatgcgctacaaatcctgtctttctcaaaatgaacatttgttaatcctaaaatgtgttctccctttagaagcttatgaagattcttcattccaacatgggctagtcggcggtgccagagccaacccatgttagtcttagcagttaagcaagtgtcgagttcagctctatcaaaatctactaagtatagctgaccctctaacactcccttaaatgctattgaatcatcacttcttctaaagacagtgacaccttgatttccatccccgaatgtgatagctcgttggggatcttggtttttctcatatgaggagaacatctttttctcccctgtcatgtggtttgtgcacccgctgtcgagtatccaacttgagcccccggatgcataaaccttgccggatttgttagtaagcatataagaagcatcaaaagttttaaatgaaatggcatgatcatttgatgcattaggagttttctttctaggcaacttggcacgggttggttgcctagagctagatgtctcacccttatacataaaagcatgattagggccagagtgagacttcctagaatgaattttcctaattttgctctcaggatagccggcagggtacaaaatgtagccctcgttatcctgaggcatgggagccttgcccttaacaaagttagacaagttcttaggaggggcattaattttgacattgtctcccctttggaagccaatgccatccttaatgccagggcgtctcccattataaagcatgctacgagcaaatttaaatttctcattttctaagttgtgctcggcaattttagcatctagttttgctatatgatcattttgttgtttaattaaagccatatgatcatgaatagcattaacatcaacatctctacatctagtacaaatagatacatgctcaacaatagatgtagagggtttgcaagaattaagttcaacaatcttagcatgaagaatatcatttttatctctaagatcggaaattgtaactttgcaaacatcataatctttagccttagcaattaaaattttattttctactctaaggctagcaagagaaatattcaattcttcaatcctagcaagcaaatcatcattattatctttaggattggaagttgaaacaatgcaaacatgagaatcaaccttagcatttaaactagcattttcattcctaaggttgtcaatcatctcacggcaagtgcttagctcactagataatttttcacatttttctacttctagagcataagcctttttaaccttaacatgtttcttgttttctttaattagacaatcctcttgggagtccaaaaggtcatccttttcatgaatagcactaatcaattcatttaatttttctttttgctccatgttaagattggcaaagagaacacgcaaattatcctcctcatcactatcattatcatcactagaagactcatatttagtggaggagttagatttaaccttcttccgtttgccgtcctttgccatgaggcacttgtggccgacgttggggaagagaagtcccttggtgacggcgatgttggcggcgtcctcgtcgtcggaggagtcgcttgagctttcgtcggaatcccactcccgacaaacatgggcatcgccgcccttcttcttgtagtacttctttttctcctttcttctccccttcttgtcgtcgcctcggtcactgtcacttgatataggacatttagcaataaaatgaccgggcttaccacatttgtagcaaaccttcttggagcgggacttgtagtctttccctctcctttgcttgaggatttggcggaagctcttgatgacgagcgccatttcctcattgtcgagcttggaggcgtctataggttgtcgacttggtgtagcctcctccttcttttcctccgtcgccttgaatgcgacgggttgagcttcggatgtggatggatcatcaagctcgttgatcttcctcgagccttcgatcatgcactcaaaacttacaaaattcccgataacttcctcgggggtcattttagtatatctaggattaccacgaattaattgaacttgagtggggttaaggaaaatgagagatcttagaataaccttaaccatttcgtggtcgtcccacttcgtgctcccgaggttgcgcacttggttcaccaaagtcttgagccggttgtacatgtgttgtggctcctcccctttgcgaagtcggaaccgaccgagctccccctcgatcgtttcccgcttggtgatctttgtgagctcatctccctcgtgcgcggttttgagcacatcccaaacctcctttgcgctcttcaacccttgaactttgttatactcctctctacttaaagatgcgaggagtattgttgtcgcttgagagttgaagtgctcgatttgggccacctcatcctcatcatagtctttatcccctacggatggtacctgtgcaccaaactcaacaacatcccatatacttttgtggagtgaggttagatgaaatcgcattaaatcactccacctagcataatcttcaccatcaaaagttggtggtttgcctaatgggacggaaagtaaaggtgcatttttagaaatgcgagggtaatgtagggggatcttactaaacttcttacgctcttggcgtttagaagttacggagggcgcatcggagccggaggtcgatgttgatgaagtgtcggtctcatagtagaccactttcctcatccttttgtgcttgtcccctctccgatgtggcttgtgggaggaagatctctccttcttctccttgtggtgcgaagaagatttcttctccttccctttgttggaggagctctttttcttctccttcctcttggtgcgggactcttccgatgaagtgctcccgtggcttgtagtgggcttttcgccggtctccatctccttcttggcgtgatctcccgacat

SEQ ID NO: 4872 - DNA, 5784 bp, Zea mays
  Clone ID: TF_ZmC951_359
ctagcaaaagaaattgcgtgaatcaagaatattgagctcatgcctaagtttggtaaaagtttgttcatcaagaggcttggtaaaaatatcggctaattgatctttagtgttaatataagaaatctcgatatcccccttttgttggtgatccctaagaaaatgatactgaatggctatgtgtttagtgcggctatgctcgacgggattatccgccatcttgattgcactctcattatcacatagcaaagggactttggttaatttgtaaccgtagtcccgcagggtttgcctcatccaaagcaattgcgcgcaacaatggcctgcggcaatgtactcggcttcggcggtggaaagagcgaccgaattttgcttctttgaagcccaagacaccaaggatcttcccaagaactgacaagtccccgatgtgctcttcctattgattttgcaccccgcccaatcggcatccgaataaccaatcaaatcaaatgtggatccccgagggtaccaaagcccaaacttaggagtataagccaaatatctcaagattcgttttacggccgtaaggtgggattccttagggtcggattggaatcttgcacacatgcaaacggaaagcataatgtccggtcgagatgcacataagtatagcaaggaacctatcattgaccggtataccttttgatccacggacttacctcccgtgtcgaggtcaagatgcccattggttcccatgggtgtcttgatgggcttggcatccttcatcccaaacttgtttagaatgtcttgagtgtacttcgtttggctaatgaaggtgccctcttggagttgcttcacttggaaccctaagaaatacttcaactcccccatcatagacatctcgaacttctgtgtcataatcctactaaactcttcacatgtagattcgttagtagacccaaatatgatatcatcaacataaatttggcatacaaacaaatcattttcaagcgttttagtaaagagtgtaggatcggcctttccgactttgaagccattagcaataaggaaatctctaaggcattcataccatgctcttggggcttgcttgagcccataaagcgccttagagagcttatagacatggttagggtactcactgtcttcaaagccgggaggttgctcaacgtagacctcttccttgattggtccattgaggaagacacttttcacgtccatttgataaagcttaaagccatggtaagtagcataggccaataaaatgcgaattgactcaagcctagctacgggtgcataggtttcaccgaaatccaaaccttcgacttgggagtatcctttggccacaagtcgagctttgttccttgtcaccacaccatgctcatcttgcttgttgcggaagacccatttggttcctacaacattttggttaggacgtggaactaaatgccatacctcattcctggtgaagttgttgagctcctcttgcatcgccaccacccaatccgaatcttgtagtgcttcctctaccctgtgtggctcaatagaggaaacaaacgagtaatgttcacaaaaatgtgcaacacgagatctagtggttacccccttatgaatgtcgccgaggatggtgtcgacggggtgatctcgttgtattgcttggtggactcttgggtgtggcggtctttgctcttcatcctccttgtcttgatcatttgcatctcccccttgatctatgccgtcatcttgaggtggctcatttgattgatcttcttcttcatcaacttgagcctcttcctcattttgagtgggtggagatgcttgcatggaggaggacggttgatcttgtgcttttggaggttcttcggattccttaggacacacatccccaatggacatgttccttagtgcgatgcatggaacctcttcaatacctatctcatcaagatcaacttgctctacttgagagccgttagtttcatcaaacacaacgtcacatgatacttcaaccagtccagtggacttgttaaagatcctatatgcccttgtgtttgagtcataaccaagtaaaaagccttctacagtcttaggagcaaatttagattttctacctcttttaacaagaataaaacatttgctaccaaagactctaaaatatgaaatattgggctttttaccggttaggagttcatatgatgtcttcttgaggattcggtgtagatataaccggttgatggcgtagcaagcggtgttgaccgcctcggcccaaaaccgatctgaagtcttgtactcatcaagcatagttctagccatgtccaatagagttctattcttcctctccactacaccattttgttgtggcgtgtagggagaagagaactcatgcttgatgccctcctcctcaaggaagccttcaatttgtgagtttttgaactccgttccgttgtcgcttcttattttcttgatccttaagccgaactcattttgagcccgtctcaagaatccctttaaggtctcttgggtttgagatttttcctgcaaaaagaatacccaagtgaagcgagaataatcatccacaataactagacagtacttactcccgccgatgcttatgtaagcaatcgggccgaataggtccatgtgtaagagctctagtggtctgtcggtcgtcattatgttcttgtgtggatgatgggcgccaacttgctttcctgcctgacatgcgctacaagtcctgtctttctcaaaatgaacattggttagtcctaaaatgtgctctccctttagaagcttatgaagattcttcatcccaacatgggctagtcggcggtgccagagccaacccatgttagtcttagcaattaagcatgtgtcaagttcagctctatcaaaatctactaagtatagctgaccctctaacacacccttaaatgctattgaatcatcacttcttctaaagacagtgacacctttgaccaaaccttgatttccatccccgaatgtgatagctcgttggggatctttgtttttctcgtaggaggagaacatctttttctcccctgtcatgtggtttgtgcacccgctgtcgagtatccaacttgagcccccggatgcataaacccaaatggttttgggtcctttggcattagacacaagaattttgggtacccaaacacaagtctttgaccccttgtgcttgcccccaacatatttggcaactactttgccagatttgttagtcaacacataagatgcatcaaaagtcttaaatgaaatgctatgttcatttgatgcattaggaattttcttcttaggcaacttagcacgggttggttgcctagagctagatgtctcactcttatacataaaagcatggttagaaccagagtgagacttcttagaatgaattttcctaattttgtcctcgggatagccggcagggtataaaatgtaaccctcgttatcctgaggcatgggagccttgcccttaacaaaattggacaatcttttaggaggggcactaagtttgacattgtctcccctttggaagccaatgccatccttaatgcccgggcgtctcccattatagagcatacttctagcaaatttaaatttttcattttctaagttatgctcggcaattttagcatctaattttgctatatgatcattttgttgtttaattaaagtcatgtgatcatgtatagcatcaatgttaacatctctacatctagtacaaatagaagtgtgctcaacggtagatgtagagggtttgcaagattttagttcaacaaccttagcatgcaatatttcatttttacttctaaggtcggaaatagtagcattgcaaacatcaaaatctttagccttagcaagtaatttttcattttcattcctaaggctagcaagagaatcattcatttccttaatcttagcaagcaaatcatcattatcatttctaagattgggaattgaagcatcacaaacatgagaatcaaccttagctaacaaattagcattttcatttctaaggttgtctattgtctcatggcaagtgcttagctcactagataatttttcacatttttccatttctagagcataagcatttttaaccttaacatgttttttattttccttgattaggaagtcctcttgggtgtccaagagatcatccttttcatggatggcactaatcaattcattaagtttttccttttgttgcatgttgaggttggcaaaaagagtacgcaaattgtcttcctcatcactagcattatcatcactagaggattcatatttagtggaggatttagatttaaccttctttttgtcgtcctttgccatgaggcatttgtggccgacgttggggaagagaagccctttggtgacggcgatgtgggcggcgtcctcgtcgtcggaggagtcgcttgagctttcgtcggagtcccactcccgacaaacatgggcatcgccgcccttcttcttgtagtatctcttcttctcctttcttctccccttcttgtcgtcgcctcggtcactgtcactagatataggacatttagcaataaaatgaccgggcttaccacatttgtagcaaaccttcttggagcgggacttgtagtctttccctctcctttgcttgaggatttggcggaagctcttgatgacgagcgccatttcctcattgtcgagcttggaggcgtctattggttgtcgacttggtgtagcctcctccttcttctcctccgtcgccttgaatgcaacgggttgagcttcggatgtggatggatcatcaagctcgttgatcttcctcgagccttcgatcatgcactcaaaacttacaaaattcccgataacttcctcggcggtcattttagtatatctaggattaccacgaattaattgaacttgagtggggttaaggaaaatgagagatcttagaataaccttaaccatttcgtggtcgtcccattttgtgctcccgaggttgcgcacttggttcaccaaagtcttgagccggttgtacatgtgttgtggctcctcccctttgcgaagtcgaaaccgaccgagctccccctcgatcgtttcccgcttggtgattttggtgagctcatctccttcgtgcgcggttttgagcacatcccaaacctccttggcgctcttcaacccttgaactttgttatactcctctctacttaaagaggcgaggagtattgttgtcgcttgagagttgaagttctcgatttgggccacctcatcctcatcataatctttatcccctacagacggtacctgtgcaccaaactcaacaacgtcccatatacttttgtggagtgaggttagatgaaatcgcattaaatcactccacctagcataatcttcaccatcaaaagttggtggtttgcctaatgggactgaaagtaaaggtgcatgtttagaaatgcgagagtagtgtagggggatcttactaaacttcttacgctcttggcgtttagaagttacggagggcgcatcggagtcgaaggtcgatgttgatgaagtgtcggtctcgtagtagaccactttcctcatcctcttttgcttgtctccgcttcgatgcggcttgtgggaagaagatttttccttcttctccttgtgatgagaagaagatttcttctccttccctttgttggaggagctcttcttcttctccctcctcttggtgcgggactcttccgatgaagtgctcccatggcttgtagtgggcttttcgccggtctccatctccttcttggcgtgatctcccgacat

SEQ ID NO: 4873 - DNA, 5679 bp, Zea mays
  Clone ID: TF_ZmC951_364
ctagcaaaagaaatttctagaatcaagaatattgagctcatgcctaagtctggtaaaagattgttcatcaagtggcttggtaaagatatcggctaattgatctttagtgttaatgtaagaaatctcgatatctcccttttgttggtgatccctaagaaaatgataccgaatggctatgtgcttagtgcggctatgctcgacgggattgtcggccattttgattgcactctcattatcacatagcaaagggactttggttaatttgtaaccgtagtcccgcagggtttgcctcatccaaagcaattgcgcgcaacaatgtcctgcggcaatgtactcggcttcggcggtggaaagagcgaccgaattttgcttctttgaagcccaagacaccaaggatcttcccaagaactggcaagtccccgatgtgctcttcctattaattttgcaccccgcccaatcggcatccgaataaccaatcaaatcaaatgtggatccccgagggtaccaaagcccaaacttaggtgtgtaagccaaatatctcaagattcgttttacggccgtaaggtgggattccttagggtcggattggaatcttgcacacaagcaaacggaaagcataatgtccggtcgagatgcacataaataaagcaatgaaccaatcatcgaccggtataccttttgatccacggacttacctcccgtgtcgaggtcgagatgcccattggttcccatgggagtcttgatgggcttggcatccttcattccaaacttggttagaatgtcttgagtgtacttcgtttggcaaatgaaggtgccctcttggagttgcttgacttggaatcctagaaaatacttcaactcccccatcatcgacatctcgaatttctgtgtcatgatcctactaaactcttcacatgtagactcgttagtagacccaaatataatatcatcaacataaatttggcatacaaacaagtcattttcaagagttttagtaaagagtgtaggatcggccttgccgactttgaagccattagcaataaggaaatctcttaggcattcataccatgctcttggggcttgcttgagcccataaagcgccttagagagcctataaacatggttaggatactcactgtcttcaaagccgggaggttgctcaacatagacctcttccttgatcggtccattgaggaaggcacttttcacgtccatttgataaagcttaaagccatggtaagtagcataggctaataatatgcgaattgactcaagcctagctacgggtgcataggtttcaccgaaatccaaaccttcgacttgtgaataccctttggccacgagtcgagctttgttccttgtcaccacaccatgctcatcttgcttgttgcggaagacccatttggttcctacaacattttggttaggacgtggaactaaatgccatacctcattcctcgtgaaattgttgagctcctcttgcattgccaccacccaatccgaatcttgaagtgcttcctccaccctgtgtggctcaatagaggaaacgaaagagtaatgctcacagaaatgtgcaacccgagatcgagtagttacccccttatgaatgtcgccgaggatggtgtcgacggggtgatctcgttggattgcttggtggactcttgggtgtggcggccttggttcttcctcatcctccttttcttgatcaattgcatctccccctggatcattgccatcatcttgaggtggctcatcttcttgattttgcccttcatcaacttgagcttcatcctcattttgagttggtggagatgcttgcttggaggaggacggttgatcttgtgcatttggaggctcttcggattccctaggacacacatccccaatggacatgttccttagcgctatgcatggagcctgttcttcacctatctcatcaagatcaacttgctctacttgagagccgttagtttcatcaaacacaacgtcacatgagacttcaactagtccagtggacttgttaaagaccctatatgcccttgtgtttgagtcataaccaagtaaaaagccttctacagttttaggagcaaatttagattttctacctcttttaacaagaataaagcatttgctaccaaaaactctaaagtatgaaatgttgggctttttaccggttaggagttcatatgatgtcttcttgaggattcggtgaagatataaccggttgatggcgtagcaggcggtgttgaccgcttcggcccaaaaccggtccggtgtcttgtactcatcaagcatggttcttgccatgtccaatagagttcgattcttcctctccactacaccattttgttgaggtgtgtagggagaagagaactcatgcttgatgccctcctcctcaaggaagctttcaatttgagagttcttgaactccgtcccgttgtcgcttcttattttcttgatccttaaggcgaactcattttgagcccgtctcaagaatccctttaaggtctcttgggtttgagatttttcctgtaaaaagaatacccaagtgaagcgagaataatcatccactattacaagacaatacttactcccgtcgatgcttatgtaagcaatcgggccgaatagatccatgtggagtagctcaagcggcctgtcggtcgtcatgatgttcttgtgtggatgatggactccaacttgcttccctgcctggcatgcgctacaaatcctgtctttctcaaaatgaacatttgttaatcctaaaatatgttctccctttagaagcttgtgaagattcttcatcccaacatgggctagtcggcggtgccagagccaacccatgttagtcttagcaattaagcaagtgtcgagttcagctctatcaaaatctaccaagtatagctgaccctctaacactcctttaaaagctattgaatcatcacttcttctaaagacagtgacaccttgatttccatccccgaatgtgatagctcgttggggatctttgtttttctcatatgaggagaacatccttttctccccggtcatgtggtttgtgcacccgctgtcgagtatccaacttgagcccccggatgcataaacccaaactgttttgggtcctttggcattagatacaagaactttgggtacccaaacacaagtcttggaacccttgtgtttgcccccaacaaacttggcaacgaccttgccagttttgttagtcaaaacatatgatgcatcaaaagttttaaatgaaatgctatgttcatttgatgcattagaaattttctttctaggcaacttggcacgggttggttgcctagagctagatgtctcacccttatacataaaagcatgattagggccagagtgagacttcctagaatgaattttcctaattttgctctcgggataaccggcagggtacaaaatgtaaccctcgttatcctgaggcatgggagccttgcccttaacaaagttagacaaatttttaggaggggcattaagtttgacattgtctcccctttggaagccaatgccatccttgatgccagggcgtctcccattatagagcatacttctagcaaatttaaatttttcattttctaagttatgctcggcaattttagcatctagttttgctatatgatcattttgttgtttaattaaagccatatgatcatgaatagcatcaatatcaacatttctacatctagtacaaatagatacatgctcaacaatagatgtagatggtttgcaagaattaagttcaacaatcttagcatgaagaatatcatttttatctctaagattggcaatggtaactttgcaaacatcaaaatctttagccttagcaatcaaactttcattctctaatctaaggctagcaagggaaatgtttaattcttcaatcctagcaagcaaatcatcattattatctctaggattgggaattgaaacattacaaacatgagaatcaaccttagcatttaaactagcattttcatttctaaggttgtcaatcatctcacggcaagtgcttagctcactagataatttttcacatttttctacctctagagcataagcctttttaaccttaacatgtttcttgttttctttaattagacaatcctcttgggaatccaaaaggtcatccttttcatgaatagcactaaccaattcattcaatttttccttttgagctacgttaaggttggcaaaaagggaacgcaaattatcctcctcatcactagcattatcatcactagaagattcatatttagtggaggagttggatttaaccttcttctttttgtcgtcctttgccatgaggcacttgtggccgacgttggggaagaggagtcccttggtgacggcgatgttggcggcgtcctcgtcgtcggaggagtcgcttgagctttcgtcggaatcccattcccgacaaacatgggcatcgccgcccttcttcttgtagtaccttttcttctcctttcttctccccttcttgtcgtcgcctcggtcactgtcactagatataggacatttagcaataaaatgaccgggcttaccacacttgtagcaaaccttcttggagcgggacttgtagtccttccccctcctttgcttgaggatttggcagaagctcttgatgacgagcgccatttcctcattgtcgagcttggaggcgtctattggttgtctacttggtgtagactcctccttcttctcctccgttgccttgaatgcaacgggttgggcttcggatgggtcgccaagctcgttgattttcctcgagccttctatcatgcactcaaaacttacaaaatgcccgataacttcctcgggggtcattttagtatatctaggattaccacgaatcaattgaacttgagtgggattaagaaaaatgagagatcttaaaataacatttaccacttcgtggtcatcccacttcttgctcccgaggttgcgcacttggttcaccaaagtcttgagccggttgtacatatgttgtggctcctcccctttgcgaagccggaaccgaccgagctccccctcgatcgtttcccgcttggtgatcttggtgagctcatctccttcgtgcgcggttttgagcacatcccaaatctccttagcactctcatcctcatcatagttctcatcccctaccgacggtacctgtgcaccaaactcaacaacatcccatatacttttgtggagcgaggttagatgaaatcgcattaaatcgctccacctagcgtaatcttcaccatcaaaagttggtggtttgcctaatgggacggaaagtaaaggtgtatgtttggaaatgcgagggtagcgtagggggatcttactatacttcttgcgctcttggcgcttagaagtgacggagggcgcatcggagtcggaggtcgatgttgatgaagtgtcggtctcgtagtagaccactttcctcatcctcttgtgcttgtcgcctttccgatgcggcttgtgggaagaagatttttccttcttctctttgtggtgagaagaagatttcttctccttccctttgatggaggagctcttcttcttctccctccttttggtgcgggactcttccgatgaagtgctcccgtggcttgtagtgggcttttcgccggtctccatctccttcttggcgtgatctcccgacat

SEQ ID NO: 4874 - DNA, 5772 bp, Zea mays
  Clone ID: TF_ZmC951_366
ctagcaaaagaaatttctagaatcaagaatattgagctcatgcctaagtttggtaaaagattgttcatcaagaggcttggtaaagatatcggctaattgatctttagtgttaatgtaagaaatctcgatatctcccttttgttggtgatccctaagaaaatgataccggatggctatgtgtttagtgcggctatgctcgacgggattgtcggccatttttattgcactctcattatcacatagcaagggaactttggtcaatttgtaaccgtagtcccgcagggtttgcctcatccaaagcaattgcgcgcaacaatggcctgcggcaatgtactcggcttcggcggtggaaagagcgaccgaattttgcttctttgaagcccaagacaccaaggatcttcccaagaactggcaagtccccgatgtgctcttcctattgattttgcaccccgcccaatcggcatccgaataaccaatcaaatcaaatgtggatcccctaggataccaaagcccaaacttaggagtataagctaaatatctcaagattcgttttacggccgtaaggtgggattccttagggtcggattgaaatcttgcacacatgcaaacggaaagcataatatccggtcgagatgcacataaataaagcaatgaaccaatcatcgaccggtataccttttgatcgacggatttacctcccgtgtcgaggtcgagatgcccattggttcccatgggtgtcttgatgggcttggcatccttcattccaaacttggttagaatgtcttgagtgtacttcgtttggcaaatgaaggtgccctcttggagttgcttgacttggaatcctagaaaatacttcaactcccccatcatcgatatctcgaatttctgtgtcatgatcctactaaactcttcacatgtagactcgttagtagacccaaatataatatcatcaacataaatttggcatacaaacaagtcattttcaagagttttagtaaagagtgtaggatcggccttgccgactttgaagccattagaaataaggaaatctcttaggcattcataccatgctcttggggcttgcttgagcccataaagcgccttagagagcctatagacatggttagggtactcactgtcttcaaagccgggaggttgctcaacatagacctcttccttgattggtccattgaggaaggcacttttcacgtccatttgataaagcttaaagccatggtaagtagcataggccaataatatgcgaattgactcaagcctagctacgggtgcataggtttcaccgaaatccaaaccttcgacttgtgaatacccttttgccacgagtcgagctttgttccttgtcaccacaccatgctcatcttgtttgttgcggaagacccatttggttcctacaacattttggttaggacgtggaactaaatgccatacctcgttccttgtgaaattgttgagctcctcttgcattgccaccacccaatccgaatcttgaagtgcttcctctatcctgtgtggctcaatagaggaaacaaaagagtaatgttcacaaaaatgtgcaacacgagatcgagtggttacccccttatgaatgtcgccgaggatggtgtcgacggggtgatctcgttggattgcttggtggactcttgggtgtggcggccttggttcttcctcatcctctttttcttgatcatttgcatctcccccttgatcattgccatcatcttgaggtggctcatcttcttgattttgcccttcatcaacttgagtctcatcctcattttgagttggtggagatgcttgcgtggaggaggatggttgatcttgtgtatttggagactcttcggattccttaggacacacatccccaatggacatgttccttagcgctatgcatggagcctcttcatcacctatctcatcaagattaacttgctctacttgagagccgttagtttcatcaaacacaacgtcacatgagacttcaactagtccagtggacttgttaaagaccctatatgcccttgtgtttgagtcataaccaagtaaaaagccttctacagttttaggagcaaatttagattttctacctcttttaacaagaataaagcatttgctaccaaagactctaaaatatgagatgttgggctttttaccggttaggagttcatatgatgtcttcttgagaattcgatgaagatataaccggttgatggcgtagcaggcggtgttgaccgcttcggcccaaaaccggtccggtgtcttgtactcatcaagcatggttcttgccatgtccaatagagttcgattctttctctccactacaccattttgttgtggcgtgtagggagaggagaactcatgcttgatgccctcctcctcaaggaagccttctatttgtgagttcttgaactccgtcccgttatcgcttctaattttcttgatccttaagccgaactcattttgagcccgtcttaagaatccctttaaggtctcttgggtttgagatttttcctgcaaaaagaatacccaagtgaagcgagaataatcatccactattacaagacaatacttactcccgccgatgcttatgtaagcaatcgggccgaatagatccatgtggagtagctcaagcggcctgtcggtcgtcatgatgttcttgtgtggatgatggactccaacttgcttccctgcctggcatgcgctacaaatcctgtctttctcaaaatgaacatttgttaatcctaaaatgtgctctccctttagaagcttatgaaggttcttcatcccaacatgggctagtcggcggtgccagagccaaccaatgttagtcttagcaattaagcatgtgtcaagttcagctctatcaaaatctactaagtatagctgaccctctaacacacccttaaatgctattgaatcatcacttcttctaaagacagtgacaccttgatttccatccccgaatgtgatagctcgttggggatcttggtttttctcatatgaggagaacatccttttctccccggtcatgtggtttgtgcacccgctgtcgagtatccaacttgagcccccggatgcataaacccaaactgttttgggtcctttggcattagaaacaagaactttgggtacccaaacacaagtcttggaacccttgtgtttgcccccaacaaacttggcaaccactttgccggatttgttagtaagcacataagaagcatcaaaagttttaaatgaaatggcatggtcatttgatgcattaggagttttctttctaggcaacttggcacgggttggttgcctagagctagatgtctcacccttatacataaaagcatgattagggccagagtgagacttcctagaatgaattctcctaattttgctctcaggatagccggcagggtacaaaatgtagccctcgttatcctgaggcatgggagccttgcccttaacaaagttagacaagttcttaggaggggcattaattttgacattgtctcccctttggaagccaatgccatccttaatgccagggcgtctcccgttataaagcatgctacgagcaaatttaaatttctcattttctaagttgtgctcggcaattttagcatctagttttgctatatgatcattttgttgtttaattaaagccatatgatcatgaatagcatgaatatcaacatctctacatctagtacaaatagatacatgctcaacaatagatgtagagggtttgcaagaattaagctcaacaatcttagcatgaagaatatcatttttatcgctaagatcggaaattgtaactttgcaaatatcaaaatctttagccttagcaattaaatcttcattctctaatctaaggctagcaagagatacattcaattcatcaatcttagcaagcaagtcaacattatcatctctaagattgggaattgaaatattacaaacatgtgaatcaaccttagcatttaaaatagcattttcatttctaaggttgtcaatcatctcacgacaagtgcttagctcactagatagtttttgacatttttctacttctagagcataagcatttttaaccttaacatgtttcttgttttctttaattagacaatcctcttgggcatccaaaaggtcatccttttcatgaatagcactaactaattcatttaatttttctttttgagctatgttaaggttggcaaaaagggaacacaaattatcctcctcatcactagcattatcatcactagaagattcatatttagtggaggagttggatttaaccttcttctttttgccgtcctttgccatgaggcacttgtggccgacgttggggaagaggagtcccttggtgacggcgatgttggcggcgtcctcgtcgtcggaggagtcgcttgagctttcgtcggaatcccattcccgacaaacatgggcatcgccgcccttcttcttgtagtaccttttcttctcctttcttctccccttcttgtcgtcgcctcggtcactgtcactagatataggacatttagcaataaaatgaccgggcttaccacacttgtagcaaaccttcttggagcgggacttgtagtccttccccctcctttgcttgaggatttggcggaagctcttgatgacgagcgccatttcctcattgtcgagcttggaggcgtctattggttgtctacttggtgtagactcctccttcttctcctccgttgccttgaatgcaacgggttgggcttcggatgggtcgccaagctcgttgattttcctcgagccttctatcatgcactcaaaacttacaaaatgcccgataacttcctcgggggtcattttagtatatctaggattaccacgaatcaattgaacttgagtgggattaagaaaaatgagagatcttaaaataacatttaccacttcgtggtcatcccacttcttgctcccgaggttgcgcacttggttcaccaaagtcttgagccggttgtacatgtgttgtggctcctcccctttgcgaagccggaaccgaccgagctccccctcgatcgtttcccgcttggtgatcttggtgagctcatctccttcgtgcgcggttttgagcacatcccaaatctccttagcgctcttcaacccttgtactttgttatactcctctctacttagagaggcgagaagtattgtcgttgcttgtgagttgaagtgctcgatttgggccacctcatcctcatcatagttctcatcccctaccgacggtacctgtgcaccaaactcaacaacatcccatatacttttgtggagcgagattagatgaaatcgcattaaatcgctccacctagcgtaatcttcaccatcaaaagttggtggtttgcctaatgggacggaaagtaaaggagtatgtttggaaatgccagggtagcgtaggggaatcttactatacttcttgcgctcttggcgcttagaagtgacggagggcgcgtcggagtcggaggttgatgttgatgaagtgtcggtctcgtagtagaccaccttcctcattcttttgtgcttgtctcctctccgatgcggcttgtgagaagaagatttttccttcttctctttgtggtgtgaagaggaagactttttctccttccgtttggaggagtccttcttcttctccttcctcttggtgtgggactcttccgatgaagtgctcccttggcttgtagtgggcttttcgccggtctccatctccttcttggcgtgatctcccgacat

SEQ ID NO: 4875 - DNA, 3414 bp, Zea mays
  Clone ID: TF_ZmC951_372
atgtcgggagatcacgccaagaaggaaatggtgaccggcgagaagcccactacaagccacgggaaagcttcatcggaagagtcccgcaacaaagggaaagggaaggagaagaaaccctcttcccacaaatcgcatcggagtggcgataagaaaaagaagatgaggaaggtggtctactacgagaccgatacttcatcaccttccacctccggctccgacgcgccatccattacttctaagcgccatgagcgcaagaagtttagtaagattcccttacgctatcctcgcactcctagacatacgcctctactttccgtcccattaggcaaaccaccaacatttgatggtgaagattatgctaggtggagtgatttaatgcgatttcatctaacctcactccacaaaagtatatgggatgttgttgagtttggtgtgcaggtaccatccgtaggggatgaagattatgatgaggatgaagtggcccaaatcgagcacttcaactcccaagccacaactatactcctcgcctctctaagtcgagaggagtataacaaggtgcaaggattaaagagcgccaaggaagtttgggacgtgctcaagaccgcgcacgaaggagatgagctaaccaagatcaccaagcgagagacgatcgagggggagctcggtcgcttccgtcttcgccaaggggaggagccacaagacatgtacaaccggctcaaaaccttggtgaaccaagtgcgcaacctcgggagcaaaaaatgggatgaccacgaaatggttaaggttattctaagatcacttgttttccttaaccctactcaagttcaattaattcatggtaatcctagatatacactaatgactcccgaggaagtaatcgggaattttgtgagctttgagttcatgatcaaaggctcaaggaagatcaacgagcttgatggtccctccacgtccgaagcacaaccggtcgcatttaaggcgacggaggagaaggaggagtctacatcgagtagaacacccatcgatgcctccaagctcgacaacgaggaaatggcgctccaaaggagggggaaagattacaagccccgctccaagaaagtatgctacaaatgtggtaagcccggtcactttatagcaaaatgtcctatttctagtgacagtgacaggggcaacgacaagaagggaagaagaaaggagaagaataaatactacaagaagaagggtggcgacgctcatgtatgccgcgagtgggactcggacgagagctcctccgactcctcctccgacgaggacgccacaaacatcgccatcaacaagggccttctcttccccaacgtcggccacaagtgccttatggcaaaggacgacaaaaagaagaaggttaaatctaaatcctctactaaatatgagacctctagtgatgataatgctagtgatgaggaagataatttatgtaccctttttgccaacctaaacatgcaacaaaaagaaaaattaaatgaattgattagtgtcattcatgagaaggatgatctcttagacactcaagaggacttcctaattaaagaaaacaaaaagcatgttaaggtgaaaaatgcttatgctctagaagtagaaaagtgcgaaaaattatctagtgagctaagcatttgcaatgagaccattgacaaccttagaaatgaaaatgctagtttaaatgctaaggttgattcaaatgtttgtaatgttttaattcccaatcttaaagatgataatgttgatttacttgctaagattgaagaattaaatgttactcttgctagccttaggattgaaaatgagaaattaattgctaaggctaaagaattagatatttgcaatgcttccatttccgaccttagaagtaaaaatgatatattacatgctaaggttgtagaattaaaaacttgcaaaccctctacatctaccgttgaacatactactatttgcactagatgtagagatgttaacattgatgctattcatgatcacatggctttaatcaaacaacaaaatgatcatatagcaaaattagatgctaaaattgccgagcatgacctagaaaacgaaaaatttaaatttgctagaaccatgctctatagagggagacgccctggcattaaggatggcattggcttccaacagggagacaatagccgaagtgaccgccgtcactccaccgctccactggccagtctgacagaaggacagcgccgcctgcgccactccgactgcagtgccactcgacagagtgagtctgacaggcagtcaggccttgccaaaggcaccacggcgaactccgccccgcccgaccccagggctcggactcgggctaagacccggaagacggcgaactccgctccgcccgaccccagggctcggactcgggctaagacccggaagacggcgaactccgctccgcccgaccccagggctcggactcgggctaagacccggaagacggcgaactccgctccgcccgaccccagggctcggactcgggctaagacccggaagacggcgaactccgctccgcccgaccccagggctcggactcgggctaagacccggaagacggcgaactccgctccgcccgaccccagggctcggactcgggctaagacccggaagacggcgaactccgctccgcccgaccccagggctcggactcgggctaagacccggaagacggcgaactccgctccgcccgaccccagggctcggactcgggctaagacccggaagacgacgaaactccgctccgcccgaccccagggctcggactcgggctaagacccggaagacgacgaactccgctccgcccgaccccagggctcggactcgggctcggtcccgaaagacgacgaactccgcctcgcccgaccccagggctcggactccgccctggcctctgccgaacgacttccgcctcgcccgacccggaggctcggactcggcctcggcaacggaagacagattcgaccccagcttcggaggagcccccacgtcgcccggcctcgggcgcgggcccgccacgtcaacagggagcgccatcaccactctaccccgagccgactcgggccgcagagaacaagaccggtgtcccatctgaccagctccgccagataggcaatgatggcgcctcccaagctccatgacggcggcagctctcagcttcgtcggcttagggaccccccgatctcgaaacgccgacagcgctggaggttgtactagctccgttccagcttttgcggagattttcgaggaaggcttcttctccggtggatccgctatacgatgcagaatcccttcttcgtctgccacggacgagatggttccgaagcaaaacacggatccagagcggagagcaatcttatgctggaaaatgatggccat

SEQ ID NO: 4876 - DNA, 3924 bp, Zea mays
  Clone ID: TF_ZmC951_395
ttattcttcatcaatttgagcctcatcctcattttgagttggtggagatgcttgcatggaggaggatggttgatcttgtgcatttggaggctcttcggattccttaggacacacatccccaatggacatgttccttaatgcgatgcacggagcctcttcatcacctatctcatcaagatcaacttgctctacttgagagccgttagtctcatcaaacacaacgtcacaagaaacttcaacttgtccagaggacttgttaaagactctatatgcccttgtgtttgaatcataccctagtaaaaagccttctacagttttaggagcaaatttagattttctacctcttttaacaagaataaagcatttgctaccaaaaactctaaaatatgaaatatttggctttttaccggttaggagttcgtatgatgtcttcttgaggattcggtgtagatataaccggttgatggcgtagcaagcggtgttgaccgcctcggcccaaaaccgatccgaagttttgtactcatcaagcatggtccttgccatgtccaatagagttctatttttcctctccactacaccgttttgctgtggcgtgtagggagaagagaactcatgcttgatgccctcctcctcaaggaagccttcgatttgagagttcttgaactccgttccgttgtcgcttcttattttcttgatccttaaggcgaactcattttgagcccgtctcaagaatccctttaaggtttcttgggtttgagatttttcctgcaaaaagaatacccaagtgaagcgagaataatcatccacaataactagacagtacttactcccgccgatgcttatgtaggcgatcgggccgaatagatccatgtgcaggagctccagtggcctgtcggtcgtcattatgttcttatgcggatgatgagtgccaacttgcttccctgcttggcatgcgctgcaaatcctgtctttctcaaaatgaacatttgttaatcctaaaatgtgttctccctttagaagcttgtgaagattcttcatcccaacatgggctagtcggtggtgccagagccaacccatgttagtcttagcaattaagcaagtgtcgagttcagctctatcaaaatctaccaagtatagctgaccttctaacactcccttaaatgctattgaatcatcacttcttctaaagacagtgacacctttgaccaaaccttgatttccatccccgaatgtgatcgctctttggggatcttggtttttctcatatgaggagaacatctttttctccccagtcatgtggttcgtgcacccgctgtcgagtatccaacttgagcccccggatgcataaaccttgccggatttgttagttaaaacataagatgcatcaaaagttttaaatgaaatgttatgatcatttgatgcactaggagttttctttctaggcaacttagcatgggttggttgcctagagctagatgtctcacccttatacataaaagcatgattagggccagagtgagacttcctagaatgaattctcctaattttgctctcgggataaccggcagggtataaaatgtaaccctcgttatcctgaggcatgggagccttgcccttaacaaagttggacaattttttaggaggggcattaattttgacattgtctcccttttggaagccaatgccttccttaatgcccgggcgtctcccattataaagcatgctacgagcaaatttaaatttctcattttctaagttgtgctcggcaattttagcatctagttttgctatgtgatcattttgttgtttaattaaagccatatgatcatgaatagcattaacatcaacatctctacatcttgtacaaatagatacatgctcaacaatagatgtagagggtttgcaagagttaagttcaacaatcttagcatgaagaatatcatttttatctctaagatcggagattgtagttttgcaaacatcaaaatctttagccttagcaagcaatttttcattctcaattctaaggctagcaagggaagcattcaactcatcaatcctagcatgtaaatcaacattatcatctctaggatttgaagttgaaatattgcaaacatgtgaatcaaccttagcatttaaactagcattttcattcctaaggttgtcaatcatctcacgacaagtacttagctcactagataacttttcacatttttcaatttcaagagcataagcccttttaaccttaacatgtttcttgttttctttaattagacaatcctcttgggaatccaaaaggtcatccttttcatgaatagcactaactaattcatttaatttttccttttgagctatgttaaggttggcaaaaagggaacgcaaattatcctcctcatcactagcattatcatcactagaagattcatatttagtggaggagttggatttaaccttctttcgtttgccgtcctttgccatgagacacttgtggccgacgttggggaagagaagtcccttggtgacggcgatgttggcggcgtcctcgtcgtcggaggagtcgcttgagctttcgccggaatcccactcccgacaaacatgggcatcgccgcccttcttcttgtagtacctcttcttttcctttcttctccccttcttgtcgtcgcctcggtcactgtcacttgttataggacatttagcaataaaatgaccgggcttaccacatttgtagcaaaccttcttggagcgggacttgtagtctttccctctcctttgcttgaggatttggcggaagcttttgatgacgagcgccatttcctcattgtcgagcttggaggcgtctattggttgtcgagttggtgtagcctcctccttcttttcctccgtcgccttgaatgcgacgggttgagcttcggatgtggatggatcatcaagctcgttgatcttcctcgagccttcgatcatgcactcaaaacttacaaaattcccgataacttcctcgggggtcattttagtatatctaggattaccacgaattaattgaacttgagtggggttaagaaaaatgagagatcttagaataaccttaaccacttcgtggtcgtcccactttacgctcccgaggttgcgcacttggttcaccaaggttttgagccggttgtacatgtgttgtggctcctctcctttgcgaagccggaaccgaccgagctccccctcgatcgtttcccgcttggtgatctttgtgagttcgtctccctcgtgtgcggttttgagcacatcccaaacttctttggcgctcttcaacccttgaactttgttatactcctctctacttaaaaaggcgaggagtattgttgtcgcttgagagttgaagtgctcgatttgggccacctcatcctcatcataatctttgtcccctacggatggtacctgtgcaccaaactcaacaacatcccatatacttttgtggagtgaggttagatgaaatcgcattaagtcactccacctagcataatcttcaccatcaaaagttggtggtttgcctaatgggacagaaagtaaaggtgcatgtttagaaatgcgagggtagtgtagggggatcttactaaacttcttacgctcttggcgtttagaagttacggagggcgcgtcggagccggaggtcgatgttgatgaagtgtcggtctcgtagtagaccactttcctcatcctcttttgcttgtccttactccgatgcggcttgtgggaagaagatttttccttcttctctttgtggtgagaagaagatttcttctccttccctttgttggaggagatcttcttcttctccttcctcttggtgcgggactcttccgatgaagtgctcccttggcttgtagtgggcttttcgccggtctccatctccttcttggcgtgatctcccgacat

SEQ ID NO: 4877 - DNA, 3216 bp, Zea mays
  Clone ID: TF_ZmC951_399
tcaccccccttctaggagactttcaattggtatcagagctctattcttcctctccactacaccattttgttgtggcgtgtagggagaagagaactcatgcttgatgccctcttcttcaagaaagccttcgatttgtgagctcttgaactccgtcccgttgtcgcttctaattttcttgatccttaagtcgaactcattttgagcctgtctcaagaatccctttaatgtctcttgggtataagatttttcctgtaaaaagaacacccaagtgaagcgagaataatcatccacaataactagacagtacttactcctgccgatgcttatgtaagctatcgcgccgaataggtccatgtgtaggagctcgagtggcctgtcagtcgtcatgatgttcttgtgtggatgatgagcaccaacttgcttccctgcttggcatgcgctacaaatcctgtctttctcaaaatgaacatttgttaatcctaaaatgtgctccccctttagaagcttatgaagattcttcatcccaacatgtgctagtcggagatgccagagccagcccatgttagtcttagcaattaagcaagtgtcgagttcagctctatcaaaatctactaagtatagctgaccctctaacactcccttaaatgctattgaatcatcacttcttctaaagacagtgacaccttgatttccgtccccgaatgtgattgctctttggggatcttggtttttctcataggaggagaacatctccttctcccatgtcatgtggtttgtgcacccgctgtcgatcacccaacttgagcccccggatgcataaaccttgccggatttgttagttaagacataagaggcatcaaaagttttaaaagaaatgttatggttatttgatgcactaggagttttctttttaggcaattttgcatgggttgattgcctagaactagatgtctcacccttatacataaaagcatgattagggccagagtgagacttcctagaatgaattctcctaattttgctctcgagataaccgacagggtacaaaatgtaaccctcgttatcctgaggcatgggagccttgcccttaacaaagttggacaatttcttaggaggggcattaagtttgacattgtctcccttttggaagccaatgtcgtccttaatgccagagcgtctcccattatagagcatgcttctagcaaatttaaatttttcattttctaagtcatgctcattaatcttagcattaagttgagctatgtgatcattttgttgtttaattaaagccatgtgatcatgaatagcatcaacattaatgtctctacatctagtacaaatggaagtgtgctcaacgatagatgtagagggtttgcaagattttaattctacaaccttagcatgcaatatatcatttttacttctaaggtcggaaatggaagcattgcaaacatctaattctttagccttagcaagcaatttttcattttcaatcctaaagctagcaagagaaatgtttaattcttcaatcttagcaagcaaatcaacattatcatctctaagattgggaattgaaacattacaagcatttgaatcaaccttagcaattaaactagcattttcatttctaaggttgtcaatagtctcatggcaagtgcttagctcactggaaagtttttcacatttctctacttctagagcgtaagcatttttaaccttaacatgcttcttattttctttaataaggaagtcctcttgggtgtccaagagatcatccttctcatggatagcactaatcaattcatttagtttttctttttgttgcatgttgaggttggcaaaaagaatgcgtaagttatcctcctcattgctagcattatcctcatcactagaggtttcatattttgtggaggatcttgattttaccttcttccttttgccgtcctttgccatgaggcacttgtggctgacgttggggaagagaagtcccttggtaacggcgatgtttgcggcgtcctcgtcggaggaggagtcggtggagctctcgtcggagtcccattcccggcaaacatgggcatcgtcgcccttcttcgtgtagtacttcttcttctcctttcttctccccttcttgtcgtcgcccctgtcactagaaataggacattttgctataaagtgaccgggcttaccacatttgtagcaaactttcttggagcggggcttgtaatccttccccctcctttgcttgaggatttggcggaagctcttgatgatgagcgtcatttcctcgttgtcgagcttggaggcatcgatgggtgttctactcgatgtagactcctccttcttctcctccgtcgcaaagttcccgattacttcctcgggagtcattagtgtatatctaggattgccacaaattaattggacttgagtagggttaaggaaaacaagtgatcttagaataaccttaaccatttcgtggtcatcccattttttgctcccgaggttgcgcacttgattcaccaaggttttgagccggttgtacatgtcttgtggctcctccccttggcgaagacggaagcgaccgagctccccctcgatcgtctcccgcttggtgatcttggttagctcatctccctcgtgcgcggtcttgagtacgtcccaaacttccttggcgctctttaatccttgcaccttgttgtactcctctctacttagagagccgaggagtatagttgtggcttgggagttgaagtgctcgatttgagcctcttcgtcctcatcataatcttcataccctacggatggtacctgtacaccaaactcaactacatcccatatacttttgtggagtgaggttagatgaaatcgcattaaatcactccacctagcataatcttcaccatcaaacgttggtggtttgcctaatgggacggaaagtaaaggcgtatgtttaggaatgcgaggatagcgtaaggggatcttactaaacttcttgcgctcatggcgcttagaagtgacggacggcgcgttggagccggaggtggaaggtgatgaagtatcggtctcgtagtagaccaccttcatcatcttctttttcttgtcgccactccgatgcgacttgtgggaagaggatttcttctccttccctttccctttgttgtgggactcttccgatgaagccttcccgtggcttgtagtgggcttgtcgccggtcaccat

SEQ ID NO: 4878 - DNA, 3645 bp, Zea mays
  Clone ID: TF_ZmC951_408
cttgttcctagtgaagttgttgagctcctcttgcatcgccaccacccaatccgaatcttgaagtgcttcctctaccctgtgtggctcaatagaggaaacaaaagagtaatgctcacaaaaatgtgcaacacgagatctagtggttacccccttatgaatgtcgccaaggatggtgtcgatgaggtgatctcgttggattgcttggtggactcttgggtgcggcggtcttggttcttcatcctccttgtcttgatcatttgcatctcccccttgatcattgtcgtcatcttgaggtggctcattctcttgatcttctccttcatcaacttgagcctcattctcattttgagttggtggagatgcttgcgtggaggaggatggttgatcttgtgcatttggaggctcttcggattccttaggacacacatccccaatggacatgttccttagtgcgatgcacggagcctcttcatcacctatctcatcaagataaacttgctctacttgagagccgttagtctcatcaaacacaacgtcacaagaaacttcaactagtcctgaggacttgttaaagactctatatgcccttgtgtttgaattatatcctagtaaaaagccttctacagtcttaggagcaaatttagattttctacctcttttaacaagaataaagcatttgctaccaaagactataaaatatgaaatattgggctttttaccggttaggagttcgtatgatgtcttcttgaggattcggtgtagatataaccggttgatagcgtagcaagcggtgttaaccgcctccgcccaaaaccgatccgacgtcttgtactcatcaagcatggttcttgccatgtccaatagagttctattcttcctctccactacaccattttgttgtggggtgtagggagaagagaactcatgcttgatgccctcctcctcaaggaagccttcgatttgtgagttcttgaactccgtcccgttgtcacttctaattttcttgatccttaagccgaactcgttttgagctcgtctcaagaatccttttaaggtctcttgggtatgagatttttccaagtatagctgaccctctaacactcccttaaatgttattgaatcatcacttcttctaaagacagtgacaccttgatttccatccccgaatgtgatcgctctttggggatcctggtttttctcataggaggagaacatcttcttctcccctgtcatgtggattgtgtacccgctgtcgatgatccaacttgagcccccggatgcataaaccttgccggatttgttagttaaaacataggatgcatcaaaagttttaaaggagatgtcatgatcatttgatgcactaggagttttcttcttaggcaacttagcacgggttggttgcctcgaactagatgtctcacccttatacataaaagcatggttagggccagagtgagactttctagaatgaattctcctaattttgctctcgggataaccggcagggtacaaaatgtaaccctcgttatcctgaggcatgggagccttgcccttaacaaagttggacaatttcttaggaggggcattaagtttgacattgcctccccgttggaagccaatgccatccttaatgccagggcgtctcccattataaagcatactacgagcaaacttaaattttttattttctagttcatgctcggcaattttagcatctaatttagctatatgatcattttgttgtttaatcatggaaaggtgatcatgtatagcattaacatcaacatctctacatctagtacaaatagtgacatgctcagtggtagatgtagagggtttgcaagaattaagttcaacaatcttagcacacaatatatcatttttatctctaagatcggaaattgtaatattgcaaacatcaagttctttagccttagcaagcaattttccattctcaatcctaaggctagcgagagaaatgtttaattcttcaatcttagcaagcaaatcatcattatcatttctaagattgggaattgaaacatcacaaacatttgaatcaaccttagctaacaaattagcattctcatttctaaggttgtctatagtctcatggcaagtgcttagctcactagatagtttttcacatttttctacttctagagcgtaagcatttttaaccttaacatgctttttgttctctttaataaggaagtcctcttgggtgtccaagagatcatccttctcatgaatagcactaatcaattcatttaatttttctttttgttgcatgtttaggttggcaaaaagaatgcgcaagttatcctcctcattgctagcatcatcctcatcactagaggtttcatatttagtggaggatcttgattttaccttcttctttttgtcgtcctttgccatgaggcacttgtggccgacgttggggaagagaagacccttggtgacggagatgtttgcggcgtcctcgtcggaggaggagtcggtggagctctcgtcggagtcccattcccggcaaacatgggcatcgccgcccttcttcttgtagtacttcttcttctcctttcttctccccttcttgtcgtcgcccctgtcactgtcactggaaataggacattttgctataaagtgtccgggcttaccacacttgtagcaaactttcttggagcggggcttgtaatctttccccctcctttgcttgaggatttgacggaagctcttgatgatgagtgccatctcctcgttgtcgagcttggaggcgtcgatgggtgttctacttggagtagattcctccttcttttcttccgtcgtcttgaatgcgaccggttgtgcttcggacgtggaggggccatcaagctcgttgatcttctttgagcctttgatcattaattcaaaactcacaaaattcccgattacttcctcgggagtcattagtgtatatctaggattgccacgaattaattgaacatgagtagggttaaggaaaacaagtgatcttagaataaccttaaccatttcgtggtcatcccattttttgctcccgaggttgcgcacttggttcaccaaggttttgagccggttgtacatgtcttgtggctcctccccttggcgaagtcggaagcgaccgagctccccctcgatcgtttcccgcttggtgattttagtcacctcatctccttcgtgcgcggtctttagtgtgtcccaaatctccttagcacctttcaacccttgcaccttattatactcctctcgacttagagaggcgaggagtatagttgaggcttgggagttgaagtgttggatttgggccacttcgtcctcatcatagtcttcatcccctacggatggtacctgtacaccaaactcaacaacgtcccatatacttttgtggagtgatgatagatgaaatcgcatcaaatcactccatctagcataatcttcaccatcaaacattggtggtttgcctaatgggatggaaagtaaaggcgtatgtttaggaatgcgaggatagcgtaggggtatcttactaaacttcttgcgctcatggcgcttagaagtaatggatgacgcgtcggagccggaggtagaaggtgatgaagtatcggtctcgtagtagaccaccttcctcat

SEQ ID NO: 4879 - DNA, 4990 bp, Zea mays
  Clone ID: TF_ZmC951_410
tcaatcaaagttccgagaatcaagaatgtttagctcattcctaagtttggtaaaggttttctcatctaaaggcttggtaaagatatcggctaattgatctttggtgttgatataggctatctcgatatccctcctttgttggtgatctctcaaaaagtgatactgaatggctatgtgcttagtgcggctgtgttcaacgggattatccgccatgcggattgcactctcattatcacataggagagggactttgctaaatttgtagccatagtccctaagggtttgcctcatccaaagtaattgcgcgcaacaatgacctgcggcaatgtactcggcttcggcggtagaaagagctactgagttttgtttctttgaagcccaagacaccagggatctccctagaaactgacaagtccctgatgtgctcttcctatcaattttacacactgcccaatcagcatcagaatatcctcccgtgtcgaggtcaagatgcccattggttcccatgggtgtcttgatgggcttggcatccttcattccaaacttggtgagtatgtcttgaatgtacttcgtttggctgatgaaggtgctctcttggagttgcttaacttgaaatcctaggaaatacttcaactcccccatcatagacatctcgaatttttgaaccattatcctactaaactcttcacaagtagatttgttagtagacccaaatatgttatcattaacataaatttggcatacaaacaaatcttttgcaatagttttagtaaagagagtaggatcgactttaccgactttgaagccattagtgataagaaaatctcttaggcattcataccatgctcttggggcttgcttgagcccataaagcgccttagagagtttataaacatggttaggatactcactatcttcaaagccaggaggttgctcaacatagacttcttccttgattggtccattgaggaaggcattcttcacgtccatttgatataactcattcctcgtgaagttgttgagatcctcttgcatcgccaacacccaatccaaatctttaagtgcatcctctaccctgtgtggtcttgggtgtggcggtcttggatcttgttcatcttccttgtcttgatcattgtcatctcccccttgatcattgctctccttttgagatggctcatcctcttgatcttcattttcatcatcttgagcttgatcctcatcttgagttggtggagatgcttgtgtggaagatgatggtcgatcttgtgcttgtggaggctcttcggattccttaggacacacatccccaatagacatgttcgttagcgcgacgcacagagcctcttcttcatctagctcatcaagatcaacttgccctacttgagagccgttagtctcatcaaacacaatgtcaaaagaaacttcaactagtccagtggacttgttaaagactctatatgcccttgtgtttgagtcataaccaagtaaaaagccttctacagccttaggagcaaatttagattttctacctcttttaacaagaataaaacatttgctaccgaagactctaaaatatgaaacattgggctttttaccggtgaggagttcatatgatgtcttcttgaggattcggtgaaggtataaccggttgatggcgtagcaagcggtgttgaccgcctcgacccaaaaccgatccgaagtcttgtactcatcaagcatggtccttgccatgtccaatagagttctattcttcctctccactacaccattttgttgtggcgtgtagggagaagagaactcatggttgatgccctcctcctcaagaaagccttctatttgtgagttcttgaactccatcccattgtcgcttctaatctttttgatccttaagccgaactcattttgagctcgtctcaagaatccctttaaggtctcttgggtttgtgattttctcccgccgatgcttatgtaagctatctggccgaataggtccatgtggagtagctcaagtggcctgtcggtcgtcatgatgttcttgtgtggatgatgaacgccaacttgcttccctgcttggcatgcactacaaatcctgtctttctcaaaatgaacatttgttagttccaaaatgtgttctccctttagaagcttatgaaggttcttcatcccaacgtgggctagtcggcggtgccagagccaacccatgttggtcttagcaattaagcaagtgtcgagttcagctctattgaaatcaactaagtatagctgaccctctaacactcccttaaatgctactgaatcatcacttcttctaaagacagtaacaccttggtttccatccccgaatgtgatagctctttggggatcttggtttttctcataggaggagaacatccttttctccccagtcatgtggtttgtgcacccgctatcaatgatccaacttgagcccccggatgcataaactttgcctgatttgttagtgagcacatatgaagcatcaaaagtcttaaatgaaatgttatgatcatttgatgcaataggagatttcattttaggcattttaacatgggtagaacgcctagagctagaagcctcattcttataaataaaagcatggtgagaaacataatgagtcttcttagcatgaattctcctaatcttatcctcaggataaccagcaggatataaaatatagccctcgttatcctgaggcatgggagccttgcccttaacaaaattagacaatcttttaggaggggcattaagcttgacattgtctccctgttggaagccaatgccatcattaatgtcagggcgtctcccactatagagcatgcttctagcaaatttaaatttttcattttccaagtcatgctcattgattttagcagttaatgtagctatgtgatcattttgttgtttaattaaagcaaggtgatcatgaatagcatctacattaacatctctatatctagtgcaaatagaaacatgatcaatcatagatgtagagggtttgcaatcatttaattcaacaatcctagcgtgtaaaatagcattctcatctctaagattggtaatagcatcattgcaaacatttaaatctttagccttagcaattaattgttcattaataatcttaaggctagcaagagaggcattcaatttatcaatcttagcaatcaaactagcattatcatttctaagattgataattgaatcatcacagatatttgacttctcaaccttagcaatcaaattagcattctcaattctaaggttagagatagtgtcatggcaaatgctaagctcactagttaatttttcacatttttctacttcctgagcataagcatttttgaccttgtcacaccaaaggtgggagttcatgaagtgtaaggctttacccacaagtcgtgttacccatttgccacggagttgatcagaccccatacacctcttaacatacttcttattttctttaattaggaagtcctcttggctatccaagagttcatccttctcatgaatagcactaatcaattcattcaatttttctttttgttgcatgtttaggttggcaaaaagggtgagcaagttatcctcatcatcactagaattatcctcatcactagaagttgcatacttagtggaggatctagattttaccttcttcttcttgtcgtcctttgccatgaggcacttgtggccgacgttgggaaagaggaggcccttgttgatggtgatgttggcggcgtcctcgtcgtcggaggagtcggtggagctctcgtcggagtcccactcccggcaaacatgggcatcaccgcccttcttcttgtagtatctcttcttctccttcttcttccccctcttgtcgtcgcccctgtcactgtcactagaaataggacattttgctataaagtgaccgggcttaccacacttgtagcaaactttcttggagcggggcttgtagtctttccccctcctttgcttgaggatttggcggaagctcttgatgatgagcgccatttcctcgttgtcgagcttggaggcgtcgatggggacactacttggtgtagagtctttcttttcttcttccgtcgccttgaatgcgacgggttgcacctcggatgttgaggtggtgccttgctcgatgattttcttagagcctttgatcatcaattcaaagctcacaatttttcctatcacttcctcgggagacattagtttgtatctaggatcaccacgaattaattgtacttgagtaggattaagaaaaactagtgatcttagaataaccttgaacatttcatggtcatcccatttggtgctcccgaggttgcgcacttggttcaccaaggtctttagccggttgtacatggcttgcagatcctctccttggttgagcatgaaacaaccgagctccccctcgatcgtctccctcttggtgatcttggtcacctcatctccttcgtgcgcggttttgagcacgtcccaaatctccttggcactcttcaacccttgcaccttgttatactcctctcgacttagagaggcgaggattatagcggtagcttgggagttgaagtgccggatttgggcaaccttgtccgaatcataatctttatcccccggtgatggtacctgtactccaatcttaacaacattccaaatgctagcgtggagtgaagttaggtgatgcctcattttatcactcaacatataataatcttcaccgtcaaaaatcggtggtttgctaaacttcttgcgctcatggcgcttagaagtgacatacggagtgtcggagccggaggtggatgatgatgaggaatcggtctcgtagtagaccactttcttcatcttctttttcttgtcgccgctccgatgtgacttggcatgtgaaggggatcccttcattttgttgtcagactctcccgatggagccttcccgtggcttgtagacttgtcaccaccggtcacgatctccttctta

SEQ ID NO: 4880 - DNA, 4728 bp, Zea mays
  Clone ID: TF_ZmC951_433
ctaagatggagagtggcttggagcgacggtaaaggatgagttacggagtggaagcctttgtcttcgccgaagactccaatttcctttcaatacacctatgacttggtttgaaataaccttttgatcgacggatttacctccttcgtcgagatcgagatgcccattggttcccatgggtgtcttgataggtttggcatccttcattccaaacttgcttagaatatcttgagtatacttcgtttggcttagaaaagtgccctcttgaagttgcttcacttgaaatcctaagaaatatttcaactcccccatcatagacatctcgaatttttgtgtcatgatcctactaaattcttcacatgtagactcgttagtagatccaaatataataccatcaacataaatttggcatacaaacaagtcattttcaagagttttagtgaagagtgtaggatcggcttttccgactttgaatccattagtgataagaaaatccctaaggcattcataccatgctcgtggggcttgcttaagcccataaagcgccttagagactttatacacatggttagggtactcactatcttcaaagtcggaaggttgctcaacatagacctcttccttgattggtccattgaggaaggcactcttcacgtccatttggtaaagcttgaagccatggtaagtagcataggctaataatattcgaattgactcaagcctagctacgggtgcataggtttcaccgaaatccaaaccttcgacttgggagtatcccttggccacaagtcgggctttgttccttgtcaccacaccatgctcgtcttgcttgttgcggaagacccatttggttcctacaacattttgattaggatgtggaactaaatgccatacctcattccttgtgaagttgttgagctcctcttgcatcgccaccacccaatccgaatcttgtagtgcttcctctaccctgtgtggctcaatagaggaaacaaaagagtaatgctcacaaaaatgtgcaacacgagatctagtggttacccccttatgaatgtcgccgaggatggtgtcgacggggtgatctcgttggattgcttggtggactcttgggtgtggcggtctttgttcttcatcctctttgtcttggtcatttgcatctcccccttgatcattgccgtcatcttgaggtggctcatttgcttgatcttctatttcatcaacttgagcttcatcctcgttttgagtcggtggagatgcttgcgtggagaaggatggttgatcttgtgcatttggaggctcttcggattccttaggacacacatccccaatggacatgttccttagcgcgatgcacagagcctcttcaatacctatctcatcaagatcaacttgctctacttgagagccgttagtctcatcaaacacaacgtcataagaaacttcaacttgtccagtggacttgttaaagactctatatgcccttgtgtttgagtcatatcctagtaaaaagccttctacagtcttaggagcaaatttagattttctacctcttttaacaagaataaagcatttgctaccaaagactctaaaatatgaaatgttgggctttttaccggttaggagttcataagatgtcttcttgaggattcggtgtagatataaccggttgatggcgtagcaagcggtgttgaccgcctcggcccaaaaccgatccaaagtcttgtactcatcaagcatggttcttgccatgtccaatagagttctattcttcctctccactacaccattttgttgtggtgtgtagggagaagagaactcatgcttgatgccctcctcctcaaggaagccttcaatttgagagttcttgaactccgtcctgttgtcacttctaattttcttgatccttaagccgaactcattttgagcccgtctcaagaatccctttaaggttttcccgccgatgcttatgtaagctatcgggccgaatagatccatgtgtaggagctctagtggcctgtcggtcgtcatgatgttcttatgtggatgatgaactccaacttgcttccctgcctgacatgcgctacaaatcctgtctttctcaaaatgaacatttgttagtcccaaaatgtgttctccctttagaagtttgtgaagattcttcattccaacatgtgctagtcggcgatgccagagccaacccatgttagtcttagcaattaagcaagtgtcgagttcagctctatcaaaatctactaagtatagctgaccctctaacactcccttaaatgctattgaatcatcactccttctaaagacagtaacacctacatcttgatttccatccccgaatgtgatagctctttggggatcctggtttttcttgtaggaggagaacatctccttctcccctgacatgtggtttgtgcacccgctatcgatgatccaacttgagcccccggatgcataaaccttgccggatttgttagttaaaacataagaggcatcaaaggtcttaaatgaaatgttagaatcatttgatgccttaggagttttcttcttaggcaattttgcatgggttgattgcctagaactagatgtctcacccttatatataaaagcatggttagggccagagtgagacttcctagaatgaattctcctaattttgctctcgggataaccggcagggtacaaaatgtaaccctcgttatcctgaggcatgggagccttgccctttacaaaattagacaatcttttaggaggggcattaagtttgacattgtctcccttttggaagccaatgccatcctttatgccagggcgtctcccactatagagcatgcttctagcaaatttaaatttttcatcttccaagtcatgctcactaattttagcattaagttgagctatgtgataattttgtttcttaattaaagctaggtgatcatggatagcatcaacattaatgtctttacatctagcacaaatggaagtatgttcaacggtagatgtagagggtttgcaagattttaattctacaaccttagcatgcaatatatcatttttacttctaaggtcggaaatagaagcattgcaaacatctaattctttagccttagcaagcaatttttcattttcaatcctaaggctagcaagagaaatgttcaattcttcaatcttagcaagcaaatcaacattatcatttctaagattgggagttgaaacatcacaatcatttgaatcaaccttagcaattaaatttgcattctcatttctaaggttggcaattaaatcatggcatgtgcttagctcactagttaatttttcacatttctcaacttctagagcataggcatttttaacgttaacatgttttttgttttccttgattaggaagtcctcttgggtatccaagagttcatccttttcatggatggcactaattagctcatttagtttttctttttgttgcatgttgaggtttgcaaaaagggtacgcaaattatcctcctcatcactagcattatcatcactagaggactcatatttagtggaggatttggatttaaccttcttctttttgccgtcttttgccatgaggcacttgtggccgacgttggggaagaggagtcccttgttgatggcaatgttggcggcgtcttcgtcggaggaggagtcggtggtgctctcgtcgaagtcccactcccggcaaacatgggcatcgccgcccttcttcttgtagtacctcttcttctcctttcttctccccttcttgtcgtcgcccctgtcactgtcactagaaataggacattttgctataaagtgaccgggcttaccacacttgtagcaaactttcttggagcgggatttgtagtccttccccctcctttgcttgaggatttggcggaagctcttgatgacgagcgccatctcctcattgtcgagctttgaggcgtcgattggttgtctacttgatgtagactcctccttcttttcctccgtcgccctgaatgcaaccggttgtgcttcggacgtggaggggccatcaagctcgttgatcttctttgagcctttgatcaataattcaaagctcacaaaattccctattaccttgaccatttcatggttatcccatttcttgctcccgaggttgcgcacttggttcaccaaggttttgagccggttgtacatgtcttgtggctcctccccttggcgaagtcggaagcgaccgagctccccctcgatcgtttcccacttggtgattttggtcacctcgtctccttcgtgtgcggtctgtacaccaaactcaacaacatcccatatacttttgtggagtgaggttagatgaaatcgcatcaaatcactccacctagcataatcctcaccatcaaaagttggtggtttgcctaatgggacggaaagtaaaggcgtatgtttaggaatgcgaggatagcgtaaggggatcttactaaacttcttgcgctcatggcgcttagaagtgacggacggcgtgtcggagccggaggtggatggtgatgaggtgtcggtctcgtagtagaccaccttcctcatcttcttcttcttatcaccgctccgacgcgagttgtgtgaaggggattccttttccttccccttccctttgttgtaggactctcccgatagagccttcccgtggcttgtagcgggcttctcgccggtcaccatttccttcttggcgtgatctcccgacat

SEQ ID NO: 4881 - DNA, 5067 bp, Zea mays
  Clone ID: TF_ZmC951_439
tcaatcaaatttccgagaatcaagaatgtttagctcattcctaagtttgataaaggttttctcatctaatggcttggtaaagatatcggctagttgttctttggtactaacataagcaatctcgatatcccccctttgttggtgatccctcaaaaagtgataccgaatggctatgtgcttagtgcggctgtgctcaacaggattatccgccatgcggattgcactctcattatcacataggagagagactttagttaatttgtagccatagtccctaagggtttgcctcatccaaagcaattgcgcgcaacaatggcctgcggtaatatactcggcttcggcggtagaaagagctcctgaattttgtttctttgaagtccaagacaccagggatcttcccaagaactgacaagtccctgatgtgctcttcctatcaattttacaccctccccaatcagcatctgaataacctattaaatcaaaggtgtatcccttggggtaccaaataccaaacttaggtgtatgaactaaatatctcaagattcttttcatggccctaaggtgaacttccttaggatcggcttgaaatcttgcacacatgcatacagaaagcataatatctcccgtgtcgaggtcgagatgcccattggttcccatgggtggcttgatgggcttggcatccttcattccaaacttggtgagtatgtcttgaatatacttggtttggctgatgaaggtgcccttttggagttgcttgacttgaaatcctaagaaatacttcaactcccccatcatagacatctcgaatttttgaatcatgatcctactaaactcttcacaagtagatttgttagtagacccaaatatgatatcatcaacataaatttggcatataaacaaatcatttgcaatagttttagtaaagagagtaggatcggctttgccgactttgaagccattagtgataagaaaatctcttaggcattcataccatgctctaggggcttgcttgagcccataaagcgccttagagagtttgtaaacatgattagggtactcactatcttcaaagccgggaggttgctcaacatagacctcttccttgattggtccatttaggaaggcacttttcacgtccatttggtaaagcttaaagccatggtaagtagcataggcaagtaatatatgaattgactcaagccttgctacgggtgcataggtttcaccgaaatccaaaccttcgacttgtgaatatcccttggccacaagtcgggctttgttccttgtcaccacaccatgctcatcttgcttgttgcggaagacccacttggttcctacaacattttgattaggatgtggaacaagatgccatacctcattcctcgtgaagttattgagttcctcttgcattgccaacacccaatctgaatcccttaatgcgtcttccaccctatatggctcaatagaagacacaaaggagtaatgttcacaaaaatgagcaacacgagatcgagtggttacccccttatgaatatcgccgaggatagtgttcacggggtgatctcgttgtattgcatggtggacgcttggttgtggcggtcttggaccctcatcatcttccttgtcttgatcatcgacatctcccccttgatcattgtcctcttcttgaggtggctcctcttgatctccattttcatcatcttgagcttgatcctcatcttgggtcggtggagatgcttgcatggaagatgaaggttgatcttgtgcatgtggaggctcctcggattccttaggacacacatccccaatggacatgttccttagtgcgacgcacgaggcctcttcatcatctagctcatcaagatcaacttgctccacttgggagccgttagtctcatcaaacaaaatgtcacaagaaacttcaactagtccagtggacttgttaaagactctatatgcccttgtgtttgagtcataaccaagtaaaaagccttctacaaccttaggagcaaatttagattttcttcctcttttaacaagaataaaacatttgctaccaaagactctaaaatatgaaacattgggctttttaccggtgaggagttcataggatgtcttcttgaggattcggtgaaggtagagacggttgatggcgtagcaagcggtgttgactgcttctgcccaaaaccggtccgaagtcttgtactcatcaagcatggtcctcgccatgtcaagtagagttctattcttcctctccactacaccattttgttgtggagtgtaggaagaagagaactcatgcttgatgccctcctcctcaagaaagccttctatttgtgagttcttgaactccgtcccattgtcgcttctaatctttttgatccttaagccgaactcattttgagcccgtctcaagaatccctttaaggtctcttgggtttgtgatttttccctgtctttctcaaaatgaacatcggttagtcccaaaatgtgttctccctttagaagcttgtgaagattcttcatcccaacatgggcttgatttccatccccgaatgtgatagctctttgaagatcatggtttttctcataggaggagaacattcttttctccctagtcatgtggtttgtgcacccgctatcagtgatccagcttgagcccccggatgcataaactcttatacataaaagcatgatgagagccagagtgagacttcctagagtgaattctcctaattttgtgctcgggataaccgacaggatataaaatgtaaccctcgttatcctgagccatgggagctttgctctaacaaagttagacaatcttttaggaggggtattaagcttgacattgtctccctgttggaagccaatgccatccttaatgccagggcgtctcccactatagagcatgcttctagcaaatttaaaattttcattttctaagtcatgctcatcaattttagcactaagttgagctatgtgatcattttgtttcttaattaaagctaagtgatcctgaatagtatcaacattaatgtctctacatctagtgcaaatagtaacatgctcaacgatagatgtagagggtttgcaagtatttaaatcaacaatcttagcatgtaagatagcattctcatctctaagattggaaatggaaacattgcaaacatttaagtctttagccttagcaattaatttttcatttgcaattttaagactagagagcgaagcattcaaattgtcaatcttagtaatcaaactagcattatcatttctaagactaataattgaatcatcacaaatgtctaacttctcaaccttagctattaatttagcattttcatctctaaggttggaaataacattatggcaagtacttagcttactagttaatttttcacatttttctacctctagagcataagcatttttagtcttaacatgctttttattttccttaataaggaagtcctcttggctatccaagagttcatccttctcatgaatagcactaatcaattcatttaatttctccttttgttgcatattaatattggcaaaaagggtaagcaagttatcctcatcatcactagaattatcctcatccctagaggttgtatacttagtggaggattttgattttaccttcttcttcttaccgtcctttgccatgaggcacttgtggccgacgttggggaagaggagtcccttgttgacggcgatgtttgcggcgtcctcgtcggaggagtcgatggagctctcgtcggagtcccactcccagcaaacatgggcatcaccgcccttctttttgtaatacttcttcttttctctcctctttcccttcttgtcgtcgcccctgtcactgtcactagaaataggacattttgctataaagtggccgggcttaccacatttgtagcaaaccttcttggagcggggtttgtaatccttccccctcctttgcttgaggatttggcggaagctcttgatgatgagcgccatttcctcattgtcgagcttcgaggcgtcgatgggaagcctactcgatgtacattcttccttcttctcctccgttgctttgaatgcgaccggttgcacttcgggtgtggagggggcgccttgctcgatgattttcttggagcctttgatcatcaattcaaagctcacaaattttcctatcacttcctcgggagacattagtttatatcttggatcaccacgaattaattgtacttgagtagggttaagaaatacgagtgatctaagaataaccttgaccatctcatggtcatcccattttgtgctcccgaggttgcgcacttggttcatcaaagtcttgagctggttgtacattgtttgtggctcctccccttggtgaagcatgaagcgactgagctccctctcgatcgtttccctcttggtgatcttggtcacctcgtctccttcgtgcacgatcttgagcacgtcccaaatctcttttgcgctcttcaacccttgcaccttattatactcctctcgacttagagaggtgaggagtatagtagttgcttgagagttgaagtgctcgatttgggccacctcgtcctcatcataatcttcatcccctacggttggtacctgtactccaaactcaacaacatcccatatgcttttgtggagtgaggttaggtgatatctcatcatatcactccacctagaataatcttcaccgtcaaacgtcggtggtttgcctaatgggaccgaaagtaatggagtatgtctaggaatgcgagggtagcgtagggggatcttactatacttcttgcgctcttggcgcttagaagtgatggacgcggcgtcggatcctgatgtagagggcgatgaagagtcggtctcgtagtagaccactttcttcattttcttcttctcaccactcttgtgcgtcctaatgcgtgaaggggatcccttcttctttttgttgccggactcctttgatggagccttcccgtggcttgtggccttggcggggcttgtaggcttgttcccgccgatcaccatctccttcttggcgtgatctcccgacat

SEQ ID NO: 4882 - DNA, 4660 bp, Zea mays
  Clone ID: TF_ZmC951_446
ttatagcggagcggcttccccaaattcccgaggctggcaagttcgagtgaatcctccctggtgcactggacactgtccggtggcacaccggacaatccggtgcgtcagaccagggttgccttcagtttgactttgctccttgttttgaaccctttcttttatctttgtattggtttgttgtgaacctttggcaccggcaaataccaatggagttgagtggaagcgccttctttgccgaatactccatttccctttcaattctatgactctcgtgtcgaggtcgagatgcccattagttcccatgggtgtcttgatgagcttggcatccttcattccaaacttggtgagtatatcttgaatgtacttcgtttggctgatgaaggtaccctcttggagttgctttacttgaaatcctagaaaatacttcaactcccccatcatagacatctcgaatttttgaatcatgattctactaaactcttcacaaatagatttgttagtagacacaaatatgatatcatcaacataaatttggcatacaaacaaatcattcttaatcgtcttagtaaagagagtaggatcggccttgccgactttgaagccattagtgataaggaaatctcttaggcattcataccatgctcttggggcttgcttgagccaataaaagcgccttagagagtttatacacgtgattaggatactcactatcttcaaagtcgggaggttgctcaacatagacctcttccttgattggtccattgaggaaggcacttttcacgtccatttggtaaagcttaaagccatggtaagtagcataggcaagtaatatgcgaattgattcaagcctagctacgggtgcataggtttcaccgaaatccaaaccttcgacttgtgaatatcctttggccacaagtcgggctttgttccttgtcaccacaccatgctcatcttgcttgttgcggaagacccactcgttcctagtgaagttgttgagctcctcttgcatcgccactacccaatccgaatcttgtagtgcttcctctaccctgtgtggctcaatagaggaaacaaaagagtaatgctcacaaaaatgtgcaacacgagatctagtggttacccccttatgaatgtcgccaaggatggtgtcgacggggtgatcttgttggattgcttggtggactcttgggtgtggcggcctttgttcttcatcctccttgtcttgatcatttgcatctcccccttgatcattatcgtcatcttgaggtggctcatttgcttgatcttctacttcatcaacttgagcttcatcatccccaatggacatgttccttagcgcgatgcacggagcctcttcatcacctatctcatcaagatcaacttgctctacttgagagccgttagtttcatcaaacacaacgtcacaagaaacttcaaccagtcccgaggacttgttaaagactctatatgcccttgtgtttgaatcatatcctagtaaaaagccttctacagtcttaggagcaaatttagattttctacctcttttaacaagtataaagcatttgctaccaaagactcggttgatggcgtagcaagcggtgttgaccgcttcggcccaaaaccgatccgaagtcttgtactcatcaagcatggttcttgccatgtccaatagagttctattcttcctctccactacaccattttgttgtggcgtgtagggagaggagaactcatgcttgatgccctcctcctcaaggaagccttcaatttgagagttcttgaactccgtcccattgtcgcttctaattttcttgatccttaagccgaactcattttgagcctgtcttaagaatccctttaaggtctcttgggtttgagatttttccctgtctttctcaaaatgaacattggttagtcctaaaatgtgttctccctttagaagcttgtgaagattcttcatcccaacatgggctagtcggcggtgccagagccaacccatgttagtcttagcaattaagcaaatgtcgagttcagctctatcaaaatctaccaagtatagctgaccctccaaaactcccttaaatgctattgaatcatcacttcttctaaagacagtgacaccttggtttccatccccgaatgtgatcgctcgttggggatctttgtttttctcgtaggaggagaacattttcttctccccagtcatgtggtttgtgcacccgctatcgatgatccaacttgagcccccggatgcataaacgatcatttgatgcactaggagttttccttttaggcaacttagcatgggttggttgcctaaactagatgtctcacccttatacataaaagcatgatttgggccagagtgagacttcctagagtgaattctcctaatcttgctctcgggataaccggcagggtacaaaatgtaaccctcgttatcctgaggcatgggagccttgcccttaacaaaattagacaatcttttaggaggggcattaagtttgacattgtctcccctgtggaagccaatgccatccttgatgccagggcgtgtcccattataaagcatactacgagcaaatttaaatttttcattctctaagttatgctcggcaattttagcatctaattttgctatatgatcattttgttgtttaattaaagacatgtgatcatgaatagcatcaatatcaacatctctacatctagtacaaatagatacatgctcaacgatagatgtagacggtttgcaagattttaattctacaacctttgcatgtaatatatcgttttcatttctaaggttagaaatagtaatattgcaaacatcaaaatctttagccttagcaagcaatttctcattttcaatcctaaggctagcaagagaaacattcaactcatcaatcctagcaagtaaatcaacattatcatctctaggattgaaagttgaaacattacaaacatgagaatcaaccttagtaattaatttcgcattttcatttctaaggttggcaatagtgtcatggcatgtgcttagctcactagataatttctcacatttttctacctctagagcataagcattcttaaccttaacatgctttttattttccttgattaggaagtcctcttgggagtccaagagatcatccttttcatggatggcactaattagctcatttagtttttccttttgttccatgttaaggttggcaaaaagggtacgcaaattatcttcctcatcactagcattatcatcactagaagattcatatttagtggaggattttgatttaaccttcttccttttgccgtcctttgccatgaggcacttgtggcctacattggggaagagaagtcctttagtgacggcgatgttggtggcgtcctcgtcgtcggaggagtcgctagagctttcgttggagtcccactcccgacaaacatgggcatcgccgcccttcttcttgtagtaccttttcttctcctttcttctccccttcttgtcgtcgcccctgtcactgtcactagatataggacattttgcaataaaatgaccgggcttaccacatttgtaacacactttcttggagcgaggtttgtaatccttccccctcctttgtttgaggatttggcggaagctcttgatgatgagcgccatttcctcattgtcgagcttggaggcgtcgattggttgtctacttgatgtagactcctccttcttctcctccgtcgccttgaatgcgaccggttgtgcttcgggtgtgtaggaggtgccttgctcgatgattttctttgagcctttaataattagctcaaagctcacaaattttcctatgacttcctcgggagacattagcttatatcttgaccatctcatggtcatcccattttcactcccgaggttgcgcacttggttcaccaaggtcttcaagcggttgtacatagcttgtggatcctccccttggtgaagcatgaagcgaccgagctccccctcgatcgtttcccatttggtgatctttgtcacctcgtctccttcgtgcgcggtcttgagtacatcccaaatttccttcgcactttttaacccttgcaccttattatactcctctcgacttagagaggcgaggagtgtagtagtggcttgggagttaaagtggtgaatttgggccacctcgtccgagtcgtagtcttcatcccctacggatggtacctgtacaccaaactcaacaacattccatatgcttgtgtggagtgaggttagatgatgcctcattttgtcactccacatattataatcttcaccgtcaaaaaccggtggtttgcctaatggaatgaaaagtaatggagtatgtctagaagtacgaggataatgtaagggaatcttactaaacttcttgcgctcatggcgcttagaagttatggagggcgcgtcggagccggaggtagaaggtgatgaagtgtcggtctcatagtagaccaccttcctcatcttcttaattttgtcgccactccgatgcgacttgtgggaagaagtcttcttttccttcttcttctccttcctcttctccttgttgcgggactctcctgatagagcattctcgttgcttgtagtgggcttttcgtcggtctccatctccttcttggcgtgatctcccgacat

SEQ ID NO: 4883 - DNA, 4938 bp, Zea mays
  Clone ID: TF_ZmC951_448
ttaggtggtggtgcggtccttttgctttgggctaatattctctccccctttggcatgaatcgccaaaaacggagtcattagagcccttagaattactctttcccccttttgatcgacggatttacctccttcgtcgaggtcgagaagcccattggttcccatgggtgtcttgatgggtttggcatccttcattccaaacttgcttagaatatcttgagtatactttgtttggcttaggaaggtgccctcttggagttgctttacttgaaatcctaagaagtacttcaactcccccatcatagacatctcgaatttttgtgtcatgatcctactaaactcttcacatgtagactcgttagtagacccaaatataatatcatcaacataaatttggcatacaaacaagtcattttcaagagttttagtgaataaagtaggatcggcctttccgactttgaagccattatctataagaaaatctctaaggcatccataccatgctcttggggcttgcttgagcccataaagcgccttagagagtttataaacatggttagggtactcactatcttcaaagccgggaggttgctcaacatagacctcttccttgattggtccattgaggaaggcacttttcacgtccatttggtaaagcttaaagccatggtaagtagcataggccaataatatacgaattgactcaagcctagctacgggtgcataggtttcaccgaaatccaaaccttcgacttgggagtatcctttggccacaagtcgagctttgttccttgtcactacaccatgctcatcttgcttgttgcggaagacccatttggttcctacaacattttgatttggacgtggaaaaaaatgtgcaacacgagatctagtagttacccccttatgaatgtcgccgaggatggtgtcgacggggtgatctcgttggattgcttggtggactcttgggtgtggcggcctttgttcttcatcctccttgtcttgatcatttgcatctcccccttgatcattgtcgtcatcttgaggtggctcatttgcttgattttctactgcatcaacttgagcttcatcctcattttgagttggtggagatgcttgagtggaggaggatggttgatcttgtgcatttggaggctcttcggattccttaggacacacatcctcaatggacatgttccttagcgcgatacacggagcctcttcaccacctatctcatcaagatcaacttgctctacttgagagctgttagtctcatcaaacacaacgtcacaagaaacttcaactagtccagaggacttgttaaagactctatatgcccttgtgtttgaatcatatcctagtaaaaagccttctacagtcttaggagcaaatttagattttctacctcttttaataagaataaagcatttgctaccaaagactcggttgatggcgtagcaggcggtgttgaccgcctcggcccaaaaccgatccgaagtcttgtactcatcaagcatggttcttgccatgtccaatagagttctattctttctctccactacaccattttgttgtggcatgtagggagaagagaactcatgcttgatgccctcctcctcaaggaagccttctatttgtgagttcttgaacttcgccccattgtcgcttctaatctttttgatccttaatccgaactcattttgagcctgtctcaagaatccctttaacgtttcttgggtgtgagatttttcctgcaaaaagaacacccaagtgaagcgagaataatcatccacaataactagacagtacttactcccgtcgatgcttatgtaagcgattgggccgaataggtccatgtgtaggagctccagtggcctatcagtcgtcatgatgttcttatgtggatggtgagcaccaacttgcttccctgcctggcatgcgctacaaatcctgtctttctcaaaatgaacatttgttaatcctaaaatgtgctctccctttagaagcttgtgaagattcttcatcccaacatgtgctagtcggcggtgccagagccaacccatgttagtcttagcaattaagcatgtgtcgagttcagctctatcaaaatctactaagtatagctgaccctctaacacacccttaaatgctattgaatcatcacttcttctaaagacagtgacaccttggttcccatccccgaatgtgatgactcgttgggggtcttggtttttctcataggaggagaacattttcttctcccctgtcatgtggtttgtgcacccgctgtcgatgatccaacttgagcccccggatgcataaatccaaatggttttgggtcctttggcattagatacaagaactttgggtacccaaacacaagtctttgaccccttgtgcttgcccccaacatatttggcaactactttgccggatttgttagttaacacataagatgcatcaaaagttttaaatgaaatgctatgatcatttgatgcattaggagttttcttcttaggcaacttagcacgggttggttgcctagaactagatgtctcacccttatacataaaagcatgattagggccagagtgagactttctagaatgaattctcctaattttgttctcagggtagccggcagggtacaaaatgtaaccctcgttatcctgaggcatgggagccttgcccttaacaaaatttgacaacttcttaggaggggcattaattttgacattgcctccctgttggaagccaatgccatcctcaatgccagggtgtctccctttatagagcatgcttctagcaaatttaaaattttcattttctaagtcatgctcggcaatcttggcatctagttttgctatatgatcattttgttgtttaattaaagccatgtgatcatgaatagcattaacatcaacatctctacatctagtacaaatagaagtgtgctcagcggtagatgtagagggtttgcaagattttaattctacaaccttagcatgcaaaatatcattcttagttctaaggtcggaaatagtagtattgcaaacatcaaaatttttagccttagcaagcaatttctcattttccatcctaaggctagcaagagacatgtttaattcttcaatcttagcaagtaaatcatcattatcatttctaagattggaaattgaaacattacaaatatttgaatcaaccttagctaacaaattagcattttcatttctaaggttgtctattgtctcatgacaagtgcttagctcactagataatttttcacatttctcaacttctagagcataagcatttttaactttaacatgttttttgttttccttgattaggaagtcctcttgggagtccaagagatcatccttctcatggatggcactaatcaattcatttaatttctctttttgttgcatgtttaagttggcaaaaagagtacgcaaattatcttcctcatcactagcattatcatcactagaggactcatatctagtggaggatttggatttaaccttcttctttttgccgtactttgccatgaggaatttgtggccgacgttggggaagaggagtcccttggtgatggcgatgttggcggcgtcctcgtcgtcggaggagtcgcttgagctttcatcggagtcccactcgcgacaaacatgggcatcgccgcccttcttcttgtagtacctcttcttctccttccttctccccttcttgtcatcgcccctgtcactgtcactagaaataggacattttgcaataaagtgaccgggcttaccacacttgtagcaaaccttcttggagcggggcttgtaatctttccctctcctttgcttgaggatttggcgaaagcttttgatgacaagcgccatttcctcattgtcgagtttggaggcgtcgatgggtgttctactcagtgtagactcctcctccttctcctccgtcgctttgaatgcgaccggttgagcttcggacgtagaaggaccgtcaagctcgttgatcttccgtgagcccttgatcatgaattcaaagctcacaaaattctcgattacttcctcgggagtcattagtgtgtatctaggattaccacgaattaattgtacttgagtagggttaagaaaaataagtgatcttagaataaccttaaccacttcgtggtcatcccatttcttgctcccgaggttgcgcacttggttcaccaaggttttgagccggttgtacatatcttgtggctcctctccttggcgaagacggaagcgaccgagctccccctcgatcgtttcccgcttggtgatcttggtgagttcatcaccctcgtgcgcggtcttgagcacgtcccaaacttctttggcgctcttcaatccttgcaccttgttgtactcctccctacttagagaggctaggagtattgttgtggcttgggagttgaagtgctcgatttgggccacctcgtcctcatcataatcctcatcccctacggatggtacctgtgctccaaactcaacaacattccatatacttttgtggagtgaggttagatgaaatttcattaaatcactccacctagcataatcttcacagtcaaaggttggcggtttgcctaatggaacggaaagtaatggagtatgtctagaagtacgaggatagtgtaaggggatcttactaaacttcttgcgctcatggcgcttagaagttatggagggcgcgtcggagccggaggtagatggcgatgaggtgtcggtctcgtagtagaccaccttcctcattttctttttcttgtcgccactccgatgcgacttgtgggaggaggccttcttgtccttccctttctttttgttgcgggattcttccgatgaagctttcccgtggcttgtagcgggcttttcgccggtttccatctccttcttggcgtgttctcccgacat

SEQ ID NO: 4884 - DNA, 5667 bp, Zea mays
  Clone ID: TF_ZmC951_449
ctagcaaaagaaatttctagaatcaagaatattgagctcatgcctaagtctggtaaaagattgttcatcaagtggcttggtaaagatatcggctaattgatctttagtgttaatgtaagaaatctcgatatcccccttttgttggtgatccctaagaaaatgataccgaatggctatgtgcttagtgcggctatgctcgacgggattgtcggccattttgattgcactctcattatcacatagcaaagggactttggttaatttgtaaccgtagtcccgcagggtttgcctcatccaaagcaattgcgcgcaacaatgtcctgcggcaatgtactcggcttcggcggtggaaagagcgaccgaattttgcttctttgaagcccaagacaccaaggatcttcccaagaactggcaagtccctgatgtgctcttcctattaattttgcaccccgcccaatcggcatccgaataaccaatcaaatcaaatgtggatccccgagggtaccaaagcccaaacttaggtgtataagccaaatatctcaaaattcgttttacgaccgtaaggtgtgattccttagggtcggattggaatcttgcacacatgcaaacggaaagcataatgtccggtcgagatgcacataaataaagcaatgaaccaatcatcgaccggtataccttttgatccacggacttacctcccgtgtcgaggtcgagatgcccattagttcccatgggtgtcttgatgggtttggcatccttcatcccaaacttggttagaatgtcttgagtgtacttcgtttggctaatgaaggtgccctcttggagttgcttgacttggaagcctagaaaatacttcaactcccccatcatcgacatctcgaatttctgtgtcatgatcctactaaactcctcacatgtagactcgttagtagacccaaatataatatcatcaacataaatttggcatacaaacaagtcattttcaagagttttagtaaagagtgtaggatcggccttgccgactttgaagccattagcaataaggaaatctctaaggcattcataccatgctcttggggcttgcttgagcccataaagcgccttagagagcctatagacatgattaggatactcactgtcttcaaagccgggaggttgctcaacatagacctcttccttgatcggtccattgaggaaggcacttttcacgtccatttgatagagcttaaagccatggtaagtagcataggccaataatatgcgaattgactcaagcctagctacgggtgcataggtttcaccgaaatccaaaccttcgacttgtgaataccctttggctacgagtcgagctttgttccttgtcaccacaccatgctcatcttgcttgttgcggaagacccatttggttcctacaacattttggttaggacgtggaactaaatgccagacctcattcctcgtgaaattgttgagctcctcttgcatcgccaccacccaatccgaatcttggagagcttcctctaccctgtgtggctcaatagaggaaacaaaagagtaatgttcacaaaaatgagcaacccgagatcgagtagttacccccttatgaatgtcgccgaggatggtgtcgacggggtgatctcgttggattgcttggtggactcttgggtgtggcggtcttggttcttcctcatcctccttttcttgatcatttgtatctcccccttgatcattgctatcatcttgaggtggctcgtcttcttgattttgctcttcatcattttgagcctcatcctcattttgagttggtggagatgcttgcatggaggaggatggttgatcttgtgtacttggaggctcttcggattccttaggacacacatccccgatggacatgttccttagcgcgatgcatggagcctgttcttcacctatctcatcaagatcaacttgctctacttgagagccgttagtttcatcaaacacaacgtcacaagagacttcaactagtccagtggacttgttaaagaccctatatgcccttgtgtttgagtcataaccaagtaaaaagccttctacagttttaggagcaaatttagattttctacctcttttaataagaatgaagcatttgctaccaaaaactctaaaatatgaaatgttgggctttttaccggttaggagttcatatgatgtcttcttgaggattcggtgaagatataaccggttgatggcgtagcaggcggtgttgaccgcttcggcccaaaaccggtccggtgtcttgtactcatcaagcatggttcttgccatgtccaatagagttcgattcttcctctccactacaccattttgttgtggcgtgtagggagaggagaactcatgcttgatgccctcctcctcaaggaagccttcaatttgagagttcttgaactccgtcccgttgtcgcttcttattttcttaatccttaagccgaactcattttgagctcgtctcaagaatccctttaaggtctcttgggtttgagatttttcctgtaaaaagaatacccaagtgaagcgagaataatcatccacaataacaagacaatacttactcccgccgatgcttatgtaagcaatcgggccgaatagatccatgtggagtagctcaagcggcctgtcggtcgtcttgatgttcttgtgtgggtgatggactccaacttgcttccccgcctggcatgcgctacaaatcctgtctttctcaaaatgaacatttgttaatcctaaaatgtgctctccctttagaagcttgtgaagattcttcatcccaacatgggctagtcggcgatgccagagccaacccatgttagtcttagcaattaagcatgtgttgagttcagctctattaaaatccactaagtatagctgaccctctaacagacccttaaatgctattgaatcatcacttcttctaaagacagtgacaccttgatttccatccccgaaggtgatagctcgttggggatctaggtttttctcatatgaggagaacatcttcttctcccctgtcatgtggtttgtgcacccgctgtcgagtatccaacttgagcccccggatgcataaaccttgccggatttgttagtcaatacataagatgcatcaaaagttttaaatgaaatggcatgatcatttgatgcattaggaattttcttcttaggcaacttagcatgggttggttgcctagaactagatgtctcacccttatacataaaagcatgattagggctagagtgagacttcctagaatgaatcttcctaattttgttctcaggatagccggcagggtataaaatgtaaccctcgttatcctgaggcatgggagctttgcccttaacaaagttagacaagttcttaggaggggcattaagtttgacattgtctcccctttggaagccaatgccatccttgatgccagggcgtctcccattataaagcatgctacgagcaaatttaaatttctcattttctaagttgtgctcggcaattttagcatctagtttagctatatgatcattttgttgcttaattaaaatcatgtgatcatgaatagcatcaatatcaacatttctacatctagtacaaatagatacatgctcaacaatagatgtagagggtttgcaagattttaattctacaaccttagcatgcagcatatcatttttagttctaaggtcagaaattgtaacattgcaaacatctagttctttagccttagtaatcaacttttcattttctactctaaggctagcaagagaaatgttcaattcttcaatcctagcaagcaaatcatcattattatctctaggagtggaaattgaaacatcacaaacatgagaatcaaccttagcatttaaaatagcattttcattcctaaggttgtcaattatttcacggcaagtgcttagctcactagataatttttcacatttttctacttctagagcataagcctttttaaccttaacatgttttttgttttctttaattagacaatcctcttgggaatccaaaaggtcgtccttttcatgaatagcactaaccaattcatttaatttttctttttgagctatgttaaggttggcaaaaagggaacgcaaattatcttcctcatcactagcattgtcatcactagaagattcatatttagtggaggatttagatttaaccttctttttgccgtcctttgccatgaggcacttgtggccgacgttggggaagaggagtcccttggtgacggcgatgttggcagcgtcctcgtcgtcggaggagtcgcttgagctctcgtcggagtcccactcgcgacaaacatgggcatcgccgcccttcttcttgtaatacctcttcttttcctttcgtctccccttcttgtcgtcacctcggtcactgtcactagatataggacatttagcaataaaatgaccgggcttaccacacttgtagcaaactttcttggagcgggacttgtagtctttccccctcctttgtttgaggatttggcggaagctcttgatgacgagcgccatttcctcattgtcgagcttggaggcgtcgattggttgtcgacttggtgtagcctcctccttcttctcctccgttgccttgaatgcaacgggttgggcttcggatgagtcgccaagctcgttgattttcctcgagccttctatcatgcactcaaaacttacaaaatgcccgataacttcctcgggggtcattttagtatatctaggattaccacgaatcaattgaacttgagtgggattaagaaaaatgagagatcttaaaataacatttaccacttcgtggtcatcccacttcttgctcccgaggttgcgcacttggttcaccaaagtcttgagccggttgtacatgtgttgtggctcctcccctttttgaagccggaaccgaccgagctccccctcgatcgtttcccgcttggtgatcttggtgagctcatctccctcgtgcgcagttttgagcacatcccaaatctcctttgcatttttcaatccttgcactttgttgtattcttccttgcttagagaggcaaggagtatggttgtggcttgagagttgaagtgctcgatttgggccacctcatcctcatcatagttttcatcccctacggatggtacctgcgcaccaaactcaacaacatcccatatgcttttgtggagcgagattagatgaaatcgcattaaatcgctccacctagcgtaatcttcaccatcaaaagttggtggtttgcctagtgggacggaaagtaaaggtgtatgtttggaaatgcgagggtagcgtagagggatcttactatacttcttgcgctcttggcgcttagaagtgacggagggcgcatcggagtcggaggtcgatgttgatgaagtgtcggtctcgtagtagaccaccttcctcatcctcttgtgcttgtcgcctttccgatgcggcttgtgggaagaagatttttccttcttctctttgtggtgagaagaagatttcttctccttccctttgttggaggagctcttcttcttctccctccttttggtgcgggactcttccgatgaagtgctcccgtagcttgtagtgggcttttcgccggtctccatctccttcttggcgtgatctcccgacat

SEQ ID NO: 4885 - DNA, 6142 bp, Zea mays
  Clone ID: TF_ZmC951_450
agtcaaaggtatatgaatagattgcaagatgcatattcatgttttgaagtttctccacctgtttcaaatgattgtcctttgactaaacaaaactcccccctgaatgaaattctcctcttatctttcaacagggttttaatgaatatcaattgcaaatatgtaatttattccaattatgaaaaataccgatttgaaagtaggcataccaatttgcaatatattaattaagaaaatttcgaaggatggtggtgcggtccttttgctttgggctaatactttctccccctttggcattaatcaccaaaaacggagactttgtgagccctctttactttctcccccattggtaaatgaaatgtgagtgaaagattataccaatgtgagagtcatgtggagtgacggcgaaggttaaatgataccgatagagtggagtggaagctttgtcttcgccgaaaaactccatttcccttacattagtcgtagtcatgaaagagatatgatctaaggtatataaatgagctatgtgtgcaatgtttcaatcaaagttccaagaatcatgaatatttagctcattcctaagtttgctaaaggttttctcatctaaaggcttggtaaagatgtcggttaattgttctttggtgctaacataagctatctcgatatccccattttgttggtgatccctcaaacagtgatgctgaatgtatatgtgcttagtgcggctgtgttcaacgggattatatgccatgcggattgcactctcattatcacattggagagggacttttctcaatttgtagccatagtccctaagggtttgcctcatccaaagtaattgcgcacaacagtggcctatggcaatgtactcggcttcggcggtggaaagtgctatggagttttgtttctttgaagcccatgacaccagggatctccccagaaactgacaagtccctgatgtgctcttcctatcaattttacatcgtgtccaatcggcatcgaaatatcctattaaatcaaaagtggatcccttggggtaccaaagcccaaacttaggagtgtaaactaaatatctcatgattctcttcacgaccctaaggtgaacttccttaggatctgcctggaaccttgcacacatgcatacagaaagcataatatccggtcgagatgcacataagtagagtaaagatcctatcatcgaccggtataccttttgatctacggatttacctcccgtgtcgaggtcgagatgcccattggttcccataggtgtcttgatgggtttgccatccttcattccaaacttcttaagtatgtcttgaatgtacttcgtttggctgatgaaggtgccctcttggagttgcttgatttgaaatcctaggaaatttttcaactcccccatcattgacatctcgaatttctgtatcatgatcctactaaactcttcacaagttgacttattagtagacccaaatataatatcatcaacataaatttggcatacaaacaaattatctttaaagccaggaggttgctcaacatagacctctttgttgataggtccattgaggaaggcacttttcacgtccatttgatagagcttaaagccatggtaagtagcataggaaagtaatatatgaattgactcaagcctagctatgggtgcataagtttcatcaaagtccaaatcttcgacttgtgaataacctttggccacaagtcgggctttgtttcttgtcgccacaccatgttcatcttgcttattgtggaatacccatttggtacctacaacattttggttaggacgtggaactatatgccatacctcattcctcgtgaagttgttgagctcctcttgcattgccaccacccaatccgaatcttgaagtgcttcctccaccctgtgtggctcaatagaggaaacaaaagagtaatgctcacaaaaatgtgcaacccgagatcgagtagttacccccttatgaatgtcgccgaggatggtgtcgacggggtgatctcgttggattgcttggtggactcttgggtgtggcagccttagttcttcctcatcctccttttcttgatcatttgtatctctcccttgatcattgccgtcatgttgaggtggctcatcttcatgatcttcttgttcaacatcttgagcctcatcctcattttgagttggtggagatgcttgcatggaagaggatggttgatcttgtgcacttggaggcttttcggattccttaggacacacatccccaatggacatgttccttagcgctatgcatggagcctcttcattacctatctcatcaagatcaacttgctctacttgagagccgttagtttcatcaaacacaacatcacatgagacttcaactagtccagtggacttgttaaagaccctatatgcccttgtgtttgagtcataaccaagtaaaaagccttctacagttttaggagcaaatttagattttctacctcttttaacaagaataaagcatttgctaccaaaaactctaaagtatgaaatgttgggctttttaccggttaggagttcataggatgttttcttgaggattcggtgaagatataaccggttgatggcgtagcaggcggtgttgaccgcttcggcccaaaaccggtccggtgtcttgtactcatcaagcatggttcttgccatgtccaatagagttcgattcttcctctccactacaccattttgttgtggcgtgtagggagaggagaactcatgcttgattccctcctcctcaaggaagccttcaatttgagagttcttgaactccgtcccgttgtcgcttcttattttcttgatccttaagccgaactcattttgagcccgtctcaagaatccctttaaggtctcttgggtttgagatttttcctgtaaaaagaatacccaagtgaagcgagaataatcatccactattacaagacaatacttactcccgccgatgcttatgtaagcaatcgggccgaatagatccatgtggagtagctcaagcggcctgtcggtcgtcatgatgttcttgtgtggatgatgggctccaacttgctttcccgcctggcatgcgctacaaatcctgtctttctcaaaatgaacatttgttaatcctaaaatgtgttctccctttagaagcttatgaagattcttcatcccaacatgagctagtcggcgatgccagagccaacccatgttagtcttagcaattaagcatgtgtcgagttcagctctatcaaaatctactaagtatagctgaccctctaacacacccttaaatgctattgaatcatcacttcttctaaagacagtgacaccttgatttccatccccgaatgtgatagctcgttggggatcttggtttttctcatatgaggagaacatctttttctccccagtcatgtggttcgtgcacccgctgtcgagtatccaacttgagcccccggatgcataaacccaaatggttttgggtcctttggcattagacacaagaactttgggtacccaaacacaagtcttggagcccttgtgcttgcccccaacatatttggcaactatcttgccggatttgttagtcaacacataagatgcatcaaaagtcttaaatgaaatgttatgctcatttgatgcaataggagttttcttaggcaacttagcacgggttggttgcctagagctagatgtctcacccttatacataaaagcatgattagggccagagtgagacttcctagaatgaattctcctaattttgctctcaggataaccggcagggtataaaatgtaaccctcgttatcctgaggcatgggagccttgcccttaacaaaattagacaagttcttaggaggggcattaagtttgacattgtctcccctttggtagccaatgccatccttaatgccagggcgtctcccattatagagcatacttctagcaaatttaaatttttcattttccaagttatgctcggcaattttagcatctagttttgctatatgatcattttgttgtttaattaaagccatatgatcatgaatagcatcaatgttaacatctctacatctagtgcaaatagatacatgctcaacgatagatgtagagggtttgcaagattttaattctacaaccttagcttgtaacatgtcatttttagttctaaggtcggaaattgtagcattgcaaatatcaagatctttagccttagtaagcaatttttcattttcaattttaaggctagcaagagaaatgtttaattcttcaatcctagcaagcaaatcatcattattatttctaggattgggaatattacaaacatgagaatcaaccttagtatttaaactagcattttcattcctaaggttgtcaatcatctcacggcaagtgcttagctcattagataacttttcacatttctcaatttcaagagcataagcctttttaaccttaacatgtttcttgttttctttaattagacaatcctcttgagaatccaaaaggtcatccttttcatgaatagcactaaccaattcatttaatttttccttttgagctatgttaaggttggcaaaaagggaacgcaaattatcctcctcatcactagcattatcatcactagaagattcatatttagtggaggagttggatttaaccttcttccgtttgccgtcctttgccatgaggcacttgtggccgacgttggggaagagcagtcccttggtgacggcgatgttggcggcgtcctcgtcgtcggaggagtcgcttgagctttcgtcggaatcccactcccgacaaatatgggcatcgccgcccttcttcttgtagtacctcttcttctcctttcttctccccttcttgtcgtcgcctcggtcactgtcactagatatgggacatttagcaataaaatgaccgggcttaccacatttgtagcagaccttcttggagcgggacttgtagtccttccccttcctttgcttgaggatttggcggaagctcttgatgacgagcgccatttcctcattgtcgagcttggaggcgtctattggttgtcgacttggtgtagactcctccttcttctcctccgttgccttgaatgcaacgggttgagcttcggatgtggtggcatcatcaagctcgttgatcttcctcgagccttcgatcatgcactcaaaactaacaaaattctcgataacttcctcgggggtcattttagtatatctaggattgccacgaattaattgaacttgagtagggttaaggaaaataagagatcttagaataaccttaaccacctcgtggtcatcccactttacgctcccgaggttgcgcacttggttcaccaaggtcttgagccgattgtacatgtgttgtggctcctcccctttgtgaagccggaaccgaccgagctccccctcaatcgtttcccgcttggtgatcttggtgagctcatcaccttcgtgcgcggtcttgagtaaatcccaaatctcctttgcgttcttcaacccttgaactttgttatactcctctctacttaaagaggctaggagtattgttgttgcttgagagttgaagtgctcgatttgggccacctcatcctcatcatagccctcatcccctacagacggtacctgcgcaccaaactcaacaacatcccatatacttttgtggagcgaggttagatgaaatcgcattaaatcgctccaccttgcataatcttcaccatcaaaagttggtggtttgcctaatgggacggaaagtaaaggtgtatgtttggaaatgcgaaggtaatgtagggggatcttactatacttcttgcgctcttggcgcttagaagtgacagatgccgcgtcggagccggaggtagatgtcgatgaagtgtcggtctcgtaatagacgactttcctcatcctcttgtgtttgtccccactccgacgtggcttgtgggaagaagatttctccctcctctccttgtgatgagaagaagacttcttctccttccctttgttggaggagctcttcttcttctctttccttttgatgcgggactcttccgatgaagtgctcccgtggcttgtagtgggcctttcgccggtctccatctccttcttggcgtgatctcccgacat

SEQ ID NO: 4886 - DNA, 5687 bp, Zea mays
  Clone ID: TF_ZmC951_451
tcattactatttcatcaaaatcaacttgctctacttgagagccgttagtttcatcaaacacaacgtcacatgagacttcaactagttcagtggacttgttaaagaccctatatgcccttgtgtttgagtcataaccaagtaaaaagccttctacagttttaggagcaaatttagattttctacctcttttaacaagaataaagcatttgctaccaaaaactctaaagtatgaaatgttgggctttttaccggttaggagttcatatgatgtcttcttgaggattcggtgaagatataatcggttgatggcgtagcaggcggtgttgacgcaccggacagtccggtgcacagcggacagtccggtgaattatagtggactagccgttggagtttcccgaagctggcgagttcctgaggccgacctcccttggcgcaccggacactgtccggtgtacaccggacagtccgatgaattataacgcgagtgcccctggaatttctcgaaggtggagagtttggcttggagttccctggtgcaccggacactgtccggtggcacaccagacagtccggtgcgccagaccaggggtgccttcggttatccattgctctttttgttgaacccatttcttggtctttttattggctaagtgtgaacctttggcaccttccgtgtcgaggtcgagatgcccattggttcccatgggtgtcttgatgggcttggcatccttcatcccaaacttgtttagaatatcttgagtgtactttgtttggctcaggaaggtgccctcttgaagttgctttacttgaaatcccaagaaatacttcaactcccccatcatagacatctcgattttttgtgtcatgatcctactaaattcttcacatgtagactcgttagtagacccaaatataatatcatcaacataaatttggcatacaaacaagtcattctcaagagttttagtgaataaagtaggatcgacctttccgactttgaagccattatctataaggaaatctctaaggcattcataccatgctcttggggcttgcttgagcccataaagcgtcttagagagtttataaacatgattaggatactcactatcttcaaagccgggaggttgctcaacatagacctcttccttgattggtccattgaggaaggcactcttcacgtccatttggtaaagcttgaagccatggtaagtagcataggctaataatatacgaattgactcaagcctagctacgggtgcataggtttcaccgaaatccaaaccttcgacttgggagtatcctttggccacaagtcgggctttgttccttgtcaccacaccatgctcgtcttgcttgttgcggaacacccatttggttcctaaaacattttgattaggacgtggaactaaatgccatacctcattcctcgtgaagttgttgagctcctcttgcatcgccactacccaatccgaatcttgtagtgcttcctctaccctgtgtggttcaatagaggaaacaaaagagtaatgcttacaaaaatgtgcaacatgagatctagtggttacccccttatgaatgtcgccgaggatggtgtcgacggggtgatctcgttggattgcttggtggactcttgggtgtggcagccttggttcttcatcctccttgtcttgatcatttgcatctcccccttgatcattgccatcatcttgaggtggctcatttgcttgatcttctccttcatcaacttgagcctcatcctcattttgagttggtggagatgcttgcgtggaggaggatggttgatcttgtgcatttggaggctcttcggattctttaggacacacatccccaatggacatgttccttagcgcgatgcacagagcctcttcatcacctatctcatcaagatcaacttgctctacttgagagctgttagtctcatcaaacacaacgtcacaagaaacttcatcttgtccagaggacttgttaaagactctatatgcccttgtgtttgaatcatatcctagtaaaaagccttctacagtcttaggagcaaatttagattttctaccccttttaacaagtataaagcatttgctaccaaagactctaaaatatgaaatattgggctttttaccggttaggagttcatatgacgtcttcttgaggattcggtgtagatataaccggttgatggcgtagcaggcggtgttgaccgcctcggcccaaaaccgatctgtagtcttgtactcatcaagcatggttcttgccatgtctaatagagttatattcttcctctccactacaccattttgttgtggcgtgtagggagatgagaactcatgcttgatgccctcctcctcaaggaagccttcatgttgagagttcttgaactccgtcccgttgtcgcttctaattttcttgatccttaagccgaactcattttgagcccgtctcaagaatccttttaaagtttcttgggtatgagatttttcctgcaaaaagaatacccaagtgaagcgagaataatcatccacaataactagacagtacttactccctccgatgcttatgtaagcaatcaggccgaatagatccatgtgtaggagttccagtggcctgtcagtcgtcatgatgttcttgtgtggatgatgagcaccaacttgcttccctgcttggcatgcgctacaaatcctgtctttctcaaaatgaacatttgttaatcctaaaatgtgctctccctttagaagcttatgaagattcttcatcccaacatgggctagtcggcggtgccagagccaacccatgttagtcttagcaattaagcaagtgtcgagttcagctctatcaaaatctactaagtatagctgaccctctaacactcccttaaatgctactgaatcatcacttcttctaaagacagtgacaccttggtttccatccccgaatgtgatcgctcgttggggatcttggtttttctcgtaggaggagaacatcttcttctcccctgtcatgtggtttgtgcacctgctgtcgatgatccaacttgagccctcggatgcataaacccaaatggttttgggtcctttggcattagacacaagaactttgggtacccaaacacaagtctttgaccccttgtgcttgcccccaacatacttggcaactaccttgccagatttgttagttaaaacatatgatgcatcaaaagttttaaatgaaatgtcatgatcatttgatgcactaggagttttctttttaggcaacttagcacgggttggttgcctagaactagatgtctcacccttatacataaatgcatggttagggcaagagtgagacttcctagtatgaattctcctaatcttgctctcaggataaccggcagcgtacaaaatgtaaccctcgttatcctgagccatgagagacttgcccttaacaaagttggataatttcttaggaggggcattaagtttgacattgtcccccttttggaagccaatgccatccttaatgccagggcgtctcccactataaagcatactacgagcaaacttaaatttttcattttctagttcatgctcggcaattttagcatctagtttagctatatgatcattttgttgtttaattaaagccatgtgatcatgaatagcattaatatcaacatctctacatctagtgcaaatagacgtatgttcaatggtagatgtagagggtttacaagattttaattctacaaccttagcatgcaatatatcatttttacttctaaggtcggaaattgtaatattgcaaacatcaagttctttagccttagcaagcaagtttttattttcattcctaaggctagcaagagtaatgtttaattcttcaatcttagcaagcaaattatcattatcatttctaagattgggaattgaaacattacaaacatttgaatcaaccttagctaacaaattagcattctcatttctaaggttgtctatagtctcatggcaagtgcttagctcactagatagtttttcacatttttctacttctagagcgtaagcatttttaactttaacatgctttttgttttctttaataaggaagtcctcttgggagtccaagagatcatccttctcatggatagcactaattaattcatttaatttttctttttgttgcatgtttatgttggcaaaaagagtacgcaaattatcttcctcatcactagcattatcatcgctagaggactcatatctagtggaggatttggatttaacctttttctttttgtcgtcctttgccatgaggcacttgtggtcgacgttggggaagagaagacccttgttgatggcgatgttggcggcgtcctcgtcgtcggaggagtcggaggagctctcgtccgagtcccactcgcggcaaacatgggcgtcgccacccttcttcttgtagtatttcttcttctcctttcttctccccttcttgtcgtcgcccctgtcactgtcactagaaataggacattttgctataaagtgaccgggcttaccacacttgtagcaaaccttcttggagcggggcttgtaatctttccccctcctttgcttgaggatttggcggaagctcttgatgacgagcgtcatttcctcgttgtcgagctttgaggcgtcgattggttgtctactcggtgtagactcctccttcttctcctctgtcgccttaaatgcgacaggttgtgcttcggatgtggagggatcatctagctcattgattttctttgagcccttgatcatgtactcaaagctcacaaaattcccgattacttcctcgggagtcattagtgtatatctaggattaccacgaattaattgaacttgagtagggttaaggaaaataagtgatctaagaataaccttaaccatctcgtggtcatcccactttttgctctcgaggttgcacacttggttcaccaaggttttgagccggttgtacatgtcttgtggctcttctcctttgcgaagccggaagcgaccgagctccccctcgatcgtctcccgcttggtgatcttggttagttcatcaccctcgtgcgcggtcttgagcacgtcccaaacttccttggcgctctttagtccttgcaccttgttgtactcctccctacttagagaggcgaggagtatggttgtggcttgggagttgaagtgctcgatttgggccacctcgtcctcatcataatcctcatcccctacggatggtacctgtgctccaaactcaacaacattccatatacttttgtggagtgaggttaggtgaaatttcatcaaatcactccacctagcataatcttcaccgtcaaaggttggcgatttgcctaatggaacggaaagtaatggagtatgtctagaagtgcgaggatagtgtaaggggatcttactaaacttcttgcgctcatggcgcttagaagttacggagggcgcgtcgaagccggaggtggaaggtgatgaagtatcggtctcgtagtagaccaccttcctcatcttctttttcttgtcaccactctgatgcgacttgtgggaagaggctttcttctccttccctttcccctttttgcgggactcttccgatgaagccttcccgtggcttgtagtgggcttatcgccggtctccatctccttattggcgtgttctcccgacat

SEQ ID NO: 4887 - DNA, 4884 bp, Zea mays
  Clone ID: TF_ZM3542.C1.o1.fg
atgccgccccgcacaaggctaacggcacgcaagtcaacgggaccaattggagtgcctcggcatcaactggcccctcgacatgaaagcagtagcagtggaagtaatgactccataggagatcttgaagcccgagtgagtcgacttcaagcagcgctgcaacacaggaccgatgcttgggtcgcagacgaagatagaatcaatgaactaagaagggacatccgtcacctgcaggatcagcttgctgatcgagacttagcacttgactgggcagtacagtctcgtttgctggcatgtgctaaggaagcaagggctcaggcccaaattaaagaacttagctcaactgtcgacaaccttaatgtaaaatggaaggtttctctggcacattatgtttacttcaaatgttatttgccacagatgtcgaccaggactcgaggacaggacgcagcaggaacttctgggggaagggatgttaccccaaacccacctccggttcctcccacattagccgaggcgattgccgccttggtgaatgccaccgcagacaatacccgcttccttagggaaaaggcgggtcaacagcaattccagcagcaggcaggaaggggttatcagcaaggcccccgtgaaaccacctatctggacttctctgaaacccatccacccctattcatcaaagctgaagatccattagaagctgatgagtggatacgggttattgaacaaaagtttggtcttctccgttgttcagaaacgcagaagccgttgttcgcagcacagcaactacgtggtcctgccagtacttggtggggaaattttgtggctactcaacctgtcaaccatcaagtcacctgggaagagtttaaagcagccttccgtgagcactacatacccgaaggagtgctgcatatgaaacaagaggaatttatgaagttaaaacaaggaggagataccgtcaatcagtatctcaacaagtttaatcacctgtcgcagtatgccatcgaccaggtgaatactgatttaaagaagaagaactgttttatgcggggtttaaatgatcggctacagaggaaaatggctgcctgtattgacttgacgtatggaaaggctgtcagcacagccttatctgttgaagcaaaatacgcaagttctgggaaaaacaagggattcggtggtgagaggcctaatcagggccaggcgaagaagcaacagtttgtgatccggccttcaagccaaaatcacactttttctcgtccacccttattccctttcaaacagccaatcattattcgccccaacaatacccccactactccaaatcagccgggtgccccaggcactcgattccctgccttgcctagttcttcaactgggtgttttaattgcggcaagtcgggacatttcatcaaagactgcccatatcctaagcaaaatcaatcaaatgctccgcaaggatctgggagatcagctcaacccaaaggaaatattgtggggaaaaatacaaagaagacggggcgtgtatattacacccaagtggccactacaccggaaggagagccggtgatgatgggtacgtttcccgtggccagtcaccctgcaattattctttttgattctggtgcttcgcatacattcattagcaagaaatttgtggagcaacatcatattgcatgccatgaatcaaaagagggatttaaaattcattcacctgggggacacatttttactagagaagtggcctatgaagtgccagtaacaatggccggacgaaactttcctgctaacatgattgttctgaaaggccaggatatagatgtaattttgggtatgaattggttaacccaacacaaggcaattctcaacactgaactcagaaccgtcaggttgagctataatcaagaagagattcttttgtctctccccgtaaccaatccagccaaagcttctggtagaatatatgaagccattgtaccggagatcaagaacattccggtagtatgtgagtttccagatgtatttccggaagatttgcctggactgccccctgaaagagatgtagaatgtgtaattgagctaaagcccggtacgactcccatctcccgaagatcgtaccgtatgccccctaatgagttggcggaattgaagattcaattacaagatctactgaataagggattcatccggccaagctcgtccccatggggttgtcccgccatttttgttaagaagaaggataaaaccttgcgaatgtgcgtggattatcgacccctgaatgaggtcaccatcaagaataagtaccctcttccaaggatcgacatcttatttgatcaactgactggggcgagggtattttccaaaattgatctcaggtcgggctatcatcaaatccgtattcggcccaaggatataccgaagaccgcgtttactacgcggtacggattgtttgaatacctgataatgtctttcgggctcaccaatgctcctgcccacttcacctatttgatgaactcagtgttcatgcccgagttggacaagttcatggtagtcttcattgacgatatcttgatatattctaaaaatgaagaggaccatgctcagcatctacggattgtattgacgcacctgagggaacatcagctatatgccaagttcagcaagtgcgcgttctggctggaggaaattcaatttttggggcacgtgttatcggctaaaggaattgcagtagatcctagcaaggtcaaagatattctggagtggaaacccccaaccactgttcaccaagtccggagttttcttggactagctggatattatcgcagattcataccagatttttctaagcttgtgaagccaatcacaagtttattgaagaatgacattaagttcaattggtcttctaagtgtaatgaagcctttgagcaattgaaggcattattaaccactgctccggtattggctcaaccggacatcactaagccttttgatgtatattgtgatgcatctggcagtgggctcggctgtgtactaatgcaagagggccgaataattgcgtatgcttcaaggcagttgcgccgacatgaggagcattacccaactcatgatctggagctagctgctgtggttcatgccctaaaaatttggcgtcactatctgctgggaaatatctgtcacatatatacagatcataaaagtttgaagtacattttcacccagtcagaattaaatatgaggcaaagacgatggcttgagcttattaaagactatgaactggagatccattatcacccaggcaaagccaatgtggtggcagatgcactgagccgtaagacttcctgccactgtcttatggtgaagacctccgagaacactttgtgtcaagagatggagaagctaaacctggggataatccaacaagggactctaaatcagctaaagcttgagtcaatcattttgcaaaggataattgatgctcaaaaggataatctgggtatgaagcacatacgagaaaagataagggctggagtagccaaatgtttcaaggaagacgatcaaggtgtgatatggtttaaaaaccgcatagtagtgccaaagaacgaagaactccgccagcaaattcttgatgaagcacatcttagtcgttattctattcatcccggaagcactaagatgtatcaagacttaaagcaacattactggtggacaaagatgaagattgaaattgcacgctatgtggctaagtgtgacacttgtagacgtgtcaaggccatacacatgaaaactgctggtccattacaatctttgccaatcccaacaaggaaatgggaagacataagtatggactttattgtgggactgcccaggacggccaaagggtatgattctatttgggttatcgttgatcgactcacaaagattgcccacttcttacccgtcagggccaaatatacagtagccacttatgcagcattatatatcggccgtattatcagtttgcatggtattccaaagaccatagtgtcggatcgtggacctcagttcgtatccaagttttgggaagaacttcataaatccttgggtaccaaattgctccacagttcggcctatcatcctcaaacaagtggacagactgagagggtaaatcagatactcgaggatatgctgcgggcatgtgttctggacttctcacagaaatgggatgaatgtttgcccctagcggagttttcatacaataacagttatcaagaaagtatcaagatggcaccttttgaagctttatatgggcgacggtgtcgaactccgctaaattggtctgaacctggagaaagatacttctttaggcctgatatggtgaaagaggtcgaagaaaaggttcataaaattattcataatatgaagaaagctcagactcgacaaaagagttatgcggaccgacgacgacaacccttatgctttctggtaggcgattatgtctacctgaaagtttcaccaatgaagggtgtatcgcgtttcggggttaaagggaagcttgcacccaggtacattggtccattcctggtgattgagcaatgtggaccagtggcgtaccgacttcaactacccgaaacattgtctgctgtgcataatgtgttccacgtgtcacaattgaagaagtgtcttcgggttcccgatcgaaccattgaagtaacagatgttgtccttgaaccagacttgacatactctaagcaccctatacgagtcttggatcaaaaggacagggttacccggagaaaaactctcaagttttataagatacagtggaaccagcattctgaagatgaagctacttgggaaactcaagacttcttgaataagaatttcccaggctttctagcctcatgtaatttgtaa

SEQ ID NO: 4888 - DNA, 1539 bp, Zea mays
  Clone ID: TF_ZM3655.C3.o1.fg
atgtcgggagatcacgccaagaaggagatggagaccggcgaaaagcccactacaagccaagggagcacttcatcggaagagtcccgcaccaaaaggagggagaagaagaagagctcttccatcaaagggaaggagaagaaatcttcttctcaccacaaagagaagaaggaaaaatcttattcccacaagccgcatcggaaaggcgacaagcacaagagaatgaggaaggtggtctactacgagaccgacacttcatcaacttctacctccgactccgatgcgccctccgtcacttctaagcgccaagagcgcaagaagtatattcaattgattcgtggtaatcctagatacactaaaatgacccccgaggaagttatcgggcattttgtaagttttgagtgcatgatagaaggctcgaggaaaatcaacgagcttggcgagcgatccgaagctcaacccgttgcattcaaggcgacggaagaaaagaaggaggagtctacaccaagtagacaaccaatagatgcctccaagctcgacaatgaggaaatggcgctcgtcatcaagagcttccgccaaatcctaaagcaaaggagggggaaggactacaagtcccgctccaagaaggtttgctacaagtgtggtaagcccggtcattttattgctaaatgtcctatatctagtgacagtgaccgaggcgacgacaagaaggggagaagaaaggagaagaaaaggtactacaagaagaagggcggcgatgcccatgtttgtcgggaatgggattccgacgaaagctcaagcgactcctccgacgacgaggacgccgccaacatcgccgtcaccaagggactcctcttccccaacgtcggccacaagtgcctcatggcaaaggacggcaaaaagaagaaggaaaaatctcaaacccaagagaccttaaaaggattcttgagacgggcccaaaatgagttcgccttaaggatcaagaaaataagaagcgacaacgggacggagttcaagaactctcaaattgaaagcttccttgaggaggagggcatcaagcatgagttctcctctccctacactccacaacaaaatggtgtagttgagaggaagaatcgaactctattggacatggcaagaaccatgcttgatgagtacaagacaccggaccggttttgggccgaagcggtcaacaccgcctgctacgccatcaaccggttatatctgcaccgaatcctcaagaagacatcatatgaactcctaaccgggaatccgaagagcctccaaatgcacaagatcaaccgtcctcctccatgcaagcatctccaccaactcaaaatgaggatgaggctcaagttgatgaagggcaaaatcaagaagatgagccacctcaagatgatgacaatgatcaagggggagatgcaaatgatcaagagaaggaggatgaggaagaaccaagaccgccacacccaagagtccaccaagcaatccaacgagatcaccccgtcgacaccatcctcggcgacattcataagggggtaa

SEQ ID NO: 4889 - DNA, 4560 bp, Zea mays
  Clone ID: TF_ZM3971.C1.o1.fg
atggcgctcgtcatcaagagctttcgccaaatcctcaagcaaaggagagggaaagactacaagtcccgctccaagaaggtttgctacaaatgtggtaagcccggtcattttattgctaaatgtcctatatcaagtgacagtgaccgaggcgacgacaagaaggggagaagaaaggagaagaagaggtactacaagaagaagggcggcgatgcccatgtttgtcgggagtgggactccgacgaaagctctagcgactcctccgacgacgaggacgccgccaacatcgccgtcaccaagggacttctcttccccaacatcggccacaagtgcctcatggcaaaggacggcaaaaggaagaaggtaaaatcaagatcctccactaaatatgaaacctctagtgatgaaaatgctagtgatgaggaggataacttgcgtattctttttgccaatcttaacatggaacaaaaggaaaaattaaatgaattaattagtgctattcatgaaaaggatgaccttttggattcccaagaggactgtctaattaaagaaaacaagaaacatgttaaggttaaaaatgcttatgctctagaaattgagaaatgtgaaaaattatctagtgagctaagcacttgccgtgagatgattgacaaccttaggaatgaaaatgctaatttaaatactaaggttgattcacatgtttgcaatgtttcaattcctaatcctaaagataataatgatgatttgctttctaggattgaagaattaaacatttctcttgctagccttagagtagaaaatgaaaatttaattgctaaggctaaagaactagatgtttgcaatgctaccatttccaatcttagagataaaaatgatattcttcatgctaagattgttgaacttaattcttgcaaaccctctacatctattgttgagcatgtatctatttgtactagatgtagagatgttgatgttaatgctattcatgatcatatggctttaattaaacaacaaaatgatcatatagcaaaactagatgctaaaattgccgagcataacttagaaaatgaaaaatttaaatttgctagaagtatgctctatagtgggagacgccctggcatcaaggatggcattggcttccaaaggggagacaatgtcaaacttagtgcccctcctaaaagattgtctaactttgttaagggcaaggctcccatgcctcaggataacgagggttacattttgtaccctgccggttatcctgaaagcaaaattaggagaactcattctaggaagtctcactctggccctaatcatgcttttatgtataagggtgagacatctagctctaggcaaccaacccgtgccaagttgcctagaaagaaaactcctagtgcatcaaatgatcatgacatttcattcaatacttttgatgcatcttatgtgttgactaacaaatccggcaaggtttatgcatccgggggctcaagttggatactcgacagcgggtgcacaaaccacatgacaggggagaagaagatgttctcctcctacgagaaaaaccaagatccccaacgagctatcacattcggggatggaaatcaaggtgtcactgtctttagaagaagtgatgattcaatagcatttaagggagtgttagagggtcagctatacttggtagattttgatagagctgaactcgacacttgcttaattgctaagactaacatgggttggctctggcaccgccgactagcccatgttgggatgaagaatcttcacaagcttctaaagggagaacacattttaggattaacaaatgttcattttgagaaagacaggatttgcagcgcatgccaagcagggaagcaagttggctctcatcatccgcataagaacataatgactaccgacaggccactggagctcctacacatggatctattcggcccgatcgcttacataagcatcggcgggagtaagtactgtctagttattgtggatgattattctcgctttacttgggtattctttttacaggaaaaatctcaaacccaagagaccttaaagggattcttgagacgggctcaaaatgagtttggcctaaggatcaagaaaataagaagcgacaacgggacggagttcaagaactctcaaatagaaagcttccttgaggaggagggcatcaagcatgagttctcttctccctacacgccacaacaaaatggtgtagtggagaggaagaatcgaactctattggacatggcaagaaccatgcttgatgagtacaagacttcggatcggttttgggccgaggcggtcaacaccgcctgctacaccatcaaccggttgtatcttcaccaaatcctcaagaagacatcgtatgaactcctaaccggtaaaaagcccaacatttcatattttagaatttttggtagcaaatgctttatccttgttaaaagaggtagaaaaactaaatttgctcctaaaactgtagaaggctttttacttggttatgactcaaacacaagggcatatagggtctttaacaagtccactggactagttgaagtctcatgtgacgttgtgtttgatgaaactaacggctctcaagtagagcaagttgatcttgatgagataggtgatgaagaggctccatgcatagcgctaaggaacatgtccattggggatgtgtgtcctaaggaatccaaagagtctccaagagcacaagatcaaacattttcctccatgcaagcatccccaccgactcaaaatgaggaagaggctcaagttgatgaagaagaagatcaatcaagtgagccacctcaagatgacggcatagatcaagggggagatgtaaatgatcaagacaaggaggatgaagagcaaagaccgccacatccaagagtccaccaagcaattcaacgagatcaccccgtcgacaccatcctcggcgacattcataagggggtaaccactagatctcgtattgcacatttttgtgaacattactcgtttgtttcctctattgagccacatagggtagaggaagcacttcaagattcggattggctggtggcgatgcaagaggagctcaacaacttcactaggaatgaggtatggcatttagttccacgtcctaaccaaaatgttgtaggaaccaaatgggtcttccgcaacaagcaagatgagcatggtgtggtgacaaggaacaaagctcgacttgtggccaagggatactcccaagtcgaaggtttggatttcggtgaaacctatgcacccgtagctagacttgagtcaattcgcatattattagcctatgctacttaccatggctttaagctttatcaaatggacgtgaaaagtgccttcctcaatggaccaatcaaggaagaggtctatgttgagcaacctctcggctttgaagacagtgagtatcctaaccatgtctataagctctctaaggcgctttatgggctcaagcaagccccaagagcatggtatgaatgccttagggatttcctcattgctaatggcttcaaagtcggtaaagccgatcctacactctttactaaaactcttgaaaatgacttgtttgtatgccaaatttatgttgatgatattatatttgggtctactaacgagtctacatgtgaagagtttagtaggatcatgacacaaaagttcgagatgtctatgatgggggagttgaagtattttctaggtttccaagtaaagcaactccaagagggcaccttcattagccaaacgaagtacactcaagacatcctaaccaagtttgggatgaaggatgccaaacccatcaagacacccatgggaactaatgggcatctcgacctcgacacgggaggtaagtccgtggatcaaaaggaataccggtcgatgattggttctttactttatttatgtgcatctcgaccggatattatgctttccgtatgcatgtgtgcaagattccaagccaaccctaaggaagctcaccttacggccgtaaaacgaatcttgagatatttggcttatactcctaagtttgggctttggtatcctaggggatccacatttgatttgattggttattcggatgccgattgggcggggtgtaaaatcaataggaagagcacatcggggacttgccagttcttgggaagatccttggtgtcttgggcttcaaagaagcaaaattcggtcgctctttccaccgccgaagccgagtacattgccgcaggccattgttgcgcgcaattgctttggatgaggcaaaccctgcgggactacggttacaaattaaccaaagtccctttgctatgtgacaatgagagtgcaatcaaaatggccgacaatcccgtcgagcatagccgcactaagcacatagccattcggtatcactttttgagagatcaccaacaaaagggagatatcgagatttcatacattaatactaaagatcaattagccgatatctttaccaagcctcttgatgaacaatcttttaccaaacttaggcatgagctcaatattcttgattcacgcaatttcttttgctag

SEQ ID NO: 4890 - DNA, 5772 bp, Zea mays
  Clone ID: TF_ZM3976.C13.o1.fg
atgtcgggagatcacgccaagaaggagatggagaccggcgaaaagcccactacaagccacgggagcacttcatcggaagagtcccgcaccaagaggaaggagaagaagaaggactcctccaaacggaaggagaaaaagtcttcctcttctcaccaccaagagaagaaggagaaatcttcttctcacaagccgcatcggaaaggcgacaagcacaagaggatgaggaaagtggtctactacgagaccgacacttcatcaacatcgacctccgactccgacgcgccctccgtcacttctaagcgccaagagcgcaagaagtatagtaagatccccctacactaccctcgcatttccaaacatacacctttactttccgtcccattaggcaaaccaccaacttttgatggtgaagattacgctaggtggagcgatttaatgcgatttcatctaatctcgctccacaaaagtatatgggatgttgttgagtttggtgcacaggtaccgtcggtaggggatgagaactatgatgaggatgaggtagcccaaatcgagcacttcaactctcaagcaacgacaatactcctcgcctctctaagtagagaggagtataacaaagtacaagggttgaagagcgctaaggagatttgggatgtgctcaaaaccgcgcacgaaggagatgagctcaccaagatcaccaagcgggaaacgatcgagggggagctcggtcggttccggcttcgcaaaggggaggagccacaacatatgtacaaccggctcaagactttggtgaaccaagtgcgcaacctcgggagcaagaagtgggatgaccacgaagtggtaaatgttattttaagatctctcatttttcttaatcccactcaagttcaattgattcgtggtaatcctagatatactaaaatgacccccgaggaagttatcgggcattttgtaagttttgagtgcatgatagaaggatcgaggaaaatcaacgagcttggcgacccatccgaagcccaacccgttgcattcaaggcaacggaggagaaaaaggaggagtctacaccaagtagacaaccaatagacgcctccaagctcgacaatgaggaaatggcgctcgtcatcaagagcttccgccaaatcctcaagcaaaggagggggaaggactacaagtcccgctccaagaaggtttgctacaagtgtggtaagcccggtcattttattgctaaatgtcctatatctagtgacagtgaccgaggcgacgacaagaaggggagaagaaaggagaggaaaaggtactataagaagaagggcggcgatgcccatgtttgtcgggaatgggattccgacgaaagctcaagcgactcctccgacgacgaggacgccgccaacatcgccgtcaccaagggactcctcttccccaacgtcggccacaagtgcctcatggcaaaggacggcaaacggaaaaaggttaaatctaactcctccactaaatatgaatcttctagtgatgataatgctagtgatgaggaggataatttgcgttccctttttgccaaccttaacatagctcaaaaagaaaaattaaatgaattagttagtgctattcatgaaaaggatgaccttttggactcccaagaggattgtctaattaaagaaaacaagaaacatgttaaggttaaaaaggcttatgctctagaggtagaaaaatgtgaaaaattatctagtgagctaagcacttgccgtgagatgattgacaaccttagaaatgaaaatgctagtttaaatgctaaggttgattctcatgtttgtaatgtttcaattcccaatcctagagataataatgatgatttgcttgctaggattgaagaattaaacatttcccttgctagccttagattagagaatgaaagtttgattgctaaggctaaagattttgatgtttgcaaagttaccattgccaatcttagagataaaaatgatattcttcatgctaagattgttgaacttaattcttgcaaaccatctacatctattgttgagcatgtatctatttgtactagatgtagaaatgttgatattgatgctattcatgatcatatggctttaattaaacaacaaaatgatcatatagcaaaactagatgctaaaattgccgagcataacttagaaaatgaaaaatttaaatttgctagaagtatgctctataatgggagacgccctggcatcaaggatggcattggcttccaaaggggagacaatgtcaaacttaatgcccctcctaaaaatttgtctaactttgttaagggcaaggctcccatgcctcaggataacgagggttacattttgtaccctgccggttatcccgagagcaaaattaggaaaattcattctaggaagtctcactctggccctaatcatgcttttatgtataagggtgagacatctagctctaggcaaccaacccgtgccaagttgcctagaaagaaaatttctaatgcatcaaatgaacatagcatttcatttaagacttttgatgcatcatatgttttgactaacaaatctggcaaggtcgttgccaagtttgttgggggcaaacacaagggttccaagacttgtgtttgggtacccaaagttcttgtatctaatgccaaaggacccaaaacagtttgggtttatgcatccgggggctcaagttggatactcgacagcgggtgcacaaaccacatgaccggggagaaaaggatgttctcctcatatgagaaaaacaaagatccccaacgagctatcacattcggggatggaaatcaaggtgtcactgtctttagaagaagtgatgattcaatagcttttaaaggagtgttagagggtcagctatacttggtagattttgatagagctgaactcgacacttgcttaattgctaagactaacatgggttggctctggcaccgccgactagcccatgttgggatgaagaatcttcacaagcttctaaagggagaacacattttaggattaacaaatgttcattttgagaaagacaggatttgtagcgcatgccaggcagggaagcaagttggagtccatcatccacacaagaacatcatgacgaccgacaggccgcttgagctactccacatggatctattcggcccgattgcttacataagcatcggcgggagtaagtattgtcttgtaatagtggatgattattctcgcttcacttgggtattctttttacaggaaaaatctcaaacccaagagaccttaaagggattcttgagacgggctcaaaatgagttcgccttaaggatcaagaaaataagaagcgacaacgggacggagttcaagaactctcaaattgaaagcttccttgaggaggagggcatcaagcatgagttctcttctccctacacacctcaacaaaatggtgtagtggagaggaagaatcgaactctattggacatggcaagaaccatgcttgatgagtacaagacaccggaccggttttgggccgaagcggtcaacaccgcctgctacgccatcaaccggttatatcttcaccgaatcctcaagaagacatcatatgaactcctaaccggtaaaaagcccaacatttcatactttagagtttttggtagcaaatgctttattcttgttaaaagaggtagaaaatctaaatttgctcctaaaactgtagaaggctttttacttggttatgactcaaacacaagggcatatagggtctttaacaagtccactggactagttgaagtctcatgtgacgttgtgtttgatgaaactaacggctctcaagtagagcaagttgatcttgatgagataggtgaagaacaggctccatgcatagcgctaaggaacatgtccattggggatgtgtgtcctagggaatccgaagagcctccaaatgcacaagatcaaccgtcctcctccatgcaagcatctccaccaactcaaaatgaggatgaagctcaagttgatgaagggcaaaatcaagaagatgagccacctcaagatgatggcaataatccagggggagatgcaattgatcaagaaaaggaggatgaggaagaaccaaggccgccacacccaagagtccaccaagcaatccaacgagatcaccccgttgacaccatcctcggcgacattcataagggggtaactactcgatctcgggttgctcatttttgtgaacattactcttttgtttcctctattgagccacacaggatagaggaagcacttcaagattcggattgggtggtggcaatgcaagaggagctcaacaatttcacgaggaacgaggtatggcatttagttccacgtcctaaccaaaatgttgtaggaaccaaatgggtcttccgcaacaagcaagatgagcatggtgtggtgacaaggaacaaagctcgactcgtggccaaagggtattcacaagtcgaaggtttggatttcggtgaaacctatgcacccgtagctaggcttgagtcaattcgcatattattggcctatgctacttaccatggctttaagctctatcaaatggatgtgaaaagtgccttcctcaacggaccaatcaaggaagaggtctatgttgagcaacctcccggctttgaagacagtgagtaccctaaccatgtctataggctctctaaggcgctttatgggctcaagcaagccccaagagcatggtatgaatgcctaagagatttccttattgctaatggcttcaaagtcggcaaggccgatcctacactctttactaaaactcttgaaaaagacttgtttgtatgccaaatttatgttgatgacattatatttgggtctactaacgagtctacatgtgaagagtttagtaggatcatgacacagaaattcgagatgtcgatgatgggggagttgaagtattttctaggattccaagtcaagcaactccaagagggcaccttcattagccaaacgaagtacactcaagacattctaaccaagtttggaatgaaggatgccaagcccatcaagactcccatgggaaccaatgggcatctcgacctcgacacgggaggtaagtccgtggatcaaaaggtataccggtcgatgattggttcattactttatttatgtgcatctcgaccggacattatgctttccgtttgcatgtgtgcaagattccaatccgaccctaaggaatcccaccttacggccgtaaaacgaatcttgagatacttggcttatacacctaagtttgggctttggtaccctcggggatctacatttgatttgattggttattcggatgccgattgggcggggtgtaagattaataggaagagcacatcagggacttgccaattcttgggaagatccttggtgtcatgggcttcaaagaagcaaaattcggtcgctctttctaccgccgaagccgagtatattgccgcaggccattgttgcgcgcaattactttggatgaggcagaccctgcgggactatggttacaaattaaccaaagtccctttgctatgtgataatgagagtgcaatcaaaatggccgacaatcccgtcgagcatagccgcactaagcacatagccattcggtatcattttcttagggatcaccaacaaaagggagatatcgagatttcttacattaacactaaagatcaattagccgatatctttaccaagcctcttgatgaacaatcttttaccagacttaggcatgagctcaatattcttgattctagaaatttcttttgctag

SEQ ID NO: 4891 - DNA, 4329 bp, Zea mays
  Clone ID: TF_ZM4318.C3.o1.fg
atggtgaaccaacgtcaaggacctaacaaccggaaccagcgtggacaacaagcaccaccaccaccgccaccaccaaatcccaatatggagcagttcatcgccgcccaaatgcagattctgcaaggactcactgctgtggttcaacaattacaacaaaaccaacagaatcagcaaccccagcagcagcagtatgcgcccccggccagagataagcaccgggacttcatgagtcatcacccgccgacattctctcatgcggttgagcccttggatgccgatgactggctcaaagtcattgggaagaagctggacataactcagtgcaacgaccgggagaaggtcttgtacgcctcgggaagactcgagggagctgcgtccgattggtgggatgccttcacagcggcacatcccaacgctgataccataacctggcaggagttccaagagaacttccgtgctcatcacatcccctctggaatcatgaagctgaagaagaaggagttcctttcccttactcaggggaatatgtctgtcagcgagtatcgtgatcgcttcactcagctttcacgttatgctcctgaagaagtggacactgatgagaagcgccaagagcgtttcctggaagggttgattggacctctgaactaccaacttcagagtcacacattccccaacttccagacactgctgaacaaggcaattggccttgagagcaaaaggaaagaattatctgaccataaaaggaagttccaaggtcagtcaagcaggaacactcgcccgaataatgctcaaggttcgcagttctgctctggaaatcagggtggaaacaattatcaagtgcaacgctctggacagcaaggccagagaaataatcagagtcagaatcaacaaaggagtaacccccagaccaaccagaggtctggtggaaattctcagaaccgtcaaggtggcaccaacaacactcaggccagaaacaacgcacctgtccaacccaacggctgtttcaagtgcggtgaactaggccactatgccaacaactgtccaaggcgcaaccagcaaacaccccagaaaggcaataatcagaggaatgaccagaacacccccgctcgtggatctgctcagaacaagactccacagaaccagagcagaggaagggtcaatcatgtcactgcggaatcagtgcctgaggatgccgacatagtgtatggaatagattttacagtcgacccagtggtcctaggatccaacgggattgatgtgattcttggatgcaattggttgaaaagttgtgatggagtgatacagtgtgccaatggaactattatgttgacaagtcctcaaggtgaaagaatccaagttaacatagacaagtcaacagatgaaaaagggaagacagtgatcaatcacttggaagaaaagcccttggaaaatatcaaagtagtgtgcgaatacccagacgtatttccggaggaattgccaggtatgccacctgaccgtgatatagagttttctattgaattagtacccggaatcgcacctatctcaaaaagaccatatagaatggatgtcaaggatttagtagaactgaagaaacaaatagaagaattactagaaaaaggtttcattcgcccaagttcatccccttggggagccccagtgctatttgtgaacaagaaggatggttcaaggagaatgtgtgttgattatagaagtttgaatgaagtaaccatcaaaaataaatacccgttacctcggattgaagatttattcgatcaaatgaagggagctaagatattctcaaaggtagatctaagatcgggatatcatcagttaaagattcgagcagaagacgtacccaagacagccttcacgacgagatatggattatatgagtttttggtcatgtcgtttggactgactaatgcaccagcatactttatgaacttgatgaataaagtattcatggaatatctggatcagtttgtggtcgtatttattgacgacatactgatatattctccgaatgaagaagcacatgaagatcatctaaggctagttctacaaaagcttcgtgacaaccaactgtacgcaaaattctcgaagtgtgatttttggttgaaagaagttgctttcttagggcatattgttaccaatggtggaattaaagtggacccaggaaagataagagagatactagattggaagcaaccaaaggatgcgtccaagatcagaagttttcttggattggcaggatactatagaagatttattgaaggtttctccaagttagtgaagcctcttacctcactactggagaaaggcaaagagttcaaatgggatgaagcttgccagaattgttttgaagaactcaagaagaggttaaccactgcaccaatactggtaatgccagacatccacaagggatttgatgtgtattgcgatgcatcacaccttggacttggatgtgtgctaatgcaagaaggaaaagtgattgcttatgcttcaagacagttgaggaaacatgagaagaattatcctacgcatgatttggaactagctgccgtagtacacgctttgaagatttggaggcactatatgattggaaacaagtgcaaaatcttcacggatcacaaaagcttgaaatatatattcactcagaaggaactcaacctcagacagagaagatggcttgagttgattaaagattatgatttggaaatacaatatcaccccggaaaagcaaatgtagtagctgatgctttgagccgtaagggtcaagtgaacaacatcactactcatttgatgtcacaagaattgtgctgggaaatggaacgactcaaccttggatttctcaataatgtagaagcaacagtgatggaagtcgaatctactttggaagaagagattcgtaaaggacaagaatctgatgagaagattaaggaaattaaaactttgattagtatgggtaaagccccagatttcacggaagatgaacaaggcacaatatggtttaagaagagaatatgtgtaccagaaatcgagcacttgcgccaacttattttgagagaagctcatgattcagcttactctattcaccctggaagtaccaagatgtaccaggaccttaaagaaaagtactggtggtacggattgaaaagagatgttgctactcatgttgcattatgtgacgtgtgtcagcgagttaaagccgaacaccaaagaccagcaggattgctacaacctctcaaggtaccggaatggaagtgggaagaaatcagtatggatttcatagttggactaccccgtactcgagatggctatgattcaatatgggtcatagtagacaggttaactaaggtagcacactttatacctgtgaagacaacacactcgggagcccagttagcagaattatacatgtcgaggattgtttgtctgcatggagtaccgaagaagattgtatcggatcgaggaacccagtttacctcgctcttttggaaaagacttcatgagtccatggataccaagctaaactttagttcagcttatcatcctcaaacggatgggcaaacggaaagaacaaaccaagtattggaagatatgctaagagcttgcgctctaaagcatggtagaagctgggataaaagtttgccttatgcagaattttcgtataacaacagttatcaagcaagtctcaaaatggcaccatttgaagcactatatggacgaaagtgtagaacaccgctttattggaatcagactggagaaagtcaagtatttggtccagaaattctccaggaggcagaaaagcaagtgcagattatcagagaaaatttgaagacagcacagtcaagacagaagagctatgctgataatagaagaagagaattgatgtttgaagtaggagacttcgtataccttaaagtttcaccgatgagaggaatgaaaaggtttaaggttaaaggaaaactatcacctcgctatattggcccgttcaagattttggaaagaaaaggtgaagtagcctaccagttagagctacccgatagattatcagatgtgcatgacgtatttcacgtgtcgcaactcaagaagtgcttaagggtaccaaaagaacagctacccatggaagaactgattgtgaatgaggatttgacttattcggagtatccagtcagaattttggaaacatctcgcagaattacacggagtaaagtcattaacatgtgcaaagttcagtggagtcatcattcggaagatgaggccacttgggaaagagaagatgaactcatagcagaattcccccagttattctcggaaagctcttaa

SEQ ID NO: 4892 - DNA, 4998 bp, Zea mays
  Clone ID: TF_ZM4330.C4.o1.fg
atgtcgggagatcacgccaagaaggagatggagactggcgaaaagcccactacaagcaacgggagcacttcatcggaagagtcccgcaccaaacggagggagaagaagaagaactcctccaacaaagggaaggagaagaaatcttcttctcaccacaaagagaagaaggaaaaatcttcttcccacaagccgcatcggagtggggacaaacaaaagaggatgaggaaggtggtctactacgagaccgacacttcatcaacatcgacctccggctccgacacgccctccgtaacttctaaacgccaagagcgtaagaagtttagtaagatccccctacactaccctcgcatttctaaacatgcatctttactttccgtcccattaggcaaaccaccaactttcgacggtgaagattatgctaggtggagtgatttaatgcgatttcatctaacctcactccacaaaagtatatgggatgttgttgagtttggtgcacaggtaccatcggtaggggataaggactatgatgaggatgaggtggcccaaatcgagcacttcaactctcaagcaacaacgatactcctcgcctctttaagtagagaggagtataacaaagtgcaagggttgaagagcgccaaggaggtttgggatgtgctcaaaaccgcgcacgagggagatgagctcaccaagatcaccaagcgggaaacgatcgagggggagctcggtcggttccggcttcgcaaaggggaggagccacaacacatgtacaaccggctcaagactttggagaaccaagtgcgcaacctcgggagcaagaagtgggacgaccacgaagtggtaaatgttatcttaagatctctcatttttcttaatcccactcaagttcaattgattcgtggtaatcctagatatactaaaatgacccccgaggaagttatcgggcattttgtaagttttgagtgcatgatagaaggctcgaggaaaatcaacgagcttggcgacccatccgaagcccaacccgttgcattcaaggcaacggaggagaagaaggaggtgtctacaccaagtagacaaccaatagacgcctccaagctcgacaatgaggaaatggcgctcgtcatcaagagcttccgccaaatcctcaagcaaaggagggggaaagactacaagtcccgctccaagaaggtttgctacaaatgtggtaagcccggtcattttattgctaaatgtcccatatctagcgacagtgaccgaggcgacgacaagaaggggagaagaaaggagaagaaaaggtactacaagaagaagggcggcgatgcccatgtttgtcgggaatgggattccgacgaaagctcaagcgactcctccgacaacgaggacgccgccaacatcgccgtcaccaagggacttctcttccccaacgtcggccacaagtgcctcatggcaaaggacggcaaacggaagaaggttagatctaactcctccactaaatatgagtcttctagtgatgacaatgctagtgatgaggaggatagtttgcgttccctttttgccaaccttaacatagctcaaaaggagaaattaaatgaattagttagtgctattcatgaaaaggatgaccttttggattcccaagaggacctcctcattaaggaaaataagaagcatgttaaggttaaaaagtcttatgctcttgaaattgagaaatgtgaaaagttatctagtgagctaagcacttgccgtgagatgattgacaaccttaagaatgaaaatgctagtttaaatgctaaggttgattctcatgtttgtaatgtttcaattcccaatcctagagataataatgatgatttgcttgctaggattgaagaattaaacatttctcttgctagccttaaggtagaaaatgaaagtttaattgctaaggctaaagattttgatgtttgcaaagttacaatttccgatcttagagataaaaatgatattcttcatgctaagattgttaaacttaattcttgcaaactgtctacatctattgttgaacatgtcactatttgtactagatgtagagatattgatatcaatgctatacatgatcacatgactctaattaaacaacaaaatgatcatatagcaaaactagatgctaaaattgccgagcacaacttagaaaatgagaaatttaaatttgctcgtagcatgctttataatgggagacaccctggcattaaggatggcattggcttccaaaggggagacaatgtcaaaattagtgcccctcctaagagattgtccaactttgttaagggcaaggctcccatgcctcaggataacgagggttacattttataccctgccggttatcccgagagcaaaattaggaaaattcattctaggaagtctcactctggccctaatcatgcttttatgtataagggtgagacatctagctctaggcaaccaacccatgctaaattgcctagaaagaaaactcctaatgcatcaaatgatcatgctatttcatttaaaacttttgatgcatcctatgttttgactaacaaatccggcaaggtcgttgccaagtttgttgggggcaaacacaaggggtcaaagacttgtgtttgggtacccaaagttcttgtgtctaatgccaaaggacccaaaacagtttgggtttatgcatccgggggctcaagttggatactcgacagcggatgcacaaaccacatgaccggggagaaaaggatgttctcctcatatgagaaaaatcaagatccccaacgagctatcacattcggggatggaaatcaaggtgtcactgtctttagaagaagtgatgattcaatagcatttaagggagtgttagagggtcagctatacttggtagattttgatagagctgaactcgacacttgcttaattgctaagactaacttgggctggctctggcaccgccgactagcccatgttgggatgaagaatcttcacaagcttctaaagggagaacacattataggattaacaaatgttcattttgagaaagacagggaaaaatctcaaacccaagagaccttaaagggattcttgagacgggctcaaaatgagttcggcttaaggatcaagaaaataagaagcgacaacgggacggagttcaagaactctcaaattgaaggctttcttgaggaggagggcatcaagcatgagttctcttctccctacacacctcaacaaaatggtgttgtggagaggaagaatagaactcttttagacatggcaaggaccatgcttgatgaatataagacttcggatcggttttgggccgaggcagtcaacaccgcctgctacgccatcaaccgattatatctacaccgaatcctcaagaagacatcatatgaactcctaatcggtaaaaagcccaacatctcatattttagagtctttggtagcaaatgctttattcttgttaaaagaggtagaaaatctaaatttgctcctaagactgtagaaggctttttacttggttatgactcaaacacaagggcatatagggtctttaacaagtccactggactagttgaagtctcatgtgacgttgtgtttgatgaaactaacggctctcaagtagagcaagttgatcttgatgagataggtgatgaagaggctccatgcatagcgctaaggaacatgtccattggggatgtgtgtcctaaggaatccgaagagtctccaaatacacaagatcaaccatcctcctccacgctagcaactccaccaactcaaaatgagaatgaagctcaagttgatgaagtagaagatcaagcaaatgagccacctcaagatgacggcaatgatcaagggggagatgcaaatgatcaagacaaggaggatgaagagcaaaggccgccacatccaagagtccaccaagcaatacaacgagatcaccccgtcgacaccatcctcggcgacattcataagggggtaactactcgatctcgtgttgcccatttttgtgaacattactcgtttgtttcctctattgagccacacagggtagaggaagcactccaagattcggattgggtggtggcgatgcaagaggagctcaacaacttcactaggaatgaggtatggcatttagttccacgtccgaaccaaaatgttgtaggaaccaaatgggtcttccgcaacaagcaagatgagcatggtgtggtgacaaggaacaaagctcgacttgtggccaagggatactcccaagtcgaaggtttggatttcggtgaaacctatgcacccgtagctaggcttgagtcaattcgcatattattggcctatgctacttaccatggctttaagctttatcaaatggacgtgaaaagtgccttcctcaatggaccaatcaaggaagaggtctatgttgagcaacctcccggctttgaagacagtgagtatcctaaccatatctataagctctctaaggcgctttatgggctcaagcaagccccaagagcatggtatgaatgccttagagatttccttattgctaatggcttcaaagttggaaaggccgatcctacactctttactaaaactcttgaaaatgacttgtttgtatgccaaatttatgttgatgatattatatttgggtctactaacgagtctacatgtgaagagtttagtaggatcatgacacagaaattcgagatgtctatgatgggggagttgaagtatttcttaggattccaagtaaagcaactccaagagggcaccttcatcagccaaacaaagtacactcaaggcattctaaacaagtttgggatgaaggatgccaaacccatcaagacacccatgggaactaatgggcatctcgacctcgacacgggaggggaagaaactacttcgcgggctctaatgattccgtttttggcgattcatgccaaaaagggggagaaaggagcccaaagcaaaaggaccgcaccaccaccaatttcaaaaactcagtgttga

SEQ ID NO: 4893 - DNA, 2880 bp, Zea mays
  Clone ID: TF_ZM4333.C1.o1.fg
atgtcgggagatcacgccaagaaggagatggagactggcgaaaagcccactacaagcaacgggagcacttcatcggaagagtcccgcaccaaacggagggagaagaagaagaactcctccaacaaagggaaggagaagaaatcttcttctcaccacaaagagaagaaggaaaaatcttcttcccacaagccgcatcggagtggggacaaacaaaagaggatgaggaaggtggtctactacgagaccgacacttcatcaacatcgacctccggctccgacacgccctccgtaacttctaaacgccaagagcgtaagaagtttagtaagatccccctacactaccctcgcatttctaaacatgcatctttactttccgtcccattaggcaaaccaccaactttcgacggtgaagattatgctaggtggagtgatttaatgcgatttcatctaacctcactccacaaaagtatatgggatgttgttgagtttggtgcacaggtaccatcggtaggggataaggactatgatgaggatgaggtggcccaaatcgagcacttcaactctcaagcaacaacgatactcctcgcctctttaagtagagaggagtataacaaagtgcaagggttgaagagcgccaaggaggtttgggatgtgctcaaaaccgcgcacgagggagatgagctcaccaagatcaccaagcgggaaacgatcgagggggagctcggtcggttccggcttcgcaaaggggaggagccacaacacatgtacaaccggctcaagactttggagaaccaagtgcgcaacctcgggagcaagaagtgggacgaccacgaagtggtaaatgttatcttaagatctctcatttttcttaatcccactcaagttcaattgattcgtggtaatcctagatatactaaaatgacccccgaggaagttatcgggcattttgtaagttttgagtgcatgatagaaggctcgaggaaaatcaacgagcttggcgacccatccgaagcccaacccgttgcattcaaggcaacggaggagaagaaggaggtgtctacaccaagtagacaaccaatagacgcctccaagctcgacaatgaggaaatggcgctcgtcatcaagagcttccgccaaatcctcaagcaaaggagggggaaagactacaagtcccgctccaagaaggtttgctacaaatgtggtaagcccggtcattttattgctaaatgtcccatatctagcgacagtgaccgaggcgacgacaagaaggggagaagaaaggagaagaaaaggtactacaagaagaagggcggcgatgcccatgtttgtcgggaatgggattccgacgaaagctcaagcgactcctccgacaacgaggacgccgccaacatcgccgtcaccaagggacttctcttccccaacgtcggccacaagtgcctcatggcaaaggacggcaaacggaagaaggttagatctaactcctccactaaatatgagtcttctagtgatgacaatgctagtgatgaggaggatagtttgcgttccctttttgccaaccttaacatagctcaaaaggagaaattaaatgaattagttagtgctattcatgaaaaggatgaccttttggattcccaagaggacctcctcattaaggaaaataagaagcatgttaaggttaaaaagtcttatgctcttgaaattgagaaatgtgaaaagttatctagtgagctaagcacttgccgtgagatgattgacaaccttaagaatgaaaatgctagtttaaatgctaaggttgattctcatgtttgtaatgtttcaattcccaatcctagagataataatgatgatttgcttgctaggattgaagaattaaacatttctcttgctagccttaaggtagaaaatgaaagtttaattgctaaggctaaagattttgatgtttgcaaagttacaatttccgatcttagagataaaaatgatattcttcatgctaagattgttaaacttaattcttgcaaactgtctacatctattgttgaacatgtcactatttgtactagatgtagagatattgatatcaatgctatacatgatcacatgactctaattaaacaacaaaatgatcatatagcaaaactagatgctaaaattgccgagcacaacttagaaaatgagaaatttaaatttgctcgtagcatgctttataatgggagacaccctggcattaaggatggcattggcttccaaaggggagacaatgtcaaaattagtgcccctcctaagagattgtccaactttgttaagggcaaggctcccatgcctcaggataacgagggttacattttataccctgccggttatcccgagagcaaaattaggaaaattcattctaggaagtctcactctggccctaatcatgcttttatgtataagggtgagacatctagctctaggcaaccaacccatgctaaattgcctagaaagaaaactcctaatgcatcaaatgatcatgctatttcatttaaaacttttgatgcatcctatgttttgactaacaaatccggcaaggtcgttgccaagtttgttgggggcaaacacaaggggtcaaagacttgtgtttgggtacccaaagttcttgtgtctaatgccaaaggacccaaaacagtttgggtttatgcatccgggggctcaagttggatactcgacagcggatgcacaaaccacatgaccggggagaaaaggatgttctcctcatatgagaaaaatcaagatccccaacgagctatcacattcggggatggaaatcaaggtgtcactgtctttagaagaagtgatgattcaatagcatttaagggagtgttagagggtcagctatacttg

SEQ ID NO: 4894 - DNA, 759 bp, Zea mays
  Clone ID: TF_ZM4336.C2.o2.fg
atgtcgggagatcacgccaagaaggatatggtgaccggcgagaagcccgccacaagccacgggaaggctccatcaggagagtcccacaacaagaagaaggaggaattacctcctcacaagtcgcatcggagtggcgacaagaaaaagaagatgaagaaggtggtctactacgagaccgattcttcgtcgccatccacctccggctccgacgcaccgtccgtcacttctaagcgccatgcgtgcaagaagtttagctccaagaaaatcatcgagcaagacacctcctccacacgcgaggcacaacccgtcgcattcaaagcgttggaggagaagaaagaagagtctacatcaagtaggcttcccattgacgcctccaagctcgacaacgaggaaatgacgctcatcatcaagatctttcgccaaatcctcaagcaaaggaaggggaaagattacaagccccgttccaagaaggtttgctacaagtgtggtaagcccggtcactttatagcaaaatgtcccatttctagtgacagtgacaggggcgacgacaagagggggaagaagaaggagaagaagaggtactacaagaagaagggtggtgatgcccatgtttgccgggagtgggactccgacgagagctccaccaactcctcctccgacgaggacaccgccaacatcgccatcaacaaaggcctcctcttctccaacgtcggccacaaatgcctcatggcaaaggacggcaagaagaagaaaaaatga

SEQ ID NO: 4895 - DNA, 3210 bp, Zea mays
  Clone ID: TF_ZM4353.C2.o6.fg
atgaaagcagcagcagtggaagtaatgacccccatcggagatcttgaagcccgtgtgagtcgacttcaaacagcgctgcaacacaggaccgatgcttgggtcgccgatggagatagaatcaatgaactgagaagggacatccgacatctgcaggatcagctcgctgatcgagacttagcacttgactgggtcgtacagtctcgtttgctaatgtgtgctaaggaagcaagggctcaggcccgaattaaagaacttagctcaacggttgataacctgcagatgccgaccaggactcgaggacaggacgcagccggaacttctgggggcagggatgttaccccaaacccacctccggttcctcccacgttagccgaggcgattgccgccttggtgaatgccaccgcagacaatacccgcttccttagggaaatggcgggtcagcagcaattccagcagcaggcaggaagaggttatccgcaaggtccccgggagaccacctatctggacttctctgaaacccgcccacctctattcgtcaaggcagaagatcccctagaagctgatgagtggattcgggttattgaacaaaagtttggtcttctccgttgctcagagacgcagaagtcgttgttcgcagcacaacaactccgtggtcctgccagtacctggtggggaaatttcgtggctattcaacctgtcaaccatcaagtcacctgggatgagtttaaagcagccttccgtgaacactacatccccgaaggagtgctgcatatgaaacaagaggaatttatgaagttacaacaaggtggagataccgtcaaccaatatctcaacaagtttaatcacctgtcgcagtatgccatcgaccaggtgaatactgatttaaagaagaagaactgttttatgcggggactgaatgatcggctacaaaggaaaatggccacatgcatagatctcacctatggaaaggctgtcagtacagccttatctgttgaagcaaaatacacaaattctgggaagaataagggattcggtggtgagaggcctagtcagggccaggcaaagaagcaacggtttgtgatccgaccttcaaaccaaaatcgcactttttctcgtccaccctcatttcccttcaaacaacctatcattatccgccccaacaataaccccactaccccaaatcagccgggtgcccgaggcactcgattccctgccttgcctagttcttcaactgggtgttttaattgcggcaagtcgggacattttatcaaagactgcccatatcctaggcaaaatcaatctaatgcttcgcaaggatctgggaaatcagctcagtctaaaggaaatgctatggggaaaaatacaaagaagacagggcgtgtatattacactcaagtggctactacaccggaaggagagccggtgatgatgggtacgtttcccgtggccagtcacccagcaattattctttttgattctggtgcttcacatacattcattagcaagaaatttgtggagaaacatcatattgcataccatgaatcaaaggagggatttaaaattcattcacctgggggacacatttatactagagaagtggcctatggagtgccagtaacaatggccgagcggaactttcctactaacatgattgttctgaagggccaggatatagatgtaattttgggtatgaattggttaacccaacacaaggcaattctcaacactgaactcagaaccgtcaggttgagctataaccaagaaaagattcttttgactctcctcgcaaccaatccagccaaaacttctggtagagtatatgaagccattgtaccggagatcaagaacattccggtagtatgtgagtttccagatgtatttccggaagatttgcctggactgccccctgaaagagatgtagaattcgtaattgagctaaagcccggtacggctcccatctcccgaaggtcgtaccgtatgccccctaatgagttggcggaattgaaaattcaatatcaagatctactgaataagggattcatccggccaagctcgtccccatggggttgccccgccatttttgttaagaagaaggatcaaaccctgcgaatgtgcgtggattatcgacccctgaatgaggtcactatcaagaataagtaccctcttccaaggatcgacatcttatttgatcaactgactggggcgagggtattttccaaaattgatctcaggtcgggctatcatcaaatctgtattcggcccgaggatataccgaagaccgcgtttactacgcggtatggattgtttgaatacctggtaatgtctttcgggctcacaaatgctcctgcccacttcacttatttgatgaactcggtgttcatgcccgagttggacaagttcgtggtggtcttcatcgacgatatcttgatatattctaaaaatgaagaggatcatgctcagcatctacggattgtattgacgcgcctgagggaacaccagctatatgccaagttcagcaagtgcgcgttctggctggaagaaattcaatttttggggcacgtgttatcggctaaaggaattgcggtagatcctagcaaggtcaaagatattctggagtggaaacccccaacaactgttcaccaagtccggagttttcttggactagctgggtattatcgcagattcataccagatttttctaagcttgtgaagccaatcacaagtttattgaagaatgacattaagtttaattggtcttctaagtgtaatgaagcctttgagcaattgaagacactattgaccactgctccggtattggctcaaccggacatcactaaaccttttgatgtatattgtgatgcatctggcagtgggctcagctgtgtactgatgcaagagggccgagtaattgcgtatgcttcaaggcaattgcgccgacatgaggagcattatccaactcatgatctggagctagctgctgtggttcatgccctgaagatatggcgtcactatctgctgggaaatatctgtcacatttatacagatcataaaagtttgaagtacatcttcacccagtcagaattaaatatgagacaaagacgatggcttgagctcattaaagactatgaactggagatccattatcacccaggcaaagccaatgtggtggcagatgcactgagtcgtaagacttcctgccactgtcttatg

SEQ ID NO: 4896 - DNA, 5478 bp, Zea mays
  Clone ID: TF_ZM4401.C1.o4.fg
atgtcgggagatcacgccaagaaggagatggagaccggcgaaaagcccactacaagccacgggagcacttcatcggaagagtcccgcaccaagaggaaggagaagaagaaggactcctccaaacggaaggggaaaaagtcttcctcttctcaccacaaagagaagaaggagaaatcttcttcccacaagccgcatcggaaaggcgacaagcacaagaggatgaggaaagtggtctactacgagaccgacacttcatcaacatcgacctccgactccgatgtgccctccgtcacttctaagcgccaagagcgcaagaagtatagtaagatccccctacactaccctcgcatttccaaacatacacctttactttccgtcccattaggcaaaccaccaacttttgatggtgaagattacgctaggtggagcgatttaatgcgatttcatctaatctcgctccacaaaagtatatgggatgttgttgagtttggtgcacaggtaccgtcggtaggggatgagaactatgatgaggatgaggtggcccaaatcgagcacttcaactctcaagcaacgacaatactcctcgcctctctaagtagagaggagtataacaaagtacaagggttgaagagcgctaaggagatttgggatgtgctcaaaaccgcgcacgaaggagatgagctcaccaagatcaccaagcgggaaacgatcgagggggagctcggtcggttccggcttcgcaaaggggaggagccacaacacatgtacaaccggctcaagactttggtgaaccaagtgcgcaacctcgggagcaagaagtgggatgaccacgaagtggtaaatgttattttaagatctctcatttttcttaatcccactcaagttcaattgattcgtggtaatcctagatatactaaaatgacccccgaggaagttatcgggcattttgtaagttttgagtgcatgatagaaggctcgaggaaaatcaacgagcttggcgacccatccgaagcccaacccgttgcattcaaggcaacggaggagaagaaggaggagtctacaccaagtagacaaccaatagacgcctccaagctcgacaatgaggaaatggcgctcgtcatcaagagcttccgccaaatcctcaagcaaaggagggggaaggactacaagtcccgctccaagaaggtttgctacaagtgtggtaagcccggtcattttattgctaaatgtcctatatctagtgacagtgaccgaggcgacgacaagaaggggagaagaaaggagaagaaaaggtactacaagaagaagggcggcgatgcccatgtttgtcgggaatgggattccgacgaaagctcaagcgactcctccgacgacgaggacgccgccaacatcgccgtcaccaagggactcctcttccccaacgtcggccacaagtgcctcatggcaaaggacggcaaaaagaagaaggttaaatccaactcctccactaaatatgaatcttctagtgatgataatgctagtgatgaggaggataatttgcgttccctttttgccaaccttaacatagctcaaaaagagaaattaaatgaattagttagtgctattcatgaaaaggatgaccttttggatgcccaagaggattgtctaattaaagaaaacaagaaacatgttaatgttaaaaatgcttatgctctagaagtagaaaaatgtcaaaaactatctagtgagctaagcacttgtcgtgagatgattgacaaccttagaaatgaaaatgctattttaaatgctaaggttgattcacatgtttgtaatgtttcaattcccaatcttagagatgataatgttgacttgcttgctaagattgatgaattgaatgtatctcttgctagccttagattagagaatgaagatttaattgctaaggctaaagattttgatgtttgcaaagttacaatttccgatcttagagataaaaatgatattcttcatgctaagattgttgagcttaattcttgcaaaccctctacctctattgttgagcatgtatctatttgtactagatgtagaaatattgatattaatgctattcatgatcatatggctttaattaaacaacaaaatgatcatatagcaaaactagatgctaaaattgccgagcacaacttggaaaatgaaaaatttaaatttgctcgtagcatgctttataatgggagacgcccgggcattaaggatggcattggcttccaaaggggagacaatgtcaaaattagtgcccctcctaagagattgtccaactttgttaagggcaaggctcccatgcctcaggataacgagggttacattttgtaccctgccggttatcctgagaacaaaattaggaaaattcattctaggaagtctcactctggccctaatcatgcttttatatataagggtgagacatctagctctaggcaaccaacccgcgccaagttgcctagaaagaaaactcctaatgcatcaaatgatcatgccatttcatttaaaacttttgatgcttcttatatgcttactaacaaatccggcaaagtagttgccaagtttgttgggggaaaacacaagggttccaagacttgtgtttgggtacccaaagttcttgtgtctaatgccaaaggacccaaaaccgtttgggtttatgcatccgggggctcaagttggatactcgacagcgagtgcacaaaccacttgaccggggagaaaaggatgttctcctcatatgagaaaaaccaagatccccaacgagctatcacattcggggatggaaatcaaggtgtcactgtctttagaagaagtgatgattcaatagcatttaagggagtgttagagggtcagctatacttggtagattttgatagagctgaactcgacacttgcttaattgctaagactaacatgggctggctctggcatcgccgactagcacatgttgggatgaagaatcttcacaagcttctaaagggagaacacattttaggattaacaaatgttcattttgagaaagacagggtttgtagcgcatgccaggcgggaaagcaggttggagctcatcatccacacaagaacataatgacgaccgacaggccactggagctcctacacatggatctattcggcccgatcgcttacataagcatcggcgggaaaaaatctcaaacccaagagaccttaaagggattcctgagacgggctcaaaatgagttcggcttaaggatcaagaaaataagaagcgacaacgggacagagttcaagaactctcaaattgaaggctttcttgaggaggagggcatcaagcatgagttctcttctccctacacgccacaacaaaatggtgtagtggagaggaagaataggactctattggacatggcaagaaccatgcttgatgagtacaagacttcggatcggttttgggccgaggcggtcaacaccgcttgctactccatcaaccggttatatcttcaccgaatcctcaagaaaacatcgtatgaactcctgaccggtaaaaagcccaacatttcatattttagagtctttggtagcaaatgctttatacttgttaaaagaggtagaaaatctaaatttgctcctaagactgtagaaggctttttacttggttatgactcaaacacaagggcatatagagtctttaacaagtcctcaggacttgttgaagtttcttgtgacgttgtgtttgacgaaactaacggctctcaagtagagcaagttgatcttgatgagataggtgaagaacaggctccatgcatagcgctaaggaacatgtccattggggatgtgtgtcctaaggaatccgaagagcctccaattgctcaagatcaaccatcctcctccatgcaagcatctccaccgactgaaaatgaggatgaagctcaagttgatgaagttgaagatcaagcaaatgagccacctcaagatgatagcaatgatcaagggggagatacaaatgaggaagacaaggaggatgaagagcaaaggccgccacacccaagagtccaccaagcaatccaacgagatcaccccgtcaacaccatcctcggcgacattcataagggggtaactactcgatctcgtgttgctcatttctgtgaacattactcgtttgtttcctctattgagccacacagggtagaggaagcacttcaagattcggattgggtggtggcgatgcaagaggaactcaacaacttcacgaggaatgaggtatggcatttagttccacgtcctaatcaaaatgttgtaggaaccaaatgggtcttccgcaacaagcaagacgagcatggtgtggtgacaaggaacaaagctcgacttgtggccaagggatactcccaagtcgaaggtttggatttcggtgaaacctatgcacccgtagctaggcttgagtcaattcgcatattattggcctatgctacttaccatggctttaagctttatcaaatggacgtaaaaagtgccttcctcaatggaccaatcaaggaagaggtctatgttgagcaacctcccggctttgaagacagtgagtatcctaaccatgtctataagctctctaaggcgctttatgggctcaagcaagccccaagagcatggtatgaatgccttagagatttccttattgctaatggcttcaaagtcggaaaggccgatcctactttgttcactaaaactcttaacaatgatttgtttgtatgccaaatttatgttgatgatatcatatttgggtctactaacgaatcaacttgtgaagaatttagtaggatcatgacacaaaaattcgagatgtctatgatgggggagttgaagtatttcttaggattccaagtaaagcaactccaagagggcaccttcatcagccaaacaaagtacactcaagacattctaaccaagtttgggatgaaggatgccaaacccatcaagacacccatgggaactaatgggcatctcgacctcgacacgggaggtaagtccgtagatcaaaagattattccggacaggagaagctttttggaaaaacaggccaagcgcggaccgtccgggctcttgcggcggaccgtccgcgacatggggatacccctcggacagaaccaatgcaaaaactcaagtttccactacagactgtccggaggaaaagcgaagaccgtccgagccctcgcgcggaccgtccggcctcaggcgcggaccgtccggtcgccgttgatctacaggggcggaccgtccggacctggctcgcggaccgtccgcgctcagcagaatggcccaacggctaggaagtggttggtggctataaatacaaccccaaccacctccattcacttcatccaagcattccaaccttcaacattcaatacaagagctagcaatccattccaagacacattcaaagcctccatctctccaagtttcacaattgagaaaagagatcattag

SEQ ID NO: 4897 - DNA, 1812 bp, Zea mays
  Clone ID: TF_ZM4404.C2.o1.fg
atgtcgggagaattcgccaagaaggagatggagaccggcgacaagcccactacaagccacgggaaggcttcatcggaagagtcccgcaacaaggagaagaagagggagaagaagaaggagaagaagacttcttctcacaagtcgcatcggagtggcgataagataaagaagatgaggaaggtggtctactacgagaccgacacctcatcgccatctacctccggctccgacgcaccctccataacttctaagcgccatgagcgcaagaagtttagtaagatccccctacgctaccttcgcattactaaacatacacctttactttccgtcccattaggcaaaccaccaacttttgatggtgaagattatgctaggtggagtgatttaatgcgatttcatctaacctcactccacaaaagtatatgggatgttgttgagtttggtgcacagcacttcaactcccaagccacaacaatactcctcgcctctctaagtagggaggagtacaacaaggtggaaggattaaagggcgccaaggaagtttgggacgtgctcaagaccgcgcacgagggtgatgaactcaccaagatcaccaagcgagaaacgatcgagggggagctcggtcgcttccgtcttcgccaaggggaggagccacaagacatgtacaaccggctcaaaaccttggtaaaccaagtgcgcaacctcgggagcaaaaagtgggatgaccacgaggtggttaaggttattctaagatctcttattttccttaaccctactcaagtacaattaattcgtggtaatcctagatatacactaatgacttccgaggaagtaatcgggaattttgtgagctttgaatttatgatcaagggctcacggaagatcaacgagcttgacggtccttctacgtccgaggctcaacccgtcgcattcaaagcgacgaaagacaagaaggaggagtacacaccgagtagaacacccatcgacgcctccaagctcgacaacgaggaaatggcgctcgtcatcaaaagctttcgccaaatactcaagcaaaggagggggaaagattacaagccccgctccaagaaggtttgctacaagtgtggtaagcccggtcactttatagctaaatgtcctatttctagtgatagtgacaagggtgacgacaagaaggggagaagaaaggagaagaagaggtactacaagaagaagggcggcgatacccatgtttgtcgggagtgggactctgacgaaagctctagcgactcctccgacgacgaggacgccgccaacatcgccgtcaccaagggactcttcttccccaacgtcggccacaagtgcgtcatggcaaaggacggcaaaaagaagaaggttaaatctaaatcctccactagatatgagtcttctagtgatgaaaatgctagtgatgaggaagataacttacgcactctttttgccaacttaaacatgcaacaaaaagagaaattaaatgaattgattagtgccatccatgagaaggatgatctcttggactcccaagaggacttcctaatcaagaaaaacaaaaagcatgttaaagttaaaaatgcttatgctctagaagttgagaagtgtgaaaaattgtctagtgagctaagcacttgccatgagaccattgacaaccttagaaatgaaaatgttagtttaaatgctaaggttgtttctcatgtttgtgatgttttaattcccaatcctagaaataatgatgatgatttacttgctaggattaaagaattaaacacttctcttgctagccttaggagtgaaaaatga

SEQ ID NO: 4898 - DNA, 5784 bp, Zea mays
  Clone ID: TF_ZM4404.C5.o1.fg
atgtcgggagatcacgccaagaaggagatggagaccggcgaaaagcccactacaagccaagggagcacttcatcggaagagtcccgcaccaagaggagggagaagaagaatatctcctccaacaaagggaaggaaaagaaatcttcttctcaccacaaagagaagaaggaaaaatcttcttcccacaagccgcatcggagtaaggacaagcaaaagaggatgaggaaagtggtctactatgagaccgacacttcatcaacatcgacctccggctccgacacgccctctgtaacttctaaacgccaagagcgtaagaagtttagtaagatccccctacactaccctcgcatttctaaacatgcacctttactttccgtcccattaggcaaaccaccaacttttgatggtgaagattatgctaggtggagtgactttatgcgatttcatctaacctcactccacaaaagtatatgggatattgttgagtttggtgcacaggtaccatccgtaggggacaaagattatgatgaggatgaggtggcccaaatcgagcacttcaactctcaagcgacaacaatactcctcgcctctttaagtagagaggagtataacaaagttcaagggttgaagagcgccaaagaagtttgggatgtgctcaaaaccgcgcacgagggagacgagctcaccaagatcaccaagcgggaaacgatcgagggggagctcggtcggttccggcttcgcaaaggggaggagccacaacacatgtacaaccggctcaagaccttggtgaaccaagtgcgcaacctcgggagcataaaatgggatgaccatgaaatggttaaggttattctaagatctcttattttccttaatcctactcaagttcaattaattcgtggtaatcctagatatactaaaatgacccccgaggaagttatcgggcattttgtaagttttgagtgcatgatcgaaggctcgaggaagatcaacgagcttgatgatccatctacatccgaggctcaacccgtcgcattcaaggcgacggaggacaagaaggaggaggctacaccaagtcgacaaccaatagacgcctccaagctcgacaatgaggaaatggcgctcgtcatcaagagcttccgccaaatcctcaagcaaaggagggggaaagactacaagtcccgctccaaaaaggtttgctacaagtgtggtaagcccggtcattttattgctaaatgtcctatctctagtgacagtgaccgaggcgacgacaagaagggaagaagaaaggaaaagaagaggtactacaagaagaagggcggcgatgcccatgtttgtcgggagtgggattccgacgaaagctcaagcaactcctcctccgacgaggacgccgccaacatcgccgtcaccaagggacttctcttccccaacgtcggccacaagtgcctcatggcaaaggacggcaagcggaagaaggttaaatctaactcctccactaaatatgagtcttctagtgatgataatgctagtgatgaggaggataatttgcgtaccctttttgccaatcttaacatggaacaaaaggaaaaattaaatgaattaattagtgctattcatgaaaaggatgaccttttggattcccaagaggattgtcttattaaggaaaacaagaaacatgttaaggttaaaaaggcttatgctcttgaaattgagaaatgtgaaaagttatctagtgagctaagcacttgccgtgagatgattgacaaccttagacatgaaaatgctagtttaaatgctaaggttgattcacatgtttgtaatgtttcaattcccaatcctagagataataataatgatttgcttgctaggattgaagaattaaacatttctcttgctagccttagaaatgaaaatgaaaacttgcttgctaaggctaaagattttgatgtttgcaaagttacaatttccgatcttagagataaaaataatattcttcatgctaagattgttgaacttaattcttgcaaaccctctacatctattgttgaacatatatctatttgtactagatgtagagatattgatgttaatgctattcatgatcacatgtccttaattaaacaacaaaatgatcatatagcaaaactagatgctaaaattgccgagcacaacttagaagatgagaaatttaaatttgctcgtagcatgctttataatgggagacgcccgagcatcaaggatggcattggattccaaaggggagacaatgtcaaacttaatgcccctcctaaaagattgtctaattttgtaaagggcaaggctcccatgcctcaggataacgagggttatattttgtaccctgccggatatcctgagagtaaaattaggagaattcattctaggaagtctcactctggccctaatcatgcatttatgtataagggtgagacatctagctctaggcaaccaacccgtgccaagttgcctaagaaaactcctaatacatcaaatgatcataacatttcatttaaaacttttgatgcatcttatgttttgactaacaaatccggcaaaatagttgccaaatatgttgggggcaagcacaagggctccaagacttgtgtttgggtacccaaagttcttgtttctaatgctaaaggacccaaaaccatttgggtctatgcatccgggggctcaagttggatactcgacagcgggtgcacaaaccacatgactggggagaaaaagatgttctcctcatatgagaaaaaccaagatccccaaagagcaattacattcggggatggaaatcaaggtttggtcaaaggtgtcactgtctttagaagaagcgatgattcaatagcatttaagggagtgttagagggtcagctatacttggtagattttgatagagctgaactcgacacttgcttaattgctaagactaacatgggttggctctggcaccgccgactagcccatgttgggatgaagaatcttcacaagcttctaaagggagaacacattttaggattaacaaatgttcattttgagaaagacaggatctgtagcgcatgccaggcaggaaagcaagttggagctcatcatccacacaagaacataatgacgaccgacaggccactggagctcctacacatggatctattcggcccgatcgcttacataagcattggcgggagtaagtattgtctagttgttgtggatgattattctcgcttcacttgggtattctttttacaggaaaaatctcaaacccaagagaccttaaagggattcttgagacgggctcaaaatgagttcggcttaaggatcaagaaaataagaagcgacaacgggacggagttcaagaactctcaaattgaaggcttccttgaggaggagggcatcaagcatgagttctcttctccctacacgccacaacaaaatggtgtagtggagaggaagaatagaactctattggacatggcaaggaccatgcttgatgagtacaagacttcggatcggttttgggccgaggcggtcaacaccgcttgctacgccatgaaccggttgtatctacaccgaatcctcaagaagacatcatacgaactcctaatcggtaaaaagcccaacatttcatattttagagtctttggtagcaaatgctttattcttgttaagagaggtagaaaatctaaatttgctcctaagactgtagaaggctttttacttggttatgactcaaacacaagggcatatagggtctttaacaagtccactggactagttgaagtctcatgtgacgttgtgtttgatgagactaacggctctcaagtagagcaagttgatcttgatgagataggtgaagaagaggctccatgcatcgcgctaaggaacatgtccattggggatgtgtgtcctaaggaatccgaagagcctccaaatgcacaagatcaaccttcctcctccacgcaagcatctccaccaactcaagatgaggatgaagctcaagttgatgaagtagaagatcaagcaaatgagccacctcaagataatggcaataatcaagggggagatgcaaatgaggaagacaaggcggaagaggaacaaaggccgccacacccaagagtccaccaagcaatccaacgagatcaccccgtcgacaccatcctcggcgacattcataagggggtaactactcgatctcgtgttgcacatttttgtgaacattactcgtttgtttcctctattgaaccacacagggtagaggaagcactacaagattcggattgggtggtggcaatgcaagaggagctcaacaacttcacgaggaatgaggtatggcatttagttccacgtcctaaccaaaatgttgtaggaaccaaatgggtcttccgcaacaagcaagacgagcatggtgtggtgacgaggaacaaagctcgacttgtggccaagggatactcccaagtcgaaggtttggatttcggtgaaacctatgcacccgtagctaggcttgagtcaattcgcatattattagcctatgctacttaccatggctttaagctttatcaaatggacgtgaaaagtgccttcctcaatgggccgatcaaagaagaggtctatgttgagcaacctcccggctttgaagacagtgagtaccctaaccatgtctataagctctctaaggcgctttatgggctcaagcaagccccaagagcatggtatgaatgccttagagatttccttattgctaatggcttcaaagtcggtaaagccgatcctacactctttactaaaactcttgaaaatgacttgtttgtatgccaaatttatgttgatgatattatatttgggtctactaacgagtctacatgtgaagagtttagtaggatcatgacacagaaattcgagatgtctatgatgggggagttgaagtatttcttaggatttcaagtaaagcaactccaagagggcaccttcatcagccaaacgaagtacactcaagatattctaaccaagtttgggatgaaggatgctaaacccatcaagacacccatgggaactaatgggcatctcgacctcgacacgggaggtaagtccgtggatcaaaaggtataccggtcgatgataggttctttactctatttatgtgcatctcgaccggacattatgctttccgtatgcatgtgtgcaagattccaagccgaccctaaggaagctcaccttacggccgtaaaacgaatcttgagatatttggcttatactcctaagtttgggctttggtatcctaggggatccacttttgatttaattggttattcggatgccgattgggcggggtgcaaaatcaataggaagagcacatcggggacttgccagttcttgggaagatccttggtgtcttgggcttcaaagaagcaaaattcggttgctctttccaccgccgaagccgagtacattgccgcaggccattgttgcgtgcaattgctttggatgaggcaaaccctgcgggactacggttacaaattaaccaaagttcctttactatgtgataatgagagtgcaatcaaaatggccgacaatccagtcgagcatagccgcactaagcacatagccattcggtatcattttcttagggatcaccaacaaaagggagatatcgagatttcttacattaatactaaagatcaattagccgatatatttaccaagcctcttgatgaacaatcttttaacaaacttaggcatgagctcaatattcttgattctaggaacttcttttgttaa

SEQ ID NO: 4899 - DNA, 2493 bp, Zea mays
  Clone ID: TF_ZM4442.C1.o1.fg
atgtcgggagatcactccaagaaggagatggagaccggcgacaagcccactacaagccacgagaaagcttcatcggaagagtcccgcaacaaggggaaggggaaggagaagaaagcctcttctcacaagtcgcatcggagtggcgacaagaaaaagaagatgaggaaggtggtctactacgagaccgacacttcatcaccttccacctccagctccgacgcgccatccattacttctaagcgccatgagcgcaagaagtttagtaagattcctctacgctaccctcgcattcctagacatactccattactttccgttccattaggcaaaccgccaacctttgacggtgaagattatgctaggtggagtgatttgatgaaatttcatctaacctcactccacaaaagtatatggaatgttgttgagtttggagcacaggtaccatctgtaggggatgaggattatgatgaggacgaggtggcccaaatcgagcacttcaactcccaagccacaactatactcctcgcctctctaagtcgagaggagtataacaaggtgcaaggattaaagagcgccaaagaagtttgggacatgctcaaaaccgcacacgagggagatgagctaaccaagatcaccaagagggagacgatcgagggggagctcggtcgcttccgtcttcgccaaggggaggagccacaagacatgtacaaccggctcaaaaccttggtgaatcaagtgcgcaacctcgggagcaaaaaatgggatgaccatgaaatggttaaggttattctaagatcacttattttccttaaccctactcaagttcaattgattcgtggtaatcctagatatacactaatgactcccgaggaagtaatcgggaattttgtaagctttgagttcatgatcaagggcttaaagaagatcaacgagcttgacgtcccctccacgtccgaagcacaaccggtcgcattcaaagcgacggaggagaagaaggagtctacatcaagtagaacacccatcgacgcctccaagctcgacaatgaggaaatggcgctagtcatcaagagcttccgccaaatcctcaagcaaaggagggggaaagattacaagccccgctccaagaaagtttgctacaagtgtggtaagcccggtcactttatagcaaaatgtcctatttctagtgacagtgacaggggcgacggcaagaaggggagaagaaaggagaagaagaaatactacaagaagaagggcggcgatgcccatgtttgccgggagtgggactccaacgagagctccaccgactcctcctccgatgaggacgccgcaaacatctccgtcaccaagggactcctcttccccaacgtcggccacaagtgcctcatggcaaaggacggtaaaaagaagaaggttaaatccaaatcctccactagatatgagtcctctagcgatgataatgctagtgatgaggaagataatttgcgtactctttttgccaacttaaacatgcaacaaaaagagaaattaaataaattgattagtgctatccatgagaaggatgatctcttggacacccaagaggacttccttattaaagagaacaagaagcatgttaaggttaaaaatgcttacgctctagaagtagaaaaatgtaagaaactatctagtgagctaagcacttgccatgagaccattgacaaccttagaaatgagaatggtaatttgttagctaaggttgattcaaatgtttgtgatgtttcaattccaaatcttagaaatgataatgttgatttacttgctaagattgaagaattgaacatttctcttgctagccttagaaatgaaaatgaaaaattgcttgctaaggctaaagatatagatgtttgcaatgcttcaatttccgatcttagagataaaaatgatatattgcgtgctaagattgttgaacttaattcttgcaaaccctctacatctaccactgagcatgtcactatttgcactagatgtagagatattaacattgatgctattcatgatcacatggctttaattaaacaacaaaatgatcatatagcaaaattagatgctaaaattgccgagcatgacttagaaaacgaaaaatttaaatttgctagaagcatgctctatagagggagacgccctggcattaaggatgacattggcttccaacagggaggcaatgtcaaacttaatgcccctcctaagaaattatccaactttgttaaaggcaaggctcccatgcctcaggataacgagggttacattttgtaccctgccggttatcacgagagcaaaattaggagaattcactctaggaagtctcactctggccctaaccatgcttttatgtataagggtgaggcatctagttctaggcaatcaacccatgcaaaattgcctaagaagaaaactcctagtgcatcaaatgaacatagcatttcattcaaaacttttgatgcatcaatgttttaa

SEQ ID NO: 4900 - DNA, 3291 bp, Zea mays
  Clone ID: TF_ZM4496.C2.o4.fg
atgtcgggagctcatgccaagaaggagatggtgaccggcgagaagcccgccacaagccacagaaaagctccatcgagagagtccggcaacaaaagggaggaatcacctccccgcgtcaagtcacaccggagtggcgacaagaagaagaaaatgaagaaggtggtctactacgagaccgactctttgtcgccttccacctccggctccgacgcgccgtccgtcacttctaagcgccatgagcgcaagaagtttagtaagatccccttacgctatcctcgcatttctaaacgcacttatttactttccgtcttactaggcaaaccaccggtttttaacggtgaaaattattgtatgtggagtgaaaaaatgaggcaccatctaacctcactccacgctagcatttgggacattgttgaatttgcagcgcaggaaccatccgtgggggatgaaggctatgactcggacgaggtagcccaaatccggcacttcaactcccaagccactactatactcctcgcctctctaagtcgagaggagtataataaggtgcaagggttgaagagtgccaaagaaatttgggacatactcaagaccgcgcacgaaggagatgaggtgaccaagatcaccaagcgggaaacgatcgaagaggagctcggtcaattcatgcttcaccaaggggaggagccacaagccatgtacaaccggctcaagaccttggtgaaccaagtgcgcaacctcaggagcaccaaatgggatgaccatgaaatggtcaaggttattcttagatcactcgtttttcttaaccctactcaagttcaattaattcgtggtgatcctagatataaactaatgtctcccgaggaagtgataggaaagtttgtgcaacctgtcgccctcaaagtgatggaggagaagaaggaagagtctacatcaagtaggctccccatcgacgcctccaagctcgacaatgaggagatggctttaatcatcaaaatctttcgccaaatcctcaatcaaaggagggggaaggattacaagccccgctccaaaaaagtttgctacaagtgtggtaagcccggtcactttatagcaaaatgtcctatttctagtgacagtgacaggggcaccaacaagaagggaagaaggaaggagaagaagaagtattacaaaaagaagggtggcgatgcccatgtttgtcgggaatgggactccgacgagggctccaccgactcctcctccgacgaggacgccgccaacatcaccgtcaataaaggccttctcttccccaacgtcggccacaagtgcctcatggcaaaggacggcaaaaagaaggtttatgcatccgggggctcaagttggatcattgatagcgggtgcacaaaccacatgacaggggagaagaagatgttctcctcctatgagaaaaaccatgatccccaaagagctatcacattcgtggatgaaaaatcacaaacccaagagacattgaagggattcttaagacgggctcaaaatgagttcggattgaggatcaaaaagattagaagcgacaacgggacggagttcaagaactcacaaatagaaggcttccttgagaatgagggcatcaagcatgagttctcttctcactacacaccacaacaaaatggtgtagtggagaggaagaatagaactctacttgacatggcgagaaccatgcttgatgagtacaagacttcgaaccggttttgggcggaagcagccaacaccgcctgctacgccatcaaccgtctctaccttcaccgaatcctcaagaagacatcgtatgaactcctcaccggtaaaaagcccaatgtttcatattttagagtctttggtagcaaatgctttattcttgtcaaaagaggtagaaaatctaaatttgctcctaaggctgtagaaggctttttacttgattatgattcaaacacaagggcatatagagtctttaacaagtccactagactagttgaagtttcttgtgacaatgtgtttgatgagactaacggctctcaagtagagcaagttgatcttgatgagctagatgatgaagaggctccgtgcgtcgcactaaggaacatgtccattggggatgtgtgtcctaaggaatccgaagatcctccacatgcacaagatcaaccatcatcttcaaatcaagcatctccaccaacccaagatgaggatcaagctcaagatgatgaaaataaagatcaagaagagtcacctctagaggaggacaatgatcaagggcgagatgccaatgatcaagacaaggaagatgatgagggtccaagaccgccacacccaagagtccaccaagcgatacaacgagatcaccccgtgaactccatcctcggcgatattcataagggggtaaccactcgatctcgtgtcgctcatttttgtgaacattactcctttgtgtcttctattgagccatacagggtggaagacgcattaagggattcagattgggtgttggcgatgcaagtggaactcaacaacttcacgaggaatgaggtatggcatttagttccacgtcctaatcaaaatgttctaggaaccaagtgggtcttccgcaacaagcaagatgagcatggtgtggtgacaaggaacaaagcccgacttgtggctaagggatattcacaagtcgaaggtttggatttcggtgaaacctatgcacccgtagttaggcttgagtcaattcgtatattacatgcctatgctacttaccatggctttaagctttaccaaatggacatgaaaagtgccttcctcaatggaccaatcaaggaagaggtctatgttgagcaacctcccagctttgaagacaagtttagtaggattatggttcaaaaattcgagatgtctatgatgggggagttgaagtatttcttaggatttcaagtcaagcaactccaagagggcaccttcatcagtcaaacgaagtacattcaagacatactcaccaagtttgggatgaaggatgccaagcctatcaagacacccatgggaactaatgggcatctcgacctcgacacgggaggtaaatccgtagatcaaaaggtataccggtcgatgataggatctttactctatttatgtgcatctcgaccggatattatgctttctgtatgcatgtgtgcaagattccaagtcgatcctaaggaagttcaccttagggccatgaaacgaatcttgagatatttagttcatactcctaagtttggcctttggtaccccaagggatccacttttgatttaataggatag

SEQ ID NO: 4901 - DNA, 3894 bp, Zea mays
  Clone ID: TF_ZM4496.C6.o2.fg
atggccacaagccacgggaaggctccatcaaaggagtccgacgccaaaggaagggaggaatcaccttcctgcgtcaagtcgcaccggagtggcgacaagaagaagaaaataaagaaagtggtctactacaagaccgattcttcgtcgccctccacctccggctccaatgcaccgtccgtcacttctaagcgccatgagcgcaagaagtttagggatgaaggatatgattcggacgaggtcgcccaaattcgtcactttgactcccaagaaactactatactcctcgcctccttgtgtcgagaggaatataacaaggtgcaagggctaaaaagtgccaaagagatttgggatgtactaaagaccgcgcacgaaggggatgaggtgaccaagatcaccaagagggagactatcgagggggagttcggtcgattcatcctcaaccaaggagaagagccacaagcgatgtacaaccggctcaagaccttggtcaaccaagtgcgcaacctcgggagcacaaaatgggatgaccatgaaatggtcaaagttattctaagatcactcgtttttcgtaatcctacgcaagttcaattaatatgtggtgatcctagatataagctaatgtctcccgaggagctcgacaacgagcaaatggcgctcatcatcaagagttttcgccaaatcctcaagcaaaggaaggggaaagactacaaaccctgttccaaaaaggtgtgctacaagtgtggtaagcccggtcattttattgcaaaatgtcctatttctagtgacagtgataggggcgacgacaagagagggaagaagaaggagaagaagagatattacaagaagaaggcggcgatgcccacggtctcctcttcccccaacgtcggccacaagtgtatcatggcaaaggacgacaagaaaaagaaggtacaagctagaaccacccccaagtatactacatctaatgatgagggtagttctagtgataatgaagataacttgcttagtctttttgccaaccttaacatgcaacaaaaggaaaaactaaatgaattgataagtgctattcatgagaaggatgaactcttggatagccaagaggaatttcttattaaggaaaataagaagcatgttaaggagcttagcatttgccatgacaccatttccaaccttagagatgagaacaatagtttaattgctaaggttgagaaatcaaaagtttgccatgattcaattgacaatcttagaaatgaaaatgctagtttatttgctaagattgataaattgaatgaatcaattgctagccttaaaactgagaatgataagttaatttctaaggctaaagatttgaatgtttgcaatatttatatttccaatcttagaaatgagaatgctattttacatactaagattgatgaattaaatgcttgcaaaccctctacatctactgttggtcatgttactatttgtactagatgtggagacattaatgttgatgctattcatgatcacctagctttaattaaacaacaaaatgatcacatagctcaactaactgccaaaatcaatgagcatgagatagaaaatgaaaaatttaaatttgctagaagcatgctctataatgggagacgccctggcatcaaggatggaattggtttccaacaaggaagcaatggcaaggctcccatggctcaagataatgagggttacattttatatcctgctggttatcctgagcacaaaattaggagaattcatgctaagaagtctcattctatttcccatcatgcttttatgtacaagaatgaggcatctagctctaggcattctacccatgttaaaatgcctaaaaagaaaactcctactgcatcaaatgagcctaatgcttcatctaagacttttgatgcaccttatgtgcttactaacaaatcaggcaaagtagttgccaaatatgttgggggaaacacaagggctccaagacttgtgtttggatacccaaggaataatagaactctattggacatggcgaggaccatgcttgatgagtacaagacatcggaccagttttgggtggaagcaatcaacactgcttgctactccatcaaccggctctaccttcaccgaatcctcaagaagacatcatatgaactcctcaccagtaaaaagcccaatgtttcatattttagagtctttggtagcaaatgctttattctttttaaaagaggtagaaaatccaaatttgctcctaaagttgtagaaggttttttacttggttatgactcaaacacaagggcatatagagtcttcaacaaatccactggattagttgaggtttcttgttacattatgtttgatgagactaacggctcccaagtggagcaagttgatcttgatgagctagatgatgaagaggctccgtgtgtcgcgctaaggaacatgtctattggggatgtgtgtcctaaggaatccaaagacctacacaagcgcaagatcaaccatcatcttccaatcaagcatctccacaaacccaagataaggatcaggctcaagacaatgaagatgaagatcaataggatgagccacctcaagaggaggacaatgatcaagggggagatgacaatgatcaagacaaggaagatgatcaaaattcagggaaccaagtgggttttccgcaacaagcaagatgagcatggtgtggtgacaaggaacaaagcccgacttgtggccaagggatattcacaagtcgaaggtttggattttggtgaaacctatgcacccgtagctaggcttgagtcaatttgtatattacttgcctatgctactcatcatggctttaagctttatcaaatggacgtgaaaagtgccttcctcaatggaccaatcaaggaagaggtctatgttgagcaacctcctggctttgaagatagtgagtaccctaaccatgtttataaactctcaaaggcgctttatgggctcaagcaagccccaagagcatggtatgaatgcctaagagattttctcatcactaatggattcaaattgaagtatttcctaggatttcaagtcaagcaactccaagaaggcaccttcatcagccaaacaaagtacattgaagatatacttaccaagtttagaatgaaggatgctaagcccatcaagacacccatgggaactaatgggcatctcgacctcgacatgggaggtaaatccgtagatcaaaaggtataccggtcgatgataggatctttactctatttatgtgcatatcgaccggacattatgctttccgtatgcatgtgtgcaaggttccaagccgatcctaaggaagttcaccttagatccatgaaaagaatcatgagatatttagtttacactcctaagtttggactttggtaccccaagggatccacttttgatttaaaaggatattcagatgttgattgggtagggtgtaaaattgatagaaaaagcacatcagagacttgtcagtttttggggagatcactggtgtcttgggcttcaaagaaacaaaactcagtagctctttctaccgccgaagccgagtacattgccgcaggccattgttgtgcgcaattactttgggtgagacaaactctcagggactatggctacaaattgagcaaagtccctctcctatgtgataatgagagtgcaatctgcatagcggataatcccgttgaacacagccgcattaagcacatagacattcggtatcactttttgagggatcaccaacaaaggggggatattgagatagcttatgttagcacaaaagaacaattagccgatatctttaccaaaccattagatgagaaaacctttaccaaacttaggaatgagctaaacattcttgattctcgaaattttgattga

SEQ ID NO: 4902 - DNA, 2872 bp, Zea mays
  Clone ID: TF_ZM4547.C1.o1.fg
atgtcgggagatcacgccaagaaggagatggagaccggcgaaaagcccactacaagccacgtgagcacttcatcggaagagtcccgcaccaagaggaaggagaagaagaagatctcctccaacaaagggaaggagaagaaatcttcttctcaccacaaagagaagaaggaaaaatcttcttcccacaagccgcgtcggagtggggacaagcaaaagaggatgaggaaggtggtctactacgagactgacacttcatcaacatcaacctccgactccgatgcaccctccgtaacttctaaacgccaagagcgtaagaagtttagtaagatccccctacactatcctcgcatttctaaacatgcacctttactttccgtcccattaggcaaaccaccaacttttgatggtgaagattatgctaggtggagtgatttaatgcgatttcatctaacctcactccacaaaagtatatgggatgttgttgagtttggtgcacaggtaccatccgtaggggacaaggattatgatgaggatgaggtggcccaaatcgagcacttcaactctcaagcgacaacaatactcctcgcctctttaagtagagaggagtataacaaagttcaagggttgaagagcgccaaggaggtttgggatgtgctcaaaaccgcgcacgaaggagatgagctcaccaagatcaccaagcgggaaacgatcgagggggagctcggtcggttccggcttcgcaaaggggaggagccacaacacatgtacaaccggctcaagactttggtgaaccaagtgcgcaacctcgggagcgtcaagtgggacgaccacgaaatggttaaggttattctaagatctctcatttttcttaaccccactcaagttcaattaattcgtggtaatcctagatatactaaaatgacccccgaggaagtaatcgggcattttgtaagttttgagtgcatgatcgaaggctcgaggaagatcaacgagcttgatgatccatctacatccgaagctcaacccgtcgcattcaaggcgacggaagaaaagaaggaggagtctacaccaagtagacaaccaatcgacgcctccaagcttgacaatgaggagatggcgctcgtcatcaagagcttccgccaaatcctcaaacaaaggagggggaaagactacaagtcctgctccaagaaggtttgctacaaatgtggtaagcccggtcattttattgctaaatgtcctatatcaagtgacagtgaccgaggcgacgacaagaaggggagaagaaaggagaaaaagaagtactacaagaagaagggcggcgatgcccatgtttgtcgggagtgggattccgacgaaagctcaagcgactcctccgacgacgaggacgccgccaacatcgccgtcaccaagggacttctcttccccaacgtcggccacaagtgcctcatggcaaaggacggcaaacggaagaaggttaaatctaactcctccactaaatatgagtcttctagtgatgataataatagtgatgaggaggataatttgcgtgttctctttgccaatcttaacatggagcaaaaagaaaaattaaatgaattgattagtgctattcatgaaaaggatgaccttttggactcccaagaggattgtctaattaaagaaaacaagaaacatgttaaggttaaaaaggcttatgctctagaagtagaaaaatgtgaaaaattatctagtgagctaagcacttgccgtgagatgattgacaaccttaggaatgaaaatgctagtttaaatactaaggttgattctcatgtttgcattgtttcaacttccaatcctagagataataatgatgatttgcttgctaggattgaaaaattaaacacttctcttgctagccttagagtagaaaatgataatttgattcctaaggctaaagattttgatgtttgcaatgtcactatttccgatcttagagataaaaatgatatattacgtgctaagattgttgaacttaattcttgcaaaccgtctacatctactattgagcatgtgtctatttgtgatagatgtagagatattgatgttaatgctattcatgatcacatgtctttaattaaacaacaaaatgatcatatagcaaaactagatgctaaaattgccgagcacaacttagaaaatgagaaatttaaatttgctcgtagcatgctttataatgggagacgccctggcattaaggatggcattggcttccaaagaggagacaatgacaaacttaatgcccctcctaagaacttgtctaactttgtcaaggacaaggctcccatgcctcaggataacgagggctacattttgtaccctgccggctatcctgagagcaaaataaggaaaattcattctaggaagtctcactctggccctaatcatgcttttatgtataagggtgagacatctagctctaggcaaccaacccgtgccaagttgcctagaaagaaaactcctaatgcatcaaatgatcataccatttcatttaaaacttttgatgcttcttatgtgcttactaacaaatccggcaagatagttgccaagtttgttgggggcaaacacaagggttccaaggcttgtgtttgggtacccaaagacattgtttctaatgccaaaggacccaaaaccgtttgggtttatgcatccgggggctcaagttggatactcgacagcgggtgcacaaaccacatgacaggggagaaaaagatgttctcctcatatgagaaaaaccaagatccccaacgagctatcacattcggggatggaaatcaaggtgtcactgtctttagaagaagtgatgattcaatagcatttaagggagtgttagagg

SEQ ID NO: 4903 - DNA, 2841 bp, Zea mays
  Clone ID: TF_ZM4553.C2.o1.fg
atggccacatgcatagatctcacgtatggaaaggctgtcagcacagccttatctgttgaagcaaaatacgcaagttctgggaagaataagggattcggtggtgagaggccaaatcagggccaggcgaagaagcaacgatttgtgatccggccttcaagccaaaatcgcactttttctcgtccaccctcattccccttcaaacagccaatcattattcgccccaacaatacccccactaccccaaatcagccgggtgccccaggcactcgattccctgccttgcctagttcttcaactgggtgttttaattgcggcaagtcgggacatttcatcaaagattgcccatatcctaggcaaaatcaatcaaatgctccgcaaggatctaggagatcagctcagcccaaaggaaatgctgtggggaaaaatacaaagaagacggggcgtgtatattacacccaagtggccactacaccggaaggagagccggttatgatgggtacgtttcccgtggccagtcacccagcaattattctttttgattctggtgcttcgcatacattcattagcaagaaatttgtggagcaacatcaccttgcatgccatgaatcaaaagagggatttaaaattcattcacctgggggacacatttttactagagaagtggcctatgaagtgccagtaacaatggctggacagaactttcctgctaacatgattgttctgaaaggccaggatatagatgtaattttgggtatgaattggttaacccaacacaaggcaattctcaacactaaactcagaaccgtcaggttgagctataatcaagaagagattcttttgtctctccccgcaaccaatccagccaaaacttctggtagagtatatgaagccattgtaccggagatcaagaacattccggtagtatgtgagtttccagatgtatttccggaagatttgcctggactgccccctgaaagagatgtagaattcgtaattgagctaaagcccggtacggctcccatctcccgaagatcgtaccgtatgccccctaatgagttggcagaattgaagattcaattacaagatctactgaataagggattcatccggccaagctcgtccccatggggttgccccgccatttttgttaagaagaaggatcaaaccttgcgaatgtgcgtggattatcgacccctgaatgaggtcaccatcaagaataagtaccctcttccaaggatcgacatcttatttgatcaactgactggggcgagggtattttccaaaattgatctcaggtcgggctatcatcaaatccgtattcggcccgaggatataccgaagaccgcgtttactacgcggtatggattgtttgaatatctagtaatgtctttcgggctcacaaatgctcctgcccacttcacctatttgatgaactcggtgttcatgcccgagttggacaagttcgtggtggtctgcatcgacgatattttgatatattctaaaaatgaagaggaccatgctcagcatctacggattgtattgacgcgcctgagggaacatcaactgtatgccaagttcagcaagtgcgcgttctggctggaggaaattcaatttttggggcacgtgttatcggctaaaggaattgcggtagatcctagcaaggtcaaagatatcctggagtggaaacccccaaccactgttcaccaagtccggagttttcttggactagctgggtattatcgcagattcataccagatttttctaagcttgtgaagccaatcacaagtttattgaagaatgacattaagttcaattggtcttctaagtgtaatgaagcctttgagcaattgaagacactattgacgactgctccggtattagctcaaccggacatcactaagccttttgatgtatattgtgatgcatctggcagtgggctcggctgtgtactgatgcaagagggccgagtaattgcgtatgcttcaaggcagttgcgccgacatgaggagcattacccaactcatgatctggagctagctgctgtggttcatgccctgaagatttggcgtcactatctgctgggaaatatctgtcacatatatacagatcataaaagtttgaagtacatcttcacccagtcagaattaaatatgaggcaaagacgatggcttgagcttattaaagactatgaactggagatccattatcacccaggcaaagccaatgtggtagcagatgcactgagtcgtaagacttcctgccactgtcttatggtgaagacctccgagaacactttgtgtcaagagatggaaaagctaaacctggggataatccaacaagggactctaaatcagctaaagcttgagtcaatcattttgcaaagaataattgatgctcaaaaggataatctgggcgattatgtctacttgaaagtttcaccaatgaagggtgtatcgcgtttcggggttaaagggaaaattgcacccaggtacattggtccattcctggtgcttgagcaatgtggaccaatggcataccgtctccaactacccgaaacattgtctgctgtgcataatgtgttccacgtgtcacaattgaagaagtgtcttcgggttctcgatcgaaccgttgaagtgacagatgttgtccttaaaccagacttgacatactctgagcaccctatacgagtcttggatcaaaaggacagggttacccggagaaaaactctcaagttttataagatacagtggaaccaacattctgaagatgaggctacatgggaaactcaagactttttagataagaatttcccaggctttctagcctcatgtaaattgtaa

SEQ ID NO: 4904 - DNA, 4615 bp, Zea mays
  Clone ID: TF_ZM4555.C2.o1.fg
caaacaaaggagggggaaggattacaagtcccgctccaagaaggtttgctacaagtgtggtaagcccggtcattttattgctaaatgtcctatatccagtgacagtgaccgaggtgacgacaagaaggggagaagaaaggagaagaaaaggtactacaagaagaagggcggcgatgcccatgtttgtcgcgagtgggactccgacgagagctcaagcgactcctccgacgacgaggacgccgccaacatcgccgtcaccaagggactcctcttccccaacgtcggccacaagtgcctcatggcaaaggacggcaaaaagaaggttaaatctaaatcctccactaaatatgaatcctctagtgatgacaatgctagtgatgaggaagataatttgcgttccctttttgccaaccttaacatagctcaaaaagaaaaattaaatgaattggttagtgctattcatgaaaaggatgaccttttggattcccaagaggattatctaattaaagaaaacaagaaacatgttaaggttaaaaatgcttatgctctagaagtagaaaaatgtaacaaattatctagtgagctaagcatgtgccatgacactattgccaaccttagaaatgaaaatgctaaattaattgctaaggtagattctcatgtttgcattgatcctagaaatgataatgttgatttgcttgctaggattgatgagttaaatgtttccattgctagccttagaaatgagaatgagaaactaattgctaaggctaaggatattgatgtttgcaatgctactatttccgaccttagaactaaaaatgatatgttgcatgctaaggttgttgaactaaaatcttgcaaaccctctacatctaatgttgagcatatttccatttgtactagatgtagagatattaatgttgatgctatacatgatcacctagccttaattaaaaaacaaaatgatcacatagctcaactaaatgctaagattagagagcatgactcagaaaatgaaaaatttaaattggctagaagcatgctctataatgggagacgccctggcatcaaggatggcattggcttccaaaggagagacaatgtcaaacttaatgcccctccaaagaacttatctaactttgttaagggcaaggctcccatgcctcaggataacgagggttacattttgtaccctgccggctatcctgagagcaaaattagaaagattcattctaggaagtctcactctggccctaatcatgcttatatgtataaggatgagacatctagctctaggcaaccaacccatgccaagttgcctagaaagaaaatttctaatgcatcaaatgaacatagcatttcatttaagacttttgatgcttcttatgttttgactaacaaatccggcaaggtcgttgccaagtttgttgggggcaagcacaagggttccaagacttgtgtttgggtacccaaagttcttgtatctaatgccaaaggacccaaaacagtttgggtttatgcatccgggggctcaagttggatactcgacagcgggtgcacaaaccacatgacaggggagaaaaggatgttctcctcatatgagaaaaaccaagatccccaacgagctatcacattcggggatggaaatcaaggtgtcactgtctttagaagaagtgatgattcaatagcttttaagggagtgttagagggtcagctatacttggtagattttgatagagctgaactcgacacttgcttaattgctaagactaatatgggttggctctggcaccgccgactagcccatgttgggatgaagaatcttcataagcttctaaagggagagcacattttaggattaacaaatgttcattttgagaaagacaggatttgtagcgcatgccaagcagggaagcaagttggcactcatcatccacacaagaacataatgacgactgacaggccactggagctcctacacatggatctattcggcccgatcgcctacataagcatcggcgggagtaagtactgtctagttattgtggatgattactctcgcttcacttgggtattctttttacaggaaaaatctcaaacccaagagaccttaaaaggattcttgagacgggctcaaaatgagttcggcttgaggatcaagaagattagaagcgataacgggacggagttcaagaactctcaaattgaaggctttcttgaggaggagggcatcaagcatgagttctcttctccctacactccacaacaaaatggtgtagtggagaggaagaatcgaactctattggacatggcaagaaccatgcttgatgagtacaagacaccggaccggttttgggccgaagcggtcaacaccgcctgctacgccatcaaccggttatatctgcaccgaatcctcaagaagacatcatatgaactcctaaccggtaaaaagcccaacatttcatattttagagtttttggtagcaaatgcttcattcttattaaaagaggtagaaaatctaaatttgctcctaaaactgtagaaggctttttacttggttatgactcaaacacaagggcatatagggtctttaacaagtccactggactagttgaagtctcatgtgacgttgtgtttgatgaaactaacggctctcaagtagagcaagttgatcttgatgaagtaggtgaagaacaggctccatgcatagcgcttaggaacatgtccattggagatgtgtgtcctagggaatccgaggagcctccaaatgcacaagatcaaccatcatcctccatgcaagcatctccaccaactcaaaatgaggatgaggctcaagttgatgaagggcaaaatcaagaagatgagccacctcaagataatggcaatgatcaagggggagatgcaaatgatcaagaaaaggaggatgaggaagaaccaagaccgccacacccaagagtccaccaagcaatccaacgagatcaccccgtcgacaccatcctcggcgacattcataagggggtaactactcgatctcgggttgctcatttttgtgaacattactcttttgtttcctctattgagccacacagggtagaggaagctctccaagattcggattgggtggtggcgatgcaagagcagctcaacaatttcacgaggaatgaggtctggcatttagttccacgtcctaaccaaaatgttgtaggaaccaaatgggtcttccgcaacaagcaagatgagcatggtgtggtgacaaggaacaaagctcgactcgtagccaaagggtattcacaagtcgaaggtttggatttcggtgaaacctatgcacccgtagctaggcttgagtcaattcgcatattattggcctatgctacttaccatggctttaagctctatcaaatggacgtgaaaagtgccttcctcaatggaccgatcaaggaagaggtctatgttgagcaacctcccggctttgaagacagtgagtatcctaatcatgtctataggctctctaaggcgctttatgggctcaagcaagccccaagagcatggtatgaatgccttagagatttccttattgctaatggcttcaaagtcggcaaggccgatcctacactctttactaaaactcttgaaaatgacttgtttgtatgccaaatttatgttgatgatattatatttggatctactaacgagactacatgtgaagagtttagtaggatcatgacacagaaattcgagatgtcgatgatgggggagttgaagtattttctaggattccaagtcaagcaactccaagagggcaccttcattagccaaacgaagtacactcaagacattcttgctaagtttgggatgaaggatgccaaacccatcaagacacccatgggaactaatgggcatctcgacctcgacacgggaggtaagtccgtggatcaaaaggtataccggtcgatgattggttcattgctttatttatgtgcatctcgaccggacattatgctttccgtttgcatgtgtgcaagattccaatccgaccctaaggaatcccaccttacggccgtaaaacgaatcttgagatatttggcttatactcctaagtttgggctttggtaccctcggggatccacttttgatttgattggttattcggatgccgattgggcggggtgtaagatcaataggaagagcacatcggggacttgccagttcttgggaagatccttggtgtcatgggcttcaaagaagcaaaattcggtcgctctttccaccgccgaagccgagtacattgccgcaggacattgttgcgcgcaattgctttggatgaggcaaaccctgcgggactacggttacaaattaaccaaagtccctttgctatgtgataatgaaagtgcaattaaaatggccgacaatcccgtcgagcatagccgcactaagcacatagccattcggtatcattttcttagggatcaccaacaaaagggggatatcgagatttcttacattaacactaaagatcaattagccgatatctttaccaagccacttgatgaacaatcttttaccagacttaggcatgagctcaatattcttgattctagaaatttcttttgctaa

SEQ ID NO: 4905 - DNA, 4824 bp, Zea mays
  Clone ID: TF_ZM4576.C2.o1.fg
acatctggcgtgtcacattgggacacgctaaagaccgcgcacaaaggagacgaggtgaccaaaatcaccaagcgggaaacgatcgagggggagctcggacgcttccaacttcgccaaggggaggagccacaagatatgtacaaccggctcaaaaccttggtgaaccaagtgcgcaacctcgggagcaagaaatgggatgaccatgagatggtcaaggaggtaataggaaactttgtgagctttaaattgatgatcaaaggctcaaagaagatcaacgagcttgatggcccctctacgtccgaagctcaaccagtcacattcaaagcgatggaggaaaagaaggaggagtctacttcaagtagacaaccaatcgacgcctcaaagctcgacaatgaggagatggcactcatcatcaagagcttccaccaaatcctcaagcaaaggagggggaaggattacaagccccgctccaagaaagtttgctacaagtgtggtaagcccggtcactttatagcaaaatgtcctatttctagtgacagtgacaggggcgacgacaagaagggaagaagaaaggagaagaatagatactacaagaagaagggtggcgatgcccatgtatgccgcgaatgggactcggacaagagctcctctgactcttccttcgacgaggacgccgccaacatcgccgtcaccaagggtcttctcttccccaacgtcggccacaagtgcctcatggcaaaggtcagcaaaaagaagaaggtaaaatcaagatcctccactaaatatgaaacctctagtgatgaggatgatgctagcaatgaggaggataacttgcgcattctttttgccaacctaaacatgcaacaaaaagaaaaattaaatgaattgattagtgctattcatgagaaggatgatctcttggacacccaagaggacttccttattaaagagaacaaaaagcatgttaaggttaaaaatgcttacgctctagaagtagaaaaatgtgaaaaactatctagtgagctaagcacttgccatgagactatagacaaacttagaaatgagaatgctaatttgttagctaaggttgattcaaatgtttgtgatgtttcaattcccaatcttagaaatgataatgatgatttgcttgataagattgaagaattaaacatttctcttgctagccttaggattgagaatgaaaaattgcttactaaggctaaagaacttgatgtttgcaatattacaatttccgatcttagagataaaaatgatatattgcgtgctaagattgttgaacttaattcttgcaaaccctctacatctaccactgagcatgtcactatttgtactagatgtagagatgttgatgttaatgctatacatgatcacctttccatgattaaacaacaaaatgatcatatagctaaattagatgctaaaattgccgagcatgaactagaaaatgaaaaatttaagtttgctcgtagtatgctttataatgggagacgccctggcattaaggatggcgttggcttccaacagggaggaaatgtcaaacttaatgcccctcctaaaaaattgtccaactttgtgaagggcaaggctcccatgcctcaggataacgagggttacattttgtaccctgccggttatcccgagagcaaaattaggagaattcattctaggaagtctcactctggctctaaccatgcttttatgtataagggtttatgcatccgggggctcaagttggatcatcgacagcgggtgcacaaaccacatgacaggggagaagaagatgttctcctcctacgagaaaaactaagaccccaacgagctatcacattcggggatggaaatcaaggtgtcactgtctttagaagaagtgatgattcagtagcatttaagggagtgttagagggtcagctatacttggtagattttgatagagctgaactcgacacttgcttaattgctaagactaacatgggttggctctggcaccgccgactagcccatgttgggatgaagaatcttcataagcttctaaagggagagcacattttaggattaacaaatgttcattttgagaaagacaggatttgtagcgcatgccaagcaggaaagcaagttggtgctcatcatccacacaagaatatcatgacgactgacaggccgctggagctcctacacatggacctattcggcccgattgcttacataagcatcggcgggagtaagtactgtctagttattgtggatgattattctcgcttcacttgggtattctttttgcaggaaaaatctcatacccaggaaaccttaaagggattcttgagacaggctcaaaatgagttcggcttaaggatcaagaaaattagaagcgacaatgggacggagttcaagaactctcaaattgaaggcttccttgaggaggagggcatcaagcatgagttctcttctccatacaccccacaacaaaatggtgtagtggagaggaagaatagaactctattggacatggcaagaaccatgcttgatgagtacaagacttctgatcggttttgggccgaggcggtcaacaccgcctgctacgccatcaaccggctgtatctacaccgaatcctcaagaagacatcatacgaactcctaaccggtaaaaagcccaaaatttcatattttagagtctttggtagcaaatgctttattcttattaaaagaggtagaaaatctaaatttgctcctaagactgtagaaggctttttactaggatatgattcaaacacaagggcatatagagtctttaacaagtcctctggacaagttgaagtttcttgtgacgttgtgtttgatgaaactcacggctctcaagtagagcaagttgatcttgatgagataggtgatgaagaggctctgtgcatcacgctaaggaacatgtccattggggatgtgtgtcctaaggaatccgaagagcctccaaatgcacaagatcaaccatcctcttccacgcaagcatctccaccaactcaaaatgaggatgaggctcaagttgatgaaggagaagatcaaagagacgagccacctcaagatgacgacaatgatcaagggggagatgcaaatgatcaagacaaagaggatgaagaactaagaccgccacacccaagagtccaccaagcaatccaacgagatcaccccgtcgacaccatcctcggcgacattcataagggggtaaccactagatcttgtgttgctcatttttgtgaacattactcttttgtttcctctattgagccacacagggtagaggaagcacttcaagattcggattgggtggtggcgatgcaagaggagctcaacaacttcactaggaacgaggtatggcatttggttccacgtcctaatcaaaatgttgtaggaaccaagttggtgttccgcaacaagcaagacgagcatggtgtggtgacaagaaacaaagcccgacttgtggccaagggatactcccaagtcgaaggtttggatttcggtgaaacttatgcacccgtagctaggcttgagtcaattcgtatattattggcctatgctacttaccatggcttcaagctttatcaaatggacgtgaagagtgccttcctcaatggaccaatcaaggaagaggtctatgttgagcaacctcccggctttgaagatagtgagtaccctaactatgtatacaaactctctaaggcactttatgggctcaagcaagccccaagagcatggtatgaatgccttagagatttccttatcactaatggattcaaagtcggaaaggccgatcctactcttttcactaaaacccttgacaatgatttgtttgtatgccaaatttatgttgatgatattatatttgggtctactaacgaatctacatgtgaggaatttagtaggatcatgacacaaaagttcgagatgtcaatgatggcggagttgaagtacttcttggaatttcaagtgaagcaactccaagagggcaccttcattagccaaacaaagtatactcaagatattctaagcaagtttgggatgaaggatgccaaacccatcaagacacccatgggaaccaatgggcatctcgacctcgacagggaaggtaaatccgtcgatcaaaaggtataccggtcgatgatagggtctttactctatttatgtgcatctcgaccggatattatgctttccgtatgcatgtgtgcaagattccaagccgaccctaaggaagctcaccttacggccgtaaaacgaatcttgagatatttagttcatactcctaagtttgggctttggtatcctcggggatccacatttgatttaattggttattcggatgccgattgggcggggtgtaaaattaatagaaagatcacatcggggacttgccagttcttgggaagatccttggtgtcttgggtttcaaagaagcaaaattccgtatctctttctaccgccgaagcagagtatattaccgcaggacattgttgcgcgcaactactttggatgaggcaaacccttagggactatggttacaaattaaccaaagttcgtcttctatgtgataatgagagtgcaatccgcatggcggataatcccgttgagcatagccgcactaaacacatagccattctgtatcatttcttaagggatcaccaacaaaagggagatatcgagattgcatatattaacactaaggaacaattagctgatatctttaccaagccactagatgaacaaacttttaacaaacttaggcatgagctaaatattcttgattctaggaatttcttttga

SEQ ID NO: 4906 - DNA, 3057 bp, Zea mays
  Clone ID: TF_ZM4589.C1.o2.fg
atgtcgggagatcacgccaagaaggaaatggagaccggcgaaaagcccactacaagcaacgagaaagctctatcaggagagtcccacaacaaggagaagaggaaggagaagaagaaggaaaagaagacttcttctcacaagtcgcatcggagtggcgacaaaattaagaagatgaggaaggtggtctactacgagaccgacacttcatcgccatctacctccggctccgacgcgccctccataacttctaagcgccatgagcgcaagaagtttagtaagattcccttacattatcctcgtacctctagacatactccattactttccattccattaggcaaaccgccaacctttgacggtgaagattatgctaggtggagtgatttaatgaaatttcatctaacctcactccacaagagtatatggaatgttgttgagtttggagcacaggtaccatccgtaggggatgaggattatgatgaggacgaggtggcccaaattgagcacttcaactcccaagccacatcaatactcctcgcctctctaagtagggaggagtacaacaaggtgcaaggactaaaaagcgccaaggaggtttgggacatgctcaagacggcgcacgaaggtgatgaactcaccaaaatcaccaagcgggaaacgatcgagggggagctcggtcgcttccgtcttcgccaaggggaggagccacaagacatgtacaaccggctcaaaaccttggtgaaccaagtacgcaacctcgggagcaaaaagtgggatgaccacgaggtggttaaggttattctaagatctcttattttccttaaccctactcaagttcaattaattcgtggtaatcctagatatacactaatgactctcgaggaagtaatcgggaattttatgagctttgaatttatgatcaaaggctcacgaaagatcaacgagcttgacagtccctccacgtccgaagctcaatcggtcgcattcaaagcgacggaagaaaagaaggaggagtctacaccaagtagacaaccaatcgacgcctccaagctcgacaacgaggagatggcgcttgtcatcaaaagctttcgccaaatcctcaagcaaaggaaggggaaggattacaagccccgctccaagaaggtttgctacaagtgtggtaagcccggtcactttattgcaaaatgtcctatttctagtgacagtgacaggggcgatgacaagaaggggagaagaaaggagaagaagaggtactacaagaagaagggcggcgatgcccatgtttgtcgagagtgggactccgacgaaagctctagcgactcctccgacgacgaggacaccgccaacatcgccgtcaccaagggacttctcttccccaacgtcggccacaagtgcctcatggcaaaggacggcaaaaagaaggttaaatccaaatcctccactagatatgagtcttctagtgatgaaaatgctagtgatgaggaagataatttacgtactctttttgccaacttaaacatgcaacaaaaagagaaattaaatgaattaattagtgccatccatgagaaggatgatctcttggactcccaagaggacttcctaatcaaggaaaacaaaaagcatgtgaaagttaaaaatgcttacgctctagaagtagagaaatgtgaaaaactatctagtgagctaagcacatgccatgaaactatagacaaccttagaaatgtgaattctaatttattagctaaggttgattcaaatatttgtaatgtttcaattcccaatcttagaaataataatgatgatttgcttgctaagattgaagagttgaacatttctcttgctagccttagagatgaaaatgaaaaattgcttgctaaggctaaagatttcgatgtttgcaataccactatttccgaccttagaagtagaaatgatatattacatgctaaggttgtagaattaaaatcttgcaaaccctctacatctaccattgagcacacttctatttgcactagatgtagagatgttaatattgatgctattcatgatcacatggctttaattaaacaacaaaatgatcacatagctcaacttaatgctaaaatcaatgagcatgacttagaaaatgaaaaatttaaatttgctagaagcatgctctatagtgggagacaccctggcattaaggatggcattggcttccaaaagggggacaatgtcaaacttaatgcccctcctaagaaattgtctaattttgttaagggcaaagctcccatgcctcaggataacgagggttacattttgtaccctgccggttatcccgagagcaaaattaggagaattcattctaggaagtctcactctggccctaatcatgctttcatgtataagggtgagacatctagctctaagcaaccaacccgcgctaagttgcctaaaagaaaaactcctagtgcatcaaatgaacatagcttttcattcaaaacttttgatgcaccatatgttttaactaacaaatccagcaaagtagttgccaaatatgttgggggcaagcacaaggggtcaaagacttgtgtttgggtacccaaagttcttgtgtctaatgccaaaggacccaaaaccatttgggtttatgcatccgggggctcaagttggattatcgacagcgggtgcacaaaccacatgacaggggagaagaagatgttctcctcctatgagaaaaaccaagatccccacgagccattacattcggggatggaaatcaagactaacatgggctggctctggcaccgccgactagcacatgttgggatgaagaatcttcataagcttctaaagggagagcacattttaggattaacaaatgttcattttgagaaagataggatttgtagcgcatgccaagcaggaaagcaagttggtgtccatcatccacacaagaacatcatgacgactgacaggccactggagctcctacacatggatctattcggcccgattgcttacataagtgaaagggaaatgtgcccttgggtcatttctaagtattttggtgattga

SEQ ID NO: 4907 - DNA, 4245 bp, Zea mays
  Clone ID: TF_ZM4623.C5.o1.fg
atgtcgggagaacacgccaagaaggagatggagactggcgacaagcccactacaagccacgggaaggctacatcgcaagagtcccgcaacaaagggaaggggaaggagaagaaagcctcttcccacaagtcgcatcggagtggcgacaagaaaaagaagatgaggaaggtggtctactacgagaccgacacttcatcaccttccacctccggctccgacgcgccctccataacttctaagcgccatgagcgcaagaagtttagggatgaggattatgatgaggacgaggtggcccaaatcgagcacttcaactcccaagccacaactatactcctcgcctctttaagtcgagaggagtataacaaggtgcaaggattaaagagcgccaaggaagtttgggacgtgctcaagaccgcgcacgaaggagatgagctaaccaagatcaccaagcgggagacgatcgagggggagctcggtcgctttcggcttcgcaaaggggaagagccacaagacatgtacaactggctcaaaaccttggtgaaccaagtgcgcaacctcgggagcaaaaagtgggatgaccacgagatggttaaggaagtaatcgagaattttgtgagctttgagtatatgatcaagggcttaaagaaaatcaacgagctagatgatccctccacatccgaagcacaatcgattgcattcaaagcaacggaggagaagaaggaggagtctacgtcaagtagacaaccaatcgacgcctcaaagctcgacaatgaggaaatggcgctcgtcatcaagagcttccgccaaatcctcaaacaaaggagggggaaggactataaaccccgctccaagaaagtgtgctacaagtgtggtaagcccggtcactttatagcaaaatgtcctatttctagtgacagtgacaggggcgacgacaagaaggggagaagaaaggagaagaagaagtactacaagaagaagggcggtgatgcccatgtttgccgggagtgggactccgacaagagctccaccgactcctcctccgacgaggacgccgcaaacatcgccatcaccaagggacttctcttccccaacgtcggccacaagtgcctcatggtcaaggacggcaaaaagaagaaggttaaatccaaatcctccactagatatgagtcctctagtgatgataatgctagtgatgaggaagataatttgcgtaccctttttgccaacttaaacatgcaacaaaaagagaaattaaatgaattgattagtgctatccatgagaaggatgatctcttggacacccaagaggacttccttattaaagaaaataagaagcatgttaaagttaaaaatgcttatgctctagaagtagaaaagtgcgaaaaattatctagtgagctaagcacttgccatgagactatagacaaccttagaagtgaaaatgctgatttgttagctaaggttgattcaaatgtttgcaatgtttcaattcccaatcttggaaatgataatgatgatttgcttgctaagattgaagaattaaacatttctcttgctagccttaggattgagaatgaaaaattaattgctaaggctaaagaattagatgtttgcaatgttacaaattctgatcttagagataaaaatgatatattgcatgctaagattgttgaacttaattcttgcaaaccctctacatctatcattgaacatactactatttgcactagatgtagagatgttaacattgatgctattcatgatcacatggctttaattaaacaacaaaatgatcatatagcaaaattagatgctaaaattgccgagcatgacttagagaatgaaaaatttaaatttgctagaagcatgctctatagagggagacgccctggcattaaggatggcattggcttccaacagggaggcaatgtcaaacttaatgcccctcctaagaaattgtctaactttgttaagggcaaggctcccatgcctcaggataacgagggttacattttgtaccctgccggttatcccgaggacaaaattaggagaattcactctaggaagtctcactctggacctaaccatgcttttatatataagggtgagacatctagttctaggcaaccaacccgtgctaagttgcctgaaaagaaaactcctagtgcatcaaatgatcatgacatttcatttaaaacttttgatgcatcttatgttttaactaacaaatccggcaaggtttatgcatccgggggctcaagttgggtaatcgaaagcggatgcacaaaccacatgacaggggagaaaaagatgttctcctcctacgagaaaaaccaagatccccaacgagctatcacattcggggatggaaatcaaggattaacaaatgttcattttgagaaagacaggatttgtagcgcatgccaagcagggaagcaagttggaacccatcatccacacaagaacatcatgacgaccgacaggccactggagctcctacacatggatctattcggcccgattgcttacataagcatcggcgggaaaaaatctcacacccaagagaccttaaagggattcttgagacgggctcaaaatgagttcggcttgagaatcaagaaaattagaagcgacaacgggacggagttcaagaactctcaaattgaaggcttccttgaggaggagggcatcaagcatgagttctcttctccctacaccccacaacaaaatggtgtagtagagaggaagaatagaactctattggacatggcaagaaccatgcttgatgagtacaagactttggatcggttttgggccgaggcggtcaacaccgcctgctacgccatcaaccgagtctttggtagcaaatgctttatacttgttaaaagaggtagaaaatctaaatttgctcctaagactatagaaggctttttactagtatatgattcgaacacaagggcatatagagtctttaacaagtcctctggacaagttgaagtttcttgtgacgttgtgtttgatgagactaacggctctcacgtagagcaggttgatcttgatgagataggtgttgaagaggctccgtgcatcgcgctaaggaacatgtccattggggatgtgtgtcctaaggaatccgaagagcctccaaatgcacaagatcaaccatcctcctccacgcaagcatctccaccaactcaaaatgaggatgaggctcaagttgatgaagggcaagatcaagaagatgagccacctcaagatgatggcaatgatcaagggggagatgcaaatgatcaagacaaggaggatgaagaaccaaggccgccacacccaagagtccaccaagcaatccaacgagatcaccccgtcgacaccatcctcggcgacattcataagggggtaactactagatctcgtgttgcacatttttgtgaacattactcttttgtttcctctattgagccacacagggtagaggaagcacttcaagattcagattgggtggtggcgatgcaagaggagctcaacaacttcactaggaatgaggtatggcatttggttccacgtcttaaccaaaatgttgtaggaaccaagtgggtttgccgcaacaagcaagatgagcatggtgtggtgacaaggaacaaagctcgacttgtggccaagggatactaccaagtcgaaggtttggatttcggtgaaacctatgcacccgtagctaggcttgagtcaattcgtatattattggcctatgctacttaccatggcttcaagctttatcaaatggacgtgaaaagtgccttcctcaatggaccaatcaaggaagaggtctatgttgagcaacctctcggctttgaagataagtttagtaggatcatgacacagaaattcgagatgtctatgatgggggagttgaagtatttcttgggatttcaagtgaagcaactccaagagggcaccttcattagccaaacgaagtatactcaaaacattctaaacaagtttgggatgaaggatgccaaacccatcaagactcccatgggaaccaatgggcatctcgacctcgacacgggaggtaaatctgtagatcaaaagaaagagcacatcggggacttgccagttcttgggaagatccttggtgtcttgggcttcaaagaagcaatattccgtagctctttcaaccaccgaagccgagtatattgccgcaggccattgttgcgcgcaattgctttggatgaggcaaacccttag

SEQ ID NO: 4908 - DNA, 5310 bp, Zea mays
  Clone ID: TF_ZM4628.C5.o1.fg
atgtcgggagatcacgccaagaaggagatggagaccggcgaaaagcccactacaagccgcgggagcacttcatcggaagagtcccgcaccaagaggaaggacaagaagaaggactcctccaaacggaaggagaaaaagtcttcctcttctcaccaccaagagaagaaggaaaaatcttcttcccacaagccgcatcggaaaggcgacaagcataagaggatgaggaaggtggtctactacgagaccgacacttcatcaacttctacctccgactccgatgcgccctccgtcacttctaagcgccaagagcgcaagaagtatagtaagatccccctacgctaccctcgcatttccaaacatacacctttactttccgtcccattaggcaaaccaccaacttttgatggtgaagattacgctaggtggagcgatttaatgcgatttcatctaacctcgctccacaaaagcatatggaatgttgttgagtttggtgcgcaggtaccatccgtaggggatgaggattatgatgaggatgaggtggcccaaatcgagcacttcaactctcaagctacaacaatactcctcgcctctctaagtaaagaggagtataacaaagtacaaggattgaagagcgccaaggagatttgggatttactcaagaccgcgcatgaaggtgatgagctcaccaagatcaccaagcgggaaacgattgagggggagctcggtcggttccggcttcgaaaaggggaggagccacaacacatgtacaatcggctcaagaccttggtgaaccaagcgcgcaacctcgggagcgtaaagtgggatgaccacgaggtggttaaggttattctaagatcacttattttccttaaccctactcaagttcaattaatccgtggtaatcctagatatactaaaatgacccccgaggaagttatcgggaattttgtaagttttgagtgcatgatcgaaggctcgaggaagatcaacgagcttgatgatgccaccacatccgaagctcaacccgttgcattcaaggcaacggaggaaaagaaggaggagtctacaccaagtcgacaaccaatagacgcctccaagctcgacaatgaggaaatggcgctcgtcatcaagagcttccgccaaatcctcaagcaaaggagggggaaggatcacaagtcccgctccaagaaggtttgctacaaatgtggtaagcccggtcattttattgctaaatgtcctatatctagtgacagtgaccgaggcgacgacaagaaggggagaagaaaggagaagaagaggtactacaagaagaagggcggcgatgcccatgtttgtcgcgagtgggactccgacgagagctcaagcgacttctccgacgacgaggacgccgccaacatcgccgtcaccaagggactcctcttccccaacgtcggccacaagtgcctcatggcaaaggacggcaaaaagaaggttaaatctaaatcctccactaaatatgaatcctctagtgatgacaatgctagtgatgaggaagataatttgtgttccctttttgccaaccttaacatagctcaaaaagaaaaattaaatgaattggttagtgctattcatgaaaaggatgaccttttggattcccaagaggattgtctaattaaagaaaacaaaaaacacgttaaggttaaaaaggcctatgctcttgaaattgagaaatgtgaaaaattatctagtgagctaagcacttgtcgtgagatgattgacaaccttagaaatgaaaatgctattttaaatgctaaggttgattcacatgtttgtaatgtttcaattcccaatcttagagatgataatgttgacttgcttgctaagattgatgaattgaatgtttctcttactagccttagaattgagaatgaaaaattgcttgctaaggctaaggactttgatgtttgcaatactaccatttccgaccttagaactaagaatgatatcttgcatgctaaggttgtagaattaaaatcttgcaaaccctctacatctattgttgagcatgtatctatttgtactagatgtagagatgttgatgttaatgctattcatgatcatatggctttaattaaacaacaaaatgatcatatagcaaaactagatgctaaaattgccgagcataacttggaaaatgaaaaatttaaatttgctagaagtatgctctataatgggagacgctctggcattaaggatggcattggctaccaaaggggagacaatgtcaaacttaatgcccctcctaagaacttgtctaattttgttaagggcaaggctcccatgcctcaggataacgagggttacattttataccctgccggttatcctgagagcaagattaggagaattcattctaggaagtctcactctggccctaatcatgcttttatgtataagggtgagacatctagctctaggcaaccaacccgtgctaagttgcctaagaaaactcctattgcatcaaataagcataacatttcatttaagacttttgatgcatcttatgtgttgactaacaaatccggcaagatagttgccaaatatgttgggggcaagcacaaaggctccaagacttgtgtttgggtacccaaagttcttgtgtctaatgccaaaggacccaaaaccatttgggtttatgcatctgggggctcaagttggatactcgacagcgggtgcacaaaccacatgaccggggagaaaaggatgttctcctcatatgagaaaaaccaagatccccaacgagctatcacattcggggatggaaatcaaggtgtcactgtctttagaagaagtgatgattcaatagcatttaagggtgtgttagagggtcagctatacttggtagattttgatagagctgaactcgacacatgcttaattgctaagactaacttgggttggctctggcaccgccgactagcccatgttgggatgaagaatcttcataagcttctaaagggagaacacattttaggattaacaaatgttcattttgagaaagacaggatttgtagcgcatgccaggcggggaagcaagttggagcccatcatccacacaagaacatcatgacgaccgacaggccgctagagctgctccacatggatctattcggcccgattgcttacataagcatcggcgggagtaagtattgtcttgaaaaatctcaaacccaagagactttaaagggattcttgagacgggctcaacatgagttcggcttaaggatcaagaaaataagaagcgacaacgggacggagttcaagaactctcaaattgaaggcttccttgaggaggagggcatcaagcatgagttctcttctccctacacacctcaacaaaatggtgtagtggagaggaagcatcgaactctattggacatggcaagaaccatgcttgatgagtacaagacaccggaccggttttgggccgaagcggtcaacaccgcctgctacgccatcaaccggttatatcttcaccgaatcctcaagaagacatcctatgaactcctaaccggtaaaaagcccaacatttcatactttaaagtttttggtagcaaatgctttattcttgttaaaagaggtagaaaatcaaaatttgctcctaaaacagtagaaggctttttacttggttatgactcaaacacaagggcatatagggtctttaacaagtccactggactagttgaagtctcatgtgacgttgtgtttgatgaaactaacggctctcaagtagagcaagttgatcttgatgagataggtaatgaagaggctccatgcatcgcgctaaggaacatgtccattggggatgtgtgtcctaaggaatccgaagagcctccaaatgcacaagatcaaccatcctcctccatgcaagcatctccaccaactcaaaatgaggatgaggctcaagttgatgaagggcaaaatcaagaagatgagccacctcaagataatggcaatgatcaagggggagatgaaaataatcaagaaaaggaggatgaggaagaaccaaggccgccacacccaagagtccaccaagcaatacaacgagatcaccccgtcgacaccatcctcggcgacattcataagggggtaaccactcgatctcgtgttgcacatttttgtgaacattactcttttgtttcctctattgagccacacagggtagaggaagcactacaagattcggattgggtggtggcgatgcaagaggagctcaacaacttcacgaggaatgaggtatggcacttggttccacgtcctaaccaaaatgttgtaggaaccaaatgggtcttccgcaacaagcaagatgagcatggtgtggtgacaaggaacaaagctcgacttgtggccaagggatactcccaagtcgaaggtttggatttcggtgaaacctatgcacccgtagctaggcttgagtcaattcgcatattattggcctatgctacttaccatggctttaagctttatcaaatggacgtgaaaagtgccttcctcaacggaccaatcaaggaagaggtctatgttgagcaacctcccggctttgaagacagtgagtaccctaaccatgtctataggctctctaaggcgctttatgggctcaagcaagccccaagagcatggtatgaatgcctaagagatttccttattactaatggcttcaaagtcggcaaggccgatcctactttattcactaaaactcttgacaatgatttgtttgtatgccaaatttatgttgatgatattatatttgggtctactaacgaatctacatgtgaagaatttagtaggatcatgacaaagaaattcgagatgtctatgatgggggagttgaagtattttctaggatttcaagtgaagcaactccaagagggcaccttcatcagccaaacgaagtacactcaagacatcctaagcaagtttggaatgaatgatgccaagcccatcaaaacacccatgggaacaaatgggcatctcgacctcgacacgggaggtaagtccgtggatcaaaagtctatttcaaaccaagtcataggtatattgaaagggaattggagtcttcggcgaagacaaaggcttccactccgtaactcatccttcgccatcactccaaccatctctctattctttgggggagaaatgagcatcaaagaaaaggacttcgtctttggtataatcttaacccatttatttatgaccaaagagaaagatagcaccaagagggctctaatgattccgtttttggcgattcatgccaaaaagggggagaaatga

SEQ ID NO: 4909 - DNA, 5112 bp, Zea mays
  Clone ID: TF_ZM4635.C5.o5.fg
atgtcgggagatcacgccaagaaggagatggagaccggcgacaagcccactacaagccacgggaaggcttcatcggaagagtcccgcaacaaagggaaggggaaggagaagaaatcctcttcccacaagtcgcatcggagtggcaacaacaaaaagaagatgaggaagatggtctactacgagaccgatacttcatcaccttccacctccggctcgaacgcgccatccattacttctaagcgccatgagcgcaagaagtttagtaagacccccctacactatcctcgcattcctaaacatacgcctttactttccgtctcattaggcaaaccaccaacgtttgatggtgaagattatgctaggtggagtgatttaatgcgatttcacctaacctcactccacaaaagtatatgggacattgttgagtttggtgtacaggtaccatctgtaggggatgaagattatgatgaggacgaagtggcccaaattcaacacttcaactcccaagcctcaactatactcctcgcctctctaagtcgagaggagtataataaggtgcaagggttgaaaggtgctaagaagatttgggacacgctaaagacctcgcacgaaggagacgaggtgaccaaaatcaccaagcgggagacgatcgagggggagcttgatcgcttccgacttcgccaaggggaggagccacaagacatgtacaaccggctcaaaaccttggtgaaccaagtgcgcaacctcaggagcaaaaaatgggatgaccacgagatagttaaggttattctaagatcacttgttttccttaaccctactcaagttcaattaattcgtggcaatcctcgatatacactaaggactcccgaggaagtaatcgggaattttgtgagctttgaattgatgatcaaaggctcaaagaagatcaacgagcttgacggcccctccacgtccgaagcacaaccggtcgcatttaaggcgacagaggagaagaaggaggagtctacatcgagcagaacacccatcgacgcctccaagctcgataacgaggaaatggcgctcatcatcaagagcttccgtcaaatcctcaagcaaaggagggggaagaactacaaaccctgctccaagaaagtttgctacaagtgtggtaagcccggtcactttattgcaaaatgtcctatttctaatgacagtgacaggggcgacgacaagaagggaagaagaaaggagaagaaaaagtactacaagaagaagggcgacgatgcccatgtatgtcgcgagtgggactccgacgaaagctctagtgactcctcctccgacgaggacgccgccaacatcgctgtcaccaagggtcttctcttccccaacgtcagccacaagtgcctcatggcaaaggacggcaaaaagaagaaggtaaaatcaagatcctccaccaaatatgaaacctctagcgatgaggataatgctagtaatgaggaggataacttacgcattctttttgccaacctaaacatgcaacaaaaagaaaaattaaatgaattgattagtgttattcatgagaaggatgatctcttggacacccaagaggacttccttattaaagaaaataagaagcatgttaaggttaaaaatgcttatgctctagaagtagaaaaatatgaaaaactatctagtgagctaagcacttgccatgagactattgacaaccttagaaacaacaatgctaaacttattgctaaggttgattcaaatgcttgtaatgtttcaattcccaatcctagaaatgataatgttgatttgcttgctaagattgaagaattgaacatttctcttgctagccttagggatgaaaataaaaaattgcttgctaaggctaaagaattagatgtttgcaatgcctccatttccgaccttagaagtaaaaatgatatattgcatgctaaggttgtagaattaaaatcttgcaaaccctctacatctatcgttgagcacacttccatatgtactagatgtagagacattaatgttgatgctatccatgatcacctagctttaattaaaaaacaaaatgatcacatagctcaactaaatgctaagattagtgagcatgacctagaaaacgaaaaatttaaatttgctagaagcatgctctatagcgggagacgccctagcatcaaggatggcattggcttccaaaagggggacaatgtcaaacttaatgcccctcctaaaagattgtctaattttgtaaagggcaaggctcccatgcctcaggataacgagggttatattttgtatcctgccggttatcccgagagcaaaattaggagaattcattctaggaagtctcactctggccctaaccatgcttttatgtataagggtgagacatctagttctaggcaaccaacccgtgctaagttgcctaagaagaaaactcctagtgcatcaaatgaccatagcatttcatttaaaacttttgatgcatcttatgtgttaactaacaaatccggcaaggtttacgcatccgggggctcaagttggatcatcgatagcgggtgcacaaaccacatgacaggggagaagaaaatgttctcctcctacgagaaaaaccaagatccccaacgagctatcacattcggggatggaaaccaaggtttagtcaaaggtgccactgtctttagaagaagtgatgattcaatagcatttaagggagtgttagagggtcagctatacttggtagattttgatagagctgaactcgacacttgcttaattactaagactaacatgggttggctctggcatcgccgactagcccatgttgggatgaagaatcttcataagcttctaaagggagagcacattttaggattaacaaatgttcattttgagaaagacaggatttgtagtgcatgccaagcagggaagcaagttggtgttcatcatccacacaagaacatcatgacgactgacaggccactggagatcctacacatggacctattcggcccgatagcttatataagcatcggcgggagtaagtattgtctagttattgtggatgattattctcgcttcacttgggtattctttttgcaggaaaaatctcatacccaagagaccttaaaaggattcttgagacgggctcaaaacgagttcggcttaaggatcaagaaaattagaagcgacaacgggacggagttcaagaactctcaaattgaaggcttccttgaggaggagggcatcaagcatgagttctcttctccctacaccccacaacaaaatggtgtagtggagaggaagaatagaactctattggacatggcaagaaccatgcttgatgagtacaagacttcggatcggttttgggccgaggcggtcaacaccgcctgctacgccatcaaccgagtctttggtagcaaatgctttattcttgttaaaagaggtagaaaatctaaatttgctcctaagactgtagaaggctttttactaggatatgattcaaacacaagggcatatagagtctttaacaagtcctctggacaagttgaagtttcttgtgacgttgtgtttgatgagactaacggctctcaagtagagcaagttgatcttgatgagataggtgatgaagaggctccgtgcatcgcgcttaggaacatgtccattggggatgtgtgtcctaaggaatccgaagagcctccaaatgcacaagatcaaccatccttctccacgcaagcatctccaccgactcaaaatgaggatggggctcaagttgatgaagaaagagatcaaaatgatgagccacctcaagatgacgacaatgatcaagggggagatgcaaatgatcaagacaaggaggatgaagaaccaaggccgccacacccaagagtccaccaagcaatccaacgagatcaccccgtcgacaccattctcggcgacattcataagggggtaacaactagatcttgtgttgcacatttttgtgagcactactcttttgtttcctctattgagccacccagggtagaggaggcacttcaagattcgaattgggtggtggcgatgcaagaggagctcaacaacttcactagcaacgaggtatggcatttggttccacgtcctaatcaaaatgttgtaggaaccaagtgggttttccacaacaagcaagacgagcatggtgtggtgacaaggaacaaagcccgacttgtggccaaaggatactcccaagtcgaaggtttggatttcggtgaaacctatgcacccgtagctaggcttgagtcaattcacatattattagcttatgctacttaccatggcttcaagccttaccaaatggacgtgaagagtgccttcctcagtggaccaatcaaggaaaaggtctatgttgagcaacctcccggctttgaagatagtgagtaccctaaccatgtttacaaactctctaaggcgctttatgggctcaagcaagccccaagagcatggtatgaatgccttagagatttccttatcactaatggattcaaagtcggaaaagccgatcctactttatttactaaaacacttgacaatgatttattcgtatgccaaatttatgttgatgatattatatttgggtctactaatgaatctacatgtgaggaatttagtaggatcatgacacaaaaattcgagatgtctatgatgggggagttgaagtatttcttgggatttcaagtaaagcaactccaagagggcaccttcattagccaaacaaagtatactcaagatattctaagcaagtttgggatgaaggatgccaagcccatcaagacacccatgggaaccaatgggcatctcgacctcgacacggaaggtgccaaaggttcacaaaaagccaataaaaagaccaagaaaagggttcaacaaaaaggagcaagggataaccgaagtgctccctggtctggcgcaccggactgtccggtgtgccaccggacagtgtccggtgcaccaccggacaatgaccggtgcaccagggaactccaagttgaattcaacaccttcgagaattctcagaggcactccgctataattcaccggactgtccggtgccctaggggagagcgactctga

SEQ ID NO: 4910 - DNA, 4950 bp, Zea mays
  Clone ID: TF_ZM4646.C5.o1.fg
atgccgccacgtaccaggctaacggcacgcaagtctacgggaccaattggggtgcctcggcatcaattggctccccgacatgaaagcagcagtagtgggagtaacgaccccatcggagaccttgaagctcgtgatcaactcgctgatcgagacttagcacttgactgggccgtacagtctcgtttgctaatgtgtgctaaggaagcaagggctcaggcccgagttaaagaacttagctcgactgttgatgacctacaggtttactgcaacacgttgcacgaggaagtccatgtattatactcacaactacacccaagtgagcctgcaccacctgctgaggcagaagctggaccatctcacgttgcgggacgtgcgctgggtggggagttagacctttttgagcctcctccttctttgagtaatgtaaaatggaaggttttctctggcacattatgtttacctcaaatgtttttgcctcagatgccgaccaggactcgtgcacaggatgcagccggaacatccgggggtcgggacgttaccccgaatccgcctcccgttccacccacgcttgccgaggcaattgctgccttggtgaacgccacagccgacaacacccgcttcctgagggagatggcgggtcagcaacagcttcaacaacaagcaggaagaggattccaacaaggtccccgtgagaccacttatctggatttctctgagactcgtccgcctcttttcatcaaagcagaagacccgctcgaggccgacgaatggatacgggtcatagagcagaagtttggccttctacgctgttcggaagtacagaagccactgtttgcagcacagcaactccgaggacctgccagtacttggtgggggaactttgtggccatccagccggacaaccatcaagtcacctggaacgagtttaaagcagctttccgtgaacattacatccctgagggagtgctgcacatgaaacaagaggagtttatgaagttacaacaaggcggagataccgtcactcaatacctcaacaagttcaatcacctgtcacagtacgcaattgatcaggtgaatacggatttgaaaaagaagaattgttttatgagaggactgaacgaccggatgcagcgaaaaatggctgcatgtattgatcttacttatggaaaggctgtcagcacagccttatctgtggaggccaaatatgcaaattctggaaagactaagggattcggtggtgagcggcctaatcagggccaggcgaagaaaccacggtttgtgattcgaccctcaagccaaaatcgccctttttctcgtccaccttcatttcccttcaaacagccaatcattatccgccccaacaatgcccccactaccccaaaacagccgggtgccccaggcactcgattccctgtgctgccaagttcttcaactggatgttttaactgtggcaaatctgggcattttattaaagattgtccctatccaaggcaaaatcaggctaataatcagcaaggatcgggaaattcagctccaggcaagggaagtactccgggcaagaataccaagaaaacggggcgagtatattatacgcaagtggctaccacaccggagggagagccggtgatgatgggtacgttccctgtggccagtcaccctgcaataattctttttgattctggtgcttcgcataccttcattagcaagacatttgtggagcaacatcatattgcataccatgaatcaaaggagggatttaaaattcattcacctgggggacatatttttactaaagaagtggcctatggagtgccagtaactatggccggacggaactttcctgctaatatgatcgttctgaaaggccaggatatagatgtaatcttgggtatgaactggttaacccaatacaaggcaattctcaacactgaattcagaaccgtcaggttgagttataaccaagaagagattctcttgactctccccgcaaccaatccagccaaagcttctggtagagtctatgaagccattgtaccggagatcaagaacattccggtagtatgtgagtttccagatgtatttccggaagatttgcctggactgccccctgaaagagatgtagaattcgtaattgagctaaagcccggtacggctcccatctcccgaagatcgtaccgtatgcccccaaatgaattggcggaactgaagactcaattgcaagatctactgaataaaggattcatccggccaagctcgtccccgtggggttgtcccgccatttttgttaagaagaaggatcaaaccttgagaatgtgcgtggattatcgacccctaaatgaggtcactatcaagaataagtaccctcttccaaggatcgacatcttatttgatcaactgactggggcgagggtattttccaaaattgatctcaggtcgggctatcatcaaatccgtattcggcccgaggatataccgaagaccgcgtttactacgcgatatggattgtttgaatacctggtaatgtcgttcgggctcacaaatgctcctgcccatttcacttatctaatgaactcggtattcatgcctgaattggacaagttcgtggtagtcttcatcgatgatatcttgatatattccaagaatgaagaagaccatgctcagcatttacggattgtattgacgcgcctaagggaacaccagctatatgccaagttcagcaagtgcgcgttctggctggaagaaattcaatttttggggcacgtattatcagctaaaggaattgcggtagatcctagcaaggtcaaagatattctggagtggaaacccccaacaactgttcaccaagtccggagttttcttggactagctgggtattatcgcagattcataccagatttctctaagcttgtgaagccaatcacaagtttgttgaaaaatgacatcaagttcaattggtcttctaagtgcaatgaagcctttgaacaactgaagacactattgaccactgctccggtattagctcaaccggacatcactaaaccttttgacgtatattgtgatgcatctggcagtgggctcggctatgtactgatgcaagagggccgagtgattgcgtatgcttcaaggcagttgcgccggcatgaggagcactatccaactcatgatctggagctagctgctgtggttcatgccctaaagatctggcgtcactatctgctgggtaatatctgtcacatatatacagatcataaaagtttgaagtacatcttcacccagtcagagttgaatatgagacaaagacgatggcttgagctcattaaagactacgaactggagatccattatcacccgggcaaggccaatgtggtggcagatgcactgagccgtaaggttgcctgccactgtcttatggcgaagaccttcgagaacactttgtgtcaagaaatggaaaagctaaacctggggatcatccaacaagggactctaaatcagttaaagcttgagtcaatcattttgcaaaggataattgatgctcaaaaggataatctgggtatgaagcacattcgagagaaggtaaaggctggaacagccaagtgtttcaaagaagacgatcaaggtgtgatatggtttaaaaaccgcatagttgtgccaaagaacgaagagctccaccagcaaattctggatgaagcacatcttagtcgctattctattcatcccggaagcactaagatgtaccaagatttaaagcaacattactggtggacaaaaatgaagattgagattgcacgctatgtggcgaagtgtgacacttgcagacgtgtcaaggccatacacatgaaaactgctggtccattgcaatctttgccaatcccaacatggaaatgggaagacattagtatggactttattgtgggattacccaggacggccaaagggtatgattctatttgggttatagttgatcgactcacgaagattgcccacttcttacctgttaaagtcacatatacaatagccacttatgcagcattatacattgcccgtattctcagtctgcatggtgttccgaaaaccattgtgtcggatcgtggacctcaattcgtatccaagttttgggaagaacttcataaattcctgggtactaaactgctccacagttcggcctatcatcctcaaaccagtggacaaactgagagggtgaaccaaatacttgaagatatgctgcgggcatgtgtcctggacttctcaccaaaatgggatgaatgtttgcccctagcggagttttcatacaataacagttaccaagaaagtatcaagatggcaccctttgaagctttatatggacgtcggtgtcgaactccgttaaattggtctgaacctggagaaagatacttctttagacctgatatggtgaaagaggttgaagaaaaggttcatagaattattcataatatgaagaaagcccaagctcgtcagaagagttatgcagaccgacgacgacaacccttatgctttctggtagacgattatgtctacttaaaggtttcaccaatgaagggtatatcgcgtttcgggattaaaggaaaacttgcacctaggtacattggtccatttttggtgcttgagcaatgtgggccagtggcgtatcgactccaactccccgaaacattgtctgctgtgcataatgtgttccacgtgtcacaactgaagaagtgtcttcgggttcctgatcgaacagtcgaagtggctgatgttgtcctggaaccagatttaacatactcggaacatcctattcgagttctggatcaaaaggacagggtcacccgaagaaagactctcaagttctacaagatacagtggaaccaacattcggaagatgaggctacatgggaaacccaagacttcttagataagaatttcccaggctttttagcctcatgtaaattgtaa

SEQ ID NO: 4911 - DNA, 2718 bp, Zea mays
  Clone ID: TF_ZM4678.C5.o1.fg
atgtcgggagatcacgccaagaaagagatggggaccggtgagaagcccattacaagccacggggaggctccatcgggagagtcctacaacaaagggaaggggaaggaaaaggaatccccttcacacaagtcacgtcggagcggtgacaagaagaagaagatgaggaaggtggtctactacgagaccgactcctcgtcgccatccaccaccggctccgacacgccgtccgtaacttctaagcgccatgagcgcaagaagtttagtaagatccccctacgctaccctcgcattcctaaacatacgccattactttccgtccctttgggaaaaccaccaacgtttgatggtgaagattatgctaggtggagtgatatgatgcgatatcacctaacctcactccacaaaagtatatgggatgttgttgagtttggtgtacatgtaccatccgtaggggatgaagactatgatgaggatgaagtagcccaaattgtgcacttcaactcccaagccaccactatactcctcacctctctaagtcgagaggagtataataaggtgcaagggttgaagagcgcaaaggagatttgggacgtgctaaagaccgcacacgaaggagacgaggtgaccaagatcaccaagcgggagacgatcgagggggagctcggtcgcttccggcttcgccaaggcgaagagccacaagaaatgtacaaccggctcaagaccttggtgaaccaagtgcgcaacctcgggaataagaaatgggatgaccatgagatggttaaggttattcttagatcacttgttttccttaaccctacacaagttcaattaattcgtggtaatcctagatatacactaatgtctcccgaggaagtaataggaaactttgtgagctttgaattgatgatcaaaggttcaaagaaaatcaacgagttagatggccccttcacggctgaagcacaaccggttgcattcaaggcaacagaggagaagaaggaggagtctacatcaagtagacaaccaatcgacgcctcaaagctcgacaatgagaagatgacgctcatcatcaagagctttcgccaaatcctcaagcaaaggagggggaaggactacaaatcccgctccaagaaagtttgctacaagtgtggtaagcccggtcattttattgcaaaatgtcctatatctagtgacagtgacaggggcgacgacaagaaggggagaagaaaggagaagaagaggtattacaagaagaagggcggcgatgcccatgtttgccaggaatgggactccgacgagagctccaccgactcctcctccgatgaggacgccgcaaacatcgccgtcaccaagggtcttctcttccccaacgtcggccacaagtgcctcatggcaaaggacgacaaaaggaagaaggtaaaatcaagatcctccactaaatatgaaacctctagtgatgaggataatgctagtgatgaggaggataacttgtgcaccctttttgccaaccttaacatgcaacaaaaagaaaaattaaatgaattaattagtgctattcatgagaaggatgatctcttggatacccaagaggacttccttattaaagaaaacaagaagcatgttaaggttaagaatacttatgctctagaagtagaaaaatgcgaaaaattatctaatgagctaagcacttgccatgatactattgccaaccttagaaatgaaaatgataaacttattgctaaggttgattctaatatttgtgatgattctatttccaatcttagagatgataaagctaatttgcttgctaagattgaaaagttgaatgattcacttgctagccttagaaatgagaatgaaaaattgattgctaaggctaaagattttgatgtttgcaatgttactatttctaaccttagaagtgaaaatgatatattacatgctaaggttgtagaattaaaattttgcaaaccctctacatctaccgttgagcatacttccatttgtactagatgtagagacattaacattgatgctattcatgatcatatggctttaattaaacaacaaaatgatcatatcgctaaattagatgctaaaattgccgagcatgacttagaaaatgaaaagtttaaatttgctagaagtatgctctatagtgggagacgccctggcatcaaggatggcattgacttccaaaagggagacaatgtcaaacttaatgcccctcctaaaagattgtctaattttgtaaagggcaaggctcccatgcctcaggataacgaggggtacattttgtaccctgccggttatcccgagagcaaaattaggagaattcactctaggaagtctcactctggccctaatcatgcttttgtgtataagggtgagacatctagctctaggcaatcaacccgtgcaaaattgcctaaaaggaaaactcctactgcatcaaatggtcataacatttcatttaaaacttttgatgcttcttatgttttaactaacaaatccggcaaggtttatgcatccgggggctcaagttggatcatcgatagcgggtgcacaaaccatatgacaggggagaagaagatgttctcctcctataagaaaaaccaagatccccaacgagctatcacattcggggatggaaatcaaggtttggtcaaaggattgggtaaaatagctatatctcctcactacacgacggttgatctttag

SEQ ID NO: 4912 - DNA, 5634 bp, Zea mays
  Clone ID: TF_ZM4683.C2.o1.fg
atgtcgggagatcacaccaagaaggagatggagaccggcgaaaagcccactacaagctacgggagcacttcatcggaagagtcccgcaccaaaaggagggagaagaagaagagctcctccaacaaagggaaggagaagaaatcttcttctcaccacaaagagaagaaggaaaaatcttcttcccacaagccgcatcggaaaggtgacaagcacaagaggatgaggaaggtggtctactacgagaccgacacttcatcaacatcgacctccgactccgatgcgccctccgtcacttctaagcgccaagagcgcaagaagtatagtaagatccccctacgctaccctcgcatttccaaacatacacctttactttccgtcccgttaggcaaaccaccaacttttgatggtgaagattacgctaggtggagcgatttaatgcaatttcatctaatctcgctccacaaaggtatatgggatgttgttgagtttggtgtacaggtaccgtcgataggggatgagaactatgatgaggatgaggtagcccaaatcgagcacttcaactcacaagccacaacaattctcctcgcctcactaagcaaagaggaatataacaaagtacaagggttgaagaacgccaaggagatttgggatgtactcaaaaccgcgcacgagggagatgagctcaccaagatcaccaagcgggaaacgatcgagggggagctcggtcggttccggcttcacaaaggggaggagccacaacatatgtacaaccggctcaagactttggtgaaccaagtgcgcaacctcgggagcaagaagtgggatgaccacgaagtggtaaatgttattttaagatctctcatttttcttaatcccactcaagttcaattgattcgtggtaatcctagatatactaaaatgacccccgaggaagttatcgggcattttgtaagttttgagtgcatgatagaaggctcgaggaaaatcaacgagcttggcgacccatccgaagcccaacccgttgcattcaaggcaacggaggagaggaaggaggagtctacaccaagtagacaaccaatagacgcctccaagctcgacaatgaggaaatggcgctcgtcatcaagagcttccgccaaatcctcaagcaaaggagggggaaggactacaagtcccgctccaagaaggtttgctacaagtgtggtaagcccggtcattttattgctaaatgtccgatatctagtgacagtgaccgaggcgacgacaagaagggaagaagaaaggagaagaaaaggtattacaagaagaagggcggcgatgcccatgtttgtcgggaatgggattccgacgaaagctcaagcgactcctccgacgacgaggacgccgccaacatcgccgtcaccaagagactcctcttccccaacgtcggccacaagtgcctcatggcaaaggacggcaaaaagaagaaggttaaatccaactcctccactaaatatgaatcgtctagtgatgataatgctagtgatgaggaggataatttgcgtattctctttgccaatcttaacatggagcaaaaagaaaaactaaatgaattgattagtgctattcatgaaaaggatgaccttttggactcccaagaggattgtctaattaaagaaaacaagaaacatgttaaggttaaaaaggcttatgcactagaagtagaaaaatgtgaaaaattgtctagtgagctaagcacttgccgtgagatgattgacaaccttagaaatgaaaatgctattttaaatgctaaggttgattcacatgtttgtaatgtttcaattcccaatcttagagatgataacattgacttgcttgctaagattgatgaattgaatgcatctcttgctagccttagattagagaatgaaaatttaattgctaaggctaaaaattttgatgtttgcaatgctactatttccgaccttagaactaagaatgaaatcaaaatagatgctaaaattgccgagcacaacctagaaaatgagaaatttaaatttgctcgtagcatgctttataatgggagacgccctggcatcaaggatggcattggcttccaaaggggagacaatgtcaagcttaatacccctcctaagaacttgtctaactttgttaagggcaaagctcccatgcctcaagataacgagggttacattttataccctgccggctatcctgagagcaaaattaggaagactcattctaggaagtctcactctggccctaatcatgcttttatgtataagggtgagacatctagctctaggcaaccaacccgtgccaagttgcctagaaagaaaatttctaatgcatcaaatgaacatagcatttcatttaagacttttgatgcttcttatgttttgactaacaaatccggcaaggtcgttgccaagtttgttgggggcaagcacaagggttccaagacttgtgtttgggtacccaaagttcttgtttctaatgccaaaggacccaaaaccgtttgggtttatgcatccgggggctcaagttggatactcgacagcgggtgcacaaaccacatgacaggggagaaaaggatgttctcctcatatgagaaaaaccaagatccccaaagagcaatcacattcggggatggaaatcaaggtttggtcaaaggtgtcactgtctttagaagaagtgatgattcaatagcatttaagggtgtgttagagggtcagctatacttagtagattttgatagagctgagctcgacacatgtttaattgctaagactaacatgggttggctctggcaccgccgactagcccatgttgggatgaagaatcttcataagcttctaaagggagagcacattttaggactaaccaatgttcattttgagaaagacaggatttgtagcgcatgccaagcagggaagcaagttggcactcatcatccacacaagaacataatgacgactgacaggccactggagctcctacacatggatctattcggcccgatcgcttacataagcatcggcgggagtaagtactgtctagttattgtggatgattactctcgcttcacttgggtattctttttacaggaaaaatctcaaacccaagagaccttaaagggattcttgagacgagctcaaaatgagttcgccttaaggatcaagaaaataagaagcgacaacgggacggagttcaagaactctcaaattgaaggcttccttgaggaggagggcatcaagcatgagttctcctctccctacacgccacaacaaaatggtgtagtggagaggaagaatcgaactctattggacatggcaagaaccatgcttgatgagtacaagacaccggaccggttttgggccgaagcggtcaacaccgcctgctacgccatcaaccggttatatcttcaccgaatcctcaagaagacatcatatgaactcctaaccggtaaaaagcccaacatttcatattttagagtttttggtagcaaatgcttcattcttattaaaagaggtagaaaatctaaatttgctcctaaaactgtagaaggctttttacttggttatgactcaaacacaagggcatatagggtctttaacaagtccactggactagttgaagtctcatgtgacgttgtgtttgatgaaactaacggctctcaagtagagcaagttgatcttgatgagataggtgaagaacaggctccatgcatcgcgctaaggaacatgtccatcggggatgtgtgtcctaaggaatccgaagagcctccaagtacacaagatcaaccatcctcctccatgcaagcatctccaccaactcaaaatgaggatgaggctcaaaatgatgaagagcaaaatcaagaagacgagccacctcaagatgatagcaatgatcaagggggatatacaaatgatcaagaaaaggaggatgaggaagaaccaagaccgccacacccaagagtccaccaagcaatccaacgagatcaccccgtcgacaccatcctcggcgacattcataagggggtaactactcgatctcgggttgctcatttttgtgaacattactcttttgtttcctctattgagccacacagggtagaggaagctctccaagattcggattgggtggtggcgatgcaagaggagctcaacaatttcacgaggaatgaggtctggcatttagttccacgtcctaaccaaaatgttgtaggaaccaaatgggtcttccgcaacaagcaagatgagcatggtgtggtgacaaggaacaaagctcgactcgtagccaaagggtattcacaagtcgaaggtttggatttcggtgaaacctatgcacccgtagctaggcttgagtcaattcgcatattattggcctatgctacttaccatggctttaagctctatcaaatggacgtgaaaagtgccttcctcaatggaccgatcaaggaagaggtctatgttgagcaacctcccggctttgaagacagtgagtaccctaaccatgtctataggctctctaaggcgctttatgggctcaagcaagccccaagagcatggtatgaatgcctaagagatttccttattgcaaatggcttcaaagtcggcaaggccgatcctactttattcactaaaactcttgaaaaagacttgtttgtatgccaaatttatgttgatgatattatatttgggtctactaacgagtctacatgtgaagagtttagtaggatcatgacacagaaattcgagatgtcgatgatgggggagttgaagtattttctaggattccaagtcaagcaactccaagagggcaccttcatttgccaaacgaagtacactcaagacattctaaccaagtttgggatgaaggatgccaaacccatcaagacacccatgggaactaatgggcatctcgacctcgacacgggaggtaagtccgtggatcaaaaggtataccggtcgatgattggttcattgctttatttatgtgcatctcgaccggacattatgctttccgtttgcatgtgtgcaagattccaatccgaccctaaggaatcacaccttacggccgtaaaacgaatcttgagatatttggcttatacacctaagtttgggctttggtaccctcggggatccacttttgatttgattggttattctgatgccgattgggcggggtgtaagatcaataggaagagcacatcggggacttgccagttcttgggaagatccttggtgtcatgggcttcaaagaagcaaaattcggtcgctctttccaccgccgaagctgagtatattgccgcaggtcactgttgcgcgcaattgctttggatgaggcaaaccctgcgggactacggttacaaattaaccaaagtccctttgctatgtgataatgagagtgcaatcaaaatggccgacaatcccgtcgagcatagccgcactaagcacatagccattcggtatcattttcttagggatcaccaacaaaagggggatatcgagatttcttacattaatactaaagatcaattagccgatatctttaccaagccacttgatgaacaatcttttaccagacttaggcatgagctcaatattcttgattctagaaatttcttttgctag

SEQ ID NO: 4913 - DNA, 7242 bp, Zea mays
  Clone ID: TF_ZM4782.C1.o2.fg
atgtcgggagaacacgccaagaaggagatggagaccggcgacaagcccgctacaagccacgggaaggcttcatcggaagagtcccgcaacaaaaagaaagggaaggagaagaaagcctcctcccacaagtcacatcggagtggcgacaagaaaaagaagatgaggaaggtggtctactacgagaccgacacctcatcgctatctacctccggctccgacgcgccctccataacttctaatcgccatgagcgcaagaagtttagtaagatccccttacactatcctcgtacttctagacatactccattactttccgttccattaggcaaaccgccaacctttgacggtgaagattatgctaggtggagtgatttaatgaaatttcatctaacctcactccacaaaagtatatggaatgttgttgagtttggagcacaggtaccatctgtaggggatgaggattatgatgatgacgaggtggcccaaatcgagcacttcaactcccaagccacaaccatactccttgcttccctaagtagggaggagtacaacaaggtgcaaggattaaagagcgccaaggaagtttgggacgtgctcaataccgcgcacgagggtgatgaactcaccaagatcaccaagcgggaaacgatcgagggggagctcggtcgcttccgtcttcgccaatgggaagagccacaagatatgtacaaccggctcaaaaccttggtgaaccaagtgcgcaatctcgggagcaagaaatgggatgaccacgaggtggttaaggttattttaagatcacttattttccttaaccctactcaagtacaattaattcgtggcaatccaagatatacactaatgactcccgaggaattaattgggaattttgtgagctttgaatttatgatcaagggctcacggaagatcaacgagcttgacggtccttctacgtccgaagctcaaccggtcgcattcaaagtgatgaaagaaaagaaggaggtgtctacaccgagtagaacacccatcgacgcctccaagctcgacaatgaggaaatgacgcttgtcatcaagagcttccgccaaatcctcaagcaatggagggggaaagattacaagccccgctccaagaaggtttgctacaaatgtggtaagcccggacattttattgcaaaatgtcctatatccagtgacagtgacaggggcgacgacaagaaggggagaagaaaggagaagaagaggtactacaagaagaagggcggcgatgcccatgtttgtcgcgagtgggactccgacgaaagctctagcgactcctccgacgacgaggacgccgccaacatcgccgtcaccaaaggacttctcttccccaacgtcggccacaagtgcctcatggcaaaggacggcaaaaagaagaaggttaaatctaaatcctccactagatatgagtcctctagtgatgataatgctagtgatgaggaagacaatttgcatactctttttgccaacttaaacatgcaacaaaaagagaaattaaatgaattaattagtgccatctatgagaaggatgatctcttggactcccaagaggacttcctaatcaaggaaaacaaaaagcatgttaaagttaaaaatgcttacgctctagaagttgaaaaatgtgaaaaattatctagtgagctaagcacttgccatgagactgtagacaaccttagaaatgagaattctaatttgttaactaaggttgattctgttgcttgtaatgtttcaattcccaatcttagaaatgataatgatgatttgcttgctaagattgaagaattaaacatgtctcttgctagccttaggattgaaaatgaaaaattgcttgctaaggctaaagaattggacgtttgcaatgctaccatttccgaccttagaagtagaaatgatatattacatgctaaggttgtacaattaaaatcttgcaaaccctctacatctaccgttgaacacactactatttgcactagatgtagagatgttgatattaatgctattcatgatcacatggctttacttaaacaacaaaatgatcatatagcaaaattagatgctaaaattgccgagcacgaacttgaaaatgaaaaatttaaatatgctcgtagtatgctttatagtgggagacgccctggcatcaaggatggcattggcttccaaaagggggacaatgtcaaacttaatgcccctcctaagaaattatctaactttgttaagggcaaggctcccatgcctcaagataacgagggttacattttgtaccctgccagttatcctaagagcaaaattaggagaattcattctaggaagtctcactctggccctaaccatgcttttatgtataagggtgagacatctagttctaggcaaccaacccgtgctaagttgcctaagaagaaaactcctagtgcatcaaatggtcataacatctcatttaaaacttttgatgcatcctatgttttaactaacaaatccggcaaggtagttgccaagtatgttgggagcaagcacaaggggtcaaagacttgtgtttgggtacccaaagttcttgtgtctaatgctaaaggacccaaaaccatttgggtttatgcatccgggggctcaagttggataatcgacagcgggtgcacaaaccacatgacaggggagaagaagatgttctcctcctacgagaaaaaccaagatccccaaagagcgatcactttcggggatggaaatcaaggtgtcactgtctttagaagaagtgatgattcaatagcatttaagggtgtgttagagggtcagctatacttggtagattttgatagagctgaactcgacacatgcttaattgctaagactaacatgggttggctctggcaccgccgactagcccatgttgggatgaagaatcttcataagcttctaaagggagagcacattttaggattaacaaatgttcattttgagaaagacaggatttgtagcgcatgccaaacagggaagcaagttggagcccaccatccacataagaacatcatgacgactgacaggccactggagctcctacacatggacctattcggcccgatagcttacataagcatcggcgggagtaagtactgtctagttattgtggatgattattctagcttcacttgggtattctttttgcaagaaaattctcatacccaagagaccttaaagggattcttgagacgagctcaaaacgagttcggcttaaggatcaagaagattagaagcgacaacgggacggagttcaagaactctcaaattgaaggcttccttgaggaggagggcatcaagcatgagttctcttctccctacacgccacaacagaatggtgtagtggagaggaagaatcgaactctattggacatggcaagaaccatgcttgatgagtacaagacttcggatcggttttgggccgaggcggtcaacacctcttgctacgccatcaaccgattatatctacaccgaatcctcaagaagacatcatacgaactcctaaccggtaaaaagccaaatatttcatattttagagtctttgatagcaaatgtttcattcttgttaaaagaggtagaaaatctaaatttgctcctaagactgtagaaggctttttactaggatatgattcaaacacaagggcatatagagtctttaacaagtccactggacaagttgaagtttcttgtgacgttgtgtttgatgagactaacggctctcaagtagagcaagttgatcttgatgagataggcgatgaagaggctccgtgcatcgcgctaaggaacatatccattggggatgtgtgtcctaaggaatccaaagagcctccaaatgcacaagatcaaccatcctcctccacgcaagcatctccaccgactcaaaataaggatgaggctcaaattgatgaaggagaagatcaagcaaatgagccacctcaagatgacgacaatgatcaagggggagatgcaaatgatcaagacaaggaggatgaagaaccatggccgccacacccaagaccacacagggtagaggaagcacttcaagattcggattgggtggtggcgatgcaagaggagctcaacaacttcactaggaatgaggtatggcatttagttccacgtcctaatcaaaatgttgtaggaaccaagtgggtcttccgcaacaagcaagacgagcatggtgtggtgacaaggaacaaagctcgacttgtggccaagggatactcccaagtcgaaggtttggattttggtgaaacctatgcacccgtagctaggcttgagtcaattcgtatattattggcctatgctacttaccatggcttcaagctttatcaaatggacgtgaagagtgccttcctcaatggaccaatcaaggaagaggtctatgttgagcaacctcccggctttgaagatagtgagtaccctaaccatgtttataaactctctaaggcgctttatgggctcaagcaagccccaagagcatggtatgaatgccttagagatttccttatcactaatggattcaaagtcagaaaagccgatcctacactctttaccaaaacacttgaaaatgatttgtttgtatgccaaatttatgttgatgatattatatttgggtctactaacgaatctacatgtgaagagtttagtaggatcatgacacaaaagttcgagatgtctatgatgggggagttgaagtatttcttaggatttcaagtaaagcaactccaagagggcaccttccttagccaaacaaagtatactcaagacattctaagcaagtttgggatgaaggatgccaaacccatcaagacacccatgggaaccaatgggcatctcgacctcgacgagggagcccatcgcgcccgcagtccgccctcccctcgccgcctccccagaccgcagtctctcctcaacctccctccccaaggagctggcggcagcgcggctgcgtcgggaggaggaggacgcagaggacgccgcgcgggggctgcggcaggagctcgactccgagcgggcctccccggagatggcagccagatccggccattgagccccctaaccgagcggatccaaggtactacacggtcttgccctcgcccttttgcttgctttgtcgtcctctcctcaccgcggggggacccgacgtacgagcaggaggtgttcctcgccacgcggtgcggcaggcgcatgctcgacctgtcccggttccgcgaccgcgaccgcgcgcggtgccgcgactggtgcttcgccgcgttcgtgctcgcctacgccacgtacctcgacgaccggctcaaagaacggatgcaggaccgcggagcaggcggggccagcccgggcaaatggcacgtcgacggcgaccctgtcgggatggcgtgccaggtggccgaggcctgggagctcgtgccgcggggaaggctggtgaaggagagcgcggcgatgtactgcgagctcacggaggtgatggtcgtgctcttggaccgcttcgccgacctgggcactcctgcctgcgtgcgcgtccactccatcttcaccagtactgcttggaatttgggtatgctgagttcacgcttcacagacagaactgcttggaatttggatagtgcactaaccacagttgagacattagcatcagcggctatttgtggcatcgtacattcaataataggtggacaaccactattgatcgtgggtgttgcagaaccgacaattatcatgtacacttatatctacaattttgccaaaaatcagccaaacctgggagaaaaaatgtttctgccatgggctacctgggtttacatctggacagctgttatgctgttcctcatggcaattttcaacgttgcagctattctaaacaaatttaccaggtttgcaggagaactttttgtaatgttaatcacagttttgtttatgcaagaggcgataaaggggatggttggtgaattcagtgcccctaacgcatggcaaaggagcttaattgcggactacggtgttccactaatggtgatactttggacatcattgtcatattcattgccaagcaggatcccttcaggggtccctaggaggctcttcaccccacttccttgggaacccaagtcgctccagcattggacagtagcaaaagatctgttttcagtccctacagtacatatattcctggctattgtgcctgccaccatggtcgcagggctctatttctttgaccacactgtagcttcccagatgagtcagcagaaggaatttaatttgaagaacccatcagcctaccattatgacattttggtcctaagcttgacattgcttcgcaagaagatggtccaaactgccaaggagggcatgatgaataatgctaccagttccgaagtttatgtcaaaatgcaagatgttttcataaaaatggaccacggaggcgacactgtttctgctcacaaagaaccgaaggacctgaaggatgcaattattccagaagggaatggatcaggaacagtgcctgaagtatttgatcctgaaaagcatgtagatgcttacttgcctgtccgggtgaatgagcagagagtaagcaatctgttgcagtccctgttgattgctggttgtattagagttacaccgctcattcagaagataccaacatcagtcctttggggttacttcgcctatatgtccatcgacagccttcctagaaaccagttctgggagaggatacaacttcttttcatcacgcctcaaagacgctacaaggttcttgaaggagcacatgcatccttcatggagtcagtgcctttcaacacaatatgcaccttcacactcttccagctaatctatctgttgatcgtctttgggatgacatggataccagtagcaggaatcctcttaccactgctcttcttcttcttcctcattatcatcaggcagcacttcatcccgaaatattttgatccgagccacctgagggaattagatgcagccgagtacgaagaactgaaaggttttacacctgatccatcagtgtgtgaggacgagtctgttcgcagcggagatgctcagcctggatatgcttccgaaatactcgaggaattcacgactcaccgtggagagctgaagcgcaggaactctaccttccatgatgggagactacttcagcttaactctgtcaagatgacgagagagctttctcgggttccttcttggcttacatga

SEQ ID NO: 4914 - DNA, 2869 bp, Zea mays
  Clone ID: TF_ZM4824.C1.o1.fg
atgtcgggagatcacgccaagaaggagatggagaccggcgaaaagcccactacaagccaagggagcacttcatcggaagagtcccgcaccaagaggaaggagaagaagaagatctcctccaacaaagggaaggagaagaaatcttcttctcaccacaaagagaagaaggaaaaatcttcttcccacaagccgcgtcggagtggggacaagcaaaagaggatgaggaaagtggtctactacgagaccgacacctcatcaacatcgacctccggctccgatgcgccctccgtaacttctaaacgccaagagcgtaagaagtttagtaagattcccctacactactctcgcatttccaaacatgcacctctactttccgtcccattaggcaaaccaccaacctttgatggtgaagattatgctaggtggagtgatttaatgcgttttcatctaacctcactccacaaaagtatatgggatgttgttgagtttggtgcacaggtaccatccgtaggggacaaagattatgatgaggatgaggtggcccaaatcgagcacttcaactctcaagcgacaacaatactcctcgcctctttaagtagagaggagtataacaaagttcaagggttgaagaacgccaaagaagtttgggatgtgctcaaaaccgcgcacgaaggagacgagctcacaaagatcaccaagcgggaaacgatcgagggggagctcggtcggtttcggcttcgcaaaggggaggagccacaacacatgtacaaccggctcaagaccttggtgaaccaagtgcgcaacctcgggagcgtaaagtgggacgaccacgaaatggttaaggttattctaagatctctcattttccttaaccccactcaagttcaattaattcgtggtaatcctagatatactaaaatgacccccgaggaagttatcgggaattttgtaagttttgagtgcatgatcgaaggctcgagaaagatcaacgagcttgacgaacccaccacatccgaagctcaacccgtcgcactcaaggcgacggaggaaaagaaggaggaggctacaccaagtcgacaaccaatagacgcctccaaactcgacaatgaggaaatggtgctcgtcatcaagagcttccgccaaatcctcaagcaaaggagggggaaagactacaagtcccgctccaaaaaggtttgctacaagtgtggtaagcccggtcattttattgctaaatgtcctatatctagtgacagtgaccgaggtgacgacaagaaggggagaagaagggaaaagaagaggtactacaagaagaagggcgacgatgcccatgtttgtcgggagtgggattccgacgaaagctcaagcgactcctccgacgacgaggacgccgccaacatcgccgtcaccaagggacttctcttccccaacgtcggccacaagtgcctcatggcaaaggacgacaagcggaagaaggttaaatctaactcctccactaaatatgagtcttctagtgatgataatgctagtgatgaggaggataatttgcgttccctttttgccaaccttaacatagctcaaaaggagaaattaaatgaattggttagtgctattcatgaaaaagatgacctcttggattcccaagaggacctccttattaaggagaataagaagcatgttaaggttaaaaaggcttatgctcttgaaattgagaaatgtgaaaagttatctagtgagctaagcacttgccgtgagatgattgacaaccttaaacatgaaaatgctagtttaaatgctaaggttgatttacatgtttgtaatgtttcaattcccaatcctagagataataatgatgatttgcttgctaggattgaagaattaaacatttctcttgctagtcttagagtagaaaatgaaagtttaattgctaaggctaaagaacttgatgtttgcaatactacaatttccgatcttagagataaaaatgatattcttcatgctaagatcgttgaacttaattcttgcaaaccctctacatctattgttgaacatgtatctatttgcactagatgtagagatattgatgttaatgctattcatgatcacatgtccttaattaaacaacaaaatgatcatatagcaaaactagatgctaaaattgccgagcacaacttagaagatgagaaatttaaatttgctcgtagcatgctttataatgggagacgcccgggcatcaaggatggcattggattccaaaggggagacattgtcaaacttagtgcccctcctaaaagattatctaattttgttaagggcaaggctcccatgcctcaggataccgagggttacattttataccctgccggttatcctgagagcaaaattaggagaattcattctaggaagtctcactctggccctaatcatgcatttatgtataagggtgagacatctagctctaggcaaccaacccgtgccaagttgcctaagaaaactcctaatgcatcaaatgatcataacatttcatttaagacttttgatgcatcttatgttttgactaacaaatccggcaaagtagttgccaaatatgttgggggcaagcacaagggttccaagacttgtgtttgggtacccaaagttcttgtgtctaatgccaaaggacccaaaaccatttgggtttatgcatccgggggctcaagttggatactcgacagcgggtgcacaaaccacatgacaggggagaaaaggatgttctcctcatatgagaaaaaccaagatccccaaagagcgatcacattcggggatggaaatcaaggtttggtcaaaggtgtcactgtctttagaagaagtgatgattcaatagcatttaagg

SEQ ID NO: 4915 - DNA, 5781 bp, Zea mays
  Clone ID: TF_ZM4868.C2.o1.fg
atgtcgggagatcacgccaagaaggagatggagaccggcgaaaagcccactacaagccacgggagcacttcatcggaagagtcccgcaccaaaaggagggagaagaagaagagctcctccaacaaagggaaggagaagaaatcttcttctcaccacaaagagaagaaggaaaaatcttcttcccacaagccgcatcggaaaggcgacaagcacaagaggatgaggaaggtggtctactacgagaccgacacttcatcaacatcgacctccgactccgatgcgccctccgtcacttctaagcgccaagagcgcaagaagtatagtaagatccccctacgctaccctcgcatttccaaacatacacctttactttccgtcccattaggcaaaccaccaactcttgatggtgaagattacgctaggtggagcgatttaatgcgatttcatctaacctcgctccacaaaagcatatgggatgttgttgagtttggcgcgcaggtaccatccgtaggggatgaggactatgatgaggatgaggtggcccaaatcgagcacttcaactctcaagcaacaacaatactcctcgcctctctaagtaaagaggagtataacaaagtacaagggttgaagagcgccaaggagatttgggatgtactcaaaaccgcgcatgagggagacgagctcaccaagatcaccaagcgggaaacgatcgagggggagctcggtcggttccggcttcacaaaggagaggagccacaacacatgtacaaccggctcaagactttggtgaaccaagtgcgcaacctcgggagcaagaagtgggacgatcacgaagtggtaaatgttattttaagatctctcatttttcttaatcccactcaagttcaattgattcgtggtaatcctagatatactaaaatgacccccgaggaagttatcgggcattttgtaagttttgagtgcatgatagaaggctcgaggaaaatcaacgagcttggcgactcatccgaagcccaacccgttgcattcaaggcaacggaggagaagaaggaggaggctacaccaagtcgacaaccaatcgacacctccaagctcgacaatgaggaaatggcgctcgtcatcaagagcttccgccaaatcctcaaacaaaggagggggaaagactacaagtcccgctccaagaaggtttgctacaagtgtggtaagcccggtcattttattgctaaatgtcctatatctagtgacagtgaccgaggtgacgacaagaaggggagacgaaaggaaaagaagaggtattacaagaagaagggcggcgatgcccatgtttgtcgcgagtgggactccgacgagagctcaagcgactcctccgacgacgaggacgccgccaacatcgccgtcaccaagggactcctcttccccaacgtcgaccacaaatgcctcatggcaaaggacggcaaaaagaaggttaaatctaaatcctccactaaatatgaatcctctagtgatgacaatgctagtgatgaggaagataatttgcgttccctttttgccaaccttaacatagctcaaaaagaaaaattaaatgaattggttagtgctattcatgaaaaggatgaccttttggattcccaagaagattgtctaattaaagaaaacaaaaaacatgttaaggttaaaaaggcttatgctcttgaaattgagaaatgtgaaaaattatctagtgagctaagcacttgtcgtgagatgattgacaaccttagaaatgaaaatgctattttaaatgctaaggttgattcacatgtttgtaatgtttcaattcccaatcttagaaatgataatgttgacttgcttgctaagattgatgaattgaatgtttctcttgctagccttagaaatgaaaatgaaaaattgcttgctaaggctaaggattttgatgtttgcaatactactatttccgatcttagagataagaatgatattcttcatgctaagattgttgaacttaattcttgcaaaccatctacatctattgttgagcatgtatctatttgtactagatgtagagatgttgatattaatgctattcatgatcatatggctttaattaaacaacaaaatgatcatatagcaaaactagatgcaaaaattgccgagcacaacttagagaatgagaaatttaaatttgctcgtagcatgctttataatgggagacgcccgggcattaaggatggcattggcttccaaaggggagacaatgtcaaaattagtgcccctcctaagagattgtccaactttgttaagggcaaggctcccatgcctcaggataacgagggctacattttgtaccctgccggttatcccgagagcaaaattaggaaaattcattctaggaagtctcactctggccctaatcatgcttttatgtataagggtgagacatctagttctaggcaaccaacccgtgctaaattgcctagaaagaaaactcctaatgcatcaaatgatcatgatatttcatttaaaacttttgatgcttcttatgtgcttacaaacaaatccggcaaagtagttgccaaatatgttgggggcaagcacaaggggtcaaagacttgtgtttgggtacccaaagttcttgtgtctaatgccaaaggacccaaaaccatttgggtttatgcatccgggggctcaagttggatactcgacagcgggtgcacaaaccacatgacaggggagaaaaggatgttctcctcatatgagaaaaaccaagatccccaaagagcaatcacattcggggatggaaatcaaggtttggtcaaaggtgtcactgtctttagaagaagtgatgattcaatagcatttaagggagtgttagagggtcagctatacttggtagactttgatagagctgaactcgacacttgcttaattgctaagactaacatgggctggctctggcatcgccgactagcacatgttgggatgaagaatcttcataagcttctaaagggagaacacattttgggactaacaaatgttcattttgagaaagacagaatttgtagtgcatgccaagcaggaaagcaagttggctctcatcatccacataagaacataatgacgaccgacaggccactggagctcctacacatggatcttttcggcccgattgcttacataagcatcggcgggagtaagtactgtctagttattgtggatgattattctcgcttcacttgggtattctttttacaggaaaaatcccaaacccaagagaccttaaagggattcttgagacgggctcaaaatgagtttgacttaaggatcaagaaaataagaagcgacaacgggacggagttcaagaactctcaaattgaaggcttccttgaggaggagggcatcaagcatgagttctcttctccctacacgccacaacaaaatggtgtagtggagaggaagaatagaactctattggacatggcaaggaccatgcttgatgagtacaaaacttcggatcggttttgggccgaggcggtcaacaccgcctgctacgccatcaaccgattgtatctacaccgaatcctcaagaagacatcatatgaactcctcaccggtaaaaagcccaacatttcatactttagagtttttggtagcaaatgctttattcttgttaaaagaggtagaaaatccaaatttgctcctaaaactgtagaaggctttttacttggttatgactcaaacacaagggcatatagggtctttaacaagtccactggactagttgaagtctcatgtgacgttgtgtttgatgaagctaacggctctcaagtagagcaagttgatcttgatgagataggtgaggaagaggctccatgcatcgcattaaggaacatgtccattggggatgtgtgtcctaaggaatccgaagagcctccaaatgcacaagatcaaccatcatcctccatgcaagcatctccaccaacccaagatcaggaagaggctcaagttgatgaagaaaaagatcaatcaaatgagccacctcaagatgatggcaatgatcaagggggagatacaaatgatcaagataaggaggatgaggaagaaccaaggccgccacacccaagagtccaccaagcaatccaacgagatcaccccgtcgatactatcctaggagacattcataagggggtaactactagatctcgggttgctcatttttgtgaacattactcttttgtttcctctattgagccaaacagggtagaggaagctctccaagattcggattgggtggtggcgatgcaagaggagctcaacaatttcacaaggaacgaggtatggcatttagttccacgtcctaaccaaaatgttgtaggaaccaaatgggtcttccgcaacaagcaagatgagcatggtgtggtgacaaggaacaaagctcgactcgtggccaaagggtattcacaagtcgaaggtttggatttcggtgaaacctatgcacccgtagctaggcttgagtcaattcgcatattattggcctatgctacttaccatggctttaagctctatcaaatggacgtgaaaagtgccttcctcaacggaccgatcaaggaagaggtctatgttgagcaacctcccggctttgaagacagtgagtatcctaaccatgtttataggctctctaaggcgctttatgggctcaagcaagccccaagagcatggtatgaatgccttagagatttccttattgctaatggcttcaaagtcggcaaggccgatcctacactctttactaaaactcttgaaaatgacttgtttgtatgccaaatttatgttgatgatattatatttgggtctactaacgagtctacatgtgaagagtttagtaggatcatgacacagaaattcgagatgtctatgatgggggagttgaagtattttctaggatttcaagtgaagcaactccaagagggcaccttcatcagccaaacgaagtacactcaagacatcctaagcaagtttggaatgaaggatgccaagcccatcaaaacacccatgggaacaaatgggcatctcgacctcgacacgggaggtaagtccgtggatcaaaaggtatatcggtcgatgattggttcattgctttatttatgtgcatctcgaccggacattatgctttccgtttgcatgtgtgcaagattccaatccgaccctaaggaatcccaccttacggccgtaaaacgaatcttgagatatttgacttacacacctaagtttgggctttggtaccctcggggatccacttttgatttgattggttattcggatgccgattgggcggggtgcaaaattaataggaagagcacatcggggacttgccagttcttgggaagatccttggtgtcttgggcttcaaagaagcaaaattcggtcgctctttccaccgccgaagccgagtatattgccgcaggtcattgttgcgcgcaattgctttggatgaggcaaaccctgcgggactacggttacaaattaaccaaagtccatttgctatgtgacaatgagagtgcaatcaaaatggccgacaatcccgtcgagcatagccgcactaagcacatagccattcggtatcattttcttagggatcaccaacaaaagggagatatcgagatttcttacattaatactaaagatcaattagccgatatctttaccaagcctcttgatgaacaaacttttaccagacttaggcatgagctcaatattcttgattctagaaatttcttttgctag

SEQ ID NO: 4916 - DNA, 1797 bp, Zea mays
  Clone ID: TF_ZM4871.C2.o2.fg
atggcgggtaatcaattccagcagcatggcagaagggctcctccacagggaccgcgtgaaacctcgtatctggacttttctgaaacgcgtcccccactctttgttaaagctgaagaccctcttgaagctgatgagtggataagggtaatagagcagaagttcggattaatccgttgcacagaaacacagaagtcgttgttcgtcgcccaacaactgagaggccctgccagtacctggtggggaaattttgtggcaattcaaccagccagacatcaggtcacttgggatgaatttaagttagcattccgtgaacactatattccagaaggagtgcttcacatgaaacaagaggaatttattcgactaaaacaaggaggggatactgtgatgcagtatctcaacaagtttaatcatttatcccaatatgcgattgaccaagtaaacactgacctaaagaagaaaaattgcttcatgagaggactcaacgactggctccaacggaaaatggccacctacctagaccttacgtacagcagagctgtcagcacggcgctggcagtagaagctaagaatacaggccaaggaaaatcaaagggatttggaggtgataggtccaatcagggacctgagaagcgaaccaggttggtaatccgaccatttaatcagaatcattcttctcctcgtccaccctcctatccattcaaacaacctgttttcattcgtcctaccactgcccccgcttctacaaatcagctgagtgcccctggtgctcgtttccccgcccaccctagttcctcaactggctgcttcaactgtggaaagtctggtcattttatcaaagattgtccatatccgaagctgaataagttcaacaatcagcagaactctgggacttccaatcaaggcaaaggaaacatggctaataattcagtgggcaaaaatgtcaagaagactgggcgaatttattatactcaagtggccactacaccggaaggagagccgataatgatggatctacctggattacctctagaaagggatgtagagtttgtgatcaacctgaagcccgatacagctcccatttctagaaggtcgtactggatgccaccaaatgaattggcggagctcaagatgaaactacaagacttgatggaaaagggattcattcggcccagttcatcaccgtggggatgtcccacaatttttgtcaagaagaaagatcaaacacttcgaatgtgcgtggactacagaccccttaatgaggaaatccaatttttgggacatgtattgtctgcaaatgggattgcggttgatcccagcaaggtcaaggatattctagagtggaaaccgccaaccactgtacatcaagtccgaagtttccttggactggctggctattaccgcagatttatcccagatttctccaagattgtgaaactaatcacaagtctgttgaagaatgatacaaaattcaactggtcctcaagatgcaacgaagccttcgagcagctgaagggcttcaaagggtgccatcttcaggctggattgataactgttgttatgagcaaactctgccaaagggagtctgggggtggtaagccaaacttcttattagcttggttcccaaagactcttgcaattgctcccaaaatctggcaactaattgggctcctcggaaccgccaatctgtcttcaagcctgtcggggaccataattaggggtaccctcaagacgcctaattctcagctggtaacccccatcagcataaagctgcaaaggcctgatgggtacgattaa

SEQ ID NO: 4917 - DNA, 1344 bp, Zea mays
  Clone ID: TF_ZM4889.C5.o1.fg
atgactcccgaggaagtaatcgggaattttgtgagctttgaatttatgatcaagggctcacggaagatcaacgagcttgacggtccctccacgtccgaagcacaaccggtcgcatttaaggcgacggaggagaagaaggaggagtctacaccgagtagaacacccatcgacgcctccaagctcgacaacgaggaaatgacgcttgtcatcaaaagctttcgccaaatcctcaagcaaaggagggggaaagactacaagccccgctccaagaaggtttgctacaaatgtggtaagcccggtcattttattgcaaaatgtcctatttctagtgacagtgacaggggcgacgacaaaaaggggagaagaaaggagaagaagaggtactacaagaagaagggcggcgatgcccatgtttgtcgtgagtgggactccaacgaaagctctagctactcctcctccgacgaggacgccgccaacatcgccgtcaccaagggactcctcttccccaacgtcggccacaaatgcctcatggcaaaagacggcaaaaagaagaaggtttatgcatctaggggctcaagttggataatcgacagcgggtgcacaaaccacatgacaggggagaagaaaatgttctcctcctatgagaaaaaccaggatccccaacgagctatcacattcggggatggaaaccaagattctttagattacaatttgctttccgtttctcaattatgtcaaatgggctacaactatctatttactgatgaaaaatctcatacccaagaaaccttaaagggattcttgagacgggctcaaaatgagttcggcttgaggatcaagaaaattagaagcgacaacgggacggagttcaagaacttacaaatcgaaggcttccttgaggaggagggcatcaagcatgagttctcctctccctacacgccacaacaaaatggtgtagtagagaggaagaatagaactctattggacatggcaagaaccatgcttgatgagtacaagacttcggatcggttttgggccgaggcggtcaacaccgcctgctacgccatcaaccggaatcggaagagcctccaaatgcacaagatcaaccatcctcctccacgcaagcatctccaccaactcaaaatgaggatgaggctcaagttgatgaaggagaagatcaagcaaatgagccacctcaagatgacggcaatgatcaagggggagatgcaaatgagcaagacaaggaggatgaagaaccaagaccgccacacccaagagtccaccaagcaatccaacgagatcaccccgtcgacaccatcctcggcgacattcataagggagtaa

SEQ ID NO: 4918 - DNA, 4719 bp, Zea mays
  Clone ID: TF_ZM4891.C1.o15.fg
atgaggagggtaaaggcaataagaaacaaaagcacaacaaaggatgaggttacaaactcgcgagccaaagaagaggatatgaccaagagaaagaagagtgtggatcacgttgccatagaaaatcgggagagaatgatgctccaatatgctctgtcagtcgctctgaatggggtgttcaccatgcatacccttgagagtcttttccttagtcgggtgaggaagcgacaaatttttgttgcttttgctccaaggtggtaccaaatgaggaaaaacaagactgaagtgcgggaggactcggtcctccacttaggatcttttgcttataacttatcgggaggagtttgtgcctcccttggtttgtataatattactactctgcactcacttttagctctggtttactgcaatacgttgcatgaggaagtccatatactatactcacaattacaccctagtgagcctccacatcctgctgaggcagaagccggaccatctcacgttgcgggatgcgcgctgggtggggagttagacctttttgagccccctccttccttgagatgccgaccaggactcgaggacaggacgcagccggaacttctggggggaagggatgttaccccaaacccacctccggttcctcccacgttagccgaggcgattgccgccttggtgaatgccaccgcagacaatacccgcttccttagggaaatggcgggtcagcagcaattccagcagcaggcaggaagaggttatccgcaaggtccccgtgagaccacctatctggacttctctgaaacccgtccacccctattcgtcaaagctgaagatccccttgaagctgatgagtggattcgggttattgaacaaaagtttggtcttctctgttgctcagagacgcagaagccgttgttcgcagcacaacaactccgtggtcctgccagtacctggtggggaaattttgtggctattcaacctgtcaaccatcaatatgccatcgaccaggtgaatactgatttaaagaagaagaactgttttatgcggggactgaatgatcggctacaaaggaaaatggccacatgcatagatctcacgtatggaaaggctatcagcacagccttatctgttgaagccaaatacgcaaattctgggaagaataagggattcggtggtgagaggcctaatcagggccaggcgaagaagcaacagtttgtgatccgaccttcaaatcaaaatcgtcctttttctcgtccaccctcattccccttcaaacagcctatcattattcgccccaacaatacccccactaccccaaatcagccgggtgccccaggcactcgattccctgccttgcctagttcctcaactgggtgttttaattgtggcaagtcgggacacttcatcaaagactgcccatatcctaggcaaaatcaatcaaatgcttcgcaaggatctgggaaatcagctcagcccaaaggaaatgctgtggggaaaaaatacaaagaagacggggcatgtatattacactcaagtggctactacaccggaaggagagccagtgatgatggcaagaaatttgtggagcaacatcatattgcataccatgaatcaaaggagggatttaaaattcattcacctgggggacacatttatactagagaagtggcctatggagtgccagtaacaatggccggacggaactttcctgctaacatgattgttctgaagggccaggatatagatgtaatattgggtatgaattggttaacccaacacaaggcaattctcaacactgaactcagaaccgtcaggttgagctataatcaagaagagattcttttgactctccccgcaaccaatccagccaaagcttctggtagagtctatgaagccattgtaccggagatcaagaacattccggtagtatgtgagtttccagatgtatttccggaagatttgcctggactgccacctgaaagagatgtagaatttgtaattgagctaaagctcggtacggctcccatctcccgaagatcgtaccgtatgccccctaatgaattggcggaattgaagattcaattacaagatctactgaataagggattcatccggccaagctcgtccccatggggttgtcccgccatttttgttaagaagaaggatcaaaccttgcgcatgtgcgtggattatcgacccctgaatgaggtcaccatcaagaataagtaccctcttccaaggatcgacatcttatttgatcaactgactggggcgagggtattttccaaaattgatcttaggtccggctatcatcaaatccgtattcggcccgaggatataccgaagaccgcgtttactacgcggtatggattgtttgaatacctggtaatgtctttcgggctcacaaatgctcctgcccacttcacctatttgatgaactcggtgtttatgcccgagttggacaagttcgtggtagtcttcatcgacgatatcttgatatattctaaaaatgaagaggaccatgctcagcatctacggattgtattgacgcgcctcagggaacatcagctatatgccaagttcagcaagtgcgcgttctggctggaagaaattcaatttttggggcacgtgttatcggctaaaggaattgcggtagatcctagcaaggtcaaagatattctggagtggaaacccccaaccactgttcaccaagtccggagttttcttggactagctgggtattatcgcaggttcataccagatttttctaagcttgtgaagccaatcacaagtttattgaagaatgacattaagttcaattggtcttctaagtgtaatgaagcctttgcgcaattgaagacactattgaccactgctccggtattggctcaaccggacatcactaaaccttttgatgtatattgtgatgcatctggcagtgggctcggctgtgtactgatgcaagagggccgagtaattgtgtatgcttcacggcagttgcgccgacatggggagcattacccaactcatgatctggagctagctgctgtgtcagaattaaatatgagacaaacacgatggcttgagcttattaaagactatgaactggagatccattatcacccaggcaaagccaatgtggtggcagatgcattgagtcgtaagacttcctgccactgtcttatggcgaagacctccgagaacactttgtgtcaagagatggaaaagctaaacctggggatcctccaacaagggactctgaatcagctaaagcttgagtcaatcattttgcaaaggataattgatgctcaaaaggataatctgggtatgaagcacatacgagagaagataagagctggagtagccaagtgtttcaaggaagacgatcaaggtgtgatatggtttaaaaaccgcatagtagtgccaaagaacgaagaactccgccagcaaattcttgatgaagcacatcttagtcgttattctattcatcccggaagcactaagatgtaccaagatttaaagcagcattactggtggacaaagatgaagattgaaattgcacgctatgtggctagatgtgacacttgcaaacgtgtcaaggccatacacatgaaaactgctggtccattacaatctttgccaatcccaacatggaaatgggaagacatcagtatggactttattgtgggactgcctaggacggccaaagggtatgattctatttgggttatcgttgatcgactcacaaagattgcccacttcttacccgtcagggccaaatatacagtagccacttatgcagcattatatatcgaccgtattctcagtttgcatggtattccaaagaccatagtgtcggatcgtggacctcagttcgtatccaagttttgggaagaacttcataaatccttgggtaccaaattgctccacagttcggcctatcatcctcaaaccagtggacagactgagagagtgaatcagatactcgaggatatgctgcgggcatgtgttctggacttctcgcaaaaatgggatgaatgtttgcccttagcggaattttcatacaataacagttatcaagaaagtatcaagatggcaccttttgaagctttatatggacgacagtgtcgaactccgctaaattggtctgaacctggagaaagatacttctttaggcctgatatggtgaaagaggtcgaagaaaaggttcagagaattattcataatatgaagaaagctcagactcgacaaaagagttatgcagaccgacgacgacaacccttatgctttctggtagacgactatgtctacttaaaagtttcaccaatgaagggtgtatcgtgtttcggggttaaagggaagcttgcacccaggtacattggtccattcctggtgattgagcaatgtggaccagtggcatatcgactccaactccccgaaacattgtctgctgtgcataatgtgttccacgtgtcacaattgaagaagtgtcttcgggttcctgatcgaaccgttgaagtgacagatgttgtcctagaaccagatttaacatactcggaacatcctattcgagttctggatcaaaaggacagggttacccggagaaaaactctcaagttctacaagatacagtggaaccagcattctgaagatgaggctacttgggaaactcaagacttcttgaacaagaatttcccaggctttttagcctcttgtaaattgtaa

SEQ ID NO: 4919 - DNA, 4623 bp, Zea mays
  Clone ID: TF_ZM4893.C6.o6.fg
atgccgccacgtaccaggctaacggcccgcaagtctacgggaccaattggggtgcctcggcatcaattggctccccgacatgaaagtagcagcagtggaagtaacgaccctattggagaccttgaagctcgtgatcaactcgctgatcgagacttagcacttgactgggccgtacagtctcgtttgctaatgtgtgctaaggaagtaagggctcaggcccgagttaaagaacttagctcgactgttgataacctgcagatgccgatcaggactcgaggacaggatgcagcaggaacttctgggggacgggatgttaccccaaacccacctccggttcctcccacgttagccgaggccatcgccgccttggtgaatgccaccgccgataatacccgcttccttagggaaatggcgggtcagcaacaattccagcagcaggcgggaagaggttatccgcagggtccccgtgtgaccacttatctggatttctcggaaactcgtccacctctattcgtcaaggcagaagatcccctagaagctgacgagtggattcgggttatcgagcaaaaatttggtcttctccgttgctcagagacgcaaaagccgttgttcgccgcacaacaactccgtggtcctgccagtacctggtggggaaattttatggctattcaacctgacaaccatcaagtcacctgggatgagtttaaagcagccttccgtgaacactacatccccgaaggagtgctgcatatgaaacaagaggagtttatgaagttacaacaaggtggagataccgtcaaccaatatctcaacaaattcaatcacctgtcgcagtatgccatcgaccaggtgaatacggatttaaagaagaagaactgttttatgcggggtctgaatgatcggctacaaaggaaaatggccacatgtatagatctcacatatggaaaggctgtcagcatggccttatctgttgaagccaagtacacaaattctgggaagaataagggattcggtgcctatcattatccgcccaataatacccccactaccccaaaacagccgggtgccccaggcactcgatttcctgccttgcctagttcttcaactgggtgctttaattgcggcaagtcgggacactttatcaaagactgcccatatcctaggcaaaatcaatctaatgcttcgcaaggatctgggaaatcagctcagcctaaaggaaatgctgtggggaagaatacaaagaagacagggcgtatatattacactcaagtggctactacaccggaaggagagccggtgatgatgggtacgtttcccgtggccagtcacccagcaattattctttttgattctggtgcttcacatacatttattagcaagaagtttgtggaacaacatcatattgcataccatgaatcaaaggagggatttaaaattcattcacctgggggacacatttatactaaagaagtggcctatggagtgccagtaacaatggccgaacggaactttcctgctaacatgattgttctgaaaggccaggatatagatgtaatcttgggtatgaattggttaacccaacacaaggcaatcctcaacactgaactcagaaccgtcaggttgagctataaccaagaagagattcttttgactctccccgcaaccaatccagccaaagcttctggtagagtctatgaagccattgtaccggagatcaagaacattccggtagtacgtgagtttccagatgtatttccggaagatttgcctggactgccccctgaaagagatgtagaatttgtaattgagctaaagcccggtacggctcccatctcccgaagatcgtaccgcatgccccctaatgagttggcggaactgaagattcaattacaagatctactgaataagggattcatccggccaagctcgtccccgtggggttgtcccgccatttttgttaagaagaaggaccaaaccttgagaatgtgcgtggattatcgacccctaaatgaggtcactatcaagaataagtaccctcttccaaggatcgacatcttatttgatcaattgactggggcgagggtattttccaaaattgatctcaggtcgggctatcatcaaatccgtattcggcccgaggatataccgaagaccgcgtttactacgcgatatggattgtttgaatacttggtaatgtctttcgggctcacaaatgctcctgcccatttcacttatttaatgaactcggtgttcatgcccgaattggacaagtttgtggtagtcttcatcgacgatatcttgatatattccaagaatgaagaggaccatgctcagcatttacggattgtattgacgcgcctaagggaacatcagctatatgccaagtttagtaagtgcgcattctggctggaagaaattcaatttttggggcacgtattatcagctaaaggaattgcggtagatcctagcaaggtcaaagatattctggaatggaaacctccaaccactgttcaccaagtccggagttttcttggactagctgggtattatcgcagattcataccagatttttctaagcttgtgaagccaatcacaagtttgttgaagaatgacattaagttcaattggtcttctaagtgcaatgaagccttcgagcaactgaagacactattgaccactgctccggtattagctcaaccggacatcactaaatcttttgatgtatattgtgatgcatctggcagtgggctcggctgtgtactgatgcaagagggccgagtgatcgcgtatgcttcgaggcagttgcgccgacatgaggagcactatccaactcatgatctggagctagctgctgtggttcatgccctaaagatttggcgtcactatctgctgggtaatatctgtcacatatatacagatcataaaagtctgaagtacatctttacccagtcagagttaaatatgagacaaagacgatggcttgagctcatcaaggactatgaactggagatccattatcacccaggcaaggccaatgtggtggcagatgcattgagtcgtaagacttcctgccactgtcttatggcaaagacctccgagaacactttgtgtcaagaaatggaaaagctaaacctggggatcatccaacaagggactctaaatcaactaaagcttgagtcaatcattttgcaaagaataattgatgctcaaaaggataatctgggtatgaagcacattcgagagaagataaaggctggagtagccaagtgtttcaaggaagacgatcaaggtgtgatatggtttaaaaaccgcatagtagtgccaaagaacgaagagctccgccagcaaattctggatgaagcacatcttagtcgctattctattcatcccggaagcactaagatgtatcaagacctaaaacaacattactggtggactaagatgaagattgaaattgcacgctatgtggctaagtgtgacacttgtagacgtgtcaaggccatacacatgaaaaccgctggtccattacaatctttgccaatcccaacatggaaatgggaagacatcagtatggactttattgtgggattacccaggacggccaaagggtatgattctatttgggttatagttgatcgactcacaaagattgcccacttcttacctgttaaggtcacatatacaatcgccacttatgcagcattatacattgcccgtattctcagtctgcatggtgttccgaaaaccattgtgtcggatcgtggacctcaatttgtagccaagttctgggaagcacttcacaactccttgggtactaaattactccacagttcggcttatcatcctcaaaccagtggacagactgagagggtgaaccaaatacttgaagatatgctgcgggcatgtgtcctggatttctcaccaaaatgggatgaatgtttgcccctagcggagttttcatacaataacagttatcaagaaagtatcaagatggcaccttttgaagctttatatggacgacggtgtcgaactccgctaaattggtctgaacctggagaaagatatttctttaggcctgatatggtgaaagaggtcgaagaaaaggttcagaaaattgttcataatatgaagaaagctcaggctcgacaaaagagttatgcagaccgacgacgacaacccttatgctttctggtagacgattatgtctacttaaaggtttcaccaatgaagggtatatcgcgtttcggggttaaagggaaacttgcacccaggtacattggtccatttttggtgcttgagcaatgtggaccagtggcataccgacttcagctccccgaaacattgtctgctgtgcataatgtattccacgtgtcacaattgaagaagtgtcttcgggttcctgatcgaaccgttgaagtgactgatgttgtcctggaaccagatttaacatactcggaacatcatattcgagttctggatcaaaaggacagggtcacccgaagaaagactctcaaattctataagatacagtggaaccagcattctgaagacgaggctacatgggaaacccaagacttcttagataagaatttcccaggctttctagcctcatgtaaattgtaa

SEQ ID NO: 4920 - DNA, 5610 bp, Zea mays
  Clone ID: TF_ZM4903.C4.o1.fg
atgtcgggagatcacgccaagaaggagatggagaccggcgaaaagcccactacaagccacgggagcacttcatcggaagagtcccgcaccaagaggaaggagaagaagaagagctcctccaacaaaggaaaggagaagaaatcttcttcgcaccacaaagagaagaaggagagatcttcctcccacaagccacatcggagaggggacaagcacaaaaggatgaggaaagtggtctactatgagaccgacacttcatcagcatcgacctctaactccgatgcgccctccgtaacttctaaacgccaagagcgtaagaagtttagtaagatccccctacattaccctcgcatttctaaaaatgcacatttactttccgtcccattaggcaaaccaccaactttcgatggtgaagattatgctaggtggagtgatttaatgcgatttcatctaacctcactccacaaaagtatatgggatgttgttgagtttggtgcacaggtaccatccgtaggggataaagactatgatgaggatgaggtggcccaaatcgagcacttcaactctcaagcgacaacaatactcctcgcctctttaagtagagaggagtataacaaagttcaagggttgaagagcgccaaggaggtttgggatgtgctcaaaaccgcacacgaaggagatgagctcaccaagatcaccaagcgggaaacgatcgagggggagctcggtcggttccggcttcgcaaaggggaagagccacaacacatgtacaaccggctcaagactttggtgaaccaagtgcgcaacctcgggagcgtcaagtgggacgaccacgaaatggttaagatatatactaaaatgacccccgaggaagttatcgggaattttgtaagttttgagtgcatgatcgaaggctcgaggaagatcaacgagcttgatgattccaccacatccgaagctcaacccgtcgcattcaaggcgacggaggaaaagaaggaggaggctacaccaagtcgacaaccaatcgacgcctccaagcttgacaatgaggagatggcgctcgtcatcaagagcttccgccaaatcctcaaacaaaggagggggaaagactacaagccccgctccaagaaggtttgctacaaatgtggtaagcccggtcattttattgctaaatgtcctatatcaagtgacagtgaccgaggcgacgacaagaaggggagaagaaaggagaaaaagaagtactacaagaagaagggcggcgatgcccatgtttgtcgggagtgggattccgacgaaagctcaagcgactcctccgacgacgaggacgccgccaatatcgccgtcaccaagggacttcttttccccaacgtcggccacaagtgcctcatggcaaaggacggcaaacggaagaaggttaaatctaactcctccactaaatatgagtcttctagtgatgataatgatagtgatgaggaggataatttgcgtgttctctttgccaatcttaacatggagcaaaaagaaaaattaaatgacttgattagtgctattcatgaaaaggatgaccttttggactcccaagaggattgtctaattaaagaaaacaagaaacatgttaaggttaaaaaggcttatgctctagaagtagaaaaatgtgaaaaattatctagtgagctaagcacttgccgtgagatgattgacaaccttaggaatgaaaatgctagtttaaatgctaagattgattctcatgtttgcattgtttcaactttcaatcctaagaataataatgatgatttgcttgctaagattgaagaattgaatatttctcttgctagccttagagtagaaaatgataatttgattactaaggctaaagattatgatgtttgcaaagttacaatttccgatcttagagataaaaatgatattcttcatgctaagattgttgaacttaattcttgcaaaccctctacatctattgttgagcatgtatctatttgtactagatgtagagatgttgatgttaatgctattcatgatcatatggctttaattaaacaacaaaatgatcatatagcaaaactagatgctaaaattgccgagcacaacttagaaaatgagaaatttaaatttgctcgtagcatgctttataatgggagacgccctggcattaaggatggcattggcttccaaaagggagacaatgacaaacttaatgcccctcctaagaacttgtctaactttgttaagggcaaggctcccatgcctcaggataacgagggctacattttgtaccctgccggctatcctgagagcaaaattaggaaaattcattctaggaagtctcactctggccctaatcatgcttttatgtataagggtgagacatctagctctaggcaaccaacccgtgctaagttgcctagaaagaaaactcctaatgcatcaaatgatcatgacatttcatttaaaacttttgatgcttcttatgtgcttactaacaaatccggcaaggtttatgcatccgggggctcaagttggatactcgatagcgggtgcacaaaccacatgactggggagaagaagatgttctcctcatatgagaaaaaccaagatccccaacgagctatcacattcggggatggaaatcaaggtgtcactgtctttagaagaagtgatgattcaatagcatttaagggagtgttagaggatcagctatacttagtagattttgatagagctgaactcgacacttgcttaattgctaagactaacatgggttggctctggcaccgccgactagcccatgttggaatgaagaatcttcataagcttctaaagggagaacacattttaggattaacaaatgttcattttgagaaagacaggatttgtagcgcatgtcaagccgggaagcaagttggaacccaacatccacacaagaacatcatgacgaccgacaggccgcttgagctactccacatggatctattcggcccgattgtgtacataagcatcggcgggagtaagtattgtcttgtaatagtggatgattattctcgcttcacctgggtattctttttacaggaaaaatctcaaacccaagagaccttaaagggattcttgagacgggctcaaaatgagttcggcttaaggatcaagaaaataagaagcgacaacgggacggagttcaagaactctcaaattgaaggcttccttgaggaagagggcatcaagcatgagttctcttctccctacactccacaacaaaatggtgtagtggagaggaagaatcgaactctattggatatggcaagaaccatgcttgatgagtacaagacttcggatcggttttgggcggaggcagtcaacaccgcttgctacgccatcaaccggttatatctacaccgaatcctcaagaagacatcatatgaactcctaaccggtaaaaagcccaacatttcatattttagagtctttggtagcaaatgctttattcttgttaagagaggcagaaaatctaaatttgctcctaagactgtagaaggctttttacttggttatgactcaaacacaagggcatatagggtctttaacaagtccactggactagttgaagtctcatgtgacgttgtgtttgatgaaactaacggctctcaagtagagcaagttgatcttgatgagataggtgaagaacaggctccatgcatagcgctaaggaacatgtccattggggatgtatgtcctaaggaatccgaagagcctccacatgcacaagatcaaccatcctcctccacgctagcatctccaccaactcaaaatgaggatgaagctcaagttgatgaagtagaagatcaagcaaatgagccacctcaagatgacgacaataatcaagggggagatgcaaatgatcaagacaaggaggatgaagagcaaaaaccgccacacccaagagtccaccaagcaatacaacgagatcaccccgtcgacactatcctcggcgacattcataagggggtaactactagatctcgtgttgcacatttttgtgagcattactcgtttgtttcctctattgagccacacagggtagaggaagcactacaagattcggattgggtggtggcgatgcaagaggagctcaacaatttcacaaggaacgaggtatggcacttagttccacgtcctaaccaaaatgttgtaggaaccaaatgggtcttccgcaacaagcaagatgagcatggtgtggtgacaaggaacaaagctcgacttgtggccaaaggatactcccaagtcgaaggtttggatttcggtgaaacctatgcacccgtagctaggcttgagtcaatccgcatattattagcctatgctacttaccatggctttaagctttatcaaatggacgtgaaaagtgccttcctcaatggaccaatcaaggaagaggtctatgttgagcaacctcccggctttgaaaacagtgagtatcctaaccatgtctataagctctctaaggcgctttatgggctcaagcaagccccaagagcatggtatgaatgccttagagattttcttattgctaatggcttcaaagtcggaaaggccgatcctacactctttacaaaaactctcaaaaatgacttgtttgtatgccaaatttatgttgatgatattatatttgggtctactaacgagtctacatgtgaagagtttagtaggattatgacacagaaattcgagatgtctatgatgggggagttgaagtatttcttaggattccaagtgaagcaactccaagagggcaccttcattagccaaaccaaatacactcaagacattctaaacaagtttgggatgaaggatgccaagcccatcaagacacccatgggaaccaatgggcatctcgacctcgacacaggaggtaagtccgtggatcaaaaggtataccggtcgatgataggttccttactctatttatgtgcttctcgaccggacattatgctttccgtttgcatgtgtgcaagattccaatctgaccctaaggaatcccaccttacggccgtaaaacgaatcttgagatatttggcttattctcctaagtttgggctttggtaccctcggggatccacatttgatttaattggttattcggatgccgattgggcggggtgtaagattaataggaagagcacatcggggacttgccagttcttggggagatccttggtgtcttgggcttcaaagaagcaaaattcagtcgctctttcaaccgccgaagccgagtatattgccgcaggtcattgttgcgcgcaattattatggatgaggcaaaccctgcgggactacggttacaaattaaccaaagtccctttgctatgtgatattgagagtgcaattaaaatggccgacaatcccgtcgagcatagccgcactaaacacatagccatacggtatcattttcttagggatcgccaacaaaagggggatatcgagatttcatacattaacactaaagatcaattagccgatatctttaccaagccacttgatgaacaaacttttaccaaacttaggcatgagctcaatattcttgattctagaaatttcttttgctag

SEQ ID NO: 4921 - DNA, 5766 bp, Zea mays
  Clone ID: TF_ZM4904.C2.o1.fg
atgtcgggagatcacgccaagaaggagatggagaccggcgaaaagcccactacaagccaagggagcacttcatcggaagagtcccgcaccaagagaaaggagaagaagaagatctcctccaacaaagggaaggagaagaaatcttcttctcatcacaaagagaagaaggaaaaatcttcttcccacaagccacatcggagcggtgacaagcacaagaggatgaggaaggtggtctactacgagaccgacacttcatcaccttccacctccggctccgacgcggcatccgtcacttctaagcgccaagagcgcaagaagtatagtaagattcccctacgctaccctcgcatttcaaagcatacacctttactttccgtcccattaggcaaaccaccaacttttgatggtgaagattatgctaggtggagcgatttaatgcgatttcatctaacctcgctccacaaaggtatatgggatgttgttgagtttggtgcgcaggtaccgtcagtaggggatcaagactatgatgaggatgaggtggcccaaatcgagcacttcaactcacaagccacaacaatactcctcgcctcactaagtagagaggaatataacaaagtacaagggttgaagaacgccaaggaggtttgggatgtactcaaaaccgcgcacgagggagacgagctcaccaagatcaccaagcgggaaacgatcgagggggagctcggacggttccggcttcacaaaggggaggagccacaacacatgtacaaccggctcaagactttggtgaaccaagtgcgcaacctcgggagcaagaagtgggacgaccacgaagtggtaaatgttattttaagatctctcatttttcttaatcccactcaagttcaattgattcgtggtaatcctagatatactaaaatgacccccgaggaagttatcgggcattttgtaagttttgagtgcatgatagaaggctcgaggaaaatcaacgagcttggagacccatccgaagcccaacccgttgcattcaaggcaacggaggagaagaaggaggagtctacaccaagtagacaaccaatagacgcctccaagctcgacaatgaggaaatggcgctcgtcatcaagagcttccgccaaatcctaaagcaaaggagggggaaagactacaagtcccgctccaagaaggtttgctacaagtgtggtaagcccggtcattttattgctaaatgtcctatatcaagtgatagtgaccgaggcgacgacaagaaggggagaagaaaggagaagaagaggtactacaagaagaagggcggcgatgcccatgtttgtcgcgagtgggactccgacgaaagctcaagcgactcctccgacgacgaggacgccgccaacatcgccgtcaccaagggactcctcttccccaacgtcggccacaagtgcctcatggcaaaggacggcaaaaagaaggttaaatctaaatcctccactaaatatgaatcctctagtgatgacaatgctagtgatgaggaagataatttgcgttccctttttgccaaccttaacatagctcaaaaggaaaaattgaatgaattggttagtgctattcatgaaaaggatgaccttttggattcccaagaggattgtctaattaaagaaaacaaaaaacatgttaaggttaaaaaggcttatgctcttgaaattgagaaatgtgaaaaattatctagtgagctaagcacttgtcgtgagatgattgacaaccttagaaatgaaaatgctattttaaatgctaaggttgattcacatgtttgtaatgtttcaattcccaatcttagagatgataatgttgacttgcttgctaagattgatgaattaaatgtatctcttgctagccttagattagagaatgaaaatttaattgctaaggctaaagattttgatgtttgcaaagttacaatttccaatcttaaagataaaaatgatattcttcatgctaagattgtggaacttgattcttgcaaaccctctacatctaccattgagcatgtcactatttgtgctagatgtagagatattgatgttaatgctattcatgatcacataatcttgattaagcaacaaaatgatcatatagctaaacttgatgctaaaattgccgagcacaacttagaaaatgagaaatttaaatttgctcgtagcatgctttataatgggagacgccctggcattaaggatggcattggcttccaaaggggagacaatgtcaaaattagtgcccctcctaaaagattgtcaaattttgttaagggcaaggctcccatgcctcaggataacgagggttacattttataccctgccggttatcccgaggacaaaattaggaaaattcattctaggaagtctcactctggccctaatcatgcttttatgtataagggtgagacatctagctctaggcaaccaacccgtgccaagttgcctagaaagaaaactcctaatgcatcaaatgatcatgccatttcatttaaaacttttgatgcttcttatgtgcttactaacaaatccggcaaagtagttgccaagtttgttgggggcaaacacaagggttccaagacttgtgtttgggtacccaaagttcttgtgtctaatgccaaaggacccaaaaccgtttgggtttatgcatccgggggctcaagttggatactcgacagcgggtgcacaaaccacatgaccggggagaaaaggatgttctcctcatatgagaaaaaccaagatccccaacgagctatcacattcggggatggaaatcaaggtgtcactgtctttagaagaagtgatgattcaatagcatttaagggtgtgttagagggtcagctatacttagtagattttgatagagctgagctcgacacatgcttaattgctaagactaacatgggttggctctggcaccgccgactagcccatgttgggatgaagaatcttcataagcttctaaagggagagcacattttaggattaacaaatgttcattttgagaaagacaggatttgtagcgcatgccaagcagggaagcaagttggcactcatcatccacacaaaaacataatgacgactgacaggccactggagctcctacacatggatctattcggcccgatcgcttacataagcatcagcgggagtaagtactgtctagttattgtggatgattattctcgcttcacttgggtattctttttgcaggaaaaatctcaaacccaagagaccttaaagggattcttgagacgggctcaaaatgagttcggcttaaggatcaagaaaataagaagcgacaacgggacggagttcaagaactctcaaattgaaagctttcttgaggaagagggcatcaagcatgagttctcttctccctacactccacaacaaaatggtgtagtggagagaaagaatagaactctattggacatggcaaggaccatgcttgatgagtacaagacttcggatcggttttgggcggaggcagtcaacaccgcttgctacgccatcaaccggttatatctacaccgaatcctcaagaagacatcatatgaactcctaaccagtaaaaagcccaacatttcatattttagagtctttggtagcaaatgctttattcttgttaaaagaggtagaaaatctaaatttgctcctaagactgtagaaggctttttacttggttatgactcaaacacaagggcatatagggtctttaacaagtccactggactagttgaagtctcatgtgacgttgtgtttgatgaaactaacggctctcaagtagagcaagttgatcttgatgagataggtgaagaacaggctccatgcatagcgctaaggaacatgtccattggggatgtgtgtcctaaggaatccgaagagcctccaaaagcacaagatcaaccatcctcctccacgcaagcatctccaccaactcaaaatgaggatgaaactcaagttgatgaagtagaagatcaagcaaatgagccacctcaagatattggcaatgatcaagggggagatgcaaatgaggaagacaaggaggaagaggaacaaaggccgccacacccaagagtccaccaagcaatccaacgagatcaccccgtcgacaccatcctcggcgacattcataagggggtaaccactcgatctcgtgttgcacatttttgtgaacattactcttttgtttcctctattgagccacacagggtagaggaagcacttcaagattcggattgggtggtggcgatgcaagaggagctcaacaacttcactagaaatgaggtatggcatttggttccacgtcctaaccaaaatgttgtaggaaccaaatgggtcttccgcaacaagcaagatgagcatggtgtggtgacaaggaataaagctcgactcgtggtcaaagggtattcacaagtcgaaggtttggatttcggtgaaacctatgcacccgtagctaggcttgagtcaattcgcatattattggcctatgctacttaccatggctttaagctttatcaaatggacgtgaaaagtgccttcctcaacggaccaatcaaggaagaggtctatgttgagcaacctcccggctttgaagacagtaagtatcctaaccatgtttataagctctctaaggcgctttatgggctcaagcaagccccaagagcatggtatgaatgccttagagatttccttattgctaatggcttcaaagtcggtaaagccgatcctacactctttactaaaactcttgaaaatgacttatttgtatgccaaatttatgttgatgatattatatttgggtctactaacgagtctacttgtgaagagtttagtaggattatgacacagaaattcgagatgtctatgatgggggagttgaagtatttcttaggattccaagtgaagcaactccaagagggcaccttcattagccaaacgaagtatactcaagacattctaaacaagtttgggatgaaggatgccaagcccatcaagacacccatgggaaccaatgggcatctcgacctcgacacgggaggtaagtccgtggatcaaaaggtataccggtcgatgattggttcattgctttatttatgtgcatctcgaccggacattatgctttccgtatgcatgtgtgcaagattccaagccgaccctaaggaagctcaccttacggtcgtaaaacgaatcttgagatatctggcttatactcctaagtttgggctttggtatcctaagggatccacatttaatttgattggttattcggatgccgattgggcggggtgcaaaatcaataggaagagcacatcggggacttgccagttcttgggaagatccttggtgtcttgggcttcaaagaagcaaaattcggtcgctctttccaccgccgaagccgagtacattgtcgcaggccattgttgcgcgcaattactttggatgaggcaaaccctgcgggactacggttacaaattaaccaaagtccctttgctatgtgataatgagagtgcaatcaaaatggccgacaatcccgtcgagcatagccgcactaagcacatagccattcggtatcactttttaagggatcaccaacaaaagggagatatcgagatttcatacattaatactaaagatcaattagccgatatctttaccaagcctcttgatgaacaatcgtttaacaaacttaggcatgagctaaatattcttgattctaggaatttcttttgttaa

SEQ ID NO: 4922 - DNA, 4803 bp, Zea mays
  Clone ID: TF_ZM4920.C3.o16.fg
atggagaccggcgacaagtccactacaagccacgagaaggcttcatcggaagagtcccgcaacaaagggaaagggaaggagaagaaatcctcttcccacaagtcgcatcggagtggtgacaagaaaaagaagatgaggaaggtggtctactacgagaccgatacttcatcaccttccacctccggctccgacgcgccatccattacttctaagcgccatgagcgcaagaagtttagtaagatccccctacgctaccctcgcatttctaaacatacacctttactttccgttccattaggcaaaccaccaacatttgatggtgaagattatgctaggtggagtgatttgatgcgatttcatctaacctcactccacaaaagtatatgggatgttgttgagtttggtgtacaggtaccatccgtaggggacaaagattatgatgaggatgaagtggcccaaatccaacacttcaacccccaagcctcaactatactcctcgcctctctaagtcgagaggagtataacaaggtgcaagggttgaaaggtgccaaggaaatttgggacacgctaaagaccgcgcacgaaggagatgaggtgaccaaaatcaccaagcgggaaacgatcgagggggagctcggtcgcttccgacttcgccaaggggaagagccacaagacatgtacaaccggctcaaaaccttggtgaaccaagtgcgcaacctcgggagcaagaaatgggatgaccacgaaatggttaaggttattttaagatcactcgttttccttaaccctactcaagttcaattaattcgtggcaatcctagatatacactaatgactcccgaggaagtaatcgggaattttgtgagctttgaattgatgatcaaaggctcaaagaagatcaacgagcttgacggcccctccacgtccgaagcacaaccggtcgcattcaaggcgacggaagaaaagaaggaggaatctactccatgtcgaacacccatcgacgcctccaagctcgacaacgaggaaatggcgctcgtcatcaagagctttcgccaaatcctcaagcaaaggagagggaaagattacaagccccgctccaagaaagtgtgctacaaatgtggtaagcccggtcactttatagcaaaatgtcctatttctagtgacagtgacaggggcgacgacaagaagggaagaataaaggagaagaagaaatactacaagaagaagggtggcgacgcccatgtatgccgcgagtgggattcggacgagagctcctccgactcctcctccgacgaggacgccgccaacatcgccatcaacaagggccttctcttcccaaacatcggccacaagtgcctcatgacaaaggacggcaaaaagaagaaggttaaatccaaatcctccactaaatatgagtcctctggtgatgataatgctagtgatgaggaggataatttacgtaccctttttgccaacctaaacatgcaacaaaaggaaaagttaaatgaattaattagtgccatccatgagaaggatgacctcctggacacccaagaggacttcctaatcaaggaaaacaaaaagcatgttaaggttaagaatgcttatgctctagaagttgaaaaatgtgagaaattaattagtgagctaagcacttgccatgatattatcaacaaccttaaaaatgaaaatgctagtttaattgctaaggttgattcaaatgcttgtaatatttcaattcccaatcttagaaatgataatgttgatttgcttgctaagattgaagaattgaacatttctcttgatagccttagaattgaaaatgaaaaattaattgctaaggctaaagaattagatgtttgcaatgcttcaatttccgaccttagaagtaaaaatgatatattacatgctaaggttgtagaattaaaatctagcaaaccatctacatctaccgttgaacatacttctatttgcactagatgtagagatgttgatattgatgctattcatgatcatatggtattaattaagcaacaaaatgatcatatagcaaaattagatgctaaaattgtcgagcatgaacttgaaaatgaaaaatttaaatttgctcgtagtatgctttatagtgggagacgccctggcattaaggatggcattggcttccaacagggaggcaatgtcaaacttaacgcccctcctaaaagattatctaattttgttaagggcaaggctcccatgcctcaagataacgagggttacattttgtaccctgctggttatcctgagagcaaaattaggagaattcactctaggaagtctcactttggccctaaccatgcttttatgtataagggtgagacatctagttctaggcaaccaacccaagctaagttgcctaagaagaaaactcctagtgcatcaaatgatcatgacatttcatttaaaacttttgatgcatcttatgttttaactaacaaatccggcaaggtttatgcatccgggggctcaagttggatcatcgacagtgggtgcacaaaccacatgacaggggagaagaaaatgttcccctcctacgagaaaaaccaagatccccaacgagctatcacattcgaggatggaaatcaaggtgtcactgtctttagaagaagtgatgattcagtagcatttaagggagtgttagagggtcagctatacttggtagattttgatagagctgaactcgacacttgcttaattgctaagactaacatgggttggctctggcaccgccgattggcccatgttgggatgaagaatcttcataagcttctaaagggagagcacattttaggattaacaaatgttcattttgagaaagacaggatttgtagcgcatgccaagcagggaagcaagttggtgttcatcatccacataagaacatgatgatgactgacagaccgctcgagctcctacacatggacctattcggcccgatagcttacataagcatcggcgggagtaagtactgtctagttattgtggatgattattctcgcttcacttgggtattttttttgtacgataaatctcatacccaagagaccttaaaaggattcttgagacgggctcaaaacgagttcggcttaaggatcaagaaaataagaagcgacaatggaacggagttcaagaactctcaaattgaaggcttccttgaggaggagggtatcaagcatgagttctcttctccctacaccccacaacaaaatggtgtagtggagaggaagaatagaactctgttggacatggcaagaaccatgcttgatgagtacaagacttcagatcggttttgggccgaggcagtcaacaccgcctgctatgccatcaaccggttgtatctacaccgaatcctcaagaagacatcatatgaactcctaaccggtaaaaagcccaatatttcatattttagagtctttggtagcaaatgctttattcttgttaaaagaggtagaaaatctaaatttgctcctaagactgtagaaggctttttactaggatatgattcaaacacaagggcatatagagtctttaacaagtccactggacaagttgaagtttcttgtgacgttgtgtttgatgagactaacggctctcaaatagagcaagttgatcttgatgatataggtgatgaagaggctccgtgcatcacgctaaggaacatgtccattggggatgtgtgtcctaagcaatacgaagagcctccaaatgcacaagatcaaccatcctcctccacgcaagcatctccatcgacccgaaatgaggatgaggctcaagttgatgaaggagaagaacaaagagatgagccacctaaagatgacggcaatgatcaagggggagatgcaaataaccaagacaaggaggatgaagaaccaaggccaccacacccaagagtccatgaagcaatccaacgagatcacctcgtcgacaccattctcggcgacatccataagggggtaaccactagatctcgtgttgcacatttttgtgagcattactcttttgtttcctctattgagccacacagggtagaggaagcacttcaagattcggattgggtggtggcgatgcaagaggagctcaacaacttcactaggaacgaggtatggcatttggttccacgtcctaatcaaaatgttgtaggaaccaagtgggttttccgcaacaagcaagatgagcatggtgtggtgacaagaaacaaagcccgacttgtggccaaggggtactcccaagtcgaaggttttgatttcggtgaaacctatgcacccgtagctaggcttgagtcaattcgtatattattagcctatgctacttaccatggcttcaagctttaccaaatggacgtgaagagtgccttcctcaatggaccaatcaaggaagaggtctatgttgagcaacctcctggctttgaagatagtgagtaccctaaccatgtttacaaactctctaaggcgctttatgggctcaagcaagctccaagagcatggtatgaatgccttagagatttccttatcactaatggattcaaagtcggaaaggccgatcctacactctttaccaaaacacttgaaaatgatttgtttgtatgccaaatttatgttgatgatattatatttgggtctactaacgaatctacatgtgaagagtttagtaggatcatgacacaaaaattcgagatgccaatgatgggagagttgaagtatttcttaggatttcaagtaaagcaactccaagagggcaccttcattagccaaacgaagtatacttaa

SEQ ID NO: 4923 - DNA, 5064 bp, Zea mays
  Clone ID: TF_ZM4923.C3.o1.fg
atggagaccggcgaaaagcccactacaagccacgggagcacttcatcggaagagtcccgcaccaagaggaaggagaagaagaatatctcctccaacaaagggaaggagaagaaatcttcttctcaccacaaagagaagaaggaaaaatcttcttccctcaagccgcatcgaagcggaaacaagcaaaagaggatgaggaaagtggtctactacgagaccgacacttcatcaacatcgacctccgactccgatgtgccctccgtaacttctaaacgccaagagcgtaagaagtttagtaagatccccctacactaccctcgcatttctaaacatgcacctttactttccgtcccattaggcaaaccaccaacttttgatggtgaagattatgctaggtggagtgatttaatgcgattccatctaacctcactccacaaaagtatatgggatgttgttgagtttggtgcacaggtaccatccgtaggggataaggattatgatgaggatgaggtggcccaaatcgagcacttcaactctcaagcaacaacgatactcctcgcctctttaagtagagaggagtataacaaagtgcaagggttgaagagcgccaaggaggtttgggatgtgctcaaaaccgcgcacgagggagacgagctcaccaagatcaccaagcgggaaacgatcgagggggagcttggtcggttccggcttcgcaaaggggaggagccacaacacatgtacaaccggctcaagaccttggtgaaccaagtgcgcaacctcgggagcgtaaagtgggatgaccatgaaatggttaaggttattctaagatctcttattttccttaaccctactcaagttcaattaattcgtggtaatccaagatatactaaaatgacccccgaggaagtaatcgggcattttagcttccgccaaatcctcaagcaaaggagagggaaagactataagtcccgctccaagaaggtttgctacaaatgtggtaagcccggtcattttattgctaaatgtcctatatcaagtgacagtgaccgaggcgacgacaagaaggggagaagaaaggagaagaagaggtactacaagaagaagggcggcgatgcccatatttgtcgggagtgggactccgacgaaagttcaagcgactcctccgacgacgaggacgccgccaacatcgccgtcaccaagggactcctcttccccaacgtcggccacaagtgcctcatggcaaaggacggcaaaaggaagaaggtaaaatcaagatcctccactaaatatgaaacctctagtgatgaaaatgctagtgatgaggaggataacttgcgtaccctttttgccaatcttaacatggaacaaaaagaaaaactaaatgagttaattagtgctattcatgaaaaggatgaccttttggattcccaagaggattgtctaattaaagaaaacaagaaacatgttaaggttaaaaatgcttatgctctagaaattgagaaatgtgaaaaattatctagtgagctaagcacttgccgtgagatgattgacaaccttaggaatgaaaatgctagtttaaatgctaaggttgattcacatgtttgtaatgtttcaatacctaatcctagagataataatgatgatttgtttgctaggattgaagaattaaacatttctcttgctagccttagagtagaaaatgaaaatttaattgctaaggctaaagaacttgatgtttgcaaagttacaatttccgatcttagagataaaaatgatattcttcatgctaagattgttgaacttaattcttgcaaaccatctacatctaccattgagcatgtcactatttgtactagatgtagagatattgatgttaatgctattcatgatcatatggctttaattaaacaacaaaatgatcatatagcaaaactagatgctaaaattgccgagcacaacttagaaaatgagaaatttaaatttgctcgtagcatgctttataatgggagacgcccgggcatcaaggatggcattggcttccaaaggggagacaatgtcaaacttagtgcctctcctaaaagattgtctaactttgttaagggtaagactcccatgcctcaggataacgagggttacattttgtaccctgccggttatcctgagagcaaaattaagaaaattcattctaggaagtctcactctggttctaaccatgcttttatgtataagagtgagacatctagctctaggcaaccaacccgtgctacgttgcctaagaagaaaattgctagtgcatcaaatgagcatgacatttcatttaaaacttttgatgcatcatatgtattaactaacaaatccggcaaagtagttgccaaatatgttgggggcaagcacaaggggtcaaagacttgtgtttgggtacccaaagttcttgtgtctaatgccaaaggacccaaaaccatttgggattatgcatccgggggctcaagttggatactcgacagcgggtgcacaaaccacatgacaggggagaaaaggatgttctcctcctacgagaaaaatcaagatccccaacgagctattacattcggggatgggaatcaagattacaacttgctttctgtatctcaattatgtcaaatgggctacaactgtctttttactgatattggtgtcactgtctttagaagaagtgatgattcaatagcttttaagggagtgttagagggtcagctatacttggtagattttgatagagctgaactcgacacttgcttaattgctaagactaacatgggttggctctggcatcgccgactagcccatgttgggatgaagaatcttcacaagcttctaaagggagaacacattttaggattaacaaatgttcattttgagaaagacaggatttgtagcgcatgccaggcagggaagcaagttggcacccatcatccgcacaagaacatcatgacgaccgacaggccactggagctcctacacatggatctattcggcccgatcgcttacataagcatcggcgggagtaagtactgtctagttattgtggatgattattctcgcttcacttgggtattcttcttacaggaaaaatctcaaacccaagagaccttaaagggattcttgagacgggctcaaaatgagttcggcttaaggatcaagaaaataagaagcgacaacggaacggagttcaagaactctcaaatcgaaggcttccttgaggaggagggcatcaagcatgagttctcttctccctacacgccacaacaaaatggtgtagtggagaggaagaatagaactctattggacatggcaaggaccatgcttgatgagtacaagacttcggatcggttttgggccgaggcggtcaacaccgcttgctacgccatcaaccggttatatcttcaccgaatcctcaagaagacatcatatgaactcctaaccgactgtagaaggtttttacttggttatgactcaaacacaagggcatatagggtctttaacaagtccactggactagttgaagtctcatgtgacgttgtgtttgatgagactaacggctctcaagtagagcaagttgatcttgatgagatagatgaagaagaggctccatgcatcgcgctaaggaacatgtccattggggatgtgtgtcctaaggaatccgaagagccttcaaatacacaagatcaaccgtcctcctccatgcaagcatctccaccaactcaaaatgaggatgaggctcaaattgatgaaggacaagttcaagaagatgagccacctcaagatgatggcaacgatcaagggggagatgcaaatgatcaagaaaaggaggatgagcaagaaccaatgccgccacacccaagagtccaccaagcaatccaacgagatcaccccgtcgacaccatcctcggcgacattcataagggggtaaccactagatctcgtgttgcacatttttgtgaacattactcgtttgtttcctctattgagccacacagggtagaggaagcactacaagattcggattgggtggtggcgatgcaagaggagctcaacaacttcactaggaatgaggtatggcatttagttccacgtcctaaccaaaatgttgtagggaccaaatgggtcttccgcaacaagcaagatgagcatggtgtggtgacaaggaacaaagctcgacttgtggccaaaggatactcccaagtcgaaggtttggatttcggtgaaacttatgcacccgtagctaggcttgagtcaattcgcatattattagcctatgctacttaccatggctttaagctttatcaaatggacgtgaaaagtgccttcctcaatggaccaatcaaggaagaggtctatgttgagcaacctcccggctttgaagactgtgagtaccctaaccatgtctataagctctctaaggcgctttatgggctcaagcaagccccaagagcatggtatgaatgccttagggatttccttattgctaatggcttcaaagttggaaaggccgatcctactctctttactaaaactcttgaaaatgacttgtttgtatgccaaatttatgttgatgatattatatttgggtctactaacgagtctacatgtgaagagtttagtaggatcatgacacagaaattcgagatgtctatgatgggggagttgaagtattttctaggattccaattcaaacaactccaagagggcaccttcattagccaaacgaagtacactcaagacattctaaccaagtttgggatgaaggatgccaagcccatcaagacacccatgggaaccaatgggcatctcgacctcgacacgggaggtaagtccgtggatcaaaaggaagagcacatcggggacttgccagttcttgggaagatccttggtgtcttgggcttcaaagaagcaaaattcggtcgctctttccaccgccgaagccgagtatattgccgcaggccactgttgcgcgcaattgctttggatgaggcaaaccctgcgggactacggttacaaattaaccaaagtccctttgctatgtga

SEQ ID NO: 4924 - DNA, 5688 bp, Zea mays
  Clone ID: TF_ZM4930.C2.o1.fg
atgtcgggagatcacgccaagaaggagatggagaccggcgaaaagcccactacaagccacgggagcacttcatcggaagagtcccgcaccaaaaggagggagaagaagaagagctcctccaacaaagggaaggagaagaaatcttcttctcaccacaaagagaagaaggaaagatcttcctcccacaagccgcaccggagtggggacaagcaaaagaggatgaggaaagtagtctactacgagaccgacacttcatcaacatctacctccgactccgatgcgccctccataacttctaaacgccaagagcgtaagaagtttagtaagatccccctacactatcctcgcatttctaaacatgcacctttactttccgtcccattaggcaaaccaccaacttttgatggtgaagattatgctatgtggagtgatttaatgcgatttcatctaacctcattccacaaaagtatatgggatgttgttgagtttggtgcacaggtaccgtccgtaggggataaggattatgatgaggatgaggtggcccaaatcgagcacttcaactctcaagcaacaacgatactccttgcctctttaagtagagaggagtataacaaagtacaagggttgaagagtgccaaggaggtttgggatgtgctcaaaaccgcacacgagggagacgagctcaccaagatcaccaagcgggaaacgatcgagggggagctcggtcggttccggcttcgcaaaggggaagagccacaacacatgtacaaccggctcaagactttggtgaaccaagtgcgcaacctcgggagcgtaaagtgggatgaccatgaaatggttaaggttattctaagatctcttattttccttaaccctactcaagttcaattaattcgtggaaatcctagatatactaaaatgacccccgaggaagtaatcgggcattttgtaagttttgagtgcatgatcgagggctcgaggaagatcaacgagcttgatgatccctccacatccgaagctcaacccgtcgcattcaaggcgacggaggacaagaaggaggagtctacaccaagtcgacaaccaatagacgcctccaagctcgacaatgaggaaatggcgctcgtcatcaagagcttccgccaaatcctcaagcaaaggagagggaaagactacaaatcccgctccaagaaggtttgctacaagtgtggtaagcccggtcattttattgctaaatgtcccatatctagtgacagtgaccgaggcgacgacaagaagggaagaagaaaggagaagaagaggtactacaagaagaagggcggcgatgcccatgtttgtcgcgagtgggactccgacgaaagctcaagcgactcctccgacgacgaggacgccgccaacatcgccgtcaccaagggacttctcttccccaacgtcggccacaagtgcctcatggcaaaggacggcaaaaggaagaaggtaaaatcaagatcctccactaaatatgaaacctctagtgatgaaaacgctagtgatgaggaggataacttgcgtactctttttgccaaccttaacatagctcaaaaggaaaaattgaatgaattagttagtgctattcatgaaaaggatgaccttttggattcccaagaggacctccttattaaggaaaataagaagcatgttaaggttaaaaatgcttatgctctagaaattgagaaatgtgaaaaattatctagtgagctaagcacttgccgtgagatgattgacaaccttaggaatgaaaatgctagtttaaatactaaggttaattctcatgtttgcaatgtttcaacttcaaatcctaaagataataatgatgatttgcttgctaggattgaagaattgaacatatctcttgctagccttagaatagaaaatgaaaatttaattgctaaggctaaagattttgatgtttgcaaagttgcaatttccgatcttagagataaaaatgatattcttcatgctaagattgttgaacttaattcttgcaaaccctctacatctattgttgagcatgtatctatttgtactagatgtagagatgttgatattaatgctattcatgatcatatggctttaattaaacaacaaaacgatcatatagcaaaactagatgctaaaattgccgagcacaacttagaaaatgagaaatttaaatttgctcgtagcatgctttataatgggagacgcccgggcatcaaggatggcattggcttccaaaagggagacaatgtcaaaaataatgcccctcctaaaagattgtccaactttgttaagggcaaggctcccatgcctcaggataacgagggttacattttgtaccctgccggttatcctgagagcaaaattaggagaattcattctaggaagtctcactctggccctaatcatgcttttatgtataagggtgagacatctagctctaggcaaccaacctatgctaagttgcctagaaagaaaattcctaatgcatcaaatgatcataacatttcattcaaaacttttgatgcatcttatgttttgactaacaaatccggcaaggtttatgcatccgggggctcaagttggatactcgacagcgggtgcacaaaccacatgacaggggagaagaagatgttctcctcatatgagaaaaaccaagatccccaaagagcgatcacattcggggatggaaatcaaggtttggtcaaaggtgtcactgtctttagaagaagtgatgattcaatagcatttaagggagtgttagagggtcagctatacttggtagtttttgatagagctgaactcgacacttgcttaattgctaagactaacatgggttggctctggcaccgccgactagcccatgttggaatgaagaatcttcataagcttctaaagggagagcacattttaggactaaccaatgttcattttgagaaagacaggatttgtagcgcatgccaagcaggaaagcaagttggctctcatcatccacataagaacataatgacgaccgacaggccactggagctcctacacatggatctattcggcccgatcgcttgcataagcatcggcgggagtaagtactatctagttattgtggatgattattctcgcttcacttgggtattctttttgcaggaaaaatctcaaacccaagagaccttaaagggattcttgagacgggctcaaaatgagttcggcttaaggatcaagaaaataagaagcgacaacgggacggagttcaagaactctcaaattgaaggcttccttgaggaggagggcatcaagcatgagttctcttctccctacactccacaacaaaatggtgtagtggagaggaagaatcgaactctattggacatggcaagaaccatgcttgatgagtacaagacaccggaccggttttgggccgaagcggtcaacaccgcctgctacgccatcaaccggttatatcttcaccgaatcctcaagaagacatcatatgaactcctaaccggtaaaaagcccaacatttcatactttagagtttttggtagcaaatgctttattcttgttaaacggggtagaaaatctaaatttgctcctaaaactgtagaaggctttttacttggttatgactcaaacacaagggcatatagagtctttaacaagtcctcaggactagttgaagtttcttgtgacgttgtgtttgatgagactaacggctctcaagtagagcaagttgatcttgatgagataggtgaaaaacaggctccatgcatagcgctaaggaacatgtccattggggatgtgtgtcctaaggaatccgaagagcctccacatacacaagatcaaccatcctcctccacgctagcatctccaccaactcaaaatgagaatgaagctcaagttgatgaagaagaagatcaatcaaatgagccacctcaagatgatggcaatgatcaagggggagatgcaaataatcaagaaaaggaggataagcaagaaccaaggccgccacacccaagagtccaccaagcaatccaacgagatcaccccgtcgacaccatcctcggcgacattcataagggggtaactacaagatctcgggttgcacatttttgtgaacattactcgtttgtttcctctattgagccacacaggatagaggaagcactccaagattcggattgggtggtggcaatgcaagaggagctcaacaacttcactagaaatgaggtatggcatttagtcccacgtcctaatcaaaatgttgtaggaaccaaatgggtcttccgcaacaagcaagacgagcatggtgtggtgacaaggaacaaagctcgacttgtggccaagggatactcccaagtcgaaggtttggatttcggtgaaacctatgcacccgtagctaggcttgagtcaattcgcatattattggcctatgctacttaccatggctttaagctttatcaaatggacgtgaaaagtgcctttctcaatggaccaatcaaggaagaggtctatgttgagcaacctcccggctttgaagacagtgagtatcctaaccatgtttataagctctctaaggcgctttatgggctcaagcaagccccaagagcatggtatgaatgccttagagatttccttattgataatggcttcaaagtcggtaaagccgatcctacactctttactaaaactcttgaaaatgacttgtttgtatgccaaatttatgttgatgatattatatttgggtctactaacgagtctacttgtgaagagtttagtaggattatgacacagaaattcgagatgtctatgatgggggagttgaagtatttcttaggattccaagtgaagcaactccaagagggcaccttcattagccaaacgaagtatactcaagacattctaaacaagtttgggatgaaggatgccaagcccatcaaaacacccatgggaaccaatgggcatctcgacctcgacacgggaggtaagtccgtagatcaaaaggtataccggtcgatgataggttctttactctacttatgtgcatctcgaccggatattatgctttccgtatgcatgtgtgcaagattccaagccgaccctaaggaagctcaccttacggccgtgaaacgaatcttgagatatttggcttatactcctaagtttgggctttggtatcctaggggatccacatttgatttgattggttattcggatgccgattgggcggggtgcaaaatcaataggaagagcacatcggggacttgccagttcttgggaagatccttggtgtcttgggcttcaaagaagcaaaattcggttgctctttccaccgccgaagccgagtacattgccgcaggccattgttgcgcgcaattgctttggatgaggcaaaccctgcgggactacggttacaaattgaccaaagttcccttgctatgtgataatgagagtgcaatcaaaatggccgacaatcccgtcgagcatagccgcactaaacacatagccatccggtatcattttcttagggatcaccagcaaaagggagatatcgagatttcttacattaacactaaagatcaattagccgatatctttaccaagcctcttgatgaacaatcttttaacaaacttaggcatgagctcaatattcttgattctagaaatttcttttgctag

SEQ ID NO: 4925 - DNA, 753 bp, Zea mays
  Clone ID: TF_ZM4932.C2.o20.fg
atgtcgggagctcacgccaagaaggagatggtgactggcgagaagcccgccacaagccacgggaaagctccatcgggagagtccggcaacaagaagagggaggaatcacctccccgtgtcaagttgcaccggagtggcgacaagaagaaaatgaagaaagtggtctactacgagaccaattcttcatcgccttccacctccaacttcgacacgccgtccgtcacttctaagcgccatgagcgcaagaagtttagctccaaacaaatcatcgagcgagacgccacctccacacccgaggtgcaacccgtcaccttcaaagcgatggaggagaagaaggaagagtcttcatcgagtaggcttcccatcgacacctccaagatcgataatgaggagatggcgctcatcatcaagagcttccgtcaaatcctcaaacaacggaaggggagagactacaagccccgttccaagaaggtttgctacaagtgtggtaagcccggtcactttatagcaaaatgtcctatttctagtgatagtgacaggggcgacgacaagagagggaagaaggagaagaagaggtactataagaagaaggacggtgatgcccatatttgtcgggagtgggactccaacgagagctccaccgactcctcctccgacgaggacgccgccaacatcgccgtcaacaagggtctcctcttccgcaacgtcggccacaagtgcctcatggcaaaggaaggcaaaaagaagccttaa

SEQ ID NO: 4926 - DNA, 2802 bp, Zea mays
  Clone ID: TF_ZM4948.C2.o1.fg
atgaagaaagtggtctactatgagaccgattcttcgtcgccctccacctccggctccgacgcaccgtccgtcacttctaagcgccgtgagcgcaagaagtttagtaagatccccttacgctatccccgcatttccaaacgcactcctttactttccgtcccattaggcaaaccaccagtttttgacggtgaagattattgtatgtggagtgataaaatgaggcatcatctaacctcactccacgctagcatttgggacattattgagtttggaacgcaggagtataataaggtgcaagggctaaaaagtgccaaagagatttggaacgtactaaagaccgcacatgaaggggatcaggtgaccaagatcaccaagcgggagacgatcgaggggaagctcggtcgattcatcctcaaccaaggagaggagccagaagcaatgtacaaacggctcaagaccttggtcaaccaagtgcgcaacctcaggagcacaaaatgggatgaccatgaaatggtcaaggttattctaagatcacttgttttttgtaatcctacacaagttcaattaattcgtggtgatcctagatataagctaatgtctcccgaggaagtgataggaaagtttgtgagctttgagttgatgatcaaaggctccaaacaaatcatcgagcaaggcggcacctccacacccgaggtgcaacccgtcgcattcaaagcgacagaagaaaagaaggaagagtctacgtcaagtaggctccccatcgacgcctccaagctcaacaacgaggaaatggcgctcatcataaagagcttccgccaaatcctcaaacaaaggacggggaaggattacaaaccccgctccaagaaagtatgctacaaatgtggtaagcccggtcactttattgctaaatgtcctatatctagtgatagtgacagggacaacaacaagagggggaagaagaaggagaagaagagatattataagaagaagggtggtgatgcccacgtgtgtagggaatgggactccgatgagagctccaccgactcctcctccgacgaggacgccacaaagatcaccgtcaacaaaggcctccttttccccaacgtcggccacaggtgcctcatgaccaaggacaacaaaaagaagaaggtaaaatctagagcctccagtaaatatacaacatctagtgatgagggtaactctagtgaagatgaggatgatttgcttaatgtttttgccaaccttaacatgcaacaaaaggaaaaactaaatgaactgataggtgctattcatgagaaggatgaactcttggatagccaagaggaattccttattaaggaaaacaagaagcatgttaaggtaaagaatgcttatgctcaggaagtagaaaagaatgaaaatttgactaaggagcttagcatttgccatgacaaaatttccaaccttagaaatgaaaacggtaatttatttgctaaggttgaaaaatcaaatgtctgtcatgattcaattgtcaatcttaaaaatgataatgctagtttgattgctaagattggtaaattgaatgaatcaatttctagccttaaaattgaaaacgctagtttaatttcaaaggctaaagatttaaatgtttgcaatgcttctatttccaatcttagaaatgagaatgctattttacatgctaagattgatgaattaaatgtttccaaaccctctacatccattgttgatcatgtttctatttgcatgagatgtagagacattaatgttgatgctattcatgatcacctagccttaattaaacaacaaaatgatcacatagctcaactaactagtaaaattaatgagcatgagatagagaatgaaaaaaataaatttgctagaagcatgctctataataggagacgccctggcattaaggatggcattggcttccagcagggagacaatgtcaagcttaatgcccctaagagattgtccaattttgttaagggtaaggctcccatggctcaggataacgagggttatattttatatcctgttggttatcctgagcacaagattaggagaattcatgcaaagaagtcccattctatttctcaccatgcttttatgtataagaatgaggcttctaggacttttgatgcatcttatgtgctgactaacaaatcaggcaaagtagttgccaaatatgttgggggcaaacacaagggctccaagagttgtgtttgggtacccaaggtttatgaatctgggggctcaagttggatcattgatagcggatgcacaaaccacatgacaggggagaaaaggatgttctcctcctacgagaaaacgatgatccccaaagagctatcacattcagggatggaaatcaaggaaaaatctcaaatccaagagaccttaaagggattcttgagacggactcaaaatgagtttggattaagaatcaagaagataagaaacgacaatggaacggagttcaagaactctcaaattgaaggcttccttgaggatgagggcatcaaacatgagttctcttctccctacacacctcaacaaaatggtgtagtggagaggaagaatagaactctacttgacatggcgaggaccatgcttgatgattacaagactccggaccgattttgggctgaggcaattaacgccgcctgctactccatcaaccggctctatcttcaccgaatcctcaagaagacatcatatgaactcctcaccggtaaaaagtccaatgtttcatattttagagtctttggtagtgaaagtcgcctagaggggggtgaatag

SEQ ID NO: 4927 - DNA, 8307 bp, Zea mays
  Clone ID: TF_ZM4949.C2.o4.fg
atgtcgggagatcacgccaagaaggagatggagaccggcgaaaagcccactacaagccacgggagcacttcatcggaagagtcccgcaccaagaggaaggagaagaaaaagagctcctccaacaaagggaaggagaagaaatcttcttcgcaccacaaggagaagaaggagagatcttcctcccacaagccacatcggagaggggacaagcacaaaaggatgaggaaagtggtctactatgagaccgacacttcatcaacatcgacctccggctccgatgcgccctccgtaacttctaaacgccaagagcgtaagaagtttagtaagatccccctacattaccctcgcatttctaaaaatgcacctttactttccgtcccattaggcaaaccaccaacttttgatggtgaagattatgctaggtggagtgatttaatgcgatttcatctaacctcactccacaaaagtatatgggatgttgttgagtttggtgcacaggtaccatccgtaggggataaagactatgatgaggatgaggtggcccaaatcgagcacttcaactctcaagcgacaacaatactcctcgcatctttaagtagagaggagtataacaaagttcaagggttgaagagcgcaaaggaggtttgggatgtgctcaaaaccgcgcacgagggagatgagctcacaaagatcaccaagcgggaaacgatcgagggggagctcggtcggttccgacttcgcaaaggggaggagccacaacacatgtacaaccggctcaagactttggtgaaccaagtgcgcaacctcgggagcacgaagtgggacgaccacgaaatggttaaggttattctaagatctctcattttccttaaccccactcaagttcaattaattcgtggtaatcctagatatactaaaatgacccccgaggaagttatcgggaattttgtaagttttgagtgcatgatcgaaggctcgaggaagatcaacgagcttgatgatccatccacatccgaagctcaacccgtcgcattcaaggcgacggaggaaaagaaggaggaggctacaccaagtcgacaacctatagacgcctccaagctcgacaatgaggaaatggcgctcgtcatcaagagcttccgccaaatcctcaagcaaaggagagggaaagactacaagtcccgctccaagaaggtttgctacaaatgtggtaagcccggtcattttattgctaaatgtcctatatcaagtgacagtgaccgaggcgacgacaagaaggggagaagaaaggagaaaaagaagtactacaagaagaagggcggcgatgcccatgtttgtcgggagtgggattccgacgaaagctcaagcgactcctccgacgacgaggacgccgccaacatcgccgtcaccaagggacttctcttccccaacgtcggccacaagtgcctcatggcaaaggacggcaaacggaagaaggttaaatctaactcctccactaaatatgagtcttctagtgatgataatgatagtgatgaggaggataatttgcgtgttctctttgccaatcttaacatggagcaaaaagaaaaattaaatgaattgattagtgctattcatgaaaaggatgaccttttggactcccaagaggattgtctaattaaagaaaacaagaaacatgttaaggttaaaaaggcttatgctctagaagtagaaaaatgtgaaaaattatctagtgagctaagcacttgccgtgagatgattgacaaccttaggaatgaaaatgctagtttaaatgctaaggttgattctcatgtttgcattgtttcaacttccaatcctaaagataataatgatgatttgcttgctaggattgaagaattgaatatttctcttgctagccttagagtagaaaataaaattttaattgctaaggctaaagattatgatgtttgcaaagttacaatttccgatcttagagataaaaatgatattcttcatgctaagattgttgaacttaattcttgcaaaccctctacatctattgttgagcatgtatctatttgtactagatgtagagatgttgatgttaatgctattcatgatcatatggctttaattaaacaacaaaatgatcatatagcaaaactagatgctaaaattgccgagcacaacttagaaaatgagaaatttaaatttgctcgtagcatgctttataatgggagacgccctggcattaaggatggcattggcttccaaaggggagacaatgtcaaaattaatgcccctcctaagaacttgtctaactttgttaagggcaaggctcccatgcctcaggataacgagggctacattttgtaccctgccggctatcctgagagcaaaattaggaaaattcattctaggaagtctcactctggccctaatcatgcttttatgtataagggtgagacatctagctctaggcaaccaacccgtgccaagttgcctagaaagaaaactcctaatgcatcaaatgatcatgccatttcatttaaaacttttgatgcttcttatatgcttactaacaaatccggcaaggtttatgcatccgggggctcaagttggatactcgacagcgggtgcacaaaccacatgacaggggagaaaaagatgttctcctcatatgagaaaaaccaagatccccaacgagctatcacattcggggatggaaatcaaggtgtcactgtctttagaagaagtgatgattcaatagcatttaagggagtgttagagggtcagctatacttagtagattttgatagagctgaactcgacacttgcttaactgctaagactaacatgggttggctctggcaccgccgactagcccatgttggaatgaagaatcttcataagcttctaaagggagaacacattttaggattaacaaatgttcattttgagaaagacaggatttgtagcgcatgccaggcagggaagcaagttggagctcatcatccacacaagaacatcatgacgaccgacaggccactggagctcctacacatggatctattcggcccgattgcttacataagcatcggcgggagtaagtactgtctagttattgtggatgattattctcgcttcacttgggtattctttttgcaggacaaatctcatacccaagagaccttaaagggattcttgagacgggctcaaaatgagttcggcttaaggatcaagaaaattagaagcgacaatgggacggagttcaagaactcacaaatagaagtggagaggaagaatcgaactctcttggacatggctagaaccatgcttgatgagtacaagacaccggatcggttttgggccgaggcggtcaacaccgcttgctacgccatcaaccggttatatctacaccgaatcctcaagaagacatcctatgaactcctaaccggtaaaaagcccaacatttcctattttagagtttttggtagcaaatgctttattcttgttaaaagaggtagaaaatctaaatttgctcctaagactgtagaaggccttttacttggctatgactcaaacacaagggcatatagagtctttaacaagtccactggactagttgaagtctcatgtgacgttgtgtttgatgagactaacggctctcaagtagagcaagttgatcttgatgagataggtgaagaacaggctccgtgcatcgcgctaagaaacatgtccattggggatgtgtgccctaaggaattcgaagagcctccaaatacacaagatcaaccatcctcctccacgcaagcatctccaccaacccatgatgaggacgaggctcaagttgatgaaggagaggatcaaaaggatgagccacctcaagatgacggcaacgatcaagggggagatgcaaatgatgaagacaaggaggacgaacaaccaaggccgccacacccaagagtccaccaagcaatccaacgagatcaccccgtcgacaccattctcggtgacattcataagggggtaaccactcgatctcgtgttgcacatttttgtgagcattactcttttgtttcctctattgagccacacagggtagaggaagcactacaagattcggattgggtggtggcgatgcaagaggagctcaacaatttcacaaggaacgaggtatggcacttagttccacgtcctaaccaaaatgttgtaggaaccaaatgggtcttccgcaacaagcaagatgagcatggtgtggtgacaaggaacaaagctcgacttgtggccaaaggatactcccaagtcgaaggtttggatttcggtgaaacctatgcacccgtagctaggcttgagtcaattcgcatattattagcctatgctacttaccatggctttaagctttatcaaatggacgtgaaaagtgctttcctcaatggaccaatcaaggaagaggtctatgttgagcaacctcccggctttgaagatagtaagtaccctaaccatgtctataagctctctaaggcgctttatgggctcaagcaagccccaagagcatggtatgaatgccttagagatttccttatcgctaatggcttcaaagtcggcaaggccgatcctactctattcactaagactcttgacaatgatttgtttgaatttagtaggatcatgacacagaaattcgagatgtctatgatgggggagttgaagtatttcttaggatttcaagtgaagcaactccaagagggcaccttcatttgtcaaacaaagtacactcaagacattctaaccaagtttggaatgaaggatgccaagcccatcaagactcccatgggaacaaatgggcatctcgacctcaacacgggaggtaagtccgtggatcaaaaggcgactttcaacagtgacaggggcgacgacaagaagggaaagaggagagaaaagaagaagtactacaagaagaagggcggcgatgcccatgtttgccgggaatgggactccgacgagagctccaccgagtcctcttccgacgaggacgccgccaacatcgccgtcaccaagggacttctcttccccaacgtcggccacaagtgcctcatggcaaaggacggcaaaaggaagaaggttaaatctaagtcctccacgaaatatgaatcctctagtgatgataatgctagtgatgaggagaataatttgcgtaccctttttgccaaccttaacatggaacaaaaggaaaaactaaatgagctaattagtgccatccatgaaaaggatgacctcttggactcccaagaggacttcctaatcaaggaaaataaaaagcatgtagaaaaatgtgagaaattatctagtgagctaagtacttgccatgatactattaccaaccttagaaatgaaaatgctagtttaaatgctaaggttgactcacatgtttgtaatgtttcaattcccaatcttagaaatgataatgatgatttgcttgctaagattgaagaattaaacatttctcttgctagccttagagtagaaaatgaaaatttaattgctaaggctaaagaactagatgtttgcaatgttacaatttccgatcttagagataataatgatatcttgcgtgctaagatcgttgaacttaattcatgcaaaccctctacatctagtgttgagcatgtttccttttgtactagatgtagagatgttgatattaatgctattcatgatcacatgactttgattaaacaacaaaatgatcatatagcaatattagatgcaaaaattgccgagcataacttagaaaatgaaaagtttaaatttgctagaagtatgctctataatgggagacaccctggcattaaggatggcattggctaccaaaggggagacaatgtcaaacttagtgcccctcctaaaagattgtcaaattttgttaagggcaaggctcccatgcctcaggataacgagggttacattttataccctgccggttatcctgagagcaaaattaggaaaattcactctaggaagtctcactctggccctaaccatgcttttatgtataagggtgagacatctagctctaggcaaccaacccgtgctaagttgcctaagaagaaaactcctagtgcatcaaatgagcatgacatttcttttaaaacttttgatgcatcatatgttttaactaacaaatccggcaaggtttatgcatccgggggctcaagttggatactcgacagcgggtgcacaaaccacatgacaggggaaaagaagatgttctcctcttatgagaaaaaccaagattcccaacgagctatcacattcggggatggaaatcaaggtgtcactgtctttagaagaagtgatgattcaatagcatttaagggagtgttagagggtcagctatacttggaaaaatctcaaacccaagagaccttaaagggattcttgagacgggctcaaaatgagttcggcttaaggatcaagaaaataagaagcgacaacgggacggagttcaagaactcacaaatagaaggtttccttgaggaggaggggatcaagcatgagttctcttctccctacacgccacaacaaaatggtgtagtggagaggaagaatcgaactctattggacatggctagaaccatgcttgatgagtacaagacaccggatcggttttgggccgaggcgagaggtagaaaatctaaatttgctcctaaaactgtagaaggctttttactaggatatgattcaaacacaagggcatatagagtctttaacaagtcctcaggactagttgaagtttcttgtaacgttgtgtttgatgaaactaacggctctcaagtagagcaagttgatcttgatgagataggtgaagaacaggctccgtgcatcgcgctaaggaacatgtccattggggatgtgtgccctaaggaattcgaagagcctccaaatacacaagatcaaccatcctcctccacgcaagcatctccaccaactcaaaatgaggacgaggctcaagttgatgaaggagaagatcaaagagatgagccacctcaagataatggcaatgatcaagggggagatgcaagtgatcaagacaaggaggatgaacaaccaaggccgccacacccaagagtccaccaagcaatccaacgagatcaccccgtcgacaccatcctcggcgacattcataagggggtaaccactcgatctcgggttgcacatttctgtgagcattactcttttgtttcctctattgagccacacaggatagaggaagcacttcaagattcggattgggtgatggcgatgcaagaagagctcaacaacttcttgaggaacgaggtatggcatttagttccacgtcctaaccaaaatgttgtaggaaccaagtgggtcttccgcaacaaacaagacgagcatggtgtggtgactaggaacaaagctcgactcgtggccaagggatactcccaagtcgaaggtttggatttcggtgaaacctatgcacccgtagctaggcttgagtcaattcgcatattattagcctatgctacttaccatggctccaagctttaccaaatggacgttaagagtgccttcctcaatggaccaatcaaggaagaggtctatgttgagcaacctcccggctttgaagacagtgagtatcctaatcatgtctataggctctctaaggcgctttatgggctcaagcaagccccaagagcatggtatgaatgccttagagatttccttattgcaaatggcttcaaagtcggcaaggccgatcctactttattcactaaaactcttgacaatgatttgtttgtatgccaaatttatgttgatgatatcatatttgggtctactaacgaatctacatgtgaagaatttagtaggatcatgacacaaaaattcgagatgtctatgatgggggagttgaagtattttctaggattccaagtcaagcaactccaagagggcacctttatttgccaaacaaagtatacacaagacattttaaccaagtttggaatgaaggatgccaagcccatcaagacacccatgggaaccaatggacatctcgacctcaacaagggaggccaagtgcggaccgtccgggcccttgcggcggaccgtccgcaccaccaggatgaccctcggacaggaccaatgcaaaaatctaagtctgcactatggaccgtccgaaggaaaagagcggaccgtctgggacctcgcgcggaccgtccggcctcaggcgcggaccgtccggcgcggaccgtccggaccaggcaggcggaccgtccgcggtcggcagaatggagcaacggctag

SEQ ID NO: 4928 - DNA, 3567 bp, Zea mays
  Clone ID: TF_ZM4960.C1.o10.fg
atgtcaggaaatcacgccaagaaggagatggagaccggcgacaagcccgctacaagccacgggaaggtttcatcggaagagtcccgcaacaaaaagaaagggaaggagaagaaagcctcctcccacaagtcgcatcggagtggggacaagaaaaagaagatgaggaaggtggtctactatgagaccgacacctcatcaccatctacctccggctccgacgcgccctccataacttctaagcgccatgagcgcaagaagtttagtaagatccccttacactaccctcgcacttctagacatactacattactttccgttccattaggcaaaccgccaacctttgacggtgaagattatgctaggtggagtgatttaatgaaatttcatctaacctcactccacaaaagtatatggaatgttgttgagtttggagcacatgtaccatccgtaggggatgaggattatgatgaggacgaggtggcccaaatcgagcacttcaactcccaagccacaacaatactcatcgcctctctaagtagggaggagtacaacaaggtgcaaggtctaaagagcgccaaggaagtttgggacgtgctcaaaaccgcgcacgagggtgatgaactcaccaagatcaccaagcgggaaacgatcgagggggagctcggtcgcttccgtctttgtcaaggggaggagccacaagacatgtacaaccggctcaaaaccttggtgaatcaagtgcgcaacctcgggagcaaaaagtgggatgaccacgaggtggttaaggttattttaagatcacttattttccttaaccctactcaagtacaattacttcatggcaatccaagatatacactaatgactcccgaggaagtaatcgggaattttgtgagctttgaatttatgatcaagggctcacggaagatcaacgagcttgacagtccttctacgtccgatgctcaaccggtcgcattcaaagcgacggaagagaagaaggaggagtctacaccaagtagaacacccatcgacacctcgaagctcgacaacgaggaaatgacgcttgtcatcaaaagctttcgccaaatcctcaagcaaaggagggggaaatattacaagccccgctccaagaaggtttgctacaagtgtggtaagcccggtcactttatagcaaaatgtcctatttctagtgacagtgacaggggcgacgacaagaagggaagaagaaaagagaagaagaggtactacaagaagaagggcggcgatgcccatgtttgtcgcgagtgggactccgacgaaagctctagtgactcctccgacgacgaggacaccgccaacatcgccgtcaccaagggacttctcttccccaacgtcggccacaagtgcctcatggcaaaggacggcaaaaagaaaaaggttaaatctaaatcctccactagatatgaatcctctagcgatgataatgctagtgatgaggaagataatttacgtaccctttttgccaacttaaacatgcaacaaaaagagaaattaaatgaattaattagtgccatccatgagaaggatgatctcttggactcccaagaggacttcctaatcaaggaaaacaaaaagcatgttaaagttaaaaatgcttattctctagaagttgaaaaatgcgaaaaattatctagtgagctaagcacttgccatgagactatagacaaccttagaaatgagaatgctaatttgttagctaaggttgattctattgcttgtaatatttcaatttccaatcctagaaatgataatgatgatttgcttgctaggattgaagaattgaatatatctcttgctagccttagagatgaaaatgaaaaattgcttgctaaggctaaagaactagatgtttgcaatgttacaatttccgaccttagaactaaaaatgatattttgcatgctaaggttgtagaattgaaatcttgcaaaccctctacatctaccgttgagcacactactatttgcactagatgtagagatgttgatattaatgctatacatgatcatatggctttaattaaacaacaaaatgatcatatagctaaactagatgcaaaaatcgccgagcatgaaattgaaaatgaaaaatttaaatttgctcgtagtatgctttataatgggagaggtcatggcattaaggatggcattggcttccaacagggaggcaatgtttatgcatcagggggctcaagttggatcatcgatagcgggtgcacaaactacatgacaggggagaaaaagatgttctcgtcctacgagaaaaaccaagatccccaaagagctatcacattcggggatggaaatcaaggtatcattgtctttagaagaagtgatgattcaatagcatttaagggagtgttagagggtcagctatacttggtagattttgatagagctgaactcgacacttgcttaattgctaagactaacatgggttggctatggcaccgtcgactagcccatgttgggatgaagaatcttcacaagcttctaaagggagagcacattttaggattgacaaatgttcattttgagaaagacaggatttgtagcgcatgccaagcagggaagcaagttggtgctcaccatccacacaagaacatcatgacgaccgacaggccactggagctcctacatatggatctattcggcccgatcgcttacaaaagcatcgacgggagtaagtactgtctagttattgtggatgattattctcgattcacttgggtgttctttttgcaggaaaaatctcacacccaagagaccttaaagggattcttgagacgggctcaaaatgagttcggcttaaggatcaagaaaattagaagcgacaacgggacgaagttcaagaactctcaaattgaaggctttcttgaggaggagggcatcaagcatgagttctcttctccctacacgccacaacaaaatggtgtagtggagaggaagaatagaactctattggacatggcaagaaccatgtttgatgagtacaagacttcggatcggttttgggccgaggcggtcaacaccgcctgctacgccatcaaccggttatatctacaccgaatcctcaagaagacgtcatacgaactccttaccggtaaaaatcccaatatttcatattttagagtctttggtagcaaatgctttattcttattaaaagaggtagaaattataaatttgctcctaagactgtagaaggctttttactaggatatgattcaaacacaagggcatatagagtctttaacaagtcctctagacaagttgaagtttcttgtgacgttgtgtttgatgagactaacggctctcaagtagagcaagttgatcttgatgagataggtgatgaagaggctccgtgcatcgcgctaaggaacatgtccattggggatgtgtgtcctaaggaatccaaagagcctccaaatgcacaagatcaaccatcctcctccacgcaagcatctccaccaactcaaaatgaggatgaagctcaagttgatgaaggagaagatcaagcaaatgagccatcttga

SEQ ID NO: 4929 - DNA, 4404 bp, Zea mays
  Clone ID: TF_ZM4981.C2.o9.fg
atgtcgggagatcacgccaagaaggagatggagaccggcgaaaagcccactacaagccacaggaaggcttcatcggaagagtcccgcaagaaaggaaaggggaaggagaagaaagcttcttcccacaagtcgcatcggagtggcgacaagataaagaagatgaggaaggtggtctactacgagaccgacacttcatcaccttccaccttcggctccgacgcgccctccgtaacttctaagcgccatgagcgcaagaagtttagtaaaattcccctacgctaccctcgcatttctaaacatacacctttacttttcgtcccattaggcaaaccaccaacttttgatggtgaagattatgctaggtggagtgatttaatgcgatttcatctaacctcactccacaaaagtatatgggatgttgttgagtttggtgtacaggtaccatccgtaggggatgaagactttgatgtggatgaagtggcccaaatcgagcacttcaactcccaagccacaaccatactcctcgcctctctaagtagggaggagtacaacaaggtgcaaggattaaagagcgccaaggaagtttgggacgtgctcaagaccgcgcacgagggtgatgagctcaccaagatcactaagcgggaaacgatcgagggggagctcggtcgctttcgtcttcgccaaggggaggagccacaagatatgtacaaccggctcaaaaccttggtaaaccaagtgcgcaacctcgggagcaagaaatgggatgatcacgaggtggttaaggttattctaagatcactcattttccttaaccctactcaagtacaattaattcgtggtaatcctagatatacactaatgactcccgaggaagtaatcgggaattttgtgagctttgaatttatgatcaagggctcacggaagattaacgagcttgacgatccttctacgtccgaagctcaaccggtcgcattcaaagcgacggaggaaaagaaggagtctacaccaagtagaacacccatcgacgcctccaagctcgacaacgaggaaatggcgctcgtcgtcaagagcttccgccaaatcctcaagcaaaggagggggaaagactacaaaccccgctccaagaaagtatgctacaaatgtggtaagcccggtcattttattgcaaaatgtcctatttctagtgacagtgacaggggcgatgacaagaaggggagaagaaaagagaagaagaggtactacaagaagaagggcggcgatgcccatgtttgtcgcgagtgggactccgacgaaagctcaagcgactcctccgacgacgaggacgccgccaacatcgccgtcaccaagggatttctcttcgccaacgtcggccacaagtgcctcatggcaaaggacggcaaaaagaagaaggttaaatccaaatcctccactagatatgagtcctctagtgatgataatgctagtgatgaggaagataatttgcgtactctttttgccaacttaaacatgcaacaaaaggagaagttaaatgaattaattagtgccattcatgagaaggatgatctcttggactcccaagaggacttcctaatcaaggaaaacaaacagcatgttaagggcaaggctctcatgcctcaggataacgagggttacattttgtaccctgccggttatcccgagagcaaaattaggagaattcactctaggaagtctcactctggccctaatcatgcttttatgtataagggtaagacatctagctctaggcaaccaacccgtgctaagttgcctaagaagaaaactcctaatgcatcaaatgatcatgacatctcatttaaaacttttgatgcatcatatgttttaactaacaaatccggcaaggtttatgcatccgggggctcaagttggataatcgacagcgggtgcacaaaccacatgacaggggagaagaaaatgttctcctcctatgagaaaaaccaaaatccccaacgagctatcacattcggggatggaaatcaaggtgtcactgtctttagaagaagtgatgattcaatagcatttaagggtgtgttagagggtcagctatacttggtagattttgatagagctaaactcgacacatgcttaattgctaatactaacatgggttggctctggcaccgccgactagcccatgttgggatgaagaatcttcacaagcttctaaagggagagcacattttaggattaacaaatgttcattttgagaaagacaggatttgtagcgcatgccaagcagggaagcaagttggtgcccatcatccacacaagaacatcatgacgaccgacaggccactggagctcctacacatggatctattcggcccgatagcttacataagcatcggcgggaaaacattaaagggattcttaagacgagctcaaaatgagttcgacttaaggatcaaaaagattagaagcgacaacgggacggagttcaagaactcacaaattgaaggctttcttgaggaggagagcatcaagcatgagttctcttctccctacaccccacagcaaaatggtgtagtggagaggaagaatagaactctattggacatggcaagaaccatgcttgatgagtacaagacttcggatcggttttgggccgaggcggtcaacaccgcctgctacgccatcaaccggttgtatctacaccgaatcctcaagaagacatcatacgaactcctaaccggtaaaaagcccaatatttcatattttagagtctttggtagcaaatgctttatacttgttaaaagaggtagaaaatctaaatttgctcctaagactgtagaaggctttttactaggatatgattcaaacacaagggcatatagagtctttaacaagtcctctggacaagttgaagtttcttgtgacgttgtgtttgatgagactaacggctctcaagtagagcaagttgatcttgatgagataggtgatgaagaggctccgtgcatcgcgctaaggaacatgtccattggggatgtgtgtcctaaagaatccgaagagcctccaaatgcacaagatcaaccatcctcctccacgcaagcatctccaccgactcaaaatgaggatgaggctcaaatggatgaaggagaagatcaagcaaatgagccacctcaagatgacggcaatgatcaagggggagatgcaaatgagcaagacaaggaggatgaagagcaaaggccgccacacccaagagtccaccaagcaatccaacaagatcaccctgtcgacaccatcctcggcgacattcataaggggggtagaggaagcactacaagattcggattgggtgatggcgatgcaagaggagctcaacaacttcacaaggaaggaggaaccaaatgggtgttccgcaacaagcaagatgagcatggtgtggtgacaaggaacaaagctcgacttgtggccaaaggatactcccaagtcgaaggtttggatttcggtgaaacctatgcacctgtagctaggcttgagtcaattcgtatattattggcctatgctacttaccatggcttcaagctttatcaaatggacatgaagagtgccttcctcaatggaccaatcaaggaagaggtctatgttgagcaacctcccggctttgaagatagtgagtaccctaaccatgtctataaactctcaaaggcgctttatgggctcaagcaagctccaagagcatggtatgaatgccttagagatttccttatcactaatggattcaaagtcggaaaagccgatcctacactcttcactaaaactcttgaaaatgacttgtttgtatgccaaatttatgttgatgatattatatttgggtctactaacgagtctacatgtgaagaatttagtaggatcatgacacaaaagtttgagatgtcaatgatgggggagttgaagtacttcttaggatttcaagtaaagcaactccaagagggcaccttcctaagccaaacgaagtatactcaagacattctaagcaagtttggaatgaaggatgccaaacccatcaagacacccatgggaaccaatgggcatctcgacctcgacgaaggaggtaaatccgtcgatcaaaaggggaggtgccaaaggttcatctacaactatactaaatcgactgtccggaataccgtagattattccggacaggagaagctttttgaaaaaacaggccaagcacggaccgtccgggcccttgcggtggaccgtccgcaacaccaggatgaccctcggacagaaccaatgcaaaaatccaagtctgtactacggaccgtccggaggaaaagcaaggaccgtctgagacctcgcgcggaccgtcctgtaggtaaggaaccgaaaaacccgaaggtgacaggttcggaaaaatga

SEQ ID NO: 4930 - DNA, 4845 bp, Zea mays
  Clone ID: TF_ZM4990.C2.o4.fg
atgtcgggagatcacgccaagaaggagatggagaccggcgaaaagcccactacaagccacgggagcacttcatcggaagagtctcgcaccaagaggaaggagaagaagaagatctcctccaacaaagggaaggagaagaaatcttcttctcaccacaaagagaagaaggaaaaatcttcttcccacaagcctcgtcggagtggggacaagcaaaagaggatgaggaaagtggtctactacgagaccgacacttcatcaacatcgacctccgactccgatgcgccctccgtaacttctaaacgccaagagcgtaagaagtttagtaagatccccctacactaccctcgcatttctaaacatgcacctttactttccgtcccattaggcaaaccaccaacttttgatggtgaagattatgctaggtggagtgatttaatgcgatttcatctaacctcactccacaaaagtatatgggatgttgttgagtttggtgcacaggtaccgtccgtaggggacaaggattatgatgaggatgaggtggcccaaatcgagcacttcaactctcaagcgacaacaatactcctcgcctctttaagtagagaggagtataacaaagttcaagggttgaagagcgccaaagaagtttgggatgtgctcaaaaccgcgcacgagggagacgagctcacaaagatcaccaagcgggaaacgatcgagggggagctcggtcggttccggcttcgcaaaggggaggagccacaacacatgtacaaccggctcaagaccttggtgaaccaagtgcgcaacctcgggagcgtaaagtgggacgaccacgaaatggttaaggttattctaagatctctcattttccttaaccccactcaagttcaattaattcgtggtaatactagatatactaaaatgacccccgaggaagttatcgggaattttgtaagttttgagtgcatgatcgaaggctcgaggaagatcaacgagcttgatgatccatccacatccgaagctcaacccgtcgcattcaaggcgacggaagaaaagaaggaggaggctacaccaactcgacaaccaatagacgcctccaagctcgacaatgaggaaatggcgctcgtcatcaagagcttccgccaaatcctcaaacaaaggagggggaaagactacaagtcccactccaaaaaggtttgctacaaatgtggtaagcccggtcattttattgctaaatgtcctatatctagtgacagtgaccgaggcgacgacaagaaggggagaagaaaggagaagaagagatattacaagaagaagggcggcgatgcccatgtttgtcgggagtgggattccgacgaaagctcaagcgactcctccgacgacgaggacgccgccaacatcgccgtcaccaagggacttctcttccccaacgtcggccacaggtgtctcatggcaaaggacggcaaacggaagaaggttaaatctaactcctccactaaatatgaatcttctagtgacgataatgctagtgatgaggaggataatttgcgttccctttttgccaaccttaacatagctcaaaaggaaaaattaaatgaattggttagtgctattcatgaaaaggatgaccttttggattcccaagaggacctccttattaaggaaaataagaagcatgttaaggttaaaaaggcttatgctcttgaaattgagaaatgtgaaaagttatctagtgagctaagcacttgccgtgagatgattgacaaccttaggaatgaaaatgctagtttaaatactaaggttgattcacatgtttgcaatgtttcaacttcaaatcctagagacaataatgttgatttacttgctaggattgatgagttgaatgcttccctagctagccttagaattgaaaatgaaaaattgcttgctaaggctaaagattttgatgtttgcaatgctacaatttccgaccttagaactaagaatgacatgttacatgctaaggttgttgaattaaaatcttgcaaaccctctacatctatcgttgagcatgtatctatttgcactagatgtagagatattaacattgatgctattcatgatcatatggctttaattaaacaacaaaatgatcatatagcaaaactagatgctaaaattgccaagcacaacttagaaaatgagaaatttaaatttgctcgtagcatgctttataatgggagacgcccgggcatcaaggatggcattggcttccaaaggggagacaatgtcaaaattagtgccccacctaaaagattgtccaactttgttaagggcaaggctcccatgcctcaggataacgagggttacattttgtaccctgccggttatcccgagagcaaaattaggagaattcattctaggaagtctcactctggccctaatcatgcttttatgggctcaagttggatactcgacagcgggtgcacaaaccacatgactggggagaagaagatgttctcctcctacgagaaaaaccaagatccccaacgagctatcacattcggggatggaaatcaaggtgtcactgtctttagaagaagtgatgattcaatagcatttaagggtgtgttagagggtcagctatacttagtagattttgaaagagctgaactcgacacatgcttaattgctaagactaacatgggttggctctggcaccgccgactagcccatgttggaatgaagaatcttcataagcttctaaagggagaacacattttaggactaacaaatgttcattttgagaaagacaggatttgtagcgcatgccaagcaggaaagcaagttggctcgcatcatccgcataagaacataatgacgaccgacaggccactggagctcctacacatggacctattcggcccgatcgcttacataagcatcggcgggagtaagtactgtcttgttattgtggatgattattctcgcttcacttgggtattctttttacaggaaaaatctcaaacccaagagaccttaaagggattcttgagaagggctcaaaatgagttcagcttaaggatcaagaaaataagaagcgacaacgggacggagttcaagaactctcaaattgaaggcttccttgaggaggagggcatcaagcatgagttctcttctccctacacgcctcaacaaaatggtgtagtggagaggaagaatcgaactctattggacatggcaagaaccatgcttgatgagtacaagacttcggatcggttttgggccgaggcggtcaacaccgcttgctacgccatcaaccggttgtatctacaccgaatcctcaagaagacatcttatgaactcctaaccggtaaaaagcccaacatttcatattttagagtctttggtagcaaatgctttattcttgttaaaagaggtagaaaatctaaatttgctcctaagactgtagaaggctttttactaggatatgattcaaacacaagggcatatagagtctttaacaagtcctcaggacaagttgaagtttcttgtgacgttgtgtttgatgagactaacggctctcaagtagagcaagttgatcttgatgagataggtattgaagaggctccgtgcatcgcgctaaggaacatgtccattggggatgtgtgtcctaaggaatccgaagagcctccaaatgcacaagatcaaccatcctcctccacgcaagcatctccaccgactcaaaatgaggatgaagctcaagttgatgaagaagaagatcaatcaaatgagccacctcaagatgacggcatagatcaagggggagatgcaaataatcaagacaaggaggatgaagagcaaaggccaccacacccaagagtccaccaagcaatccaacgagatcaccccgtcgacaccatcctcggcgacattcataagggggtaactactcgatctcgtgttgcacatttttgtgaacattactcgtttgtttcctctattgagccacacaggatagaggaagcactcctagattcggattgggtggtggcaatgcaagaggagctcaacaacttcactagaaatgaggtatggcatttagttccacgtcctaaccaaaatgttgtaggaaccaaatgggttttccgcaacaagcaagatgagcatggtgtggtgacaaggaacaaagctcgacttgtggccaaaggatactcccaagtcgaaggtttggacttcggtgaaacctatgcacccgtagctaggcttgagtcaattcgcattttattggcctatgctacttaccatggctttaagctttatcaaatggacgtgaaaagtgccttcctcaatggaccaatcaaggaagaggtctatgttgagcaacctcccggctttgaagacagtgagtatcctaaccatgtctataaactctctaaggcgctttatgggctcaagcaagccccaagagcatggtatgaatgccttagagattttcttattgcaaatggattcaaagtcggaaaggccgatcctacactctttaccaaaacacttgaaaatgacttgtttgtatgccaaatttatgttgatgatattatatttgggtctactaacgagtctacatgtgaagagtttagtaggatcatgacacaaaagttcaagatgtctatgatgggggagttgaagtatttcttaggattccaagtgaagcaactccaagagggcaccttcattagccaaacgaagtacactcaagacattctaaacaagtttgggatgaaggatgccaagcccatcaagacacccatgggaactaatgggcatctcgacctcgacacgggaggtcatactgtcaatgacttatag

SEQ ID NO: 4931 - DNA, 5046 bp, Zea mays
  Clone ID: TF_ZM4995.C3.o9.fg
atgtcgagagaactcgccaagaaggagatgaagaccgacgacaagcccgctacaagccacgggaaggcttcatcggaagagtcccgcaacaaaaagaaagggaaggagaagaaagcctcctcccacaagtcgcatcggagtggcgacaagaaaaagaagatgaggaaggtggtctactacgagaccgacacttcatcgccatctacctccggctccgacgcgccctccataacttctaagcgtcatgagcgcaagaagtttagtaagatccccttacactatcctcgtacttctagacatactcaattactttccgttccattaggcaaactgccaacctttgatggtgaagattatgctaggtggagtgatttaatgaaatttcatctaacctcactccacaaaagtatatggaatgttgttgagtttggagcacaggtaccatccgtaggggatgaggattatgatgaggacgaagtagcccaaatcgagcacttcaactcccaagccacaaccatacttctcgcttctctaagtagagaggagtacaacaaggtgcaaggattaaagagcgccaaggaagtttgggacgtgctcaaaaccgcgcacgagggtgatgaactcaccaagatcaccaagcgggaaatgatcgagggggagctcggtcgcttccgtcttctccaaggggaggagccacaagacatgtacaaccggctcaaaaccttggtgaatcaagtgcgcaaccttgggagcaaaaagtgggatgaccacgagatggttaaggttattttaagatcacttattttccttaaccctactcaagtacaattgattcgtggcaatccaagatatacactaatgactcccgaggaagtaatcgtgaattttgtgagctttgaatttatgatcaagggctcacggaagatcaacgagcttgatggtccctccacgtccgaagctcaaccggtcgcatttaaggcgacggaggagaaaaaggaggagtctacaccaagtagacaaccaatcgacgcctccaagctcgacaatgaggaaatggcgctcgtcatcaagagctcccgccaaatcctcaaacaaaggagggggaaggactacaaacctcgctccaagaaagtgtgttacaaatgtggtaagcccggtcactttattgcaaaatgtcctatttctagtgacagaggcgatgacaagaaggggagaagaaaggagaagaggtactacaagaagaagggcggcggtgcccatgtttgtcgggagtgggactccgacgaaagctctagcgactcctccgacgacgaggatgccgccaacatcgccgtcaccaagggccttctcttccccaacgttggccacaagtgcctcatggcaaaggatgacaaaaagaagaaggttaaatctaaatcctccactagatatgaatcctctagcgatgattatgctagtgatgaggaagataatttgcgtactctttttgccaacttaaacatgcaacaaaaagagaagttaaatgaattgattagtgccatacatgagaaggatgacctcttggacacccaagaggacttcctaatcaaggaaaacaaaaaacatgttaaggttaaaaatgcttatgctctagaagttgaaaaatgtgaaaaattatctagtgagctaagcacttgccatgagaccattgacaaccttagaaatgagaatgctaatttgttagctaaggttgagtcaaatgtttgtaatgtttcaattccaaatgataatattgagttgctttctaaaatagaagaattgaacatttctcttgctagccttaggattgaaaataagaaattaattgctagggctaaagattttgatgtttgcaatgttacaatttccgatcttagagataaaaatgatatattgtgtgctaagattgttgaacttaattcttgcaaaccctctacatctaccgttgaacatacttctatttgtactagatgtagagatgttgatattgatgctattcatgatcatatggtattaattaaacaacaaaatgatcatatagcaaagttagatgcaaaaattgccgagcatgaaattgaaaatgaaaaatttaaatttgctcgtagtatgctttatagtgggagacgccctggcattaagaatggcattggcttccaacagggaggcaatgtcaaacttaatgcccctcctaagaaattgtccaactttgttaagggcaaggctcccatgcctcaggataacgagggttacattttgtaccctgccggttatcctgagagcaaaattaggagaattcattctaggaagtctcactctggccctaaccatgcttttatgtataagggtgagacatctagctctaggcaaccgacccgtgctaagttgcctaaaaggaaaactcctagtgcatcaaatgatcatgacatctcatttaaaacttttgatgcatcttatgttttaactaacaaatctggcaaggtttatgcatccgggggctcaagttgggtaatcgacagcgggtgcacaaaccacatgacaggggagaagaagatgttctcctcctacgagaaaaaccaagattcccaaagagctatcacattcggggatggaaatcaaggtgtcactgtctttagaagaagtgatgattcaatagcatttaagggagtgttagagggtcagctatacttagtgaattttgatagagttgaacttgacacttgcttaattgctaagactaacatgagctggctctggcatcgccgactagcacatgttgggatgaagaatcttcataagcttttaaagggagagcacattttaggattaacaaatgttcattttgagaaagacaggatttgtagcgcatgccaagcaggaaagcaagttggtgctcaccatccacacaagaacatcatgacgaccgacaggccactggagctcctacacatggatctattcagcccaattgcttacataagcatcagcgggagtaagtgctatctagttattgtggatgattattctcgcttcacttgggtgttctttttgcaggaaaaatctcatacccaagagaccttaaagggattcttgagacgggctcaaaatgagttcggcttgaggatcaagaaaattagaagcgacaacgggacggagttcaagaactctcaaattgaaggcttccttgaggaggagggcatcaagcatgagttctcttctccctacacccctcaacaaaatggtgcagtggagaggaagaatagaactctattggacatggcaagaaccatgcttgatgagtacaagacttcggatcggttttgggccgaggcggtcaacaccgcctgctacgccatcaaccggttgtatctacaccgaatcctcaagaagacatcatatgaactctttaccggtaaaaagcccaatatttcatattttagagtctttggtagcaaatgctttattcttcttaaaagaggtagaaaatctaaatttgctcctaagactgtagaaggctttttactaggatatgattcaaacacaagggcatatagagtctttaacaagtcctctggacaagttgaagtttcttgtgacgttgtgtttgatgagactaacggctctcaagtagagcaagttgatcttgatgagaaaggaacatgtccgttggggatggtgtgtcctaaggaatccgaagagcctccaaatgcacaagatcaaccatcctcctccacgcaagcatctccaccaactcaaaatgaggatgaggctcaagttgatgaaggagaagatcaagcaaatgagccacctcaagatgacgacaatgatcaagggggagatgcaaattatctagacaaggaggatgaagaagcaaggccgccacacccaagagtccaccaagcaatccaacgagatcaccccgtcgacaccatcctcggcgacattcataagggggtaaccactagatctcgagttgcacatttttgtgagcattactcttttgtttcctctattgagccacacaggatagaggaagcactacaagatttggattgggtggtggcgatgcaagaggagctcaacaacttcactaggaatgaggtatggcatttggttccacgtcctaaccaaaatgttgtaggaaccaaatgggtgttccgcaacaagcaagatgagcatggtgtggtgacaaggaacaaagctcgacttgtggccaaaggatactctcaagtcgaaggtttggatttcggtgaaacctatgcacccgtagctaggcttgagtcaattcgtatattattggcctatgctacttaccatggcttcaagctttaccaaatggacgtgaagagtgccttcctcaatggaccaatcaaggaagaggtctatgttgagcaacctcccggctttgaagatagtgagtaccctaaccatgtctataaactctctaaggcgctttatgggctcaagcaagccccaagagcttggtatgaatgccttagagatttccttatcactaatggattcaaagtcggaaaagcagatcctacactcttcactaaaactcttgaaaatgacttgtttgtatgccaaatttatgttgatgatattatatttgggtctactaacgagtctacatgtgaagaatttagtaggatcatgacacaaaaattcgagatgtctatgatgggggagttgaagtacttcttaggatttcaagtgaagcaactccaagaaggcaccttcctaagccaaacgaagtatacccaagatattctaagcaagtttgggataaaggatgccaaacccatcaagacacccatgggaaccaatgggcatctcgacctcgacgaaggaggtaaacccgtcgatcaaaagaaagagcacatcggggacttgccagttcttaggaagatccttggtgtcttgggcttcaaagaagcaaaattccgtagctctttcaaccgccgaagccgagtatattgccgcaggatattgttgcgcgcaattgctttggatgaggcaaacccttag

SEQ ID NO: 4932 - DNA, 1764 bp, Zea mays
  Clone ID: TF_ZM5003.C1.o1.fg
atggagaccggcgacaagcccactacaagccacgggaaggcttcatcggaagagtcccgcaaaaagggaaaagggaaggagaagaaagcatcttcccacaagtcgcatcagagtggcgacaagaaaaagaagatgaggaaggtggtctactacgagaccgatacttcatcaccttccacctccggctccgacgcgccctccgtaacttctaagcgccatgagcgcaagaagtttagggatgaagattatgatgaggatgaagtggcccaaatcgagcacttcaactcccaagccacaacaatactcctcgcctctctaagtagagaggagtacaacaaggtgcaaggattaaagagcgccaaggaagtttgggacgtgctcaaaaccgcgcacgagggagatgagctaaccaagatcaccaagcgggagacgatcgagggggagctcggtcgcttccggcttcgcaaaggggaagagacacaagacatgtacaaccggctcaaaaccttggtgaaccaagtgcgcaacctcgggagtaaaaagtgggatgaccacgagatggttaaggttattcttagatcacttattttccttaaccctactcaagttcaattaattcgtggtaatcctagatatacactaatgactcccgaggaagtaatcgggaattttgtgagctttgagtatatgatcaagggctcaaagaaaatcaatgagctagatgatccctccacatctgaagcacaaccggttgcattcaaggcaacggaggagaagaaggaggagtctacatcaagtagacaaccaatcgatgcctcaaagctcgacaatgaggaaatggcgctcgtcatcaagagcttccgccaaatcctcaagcaaaggagcgggaaagattacaagccccgctccaagaaggtttgctacaagtgtggtaagcccggtcactttatagcaaaatgccctatttctagtgttagtgacaggggcgacgacaagaaggggagaagaaaggagaggaagaaatactacaagaataagggtggcgacacccatgtatgccgcgagtgggactcggacgagagctcctccgactcctcctccaaagaggacgtcgctaacatcgccgtcaccaagggacttctcttccccaacgtcggccacaagtgcctcatggccaaggacggcaaaaagaagaaggtttatgcatccgggggctcaagttggatcatcgatagcgggtgcacaaaccacatgacaggggagaagaagatgttctcctcctatgagaaaaatcaagatccccaacgagcaatcacattcggggatggaaatcaaggtgtcactgtctttagaaggagtgatgattcagtagcatttaagggagtgttagagggtcagctatacttggtagattttgatagagctgaactcgacacttgcttgattgctaagactaacatgggttggctatggcaccgccgactagcccatgttgggatgaagaattttcataagcttctaaagggagagcacattttaggattaacaaatgttcattttgagaaagacgggatttgtagcgcatgtcaagcagggaagcaagttggtgctcatcatccgcacaagaacatcatgacgactgacaggccactggaactcctacacatggatctattcggcccaattgcttacataagcatcgacgagagaaaaatctcatacccaagagacattaaagggattcttgagacgggctcaaaatga

SEQ ID NO: 4933 - DNA, 4848 bp, Zea mays
  Clone ID: TF_ZM5004.C2.o7.fg
atgtcgggagatcacgccaagaaggagatggagaccgacgaaaagcccactacaagcaacgggagcacttcatcggaagagtcccgcaccaaaaggagggagaagaagaagagctcctccaacaaagagaaggagaagaaatcttcttctcaccacaaagagaagaaggaaaaatcttcttcccacaagccgcatcggagtggggacaagcaaaagaggatgaggaaagtggtctactacgagaccgacacttcatcaacatcgacctccggctccgatgcgccctccgtaacttctaaacgccaagagcgtaagaagtttagtaagatccccctacactaccctcgcatttctaaacatgcacctttactttccgtcccattaggcaaaccaccaacttttgatggtgaagattatgctaggtggagtgatttaatgcgatttcatctatcctcactccacaaaagtatatgggatgttgttgagtttggtgcacaggtaccgtcggtaggggataaggactatgatgaggatgaggtagcccaaatcgagcacttcaactctcaagcgacaacgatactcctcgcctctttaagtagagaggagtataacaaagtgcaagggttgaagagcgccaaggaggtttgggatgtgctcaaaaccgcgcacgagggagatgagctcaccaagatcaccaagcgggaaacgatcgagggggagctcggtcggttccggcttcgcaaaggggaagagccacaacacatgtacaaccggctcaagaccttggtgaaccaagtgcgcaacctcgggagcataaagtgggacgaccacgaggtggttaaggttattttaagatcacttattttccttaaccctactcaagttcaattaattcgtggctcaaggaagatcaacgagcttgatgatcccaccacatccaaagctcaacccgtcgcattcaaggcgacggaggaaaagaaggaggagtctacaccaagtcgacaaccaatagacgcctccaagctcgacaatgaggaaatggcgctcgtcatcaagagcttccgccaaatcctcaaacaaaggagggggaaagactacaagtcccgctccaagaaggtttgctacaagtgtggtaagcccggtcattttattgctaaatgtcctatatctagtgacagtgaccgaggcgacgacaagaaggggagaagaaaggagaagaagagatactacaagaagaagggcggcgatgcccatgtttgtcgggagtgggattccgacgaaagctcaagcgactcctccgacgacgaggacgccgccaacatcgccgtcaccaaaggacttctcttccccaacgtcggccacaagtgcctcatggcaaaggacggcaaaaggaaaaaggttaaatctaactcctccactaaatatgaatcttctagtgatgataatgctagtgatgaggaggataatttgcgttccctttttgccaaccttaacatagctcaaaaggaaaaattaaatgaattggttagtgctattcgtgaaaaggatgacattttggattcccaagaggaccttcttattaaggaaaataagaagcatgttaaggttaaaaaggcttatgctcttgagattgaaaaatgtgaaaaattatctagtgagctaagcacttgctgtgagatgattgacaaccttaaacatgaaaatgctagattaaatgctaagaacatttctcttgctagccttagggtagaaaatgaaaatttgattgctaaggctaaagattttgatgtttgcaaagttacaatttccgatcttagagataaaaacgatattcttcatgctaagattgttgaacttaactcttgcaaaccctctacatctactgttgagcacacttctatttgcactagatgtagagatgttaacattgatgctatacatgatcacataaccttaattaaacaacaaaatgatcatatagcaaaactagatgccaaaattgccgagcataacttagaaaatgaaaagtttaaatttgctagaagtatgctctatagtgggagacgccctggcatcaaggatggcattggcttccaaaggggagacaatgtcaaacttagtgcccctcctaaaagattgtctaactttgttaagggcaaggctcccatgcctcaggataacgaaggttacattttgtaccctgctggttatcctgagagcaaaattaggagaattcattctaggaagtctcactctggcccaaatcatgcttttatgtataagggtgagacatctagttctaggcaaccaacccgtgctaagttgactaagaaaactcctagtgcatcaaatgaacatagtctttcatttaaaacctttgatgcatcttatgtgttaactaacaaatccggcaaggtttatgcatccgggggctcaagttggatactcgacagcgggtgcacaaaccacatgactggggagaaaaagatgttctcctcatatgagaaaaaccaagatccccaaagagcgatcacattcggggatggaaatcaaggtttggtcaaaggtgtcactgtctttagaagaagtgatgattcaatagcatttaagggagtgttagagggtcagctatacttggtagattttgatagagctgaactcgacacttgcttaattgctaagactaacatgggctggctctggcatcgccgactagcacatgttggaatgaagaatcttcacaaacttctaaagggtgaacacattttaggactaacaaacgttcattttgagaaagacagggagaaatctcaaacccaagagaccttaaagggattcttgagacgagctcaaaatgagttcggcttaaggatcaagaaaataagaagcgacaatgggacggagttcaagaactctcaaattgaaagcttccttgaggaggagggcatcaagcatgagttctcttctccctacacgccacaacaaaatggtgtagtggaaaggaagaatagaactctgttggacatggcaaggaccatgcttgatgagtacaaaacttcggatcggttttgggccgaggcagtcaacaccgcctgctacgccatcaaccggttatatcttcaccgaatcctcaagaagacatcatatgaactcctaaccggtaaaaagcccaacatttcatattttagagtctttggtagcaaatgctttattcttgttaaaagaggtagaaaatctaaatttgctcctaagactgtagaaggctttttacttggttatgactcaaacacaagggcatatagggtctttaacaagtccactggactagttgaagtctcatgtgacgttgtgtttgatgagactaacggctctcaagtagagcaagttgatcttgatgagataggtattgaagaggctccgtgcatcgcgataaggaacatgtccattgtggatgtgtgtcctaaggaattcgaagagcctccaaatgcacaagatcaaccatcctcctccatgcaagcatctccaccaactcaaaatgaggaagaggctcaagttgatgaagaagaagatcaatcaaacgagccaactcaagatgacggcatagatcaagggggagatgcaaatgatcaagacaaggaggatgaagagcaaaggccgccacacccaagagtccaccaagcaatccaacgagatcaccccatcgacaccatccttggcgacattcataagggggtaactactagatctcgggttgcacatttttgtgaacattactcgtttgtttcctctattgagccacacagggtagaagaagcactacaagattcggattgggtggtggcgatgcaagaggagctcaacaacttcactagaaatgaggtatggcatttagttccacgtcctaatcaaaatgttgtaggaaccaaatgggtcttccgcaacaagcaagatgagcatggtgtggtgacaaggaacaaagctcgacttgtggccaaaggatactcccaagtcgaaggtttggacttcggtgaaacctatgcacccgtagctaggcttgagtcaattcgcatattattggcctatgctacttaccatggctttaagctttatcaaatggacgtgaaaagtgccttcctcaatggaccaatcaaggaagaagtctatgttgagcaacctcccggctttgaagacagtgagtaccctaaccatgtctataagctctctaaggcgctttatgggctcaagcaagccccaagagcatggtatgaatgccttagagatttccttattgctaatggcttcaaagtcggaaaagccgatcctacactctttactaaaactcttaaaaatgacttgtttgtatgccaaatttatgttgatgatattatatttgggtctactaacgagtctacttgtgaagagtttagtaggatcatgacacaaaagttcgagatgtctatgatgggggagttcaagtatttcttaggattccaagtgaagcaactccaagagggcaccttcattagccaaacaaagtacactcaagacattctaaacaagtttgggatgaaggatgccaagcccatcaagacacccatgggaactaatgggcatctcgacctcgacacgggaggtaagtccgtggatcaaaagtctatttcaaaccaagtcataggtgtattgaaagggaattggagtcttcggcgaagacaaaggcttccactacgtaactcatccttcgccgacgcttcaagtctctctccattcttgggggagaaaagcatgagcatcaaagaaaaagactttgtctttgggggacaaagtaagagcccatggcaaaagaactag

SEQ ID NO: 4934 - DNA, 4473 bp, Zea mays
  Clone ID: TF_ZM5010.C1.o3.fg
atgtcgggagatcacgccaagaaggagatggagaccggcgaaaagcccactacaagccacgggagcacttcatcggaagagtcccgcaccaagagaaaggagaagaagaagagctcctccaacaaagggaaggagaagaaatcttcttctcaccacaaagagaagaaggaaaaatcctcttcccacaagtcgcatcggaaaggtgacaagcacaagaggatgaggaaggtggtctactacgagaccgacacttcatcaacatcaacctccgactccgatgcgccctccgtaacttctaaacgccaagagcgtaagaagtttagtaagatccccctacactaccctcgcatttccaaacatgcacctttactttccgtcccattaggcaaaccaccaacttttgatggtgaagattatgctaggtggagtgatttaatgcgattccatctaacctcactccacaaaagtatatgggatgttgttgagtttggtgcacaggtaccatccgtaggggatgaagactatgatgaggatgaggtggcccaaatcgagcacttcaactctcaagcgacaacaatactcctcgcctctttaagtagagaggagtataacaaagttcaagggttgaagagcgctaaggaggtttgggatgtgctcaaaaccgcgcacgagggagacgagctaacaaagatcaccaagcgggaaacgatcgagggggagctcggtcggttccggcttcgcaaaggtgaagagccacaacacatgtacaaccggctcaagaccttggtgaaccaagtgcgcaacctcgggagcaagaagtgggacgaccatgaaatggttaaggttattctaagatctctcattttccttaaccccactcaagttcaattaattcgtggtaatcctagatatactaaaatgacccccgaggaagttatcgggaactctgtaagttttgagtgcatgatcgaaggctcgaggaagatcaatgagcttgacgaacccaccacgtccgaagcacaacccgtcgcgttcaaggcgacgaaggaaaagaaggaggagtctacaccaagtagacaaccaatcgacgcctccaagctcgacaatgaggaaatggcgctcgtcatcaagagcttccgccaaatcctcaagcaatggaaggggaaggattacaagtcccgttccaagaaggtttgctacaaatgtggtaagcccggtcattttattgctaaatgtcccatatctagtgacagtgaccgaggcgacgacaagaaggggagaagaaaggagaagaaaaagtactacaagaagaagggcggcgatgcccatgtttgtcgggagtgggactccgacgaaagctcaagtgactcctccgacgacgaggacgccgccaacatcgccgtcaccaagggactcctcttccccaacgtcggccacaagtgcctcatggcaaaggacggcaaacggaagaaggttaaatctaactcctccactaaatatgagtcttctagtgatgataatgctagtgatgaggaggataatttgtgtaccctttttgtcaacctcaacatgcaacaaaaggaaaaattaaatgaattaattagtgccatccatgagaaggatgatctcttggactcccaagaggacttcctaatcaaggaaaataaaaagcatgttaaggttaaaaatgcttatgctctagaagttgagaaatgtcaaaaattatctattgagctaagcacttgccatgaaacaatagacaaccttagaaatgaaaatgctaatttgttagctaaggttgattctcatgtttgcaatgtttcaattcccaaccctagagataataatgatgatttgcttgctaggattgaagaattgaacatttctcttgctagtcttagattagaaaatgaaaatttgattgctaaggctaaagattttgatgtttgcaaaattacaatttccgatcttagagataaaaatgatattctacatgctaagattgttgaacttaattcttgcaaaccctctacatctaccgttgagcacacttctatttgtactagatgtagagatgttaacattgatgctatacatgatcacatgactttaattaaacaacaaaatgatcatatagctaaattagatgctaaaattgccgagcataacttagaaaatgaaaattttaaatttgctagaagtatgctctataatgggagacgaccgggcatcaaggatggcattggcttccaaaggggagacaatgttaaacttagtgcccctcctaaaagattgtcaaattttgttaagggcaaggctcccatgcctcaggataacgagggttacattttataccctgccggttatcccgaggacaaaattaggagaattcattctagaaagtctcactctggccctaatcatgctttcatgtataagggtgagacatctagctctaggcaaccaacccgtgctaagttgcctagaaagaaaactcctagtgcatcaaatgatcatgatatttcattcaaaacttttgatgcatcttatgttttaactaacaaatccggcaaggtttatgcatccgggggctcaagttggatactcgacagcgggtgcacaaaccacatgacaggggagaagaaaatgttctcctcctatgagaaaaaccaagatccccaacgagctatcacattcggggatggaaatcaaggtgtcactgtctttagaagaagtgatgattcaatagcatttaagggagtgttagagggtcagctatacttggaaaaatctcaaacccaagagaccttaaaaggattcttgagacgagctcaaaatgagttcggcttaaggatcaagaaaattagaagcgacaacgggacggagttcaagaactctcaaatcgaaggcttccttgaggaggagggcatcaagcatgagttctcctctccctacacccctcaacaaaatggtgtagtggaaaggaagaatcgaactctattggacatggctagaaccatgcttgatgaatacaagacttcggatcggttttgggccgaggcggtcaacaccgcttgctacgccatcaaccggttatatctacaccgaatcctcaagaagacatcatatgaactcctaaccgagcaagttgatcttgatgagataggtgaagaagaggctccatgcatcgcgctaaggaacatgtccattggggatgtgtgtcctaaggaatccgaagagcctccaaatgcacaagatcaaccatcctcctccacgcaagcatctccaccaactcaaaatgaggatgaggctcaagttgatgaagtagaggatcaagcaaatgagccacctcaagatgacgacaatgatcaagggggagatgcaaatgatcaagacaaggaggatgaagaaccaaggccgccacacccaagagtccaccaagcaatccaacgagatcaccccgtcgacaccatcctcggcgacattcataagggggtaactactagatctcgtgttgcacatttttgtgaacattactcgtttgtttcctctattgagccacacagggtagaggaagcactgcaagattcggattgggtggtggcgatgcaagaggagctcaacaacttcactaggaatgagcaagatgagcatggtgtggtgacaaggaacaaagctcgacttgtggccaagggatactctcaagtcgaaggtttggatttcggtgaaacctatgcacccgtagctaggcttgagtcaattcgcatattattggcctatgctacttaccatggatttaagctttatcaaatggacgtgaaaagtgctttcctcaatggaccaatcaaggaagaggtctatgttgagcaacctcccggctttgaagacagtgagtatcctaaccatgtctataagctctctaaggcgctttatgggctcaagcaagccctaagagcgtggtatgaatgccttagagatttccttattgctaatggcttcaaagtcggaaaggccgatcctacactctttactaaaacacttgaaaatgatttgtttgtatgccaaatctatgttgatgatattatatttgggtctactaacgagtctacatgtgaagagtttagtaggattatggcacagaaattcgagatgtctatgatgggggagttgaagtatttcttaggatttcaagtgaagcaactccaagagggcaccttcattagccaaacgaagtacactcaagacattctaaacaagtttgggatgaaggatgccaagcccatcaagacacccatgggaactacaggaattcacttaattcccgtcggccagaaaccgacgggaataagcatataccgacgggaattacttaattcccgtcggtttagggcttattcccgtcggttttcagccgccaggcgtcccttgtcggggatacgtttatccccgtcggcggccgacgggaattattaa

SEQ ID NO: 4935 - DNA, 5196 bp, Zea mays
  Clone ID: TF_ZM5012.C1.o12.fg
atgtcgggagatcacgccaagaaggagatggacaccggcgacaagcccgctacaagcctcgagaaagcttcatcgggagagtcccgcaacaaagggaaggggaaggagaagaaaccctcttcccacaagttgcatcggagtggggacaagaaaaagaagatgaggaaggtggtctactacgagaccgacacctcatcgccatctacctccggctccggcgcgccctccataacttctaagcgccatgagcgcaagaagtttagtaagatccccttacactaccctcgcacttctagacatactccattactttccgttccattaggcaaaccgctaacctttgacggtgaagattatgctaggtggagtgatttaatgaaatttcatctaacctcactccacaaaagtatatggaatgttgttgaatttggagcacaggtaccatccataggggatgaggattatgatgaggacgaggtggcccaaatcgagcacttcaactcccaagccacaaccatactcctcgcctctctaagtagggaggagtacaacaaggtgcaaggattaaagagcgccaaggaagtttgggacgtgctcaagaccgcgcacgaaggagatgagctaaccaagatcaccaagcgggaaacgatcgagggggagctcggtcgcttccgacttcgcaaaggggaagagccacaagacatgtacaaccggctcaaaaccttggtgaaccaagtgtgcaacctcgggagcaaaaagtgggatgaccacgagatgattaaggttattcttagatcacttatttttcttaaccctactcaagttcaattaattcgtggtaatcctagatatacactaatgactctcgaggaagtaatcaggaattttgtgagttttgagtacatgatcaagggctcaaagaaaatcaatgagctagatgatccctccacatccgaagcacaaccggtcgcatttaaggcgacggaggaaaagaaggaggagtctacactgagtagacaaccaatcgacgcctcaaagctcgacaacgaggaaatggcgctcgtcatcaagagcttccgccaaatcctcaagcaaaggagggggaaagattacaagccccgctccaagaaggtttgctacaagtgtggtaagcccggtcactttatagcaaaatgtcctatttctagtgacagtgacaggggcgacgacaagaaggggagaagaaaggagaagaagaagtactacaagaagaagggtggcgatgcccatgtttgtcgagagtgggactccgacgaaagctctagcgactcctccgacgacgaggacgccgccaacatcgctgtcaccaagggacttctcttccccaacgtcggccacaagtgcctcatggcaaaggacggcaaaaataagaaggttaaatccaaatcctccactagatatgagtcttctagcgatgataatgctagtgatgaggaagataatttgcttaccctttttgccaacctaaacatgcaacaaaaggaaaagttaaatgaattaattagtgccatccatgagaaggatgacctcttggacacccaagaggacttcctaatcaaggaaaacaaaaagcatgttaaggttaaaaatgcttatgctctagaagttgaaaaatgtgaaaaattatctagtgagctaagcacttgccatgaaactatagacaaccttagaaatgaaaatgataatttgtatgataatttgttagccaaggttgatttaaatggttgtgatgcttcaattcccaatcttagaaatgataatgataatttgcttactaagattgaagaattaaacattactcttggtagccttagaaatgaaaataaaaacttgcttgctaaggctaaagaacttgatgtttgcaacgcttccatttctgaccttagaagtaaaaatgatatattacatgctaaggttgtagaattaaaatcttgcaaaccctctacatctaccgttcaacatactactatttgcactagatgtagagatgttgatattaatgctattcatgatcacatgactttaattaaacaacaaaatgatcatatagcaaaattagatgctaaaattgccgagcatgacttagaaaacgaaaaatttaaatttgctagaagcatgctctatagagggagacgctctggcattaaggatggcattggcttccaacagggaggcaatgtcaaacttaatgcccctcctaagaaattgtctaactttgttaagggcaaggctcccatgcctcaggataacgagggttacattttgtaccctgtcggctatcctgagagcaaaattaggagaattcattctaggaagtctcactctggccctaaccatgcttttatgtataagggtgagacatctagttctaggcaaccaacccgtgctaagtttcctaagaagaaaactcctagtgcatcaaatgatcatgatatttcatttaaaacttttgatgcatcttatgtgttaactagcaaatccggcaaggttgttgctaaatatgttgggggcaagcacaaggggccaaagacttgtgtttgggtttatgcatccgggggctcaagttggatcatcgacagtgggtgcacaaaccacatgacaggggagaagaaaatgttctcctcctatgagaaaaaccaagatccccaacgagctatcacattcggggatggaaaccaaggtgtcactgtctttagaagaagtgatgattcagtagcatttaagggagtgttagagggtcagttatacttggtagattttgatagagctaaactcgacacttgcttaattgctaagactaacatgggctggctctggcaccgccgactagcacatgttgggatgaagaatcttcataagattctaaagggagagcacattttaggattaacaaatgttcattttgagaaagacaggatttgtagcgcatgccaagcaggaaagcaagttggtgctcaccatccacacaagaacatcatgacgactgacaggccactggagctcctacacatggacctattcggcccgatcgcttacataagcatcggcgggagtaagtactatctagttattgtggatgattattctcgcttcacttgggtattctttttgcaggaaaaatctcacacccaagagaccttaaagggattcttgagacgggctcaaaatgagttcggcttgaggatcaagaaaattagaagcgacaacgggacggagtttaagaactctcaaattgaaggcttccttgaggaggagggcatcaagcatgagttctcttctccctacacgccacaacaaaatggtgtagtggagaggaagaatcgaactctattggacatggcaagaaccatgcttgatgagtacaagacatcggatcggttttgggccgaggcggtcaacaccgcctgctacgccatcaaccgattagtctttggtagcaaatgctttattcttgttaaaagaggtagaaaatctaaatttgctcctaagactgtagaaggctttttactaggatatggttcaaacacaagggcatatagagtctttaacaagtcctctggacaagttcaagtttcttgtgacattgtgtttgatgaggctaacggctctcaagtagagcaagttgatcttgatgagataggtgatgaagaggctccatgcatcgcgctgaggaacatgtccattggggatgtgtgtcctaaggaattcgaagagcctccaaatgcacaagatcaaccatcctcctccacgcaagcatctccaccaactcaaaatgaggatgaggctcaagttgatgaagggcaagatcaagaagatgagccacctcaagatgacggcaatgatcaagggggagatgcaaatgatcaagacaaggaggatgaagaaccaaggctgccacacccaagagtccaccaagcaatccaacgagatcaccccgtcgacaccatcctaggcgacattcataagggggtaaccactatatctcgtgttgcacatttttgtgagcattactattttgtttcctctattgagccacacagggtagaggaagcactccaagattcggattgggtggtggcgatgcaagaggagctcaacaacttcactaggaacgagcaagacgagcacggtgtggtgacaaggaacaaagcacgacttgtggccaagggatactcccaagtcgaaggtttggatttcggtgaaacctatgcacccgtagctaggcttgagtcaattcgtatattattagcctatgctacttaccatggcttcaagctttatcaaatggacgtgaaaagtgccttcctcaatggaccaatcaaggaagaggtctatgttgagcaacctcccggctttgaggatagtgagtaccctaaccatgtttataaactctctaaggcactttatgggctcaagcaagccccaagagcatggtatgaatgccttagagatttccttgtagataatggcttcaaagtcggaaaggccgatcctactttattcactaaaactcttgaaaatgacttgtttatgtctatgatgggggagttgaagtatttcttaggatttcaagtgaagcaactccaagagggcaccttccttagccaaacgaagtatactcaagacattctaagcaagtttggaatgaaggatgccaaacccatcaagacacccatgggaaccaatgggcatctcgatctcgacacggaagggtgtaaaattaatagaaagagcacatcggggacttaccagttcttgggaagatccttggtgtcttgggcttcaaagaagcaaaattccatagctctttctaccgccgaggccgagtacattgccgcaggacacggttgcgtgcaactactttggatgaggcaaacccttagggactatggttacaaattaaccaaagttcctcttctttgtgataatgagagtgcaatccgcatggcggataatcccgttgagcatagccgcactaaacacatagccattcggtatcactttttaagggatcaccaacaaaagggagatatcgagattgcatacattaatactaaagatcaattagccgatatctttaccaagccactagatgaacaaacttttaacaaacttaggcatgagctaaatattcttgattctaggaatttcttttga

SEQ ID NO: 4936 - DNA, 2754 bp, Zea mays
  Clone ID: TF_ZM5029.C1.o1.fg
atggccatgatgggttcaacatcggaaaagctgtacctctgccaggtaccaaactttgggtttgaaatgataaagctgagaccagggttgcccaaggtccattggacaaggacaactgtaggtgggcctaatgacttgggaggttccgtcacagctggtatcggagcgaagcctatctcttcagatattataaaacatttcaaaaagaattttcaatacttatccaagaaaatttctttcattcttaccttgtcactttctggaagtactcatcttgtaataccagatatgccgcatacgaggaaaaccgcacataagtccactggacccattggcgtgcctcgtcatcagttggctccaagacatgaagggagcaacaacggcaacaacgatccaatcagagacttagaagcccaagtggaacagcttcggacggagctacatcaccaaaatagggtgtgggcagaagacagtcagtgtatagctgagttgtcagccgaagtcggccgcttgcggtactccgaacgagactcggccattgattgggccattaactcgcgctcgatcacttggcatcgtgaagcaaaagctcgagctcgtgtggatgagctcagcacgaccctttgtaacctgcaagtatattgtaatactctacatgagaaagtacatgtactgtatggtcgactacactcggacgtgcctgctgaccctattgcaatgggagccagaccatcggggacagcaggtgaaggacctgatgcggaactggatctttttaagccccctccttctacgaacctggctgatgagcgatgccatcaaggactcgtgcgcatgacggtgcgggtacttcccgtggccgggaagatactccaaatccaccacctgtaccaccaacgctggccgaggctatcgctgccttggttaacgcgactgtcgataatacccgctttttacgcgagatggcgggtaaccaattccagcagcaaggcagaagggctcctccatagggaccgtgtaaaacctcatacctggacttctctgaaacgcgtcccccacccactctttgttaaagctgaagatcctcttgaagctgatgagtggatcagggtaatagagcaaaagtttggattaatccgctgcaccgaaacacaaaagtcgttgttcgccgcccaacaactaagaggtcctgccagtacttggtggggaaattttgtggcgattcaacaagctggacatcaggtcacttgggatgaatttaaattggcattccgtgagcactatattccagaaggagtgcttcacatgaaacaagaagaattcattcgactaaaacaagcaggggatactgtgatgcagtatctcaacaagtttaatcatttatcccaatatgcgattgatcaagtaaacactgacctgaaaaagaagaattgcttcatgagaggactcaacaatcggctccaaaggaaaatggtcacctgcctagatcttacatacagcagggcagtcaccacggcgctggcagtggaagccaagaatacaggccaaggaaaatccaagggatttggaggtgacaggtccaatcagagacctaagaagcgaacaagttcctcaactggctgcttcaactgtgggaagtctggtcattttattaaagactgcccatatccgaggcagaataaatccaacaatcagcaaaactcggggagctcaaatcaaggcaaagggaacatggcaaataattcagcgggcaaaaatgtgaagaaaactgggcgaatttattacacgcaagtggccactacaccagaaggtgagccgatccgtgttcgacccaaggatatacccaagaccgcatttactacgcggtatggactattcaaatatttggttatgtccttcggattgacgaatgctcctgcccacttaacatatctgatgaactcggtatttatgcccgagttggacaaatttgtggtcttcattgatgatattttgatttattctaggaatgaagaggagcatgctaaacatttacggatcgtattaacgcgcttaagggaacatcaattatatgctaaattcagcaagtgcgcgttttggctggaggaaatccaatttttggggcatgtattgtctgcaaatgggattgcggttgaccccagcaaggtccaggatattctagagtggaaatcgccaaccattgtacatcaagttcgaagtttccttggactggctggctattaccgcagatttatcccggatttctccaagattgtgaagccaatcacaagcctattgaagaatgatattaaatttaactggtcctcaaaatgcaacgaagccttcgagcaactgaagttagaactaaacatgaggcagaggagatggcttgagctgattaaggattatgaattagaaattcattatcacccaggcaaggccaacgtggtggcagatgcactaagtcgcaaggcttcctgccattgtcttacagtaaagacctctgacaccaccttgtgtcaagaaatggagaagttaaacctgggaatgattcaacatggaaccttgatccaattgaagcttgagtcgattcttctgcaaagaattattgatgcacaaaggagtgataagggtatgaaacatattcatgagaaaatagaagccgacaaaacaaattgttttagaagggataatcaaggcatagtatggtttaataatcgcatagttgtgcctaaagatgatgaagtccactag

SEQ ID NO: 4937 - DNA, 2257 bp, Zea mays
  Clone ID: TF_ZM5029.C3.o7.fg
atggagcagttcatcgccgcccagatgcagattctgcaaggaatcactgcggctattcaacaaattcagcagaaccagcagaatcaacaacatcagcaacaacagcagtacgcacccccggccagagataagcaccgggacttcatgagtcatcactcgccgacattttctcatgcggttgatcctctggatgccgatgactggctcaaggtcattggaaagaagctggacatcactcagtgcaacgaccgagaaaaggtcttgtatgcctcgggaagactcgagggagctgcgtccgattggtgggatgccttcacagtggcacaccccaacgtggatactataacttggcaagaatttcaggagaacttccgcgctcaccatattccctcgggaattatgaagctgaagaagaaagagttcctttcccttactcaagggagtatgtctgtcagcgagtatcgtgatcgcttcactcagctttcacgctatgcccctgaagaagtggacacggatgagaagcgccaacagcgtttcctggaaggactaattggacctctgaactatcaacttcagagtcacacttttcccaacttccagacactattgaacaaggcaattggccttgaaagcaaaaggaaggaattatccgaccacaaaagaaagttccaaggtcagtccagcaggaacacctggcctaacaacgctcaaggttcgcagttccgctctggaaatcaaggcggaaacaattatcaagtacaacgctctggacagcaaggccagggaaataatcagaatcagaaccatcaaaggagcaactccaagaccaaccagaggtctggtgggagttcacaaaaccgtcaaggtggcgccagtaccacgcaggccagaaacaacgcacatgtacaacccaatggatgtttcaagtgcggtgagctaggccactatgctaacaactgcccaaggcgcaaccagcagaaaccccagaaaagcaataatcagaggaatgaccagaacacccccgctcgtggatctgctcagaacaagactcctcagaaccagagcagaggaagggtcaatcacgtcactgcagaatcagtgcctggggatgccgacatagtgtatggtatgtttcttgttaactccatacctgcatcggttttatttgactctggagcatcgcattcgtttataactgagtcatttgtggaaaaacacatcatacctaagtaccctcttaagaagatattacatattagttcaccgggaggtgacatgaaggccacacactcatgcccccatgttaatatcaagattcaaggaatagatttttcagtcaacccagtggtcctaggatccaacggtattgatgtgattcttggatgcaactggttgaaaagttgtgatggagtgatacagtgtgccaatggaacaattatgttgacaagtcctcaaggtgaaagaatccaagtcaacatagacaagtcaacagatgcaaaagggaaaatagtgatcaatcacttggaagaaaagcccttggaaaatatcaaagtagtgtgcgaatacccagacgtatttctggaggaattaccagtgctatttgtgaacaagaaggatggttcgaggagaatgtgcgttcattatagaagtttgaatgaagtaaccatcaagaataaatacccactacctcggattgaagatttattcgatcagatgaagggagctaagatattctcgaagatagatctgagatcgggatatcatcagttaaagattcgggcagaagatgtacccaagacagccttcacgacaagatatggattatatgagtttttggtcatgtcgtttggactgactaatgcaccagcatactttatgaacttgatgaataaagtattcatggaatatctggatcagtttgtggtcgtattcattgatgacatactgatatattctccgaatgaagaaacacacgaagatcatctaaggctagtcctacaaaaacttcgtaacaaccagctatatgcgaagttctcgaagtgtgaattttggcttaaggaagttgctttcttagggcatatcgttaccgatggtggaattaaagtggagccaggaaagataagtgagatactggattggaagcaaccaaaggatgcgtccaagatcagaagttttcttggattggctggatactatagaagatttattgaaggtttttccaagttagtgaaaccacttacctctctactggagaaag

SEQ ID NO: 4938 - DNA, 2232 bp, Zea mays
  Clone ID: TF_ZM5037.C4.o1.fg
atgtcgggagatcacgccaagaaggagatggagaccggcgaaaagcccactacaagctacgggagcacttcatcggaagagtcccgcaccaaaaggagggagaagaagaagagctcctccaacaaagggaaggagaagaaatcttcttctcaccacaaagagaagaaggaaaaatcttcttcccacaagccgcatcggaaaggcgacaagcacaagaggatgaggaaggtggtctactacgagaccgacacttcatcaacatcgacctccgactccgatgcgccctccgtcacttctaagcgccaagagcgcaagaagtatagtaagatccctctacgctaccctcgcatttccaaacatacacctttactttccgtcccactaggcaaaccaccaacttttgatggtgaagattacgctaggtggagcgatttaatgcgatttcatctaatctcgctccacaaaagcatatgggatgttgttgagtttggtgcgcaggtaccatccgtaggggatgaaaactatgatgaggatgaggtggcccaaatcgagcacttcaactctcaagccacaaccatactccttgcctctctaagcaaggaagaatacaacaaagtgcaagggttgaaaaatgcaaaggagatttgggatgtgctcaaaactgcgcacgagggagatgagctcaccaagatcaccaagcgggaaacgatcgagggggagctcggtcggttccggcttcaaaaaggggaggagccacaacacatgtacaaccggctcaaaactttggtgaaccaagtgcgcaacctcgggagcaagaagtgggatgaccacaaagtggtaaatgttattttaagatctctcatttttcttaatcccactcaagttcaattgattcgtggtaatcctagatatactaaaatgacccccgaggaagttatcgggcattttgtaagttttgagtgcatgatagaaggctcgaggaaaatcaacgagcttggcgacccatctgaagcccaacccgttgcattcaaggcaacggaggagaagaaggaggagtctacaccaagtagacaaccaatagacgcctccaagctcgacaatgaggaaatggcgctcgtcatcaagagcttccgccaaatcctcaagcaaaggagggggaaggactacaagtcccgctccaagaaggtttgctacaagtgtggtaagcccggtcattttattgctaaatgtcctatatctagtgacagtgaccgaggcgacgacaagaaggggagaagaaaggagaagaaaaggtactacaagaagaagggcggcgatgcccatgtttgtcgggaatgggattccgatgaaagctcaagcgactcctccgacgacgaggacgccgccaacatcgccgtcaccaagggactcctcttccccaacgtcggccacaagtgcctcatggcaaaggacggcaaaaagaagaaggttaaatccaactcctccactaaatatgaatcttctagtgatgataatgctagtgatgaggaggataatttgcgttccctttttgccaaccttaacatagctcaaaaagaaaagttaaatgaattagttagtgctattcatgaaaaggatgaccttttggactcccaagaggattgtctaattaaagaaaacaagaaacatgttaaggttaaaaaggcttatgctctagaagtagaaaaatgtgaaaaattgtctagtgagctaagcacttgccgtgagatgattaacaaccttagaaatgaaaatgctattttaaatgctaaggttgattcacatgtttgtaatgtttcaattcccaatcttagagatgataacattgacttgcttgctaagattgatgaattgaatgcatcccttgctagccttagattagagaatgaaaatttaattgctaaggctaaagattttaatgtttgcaatgctactatttccgaccttagaactaagaatgaaatgctgcatgctaaggttgtagaacttaaatcttgcaaaccctctacatctaatcttgagcatatttctatttgcactagatgtagagatattgatgttgatgctatccatgatcacttagccttaattaaaaaacaaaatgatcacatagcacaacttaatgctaagattagtgagcatgacttagtaaatgaaaaatttaaatttgctagaagtgaaagggaattaggcttacacctggttcctaaataa

SEQ ID NO: 4939 - DNA, 4920 bp, Zea mays
  Clone ID: TF_ZM5055.C5.o1.fg
atgtcgggagaacatgccaagaaggagatggagaccggcgacaagcccgctacaagccacgggaaagcttcatcggaagagtcccgcaaaaagggaaaggggaaggagaagaaagcctcttcccacaagttgcatcggagtggggacaagaaaaagaagatgaggaaggtggtctactacgagaccgacacctcatcgccatctacctccgactccgacgcgccctccataacttctaagcgccatgagcgcaagaagtttagtaagatccccttacattaccctcgcacttctagacatactccattactttccgttccattaggcaaaccgccaacctttgacggtgaagattatgctaggtggagtgatttaatgaaatttcatctaacctcactccacaaaagtatatggaatgttgttgagtttggagcacaggtaccatctgtaggggatgtggattatgatgaggacgaggtggcccaaatcgagcacttcaactcccaagccacaaccatactcctcgcctttctaagtagggaggagtacaacaaggtgcaaggattaaaaagcgccaaggaagtttgggacgtgctcaagaccgcacacgagggtgatgaactcaccaagatcaccaagcgggaaacgatcgagggggagctcggtcgcttccgtcttcgccaaggggaggagccacaagatatgtacaaccagctcaaaaccttggtgaaccaagtgcgcaacctcgggagcaagaaatgggatgaccacgaggtggttaaggttattctaagatcacttattttccttaaccctactcaagtacaattaattcgtggcaacccaagatatacactaatgacccccgaggaagtaatcgggaattttgtgagctttgaattcatgatcaagggctcacggaagatcaacgagcttgacggtccttctacgtccgaagctcaaccggtcgcattcaaagcgacagaagagaagaaggaggagtctacaccgagtagaacacccatcgacgcctccaagctcgacaacgaggaaatggcgctcgtcatcaagagcttccgccaaatcctcaagcaaaggagggggaaagattacaagccccgctccaagaaggtttgctacaaatgtggtaagcccggtcattttattgcaaaatgtcctatatccagtgatagtgacaggggtgacgacaagaaggggagaagaaaggagaagaggtactacaagaagaagggcggcgatgcccatgtttgtcgcgagtgggactccgacgaaagctctagcgactcctccgacgacgaggacgccaccaacatcgccgtcaccaagggacttctcttccccaacgtcggccacaagtgcctcatggcaaaggacggcaaaaagaagaaggttaaatctaaatcctccactagatatgagtcctctagtgatgataatgctagtgatgaggaagacaatttacgtactctttttgccaacttaaacatgcaacaaaaagagaaattaaatgaattaattagtgccatccatgagaaggatgatctcttggactcccaagaggacttcctaatcaaggaaaacaaaaagcatgttaaagttaaaaatgcttacgctctagaagttgaaaaatatgaaaaaatatctagtgagctaagcacttgccatgagactatagacaaccttagaaatgagaattctaatttgttagctaaggttgattctattgcttgtaatgtttcaattcccaatcttagaaatgataatgatgatttgcttgctaagattgaagaattaaacatgtctcttgctagccttaggattgaaaatgaaaaattgcttgctaaggctaaagaattagatgtttgcaatgctaccatttccgaccttagaagtagaaatgatatattacatgctaaggttgtagaattaaaatcttgcaaaccctctacatctaccgttgaacacactactatttgcactagatgtagagatgttgatattgatgctattcatgatcacatggttttaattaaacaacaaaatgatcatatagcaaaattagatgctaaaattgccgagcatgaacttgaaaatgaaaaatttaaatttgctcgtagtatgctctatagtgggagacgccctggcattaaggatggcattggcttccaaaagggggacaatgtcaaacttaatgctcctcctaagaaattgtctaattttgttaagggcaaggctcccatgtctcaggataacgagggttacattttgtaccctgccggttatcctgagagcaaaattaggagaattcactctaggaagtctcactctggccctaatcatgcttttatgtataagggtaagacatctagttctaggcaaccaacccgtgctaagttgcctaagaagaaaactcctagtgcatcaaatgatcatgacatttcatttaaaacttttgatgcatcatatgtattaactaacaaatccggcaaggtttatgcatccgggggctcaagttggataatcgacagcgggtgcacaaaccatatgacaggggagaagaagatgttctcctcctacgagaaaaaccaagatccccaaagagcgatcacattcgaggatggaaatcaaggtgtcactgtctttagaagaagtgatgattcaatagcatttaaaggtgtgttagagggtcagctatacttggtagattttgatagagctgaactcgacacatgcttaattgcaaagactaacatgggttggctctggcaccgccgactagcccatattgggatgaagaatcttcataagcttctaaagggagagcacattttaggattaacaaatgttcattttgagaaagacaggatttctagcgcatgccaagcagggaagcaagttggtgctcaccatccacataagaacatcatgacgactgacaggccactggagctcctacacatggatctattcggcccgatcgcttacataagcatcggcggaagtaagtactgtctagttattgtggatgattattcttgcttcacttgggtattctttttgcaggaaaaatctcacacccaagagaccttaaagggattcttgagacgggctcaaaatgagttcggcttaaggatcaagaaaattagaagcgacaacgggacggagttcaagaactctcaaattgaaggcttccttgaggaggagggcatcaagcatgagttctcctctccctacacgccacaacaaaatggtgtagtggaaaggaagaatagaactctattggacatggcaagaaccatgcttgatgagtacaagacttcggatcggttttgggccgaggcggtcaacaccgcctgctacgccatcaactggttatatctacaccgaatcctcaagaagacatcatacaaactccttatcggtaaaaagcccaatatttcatattttagagtctttggtagcaaatgctttatacttgttaaaagaggtagaaaatctaaatttgctcctaagactgtagaaggctttttactaggatatgattcaaacacaagggcatatagagtctttaacaagtccactggacaagttgaagtttcttgtgacgttgtgtttgatgagactaacggctctcaagtagagcaagttgatcttgatgagataggtgatgaagaggctccgtacatcgcgctaaggaacatgtccattagggatgtgtgtcctaaagaatccgaagagcctccaaatgcacaagatcaaccatcctcctccacgcaagcatctccaccaactcaaaatgaggatgaggctcaagttgatgaagggcaagatcaagaagatgagccacctcaagatgacggcaatgatcaagggggagatgcaaacgatcaggacaaggaggatgaagaacaaagacctccacacccaagagtccaccaagcaatccaacgagatcaccccgtcgacaccatccttggcgacattcataagggggtaaccactagatctcgaaccaaatgggtcttccgcaacaagcaagatgagcatggtgtggtgataaggaacaaagcccgacttgtggccacaggatactcccaagtcaaaggtttggatttcggtgaaacctatgcacccgtagctaggcttgagtcaattcgtatactattggcctatgctacttaccatggcttcaagctctatcaaatggacgtgaaaagcgccttcatcaatggaccaatcaaggaagaggtctatgttgagcaacctcccgactttgaagatagtgagtaccctaaccatgtttataaactctctaaggcgctttatgggctcaagcaagccccaagagcatggtatgaatgccttagagatttccttatcactaatggattcaaagtcggaaaggccgatcctacactctttaccaaaacacttgaaaatgatttgtttgtatgccaaatttatgttgatgatattatatttgggtctactaacgaatctacatgtgaagagtttagtaggatcatgacacaaaaattcgagatgtcaatgatgggggagttgaagtatttcttaggatttcaagtgaagcaactccaagagggcaccttcctaagccaaacgaagtatactcaagatattctaagcaagtttgggatgaaggatgctaaacccatcaagacacccatgggaaccaatgggcatctcgacctcgacgaaggaggtaaatctgtcgatcaaaagaaagagcacatcggggacttgccagttcttgggaagatccttggtgtcttgggcttcaaagaagcaaaattccgtagctctttctaccgccgaagccgagtacattgccgcaggccattgttgcgcgcaactactttggatgaggcaaacccttag

SEQ ID NO: 4940 - DNA, 1779 bp, Zea mays
  Clone ID: TF_ZM5105.C5.o1.fg
atgtcgggagatcactccaagaaggagatggtgaccggcgagaagcccgccacaagccatgggaaagctccatcgggggagtctggtaacaagatgaagggattcccttcacacaacaagtcgcattggagcggtgagaagaaaaagaagatgaagaaagtggtctactatgagaccgactctttgtcgccatccacctccggctccgacgcaccgtccgtcacttctaagcaccatgagcgcaagaagtttagggatgaatataatgatgcggacgaagtcgcccaaatccggcacttcaattcccaagcaactactatactcctcacctctctaagtcgagaggagtataataaggtgcaagggttgaagagtgctaaagagatttgggacgtactaaagaccacgcacgaaggagacgaggtgaccaagatcaccaagagggaaacgatcaaaggggagctcggtcggttcatgctcaaccaaggagaggagccacaagctatgtacaaccggctcaagatcttggtcaaccaagtgcgcaacctcgggagcacaaaatgggatgaccttgaaatggtcaaggaggttataggaaagtttgtgagctttgaattgatgatcaaaggctccaaacaaatcatcgagcaaggcaccacctccacacccgaggtgcaacccgttgccttcaaagcaacggaggagaagaaagaagagtctacatcaagtaggctccccatcgacgcctccaagctcgacaacgaggaaatgacactcatcatcaagagctttcgccaaatcctcaagcaaaggaaggggaaagactacaaaccccgttccaagaaggtttgctacaagtgtggtaagcccggtcactttatagcaaaatgtcctatttctagtgacagtgataggggcgacgacaagaagggaaagaggagggaaaagaagagatactacaagaagaagggcggcgatgcccatgtatgccgggagtgtgactccaatgagagatccaccgactcctcctccgacgaggacgccgcaaacctcgccatcaacaagggtctcctcttccccaatgtcggccataagtgcctcatggcaaaggacggcaaaaagaagaaggtaaaatctagagcttctactaaatatgcaacatctagtgatgaggctagctctagtgatgatgaggatgatttgctcacactttttgccaaccttaacatgcaagaaaaggagaaattgaatgaatggattagtgatattcatgagaaggatgaactcttggatagccaagaggacttcgttattaaagaaaacaagaagcatgttaaagtaaaaaatgcctatgttcaagaagtagaaaaatgtgaaaaattaactagtgagcttagcatttgccatgacactatttccaaccttagaaatgagaatgctaaattaattgctaaggttgcgaagttaaatgtttgtgatgattctcttgtcaacctcaaaaatgataatgctagtttgatttctaaaattgacaagttgaataaatcactttctagccttaagattgagaatgataatttaattgttaaggctaaggatttaaatgtttgcaatgattctattaccaatcttagaaatgagaatgccatgctacatgctaagattgatgaattaaatgcttgcaaaccctctacatctaatgttagccatgtttccatttgtactagatgtagagacattaatgttgatgctattgtcacacccggttttggaaggtaa

SEQ ID NO: 4941 - DNA, 4935 bp, Zea mays
  Clone ID: TF_ZM5107.C2.o4.fg
atgtcgggagatcacgccaagaaggagatggaaaccggcgaaaagcccactacaagtcacgggagcacttcatcggaagagtcccgcaccaaaaggagggagaagaagaagagctcctccaacaaagggaaggagaagaaatcttcttcccacaagccgcatcggagtgaggacaagccaaagaggatgaggaaagtggtctactacgagaccgacacttcatcaacatcgacctccggctccgatgcgccctccgtaacttctaaacgccaagggcgtaagaagtttagtaagattcccctacactactctcgcatttctaaacatgcacctctactttccgtcccattaggcaaaccaccaacttttgatggtgaagattatgctaggtggagtgatttaatgcgttttcatctaacctcactccacaaaagtatatgggatgttgttgagtttggtgcacaggtaccatccataggggataaggattatgatgaggatgaggtggcccaaatcaagcacttcaactctcaagcgacaacaatactcctcgcctctctaagtagagaggagtataacaaagtacaagggttgaagagtgccaaggaggtttgggatgtgctcaaaaccgcgcacgagggagacgagctcaccaagatcaccaagcgggaaacgatcgagggggagctcggtcggttccggcttcgtaaaggggaggagccacaacacatgtacaaccggctcaagaccttggtgaaccaagtgcgcaacctcgggagcgtaaagtgggatgaccatgaggtggttaaggttattctaagatctcttattttccttaaccctactcaagtacaattaattcgtggtaatccaagatatactaaaatgacccccgaggaagttatcgggcattttgtaagttttgagtgcatgatcgaaggctcgaggaagatcaacgagcttgatgatccatctacatccgaagctcaacccgtcgcattcaaggcgacggaagaaaagaaggaggagtctaccccaagtcgacaaccaatagacgcctccaagcttgacaatgaggaaatgacgctcgtcatcaaaagcttccgccaaatcctcaagcaaaggagagggaaagattacaagtcccgctccaagaaggtttgctacaagtgtggtaagcccggtcattttattgcaaaatgtcctatatctagtgacagtgaccgaggcgacgacaagaaggggagaagaaaggagaagaagagatactacaagaagaagggcggcgatgcccatatttgtcgcgagtgggactccgaagaaagctctagcgactcctccgacgacgaggacgccaccaacatcgccgtcaccaaagggcttctcttccccaacgtcggccacaagtgcctcatggcaaaggacggcaaaaggaagaaggtaaaatcaagatcctccactaaatatgaaacctctagtgatgaaaatgctagtgaggaggaggataacttgcgtaccctttttgccaatcttaacatggaacaaaaagaaaaattaaatgaattaactagtgctattcatgaaaaggatgaccttttggattcccaagaggactgtctaattaaagaaaacaagaaacatgttaaggttaaaaatgcttacgctctagaagtagaaaaatgtcaaaaactatctagtgagctaagcacttgccatgagatgattgacaaccttaaacatgaaaatgctagtttaaatgctaaggttgattcacatgtttgtaatgtttcaattcccaatcctagagataataatgatgatttgtttgctaggattgaagaattgaacatttctcttactagccttagagtagaaaatgaaaacttaattgctaaggctaaagaactagatgtttgcaatgctaccatttccaatcttagagataaaaatgatattctacatgctaagattgttgaacttaattcttgcaaaacgtctacatctactgttgagcatgtatctatttgtactagatgtagagatgttaacattgatgctattcatgatcatatggctttaattaaacaacaaaatgatcatatagcaaaattagatgctaaaattgccgagcataacttagaaaatgaaaaatttaaatttgctagaagtatgctctataatgggagacgccctggcatcaaggatggcattggcttccaaaaaggagacaatgtcaaacttaatgcccctcctaagaaactgtctaactttgttaagggcaaggctcccatgcctcaggataacgagggttacattttgtaccctgccggttatcctgagagcaaaattaggaaaattcattctaggaagtctcactctggccccaatcatgcttttatgtataagggtgagacatctagttctaggcaaccaacccgtgctaaggtgcctaagaaaattcctattgcatcaaatgatcatgacatttcatttaaaacttttgatgcatcatatgttttaactaacaaatccggcaagatagttgccaagtatgttgggggcaagcacaagggctccaagacttgtgtttgggtacccaaagttcttgtgtctaatgccaaaggacccaaaaccatttggggttatgcatccgggggctcaagttggatcatcgacagcgggtgcacaaatcacatgacaggggagaagaaaatgttctcctcctatgagaaaaaccaagatccccaacgagctatcacattcggggatggaaatcaaggtgtcactgtctttagaagaagtgatgattcaatagcatttaagggtgtgttagagggtcagctatacttagtagattttgatagagctgaactcgacacatgcttaattgctaagactaacatgggttggctctggcaccgccgactagcccatgttgggatgaagaatcttcacaagcttctaaagggagaacacgttttaggactaacaaatgttcattttgagaaagacaggatatgtagcgcatgccaggcaggaaagcaagttggcacccatcatccacacaagaacatcatgacgaccaataggccgcttgagctactccacatggatctattcggcccgattgcttacataagcatcggcgggagtaagtattgtcttgtaatagtggatgattattctcgcttcacttgggtattctttttgcaggaaaaatctcaaacccaagagaccttaaagggattcttgagacgggctcaaaatgagttcggcttaaggatcaagaaaattagaagcgacaacgggacggagttcaagaactctcaaatcgaaggttttcttgaggaagagggcatcaagcatgagttctcttctccctacacgccacaacaaaatggtgtggtggagaggaagaatcgaactctactggacatggcaagaaccatgcttgatgagtacaagacttcggatcggttttgggccgaggcggtcaacaccgcttgctacgccatcaaccggttatatctacaccgaatcctcaagaagacatcatatgaactcctaaccgagcaagttgatcttgatgagataggtgaagaagaggctccgtgcatcgcgctaaggaacatgtccattggggatgtgtgtcctaaggaatccgaagagcctccaaatgcacaagatcaaccttcctcctccacgcaagcatctccaccgactcaaaatgaggatgaagctcaagttgatgaagtagaagatcaagcaaatgagccacctcaagatgatggcattgatcaaggggaagatgcaaatgaggaagacaaggaggaagaggaacaaaggccgccacacccaagagtccaccaagcaatccaacgagatcaccccgtcgacaccatcctcggcgacattcataagggggtaactactagatctcgtgttgcacatttttgtgaacattactcgtttgtttcctataatgagccacacaaggtagaggaagcacttcaagattcggattgggtggtggcgatgcaagaggagctcaacaacttcactaggaatgaggtgtggcatttagttccacgtcctaaccaaaatgttgtaggaaccaaatgggtcttccgcaataagcaagatgagcatggtgtggtgacaaggaacaaagctcgacttgtggccaagggatactcccaagtcgaaggtttggatttcggtgaaacctatgcacccgtagctaggcttgagtcaattcgtatattattagcctatgctacttaccatggctttaagctttatcaaatggacgtgaaaagtgccttcctcaatggaccaatcaaggaagaggtctatgttgagcaacctcccggctttgaagacagtgagtatcctaatcatgtctataagctctctaaggcgctttacgggctcaagcaagccccaagagcatggtatgaatgccttagagatttccttattgctaatggcttcaaagtcggaaaggccgatcctacactctttactaaaactcttgaaaatgacttgtttgtttgccaaatttatgttgatgatattatatttgggtctactaacgagtctacatgtgaagagtttagtaggatcatgacacagaaatttgagatgtctatgatgggggagttgaagtatttcttaggatttcaagtgaagcaactccaagagggcaccttcattagccaaacgaagtacactcaagatattcttagcaagtttggaatgaaggatgccaaacccatcaagacacccatgggaactaatgggcatctcgacctcgacacgggaggtaagtccgtggatcaaaagtctatttcaaaccaagtcataggtatattgaaagggaatttgagtcttcggcaaagacaaaggcttccactccgtaactcatccttctga

SEQ ID NO: 4942 - DNA, 3367 bp, Zea mays
  Clone ID: TF_ZM5109.C6.o2.fg
atgtcgggagatcacgccaagaaggagatggagaccggcgacaagcccactacaagccacgggaaggcttcatcggaagagtcccgaaacaaggggaaggggaaggagaagaaatgctcttcccacaagtcacatcggagtggcgacaagaaaaagaagatgaggaaggtggtcaagtacgagaccgatacttcatcaccttccacctccggctccgacgcgccatccgtcagttctaagcgtcatgggcgcaagaagtttagtaagatccccttacgctatcctcgcattcctaaacatacacctttactttccgtcctattaggcaaaccaccaacgtttgatggtgaagattatgctaggtggagtgatttgatgcgatttcatctaacctcactccacaaaagtatatgggatgttgttgagtttggtgtacaggtaccatccgtaggggatgaagattatgatgaggacgaagtggcccaaatccaacacttcaactcccaagcctcaactatactcctcgcctctctaagtcgagaggagtataataaggtgcaagggttgaaaggtgccaaggagatttgggacacgctaaagaccgcacacgaaggagacgaggtgaccaaaatcaccaagcgggaaacgatcgagggggagctcggtcgcttccgacttcgccaaggggaggagccacaagacatgtacaaccggctaaaaaccttagtgaaccaagtgcgcaacctcgggagtaagaaatgggatgaccacgaaatggttaaggttattcttagatcacttgtttttcttaaccctactcaagttcaattaatttgtggcaatcctagatatacactaatgacccccgaggaagtaatcgggaattttcacaaccggtcgcattcaaaggcgacggaagagaagaaggcggaatctactccaagtcgaacacccatcgatgcctccaagctcgacaacgaggagatggtgctcatcatcaagagcttccgtcaaatcctcaatcaaaggagggggaaggattataagccccgctccaagaaagtttgctacaaatgtggtaagcctggtcattttattgcaaaatgtcctatttctagtgacagtgacaggggcgacgacaagaaggggagaagaaaggagaagaagaagtactacaagaagaagggcggcgatgcccatgtttgccgggaatgggactccaacgagagctccaccgactcctccgacgaggacgccgcaaacatcgccgtcaccaagggacttctcttccccaacgtcggccacaagtgcctcatggcaaaggacggcaaaaggaagaaggatgatctcttggacacccaagaggacttccttattaaagaaaacaaaaagcgtgttaaggttaaaaatgcttatgctctagaagtagaaaaatgtgaaaactatctagctaaagaactagatgtttgcaatgttacaatttccgatcttagagataaaaatgatatattgcgtgctaagattgttgaacttaattcttgcaaaccttctacatctaccactgagcatgtcactatttgcactagatgtagagatgttgatgttaatgcaatacatgatcacctttccatgattaaacaacaaaatgatcatatagctaaattagatgctaaaattgccgagcatgaactagaaaatgaaaaatttaagtttgctcgtagtgtcactgtctttagaagaagtgatgattcaatagcatttaaaggagtgttagagggtcagctatacttggtagattttgatagagttgaactcgacacttgcttaattgctaagactaacatgggttggctatggcaccgccgactagcccatgttggaatgaagaatcttcataagcttctaaagggagagcacattttaggattaacaaatgttcattttgagaaagacaggatttgtagcgcatgccaagcaggaaagcaagttggtgctcatcatccacacaagaacatcatgacgactgacaggccgctggagctcctacacatggacctattcggcccgatagcttacataagcatcggcgggagtaagtattgtctagttattgtggatgactattctcgcttcacttgggtattctttatgcaggaaaaatctcatacccaagatactttaaaggaattcttgagacgagctcaaaacgagttcggcttaaggataaagaaaattagaagcgacaacaggacggagttcaagaactctcaaattgaaggcttccttgaggaggagggcatcaagcatgagttctcttctccctacacgccacaacaaaatggtgtagtggagaggaagaatagaactctattggacatggcaagaaccatgcttgatgagtacaagacttcggatcggttttgggccgaggcggtcaacaccgcctgctatgccatcaaccggttgtatctacaccgaatcctcaagaagacatcatatgagctcctaaccggtaaaaagcccaatatttcatattttagagtctttggtagcaaatgctttatacttgttaaaagaggtagaaaatctaaatttgctcctaagactgtagaaggctttttactaggatatgattcaaacataaggtcatatagagtctttaacaagtcctctggacaagttgaagtttcttgtgacgttgtgtttgatgagactaacggctctcaagtagagcaagttgatcttgatgagataggtgatgaagaggctctgtgcatcgcgctaaggaatatgtcctttggggatgtgtgtcctaaggaatccgaagagcctccaaatgcacaagatcaaccatcctcctccacgcaagcatctccaccaactcaaaatgaggatgaggctcaagttgatgaaggagaagttcaagaaaatgagccacctcaagatgacggcaatgatcaagggggagaggcaaatgatcaagacaaggaggatgaagaaccaagacctccacacccaagagtccaccaagcaatccaacaagatcaccccatcgaaaccatccttggagacattcataagggggtaaccactagatcttgggttgcacatttttgtgagcattactcttttgtttcctctattgagccacatagggtagaggaagcactacaagattcggattggatggtggcgatgcaagaggagctcaacaacttcactaggaacgaggtatggcatttggttccacgtcctaatcaaaattttgtaggaaccaagtgggttttccgcaacaagcaagacgagcatggtgtggtgacaaggaacaaatcccgacttgtggccaagggatattcacaagtcgaag

SEQ ID NO: 4943 - DNA, 1784 bp, Zea mays
  Clone ID: TF_ZmC11815_3
atggggatgatccgcaagattaatctaatgggtgtgcccttgcaggtcgaagatattctctttaacattgataggaaaaagcaaagaaagagaggatgcctcgcatgtggggagaagggccactttagggacagctgtccaactatggccaaacccaaaaaggagaggagcagaggcaaggcgctaacaagtgttagaacttgggatgattcttcaagtgaagatgaacctccaaggacgcgcagccactggtcctcatcacgctcatcacgatcatcacacaaatgccttatggcaagaggtaacaaaagcattccatcctctagtgatgaaaatagtagtgatgatgaaggtttgctagaaaattttgaaacttttgcaaacttaaatagtgagttgtcaactaaaattgagctattagagtctagtgttccatccaatactgctgatgatgaccttattaaaaagaatgaaaaacttaaggctaagttagctagctcccaaaatactattgaaaatttgctagagaaaatggaaattcttagcatacataatgatgagctaactactaagctagaaaacattggtagcaccccaggagcatctttagttaaaattctcgaaattattaaaaaggatgcttctacttcttgctttgatttaatggatgatactaacccctgcaaccaagttcttgttgagaatattgttatagaaacatgttcggatgaggttgcaaaggaaaatgagcaattaaggcaagaagtggctcgtcttggcaaggctttgtatgacaagaaaggcaaagccaaacaaatccaacttccacagtataacactactgcgggagtgaacaagcctatggagggagaaactgtgatttgtaggttatgtcacaaggaaggccacaagtctttccaatgcaagacgatgaccggggataagccaaggcaaaagctcaagcaaaagccatcaagcaaaatctccaacacctacatcaaaaaggtggacaaaaagactgctacaccatatttgatcaagaagaaaaagaatggaaaggtgatagcaatcaaggccaacaagcaagccaacaaaggaaagggggccaaacgcatctgggtgccaaaggaaataatttcaaccatgaaaagcaccaagaaggtttggatcccgaaagggaattcacaggatgcaagaattacttggactaagggattgaggaaagcaacacctcaaaagaagacattaagaacatcaagaaagcaccggactgtccggcggcacaccggactgtccggtgtccacacgccggactgtctgatgcaccagggaacagcagcccaacagctagttccaggtggcacccagagagaagaccaccggactgtccggtgtgaggaccggactgtccggtgtggaaagcctgcggcgccaacggtcacctgctctgacaaggcaacggctaggcgcaccggataggctacagtgcgctgtccggtgcaccaccggactgttcggtgtgccgcaaagaactgcagcttttctctaacggctagaattgagttggggcctatatatatttcacccaaccggccatttgaaggtgtgggagcccaagcaacatactgaaagtcgcctaaaggggggtgaatagggcaaaactgaaatttacaaagttaatcccaactacaagctaggttagcgttagaaatagaaatgagttcgaagagagggtgcaaaacaaatcgcaagcgaataaagagtatgacacgcggatttgtttt

SEQ ID NO: 4944 - DNA, 1794 bp, Zea mays
  Clone ID: TF_ZmC4916_353
atggatcctaagggaaaggggatggtggtcgacaacaacgagaaggagtctatcttcaacgagccgaagaatgacaagtctaccgacttgggctcaagccacaagcgcaaagatgggaagaagaagaagacaaggcgcatcaaggagatcgtctactacgacagcgacgaatcttcttcttcccaaaaggacgacgacgacgactacaggaagacggtcaattcgaacttttcatttgattattctcgtattccacatagttcgaattcgcatttgctttccattcctcttggcaaacctccacactttgatggggaggactacagattttggagtcacaaaatgcgtagtcatttattctctctccatccaagcatatgggagattgtagagaatggaatgaaatttgatagctcggatagccctatgtttattaatgaacagattcataaaaatgcacaagctactactgtgttgctagcctctttgtgcagggacgagtacaataaggtgagcggcttggacaatgccaagcagatatgggacaccctcaagatttctcacgaggggaacgacatcaccatgctcactaaaatggagttggtggagggcgagcttggaaggtttgcgatgataaggggcgaggagccaacccaaacatacaaccggctcaagacccttatcaacaaaataaggagctatggaagcacgcgatggacggaccatgacgtcgtccgactattactaaggtcctttaccattcttgatcctcatttggtgaataatattcgtgagaatcccaggtacaccaagatgtcgcccgaagaagtcctaggaaaattcgtcagcgggcgaatgatgattaaggaagcaaggtacgtggacgacgccttgaatggaccgatcaacgagccgcaacctcttgctctcaaagcaacaagaagcaaggaggcgctacctagcaaggtggcacaaattgaggcggccggacttaatgatgaagagatggctctcatcatcaaacgcttcaaaacggtgctaaagggtcacaaggggcagccaagcaagaccaagacaaaggggaagcgctcatgcttcaaatgcggtaagattggtcattttattgctaactgtaccgataatgaaagtgaccaggaacacgggagcaaaagggaaaagaagaaaaattacaagaaggccaagggcgaggcacatctaggaaaggagtgggactcggattgctcctcttccgactccgacaatgagggactcgccgccaccgccttcaacaaatcagccctcttccccaacgagcgtcacacatgccttatggcaagggagaagaaggtatgtactcggaactctacctatgcttcttcaagtgaggacgaatctagtgatgaggatgaagtagattactcatgtttgtttaagggcctagatagaaccaaggtagacaaaattaatgagttgattgatgccttgaatgataagaatatgcttttagaaaagcaagaggatttgttgtatgaagaacatgataaatttgtagaagctcaacgatctcatgctctagaagttaaaagaaatgaaatgctttcttgtgaattatcttcttgccatgagacaatttctaaattaaggagcattaatgatgatttgaatgctaagttagagattgctagtaaatctacctcttgtgtagaaaatgttgtaacgtgcactaggtgtaaagatattaaccttgatgcttatagtgaacacctagcttgcatttctaaattaaatgaagag

SEQ ID NO: 4945 - DNA, 2550 bp, Zea mays
  Clone ID: TF_ZmC4916_433
atggagttggtggaaggcgagctaggaagatttgctgtgatcaggggagaggagccaactcagacctacaacaggctcaagaccctcatcaacaagattagaagctatggaagcacaagatggacggaccacgacgttgtccgactcatgctaaggtcattcacgataattgacccccatcttgtcaatcttattcgtgaaaatcccaggtacaccaagatgacacccgaggagattcttggaaaattcgtgagcaggcgcatgatggtgaaagaagcacgatatgtagacgatgcgcttaatggtccactacccgtctacgagccacaacccgttgctctcaaagcaacaagcagcaaggaggcgctacaaagcaaggtggcacaagttgaggctgccgggctaaacgaagatgagatggccctaatcatcaagcgcttcaagaccgcactgaaaggacgcaaggagtaccctagcaagaacaaagcaaagggaaagcgctcctgttttaaatgcggtaagactggtcatttcatagatcaatgccccgataatgataatgaccaggaacaagaaaagtatgggaagaaaaagaagaagaagaattacaagaaggcgaagggtgaggcacatcttggaaaggaatggaacttcaactgctcttcatccgactctgatgatgaaggattggctgcctcagccttcgacaaatcttcgctcttccccaacgaacaccatatgtgccttatggctaaggaaaagaagggatgccaacactatggtagacactcctctattaaggatggacttggttttcgaaaggaaaccaagaacttaacaagccaaaaggctcccgttctcaacaaggagaaagggaaggctcctatggctagtagttctcaaaagtgtcatgcctacatttatgatagaaaattttctaggaatgctcataggagtaatgatcatgatgcttttaattcacatgctatgtttgcctctagctctacttttgttcatgatagaagtaggcctaggagaaatcatgttgtgcatcatgtgcctaggaaagtttatgcatccgggggctcaagctggattatcgacagcggatgcacaaaccacatgacaggggagaagaagatgttcacctcctacgtcaagaacaaggattcccaggattcgatcatctttggagatgggaaccaaggcaaggtcaaaggattggggaagatagccattacatccgagcattctacctccaatgtgttcttagttgaatcgctcgggtacaacttattgtatgataaatcagaaacccaagggaccctaaagcgctttctaaggagggctcaaaacgaatttgagctaaaggtgaaaaagataaggagcgacaacgggtccgagttcaagaacctacaagttgaagagtatcttgaggaggaaggcatcaagcacgagttctccgctccctacacaccacaacaaaatggtgtggtagagaagaagaacaggacgcttatcgacatggcaaggacgatgctaggagagttcaagacgcccaagcggttttggtcggaagctatgaacacatcttgccacgccattaaccggctctatatgcatcgcctcctcaagaagacctcatacgaacttctgaccagtaagaaacccaacgttttttactttcgtgtatttgggagcaaatgttacattctggtgaagaaagaacaagttgatcttgatgacatagatgaagatgatgttccaacagccgcaatgcgcacgatggcgataggagaggtccctcgagaagaggcgcgtgatcaagggggagcacaagaagaacaagttatggaggaagaagcaccactggcccctccaactcaagtccgagcgacgatccaaagaaatcaccccgtcgatcagattctgggtgacataagcaagggagtaacaactcgctcacgtttagctaatttttgtgagcattactcgtttgtctcttctattgagcctttcagggtagaagaggccctgcaggatctggactgggtgttggctatgcaggaagaactcaacaactttaagaggaacgaagtttggagcctggtgccacgtccaaagctaaatgttgtgggaaccaagtgggtgttcggcaacaagcaagacgagcatggagtggtgacaagaaacaaggctcgacttgtggaaaaaggttatgcccaagtcgcgggtttggatttcgaggagacttttgctcctgtggctaggctagagtctattcgaatattattagcatatgccgctcaccactctttcaggttgtttcaaatggatgtgaagagcgctttcctcaatgggtcaatcaaggaggaggtatacgtggatcaaccccctggctttgaggatgacaggtaccccgaccatgtgtttaagctctcaaaggcgctctatggacttaagcaagccccaagagcatggtatgaatgccttagagatttcttaattgctaatgctttcaaggttgggaaagccgatcccactctttga

SEQ ID NO: 4946 - DNA, 4659 bp, Zea mays
  Clone ID: TF_ZM3616.C2.o3.fg
atgtcgcgagaacacgccaagaaggagatggagaccggcaacaagcccgctacaagccacgggaaagcttcatcggaagagtcccgcaacaaagggaaggggaaggagaagaaaccctcttcccacaagtcgcatcggagtggggacaagaaaaagaagatgaggaaggtggtctactacgagaccgacacctcatcgccatctacctccggctccgacgcgccctccgtaacttctaagcgccatgagcgcaagaagtttagtaagatccccttacactatcctcgtacttctagacatactccattactttctgttccattaggcaaaccgccaacctttgacggtgaagattatgctaggtggagtgatttaatgaaatatcacctaacctcactcaacaaaagtatatggaatgttgttgagtttggagcacaggtaccttccgtaggggatgaggattatgatgaggacgaagttgcccaaatcgagcacttcaactcccaagccacaaccatactcctcgcctctctaagtagggaggagtacaacaaggtgcaaggattaaagagcgccaaggaagtttgggacgtgctcaagaccgcgcacgagggggagctcggtcgcttccatcttcgccaaggggaggagccacaagacatgtacaatcggctcaaaaccttggtgaatcaagtgcgcaacctcgggagcaagaaatgggatgaccacgaggtggttaaggttattctaagatcacttattttccttaaccctactcaagtacaattaattcgtggcaatcctcgatatacactaatgactcccgaggaagtaatcgggaattttgtgagctttgaatttatgatcaagggctcacggaagatcaacgagcttgacggtccctccacgtccgaagcacaaccggtcgcattcaaagcgacgaaggagaagaaggaggagtctacaccaagtagaacacccatcgacgccttcaagctcgacaacgaggaaatggcgcttgtcatcaaaagcttccgccaaatcctcaagcaaaggagggggaaagattacaagccccgctccaaaaacgtttgctacaagtgtggtaagcccggtcactttatagcaaaatgtcctatttccagtgacagtgacaggggcgatgacaagaaggggagaagaaaggagaagaaaagatactacaaaaagaagggcggcgatgcccatgtttgtcgcgagtgggactccgacgaaagctctagcgactcctcctccgacgaggacgccgccaacatcgccatcaccaaggcacttccaacgtcggccacaagtgcctcatggcaaaggacggcaaaaagaaaaagtgccatccatgagaagtacgatctcttggactcccaagaggacttcctaatcaaggaaaacaaaaggcatgttaaagttaagaatgcttatgctctagaagttgaaaaatgtgaaaaattatctagtgagctaagcacttgccatgagactatagacaaccttagaaatgagaatgctaatttgttagctaaggttgattctattgcttgtaatgtttcaattcccaatcttagaaatgataataatgatttgcttgctaagattgaagaattgaacatttctcttgctagccttagagatgaaaatgaaaaattgcttgctaaggctaaagattttgatgtttgcaatgctaccatttccgaccttagaagtaaaaatgatatattgcatgctaaggttgtagaattaaaatcttgcaaaccatctatatctaccgttgagcacactactatttgcactagatgtagagatgttgatatcaatgctatacatgatcacatggctttaattaaacaacaaaatgatcatatagctaaactagatgcaaaaattgccgagcatgaaattgaaaatgaaaaatttaaatttgctcgtagtatgctttatagtgggagacgccctggcattaaggatgacattggcttccaacagggaggcaatgtcaaaattaatgcccctcctaagaaattgtccaactttgttaagggcaaggctcccatgcctcaagataacgagggatactttttgtaccctgtcggttatcctgagaacaagattaggagaattcattctaggaagtctcactctggccctaatcattcttttatgtataagggtgagacatctagctttaggcaaccaacccgtgctaagttgcctaagaagaaaactcctagtgcatcaaatgatcatgacatctcatttaaaacttttgatgcatcttatgttttaactaacaaatccggcaaggtttatgcatccgggggctcaagttggatcatcgacagcgggtgcacaaaccacatgacaggggagaagaaaatgttctcctcctacgagaaaaaccaagatccccaacgagctatcacattcggggatggaaatcaaggtgtcactgtctttagaagaagtgatgatttaatagcatttaagggagtgttagagggtcaactatacttagtgaattttgatagagctgaactcgacacttgcttaattgctaagactaacatgggctggctctggcatcgccgactagcacatgttgtgatgaagaatcttcataagcttctaaagggagagcacattttaggattaaccaatgttcattttgagaaagacaggatttgtagcgcatgccaagcagggaagcaagttggtgcccatcatccacacaagaacatcatgacgaccgataggccactggaggtcctacacatggatctattcggcctgatagcttacataagcatcggcgggagtaagtattgtctagttattgtggatgattattctcgcttcacttgggtattctttctgcaggaaaaaactcatacccaagagacattaaagggattcttgagacgggctcaaaatgagttcggcttaaggatcaagaaaattagaagcgacaacgggacggagttcaagaactcacaaattgaaggcttccttgaggaggagggcatcaagcatgagttctcctctccctacacgccacaacaaaatggtgtagtggagaggaagaatagaactctattagacatggcaagaaccatgcttgatgagtacaagacttcggatcggttttgggctgaggcggtcaacaccgcttgctacgccatcaaccgattatatctatatcgaatcctcaagaagacatcatacgaactccttaccggtaaaaggcccaatatttcatattttagagtctttggtagcaaatgctttattcttgttaaaagaggtagaaaatctaaatttcctcctaagaccgtagaaggctttttactaggatatgattcaaacacaagggcatatagagtctttaacaagtcctcgggactagttgaagtttcttgtgacgttgtgtttgatgagactaacggctctcaagtagagcaagttgatcttgatgagataggtgatgaagaggctccgtgcatctctctaaggaacatgtccattggggatgtgtgtcctaaggaattcgaagagcctccaaatgcacaagatcaaccatccccctccacacaagcatctccaccaactcaaaatgaggttgaggctcaagttgatgaaggagaagatcaagcaaatgagccacctcaagacgacggcaatgatcaagggggagatgcaaatgatcaagacaaggaggatgatgaagaacaaaggccgccacacccaagagtccaccaagcaatccaacgagatcaccccgtcgacaccatcctcggcgacattcataagggggtaaccactcgatctcgtgttgcacatatttatgagcattactcttttgtttcctctattgagccacacagggtagaagaagcactccaagattcggattgggtagtggcgatgcaagaggagctcaacaacttcactaggaacgaggtatggcatttggttccacgtcctaatcaaaatgttgtaggaaccaaatgggtcttccacaacaagcaagacgagcatggtgtggtgacaaggaacaaagcccgacttgtggccaaaggatactcccaagtcgaaggtttggatttcggtgaaacctatgcacccgtagctaggcttgagtcaattcgtatattattggcctatgctacttaccatggcttcaagctttaccaaatggacgtgaagagttccttcctcaatggaccaatcaaggaagaggtctatgttgagcaacctcccgcctttgaagatagtgagtaccctaaccatgtgtataaactctctaaggtgctttatgggctcaagcaagccccaagagcatggtatgaatgccttagagatttccttatcactaatggattcaaagtcggaaaggccgatcctacactcttcactaaaactcttgaaaatgacttgtttgtatgccaaatttatgttgatgatattatatttgggtctactaacgagtctacatgtgaagaatttagtaggatcatgacacaaaagttcgagatgtctatgatgggggagttgaagtacttcttaggatttcaagtgaagcaactccaagagggcaccttcctaagccaaacgaagttcaagacattctaa

SEQ ID NO: 4947 - DNA, 5091 bp, Zea mays
  Clone ID: TF_ZM4499.C1.o6.fg
atgtcgggagaacacgccaagaaggagatggagaccggcgaaaagcccactacaagccacgggagcacttcatcggaagagttccgcaccaagaggagggagaagaagaagagctcctccaacaaagggaaggagaagaaatcttcttctcaccacaaagagaagaaggaaaaatcttcttcccacaagccgcatcggagtggggacaagcaaaagaggatgaggaaagtggtctactacgagaccgacacttcatcaacatcgacctccggctccgatgcgccctccgtaacttctaaacgccaagagcgtaagaagtttagtaagatccccctacactaccctcgcatttctaaacatgcacctttactttccgtcccattaggcaaaccaccaacttttgatggtgaagattatgctaggtggagtgatttaatgcgatttcatctaacctcactccacaaaagtatatgggatgttgttgagtttggtgcacaggtaccgtctgtaggggataaagattatgatgaggatgaggtggcccaaatcgagcacttcaactctcaagcgacaacaatactcctcgcctctttaagtagagaggagtataacaaagttcaagggttgaagagcgccaaggaggtttgggatgtgctcaaaaccgcgcacgaaggagatgagctcaccaaaatcaccaagcgggaaacgatcgagggggagctcggtcggttccgacttcgcaaaggggaggagccacaacacatgtacaaccggctcaagactttggtgaaccaagtgcgcaacctcgggagcacgaaatgggacgaccacgaaatggttaaggttattctaagatctctcattttccttaaccccactcaagttcaattaattcgtggtaatcctagatatactaaaatgacccccgaggaagttatcgggaattttgtaagttttgagtgcatgatcgaaggctcgaggaagatcaacgagcttgatgatccatctacatccgaagctcaacccgtcgcattcaaggcgacggaggagaagaaggaggaggctacaccaagtcgacaaccaatagacgcctccaagctcgacaatgaggaaatggcgctcgtcatcaagagcttccgccaaatcctcaagcaaaggagagggaaagaccacaagtcccgctccaagaatgtttgctacaaatgtggtaagcccggtcattttattgctaaatgtcctatatctagtgacagtgaccgaggcgacaacaagaaggaaagaagaaaggagaagaagaggtactacaagaagaagggcggcgatgcccatgtttgtcgggagtgggactccgacgaaagctcaagcgactcctccgacgacgaggacgccgccaacatcgccgtcaccaagggactcctcttcccaaacgtcggccacaagtgtctcatggccaaggacggcaaaaagaaggttaaatctaaatcctccactaaatatgaatcctctagtgatgataatactaatgatgaggaagataacttgcgctctctttttgccaacctcaacatgcaacaaaaagaaaaacttaatgaattgattagtgccatccatgaaaaggatgatctcttggacacccaagaggacttcctaatcaaggaaaataaaaagcatgttaaggttaaaaatgcctatgctctagaaattgagaaatgccaaaaattatctagtgagctaagcacttgccatgaaacaatagacaaccttagaaatgaaaatgctaatttgttagctaaggttgattctcatgtttgcaatgtttcaattcccaaccctagagataataatgatgatttgcttgctaggattgaagaattgaacatttctcttgctagccttagaattgagaatgaaaaattgcttgctaaggctaaagattttgatgtttgcaatactaccatttctgaccttagaactaagaatgatatcttgcatgctaaggttgtagaattaaaatcttgcaaaccctctacatctaccattgagcacgtttccatttgtactagatgtagagatgttaacattgatgctatacatgatcacatggctttaattaaacaacaaaatgatcatatagctaaattagatgctaaaattgctgagcataacttagagaatgaaaaatttaaatttgctagaagtatgctctataatgggagacgccctggcatcaaggatggcattggcttccaaaggggagacaatgtcaaacttagtgcccctcctaaaagattgtctaattttgtaaagggcaaggctcccatgcctcaggataacgagggttacattttgtaccctgccagttatcctgagagcaaaattaggagaattcattctaggaagtctcactctggccctaaccatgcttttatgtataagggtgagacatctagctctaggcaaccaacccgtgctaagttacctagaaagaaaactcctaatgcatcaaatgatcatgacatttcatttaaaacttttgatgcatcttatgtattgactaacaaatccggcaaagtagttgccaaatatgttgggggcaagcacaaggggtcaaagacttgtgtttgggtacccaaagttcttgtgtctaatgccaaaggacccaaaaccatttgggtttatgcatccgggggctcaagttggatactcgacagtgggtgcacaaaccacatgacaggggagaaaaagatgttctcctcatatgagaaaaaccaagatccccaacgagctatcacattcggggatggaaatcaaggcttggtcaaaggtgtcactgtctttagaagaagtgatgattcaatagcatttaagggtgtgttagagggtcagctatacttagtagattttgatagagctgaactcgacacatgcttaattgctaagactaacatgggttggctctggcatcaccgattagcccatgttgggatgaagaatcttcacaagcttctaaagggagagcacattttaggactaaccaatgaaaaatctcaaacccaagaaaccttaaagggattcttgagacgggctcaaaatgagtttgacttaaggatcaagaaaataagaagcgacaacgggacggagttcaagaattctcaaattgaaggcttccttgaggaggagggcatcaagcatgagttctcttctccctacacgcctcaacaaaatggtgtagtggagaggaagaatcgaactctattggacatgggtagaaccatgcttgatgagtacaagacctcggatcggttttgggcggaggcggtcaacaccgcttgctacgccatcaaccggttgtatctacaccgaatcctcaagaagacatcatacgaactcctaaccagtaaaaagcccaatatttcatattttagagtctttggtagcaaatgctttattcttgttaaaagaggtagaaaatctaaatttgctcctaagactgtcgaaggctttttacttggctatgactcaaacacaagggcatatagggtctttaacaagtccactggactagttgaagtctcatgtgacgttgtgtttgatgaaactaacggctctcaagtagagcaagttgatcttgatgagataggtgatgaagaggctccgtgcatcgcgctaaggaacatgtccattggggatgtgggtcctaaggaatccgaagagcctccaaatgcacaagatcaaccatcctcctccatgcaagcatctccaccaactcaaaatgaggaagaggctcaagttgatgaagaagaagatcaatcaaatgagccacctcaagatgacggcatagatcaagggggagatgcaaatgatcaagacaaggaggatgaagagcaaagaccgccacacccaagagtccaccaagcaatccaacgagatcaccccgtcgacaccatcctcggcgatattcataagggggtaaccactagatctcgtgttgctcatttttgtgaacattactcttttgtttcctctattgagccacacagggtagaggaagcacttcaagattcggattgggtggtggcaatgcaagaggagctcaacaacttcactaggaatgaggtatggcatttagttccacgtcctaaccaaaatgttgtaggaaccaaatgggtcttccgcaacaagcaagatgagcatggtgtggtgacaaggaacaaagctcgacttgtggccaagggatactcccaagtcgaaggtttggatttcggtgaaacctatgcacccgtagctaggcttgagtcaattcgcatattattggcctatgctacttaccatggctttaagctttatcaaatggacgtgaaaagtgccttcctcaatggaccaatcaaggaagaggtctatgttgagcaacctcccggctttgaagacagtgagtaccctaaccatgtctataagctctctaaggcgctttatgggctcaagcaagccccaagagcatggtatgaatgccttagagatttccttattgctaatggcttcaaagtcggaaaggccgatcctacactctttactaaaactcttgaaaaggacttgtttgtatgccaaatttatgttgatgatattatatttgggtctactaacgagtctacatgtgaagagtttagtaggatcatgacacaaaagttcgagatgtctatgatgggggagttgaagtatttcttaggatttcaagtgaagcaactccaagaaggcaccttcattagccaaacgaagtacactcaagacattctaaacaagtttgggatgaaggatgccaagcccatcaaaacacccatgggaactaatgggcatctcgacctcgacacgggaggaacttcttttgttaaattgcacacattgctcttctatatacctttgatcatgtctctttcatatgctatgactaatgtgtttttcaagtctatttcaaaccaagtcataggtgtattgaaagggaattggagtcttcggcgaagacaaaggcttccactccgtaactcatccttcgccgacgctccaagtcactctccattcttgggggagaaagcatga

SEQ ID NO: 4948 - DNA, 5310 bp, Zea mays
  Clone ID: TF_ZM4893.C2.o5.fg
atgtcgggagaacacgccaagaaggagatggagaccggcgaaaagcccactacaagccacgggagcacttcatcggaagagttccgcaccaagaggagggagaagaagaagagctcctccaacaaagggaaggagaagaaatcttcttctcaccacaaagagaagaaggaaaaatcttcttcccacaagccgcatcggagtggggacaagcaaaagaggatgaggaaagtggtctactacgagaccgacacttcatcaacatcgacctccggctccgatgcgccctccgtaacttctaaacgccaagagcgtaagaagtttagtaagatccccctacactaccctcgcatttctaaacatgcacctttactttccgtcccattaggcaaaccaccaacttttgatggtgaagattatgctaggtggagtgatttaatgcgatttcatctaacctcactccacaaaagtatatgggatgttgttgagtttggtgcacaggtaccgtctgtaggggataaagattatgatgaggatgaggtggcccaaatcgagcacttcaactctcaagcgacaacaatactcctcgcctctttaagtagagaggagtataacaaagttcaagggttgaagagcgccaaggaggtttgggatgtgctcaaaaccgcgcacgaaggagatgagctcaccaaaatcaccaagcgggaaacgatcgagggggagctcggtcggttccgacttcgcaaaggggaggagccacaacacatgtacaaccggctcaagactttggtgaaccaagtgcgcaacctcgggagcacgaaatgggacgaccacgaaatggttaaggttattctaagatctctcattttccttaaccccactcaagttcaattaattcgtggtaatcctagatatactaaaatgacccccgaggaagttatcgggaattttgtaagttttgagtgcatgatcgaaggctcgaggaagatcaacgagcttgatgatccatctacatccgaagctcaacccgtcgcattcaaggcgacggaggagaagaaggaggaggctacaccaagtcgacaaccaatagacgcctccaagctcgacaatgaggaaatggcgctcgtcatcaagagcttccgccaaatcctcaagcaaaggagagggaaagaccacaagtcccgctccaagaatgtttgctacaaatgtggtaagcccggtcattttattgctaaatgtcctatatctagtgacagtgaccgaggcgacaacaagaaggaaagaagaaaggagaagaagaggtactacaagaagaagggcggcgatgcccatgtttgtcgggagtgggactccgacgaaagctcaagcgactcctccgacgacgaggacgccgccaacatcgccgtcaccaagggactcctcttcccaaacgtcggccacaagtgtctcatggccaaggacggcaaaaagaaggttaaatctaaatcctccactaaatatgaatcctctagtgatgataatactaatgatgaggaagataacttgcgctctctttttgccaacctcaacatgcaacaaaaagaaaaacttaatgaattgattagtgccatccatgaaaaggatgatctcttggacacccaagaggacttcctaatcaaggaaaataaaaagcatgttaaggttaaaaatgcctatgctctagaaattgagaaatgccaaaaattatctagtgagctaagcacttgccatgaaacaatagacaaccttagaaatgaaaatgctaatttgttagctaaggttgattctcatgtttgcaatgtttcaattcccaaccctagagataataatgatgatttgcttgctaggattgaagaattgaacatttctcttgctagccttagaattgagaatgaaaaattgcttgctaaggctaaagattttgatgtttgcaatactaccatttctgaccttagaactaagaatgatatcttgcatgctaaggttgtagaattaaaatcttgcaaaccctctacatctaccattgagcacgtttccatttgtactagatgtagagatgttaacattgatgctatacatgatcacatggctttaattaaacaacaaaatgatcatatagctaaattagatgctaaaattgctgagcataacttagagaatgaaaaatttaaatttgctagaagtatgctctataatgggagacgccctggcatcaaggatggcattggcttccaaaggggagacaatgtcaaacttagtgcccctcctaaaagattgtctaattttgtaaagggcaaggctcccatgcctcaggataacgagggttacattttgtaccctgccagttatcctgagagcaaaattaggagaattcattctaggaagtctcactctggccctaaccatgcttttatgtataagggtgagacatctagctctaggcaaccaacccgtgctaagttacctagaaagaaaactcctaatgcatcaaatgatcatgacatttcatttaaaacttttgatgcatcttatgtattgactaacaaatccggcaaagtagttgccaaatatgttgggggcaagcacaaggggtcaaagacttgtgtttgggtacccaaagttcttgtgtctaatgccaaaggacccaaaaccatttgggtttatgcatccgggggctcaagttggatactcgacagtgggtgcacaaaccacatgacaggggagaaaaagatgttctcctcatatgagaaaaaccaagatccccaacgagctatcacattcggggatggaaatcaaggcttggtcaaaggtgtcactgtctttagaagaagtgatgattcaatagcatttaagggtgtgttagagggtcagctatacttagtagattttgatagagctgaactcgacacatgcttaattgctaagactaacatgggttggctctggcatcaccgattagcccatgttgggatgaagaatcttcacaagcttctaaagggagagcacattttaggactaaccaatgttcattttgagaaagacaggatttgtagcgcatgtcaagcagggaagcaagttggctctcatcatccgcataagaacataatgacgaccgacaggccgcttgagctactacacatggatctattcggcccgattgcttacataagcatcgacgggagtaagtactgtctagttattgtggatgattattctcgcttcacttgggtattctttttacaggaaaaatctcaaacccaagaaaccttaaagggattcttgagacgggctcaaaatgagtttgacttaaggatcaagaaaataagaagcgacaacgggacggagttcaagaattctcaaattgaaggcttccttgaggaggagggcatcaagcatgagttctcttctccctacacgcctcaacaaaatggtgtagtggagaggaagaatcgaactctattggacatgggtagaaccatgcttgatgagtacaagacctcggatcggttttgggcggaggcggtcaacaccgcttgctacgccatcaaccggttgtatctacaccgaatcctcaagaagacatcatacgaactcctaaccagtaaaaagcccaatatttcatattttagagtctttggtagcaaatgctttattcttgttaaaagaggtagaaaatctaaatttgctcctaagactgtcgaaggctttttacttggctatgactcaaacacaagggcatatagggtctttaacaagtccactggactagttgaagtctcatgtgacgttgtgtttgatgaaactaacggctctcaagtagagcaagttgatcttgatgagataggtgatgaagaggctccgtgcatcgcgctaaggaacatgtccattggggatgtgggtcctaaggaatccgaagagcctccaaatgcacaagatcaaccatcctcctccatgcaagcatctccaccaactcaaaatgaggaagaggctcaagttgatgaagaagaagatcaatcaaatgagccacctcaagatgacggcatagatcaagggggagatgcaaatgatcaagacaaggaggatgaagagcaaagaccgccacacccaagagtccaccaagcaatccaacgagatcaccccgtcgacaccatcctcggcgatattcataagggggtaaccactagatctcgtgttgctcatttttgtgaacattactcttttgtttcctctattgagccacacagggtagaggaagcacttcaagattcggattgggtggtggcaatgcaagaggagctcaacaacttcactaggaatgaggtatggcatttagttccacgtcctaaccaaaatgttgtaggaaccaaatgggtcttccgcaacaagcaagatgagcatggtgtggtgacaaggaacaaagctcgacttgtggccaagggatactcccaagtcgaaggtttggatttcggtgaaacctatgcacccgtagctaggcttgagtcaattcgcatattattggcctatgctacttaccatggctttaagctttatcaaatggacgtgaaaagtgccttcctcaatggaccaatcaaggaagaggtctatgttgagcaacctcccggctttgaagacagtgagtaccctaaccatgtctataagctctctaaggcgctttatgggctcaagcaagccccaagagcatggtatgaatgccttagagatttccttattgctaatggcttcaaagtcggaaaggccgatcctacactctttactaaaactcttgaaaaggacttgtttgtatgccaaatttatgttgatgatattatatttgggtctactaacgagtctacatgtgaagagtttagtaggatcatgacacaaaagttcgagatgtctatgatgggggagttgaagtatttcttaggatttcaagtgaagcaactccaagaaggcaccttcattagccaaacgaagtacactcaagacattctaaacaagtttgggatgaaggatgccaagcccatcaaaacacccatgggaactaatgggcatctcgacctcgacacgggaggaacttcttttgttaaattgcacacattgctcttctatatacctttgatcatgtctctttcatatgctatgactaatgtgtttttcaagtctatttcaaaccaagtcataggtgtattgaaagggaattggagtcttcggcgaagacaaaggcttccactccgtaactcatccttcgccgacgctccaagtcactctccattcttgggggagaaagcatga

SEQ ID NO: 4949 - DNA, 4389 bp, Zea mays
  Clone ID: TF_ZM5043.C4.o1.fg
atggatcctaagggcaaggggattgtgatcaatgataaggagaaggagtctttcgtcaacgagcctaaagatgacaagtctaccgactcgggctcgggccacaaacgaaaagatgggaagaagaagaagacgaggcgcatcaaggagatcgtctactacgacgacagcgacgagtcctcttcctcccaaaaagacgacgacaacgaccatgaaaaaaagaagacggttaattcaaacttctcttttgattattctcgtattcctcaaagtatcaatgctaatttactcttcattccacttggtaaacctcctcattttgatggagaggactacgaattttggagtcacaaaatgcgtagtcacttgttctctctccatcctagtatatgggagttagtagagagtggaatgaaatttgatagctcggatagtcctttgtttatcaatgaacagattcataaaaatgcacaagctactactgtgttgttagcctcactgtgcagggacgagtaccataaggtgagcggattggacaatgccaagcagatctgggacaccctcaagatctcacatgaggggaacgacgtcaccatgctcaccaagatggagttggtggaaggcgaactcgggagatttgcgatgataagaggggaggagtcaacccaaacgtacaacaggctcaagaccctcatcaacaagataaggagctatggaagcacgcgatggacggaccacgacgttgtccgcctaatgctaaggtcctttactatacttgatccacatctggtaaacaatattcgtgaaaatcctatgtacaccaagatgtcgcccgaagaaattcttgggaaatttcggttcaagacggcgctaaagggtcgcaaggagcaccccaacaagaacaagacgaaggggaagcgctcctgcttcaaatgtggtaagattggtcattttatcgctaattgtaccgataatgatagtgaccaggaaaagaagagtggaaagtgggaaaagaagaagaactacaagaaggcgaagggcgaggcacatcttggaaaggagtgggattcggattgctcctcgtccgactccgacaacgaaggactcgccgccaccgccttcaacaagtcatccctcttccccaacgagcatcacacttgcctcatggcaagggaaaagaaggtaagcactcgtaatactagtacttatgcttcttcaagtgaggatgagtctagtgatgatgatgaaatagattattcatgtttattcaaaggcctagatagaaccaaggttgataaaattaatgaattaattgatgccttgaatgataagaataggttattagaaaagcaagaggatcttttgtatgaagagcatgataaatttgttagtgcacaaaattctcttgctctagaagttaaaaggaatgaaatgctttcttgtgaactatctacttgtcatgaaaccatttctactttaaaaggtgttaatgatgatttaaatgctaaactagtagtagcgaataaatctaactcttgtgtagaacatgttatgatttgcaataggtgcaaagattttaatgttgatgcttgtagtgaacacctagcttgcatttctaaattaaatgatgaagtggctagtcttaatgcccaacttaagactagcaagagtgaatttgacaagctaaaatttgcaagggatgcctacacgattggtagacacccctcaattaaggatggtcttggcttcaagagggaagtcaagaacttaacaagccataaggctcccatctccgccaaggagaaagggaaggcccctatggctagaagtgctcaaaagaaccatgccttcatgtatcatgataggagacattctagaaatgtttatagaagttatgatgcttttgattctcatgctatggttgcttctagttcttctattatgcatgatagaaatttagctaggagaaatgctattaatcacatgcctagaagaaatattgttcatgtgcctaggaaaacaaatagtgaaccttctacaatttatcatgctttaaatgcttcctttgctatttgtagaaaggataggaagataattgctagaaaattaggggcaaaatgcaagggagataaaacttgcatttgggtccctaaggctatttgtactaaccttgtaggacccaacatgagttgggtttatgcatccgggggctctagctggattatcgacagcggatgcacaaaccacatgacgggggaaaagaggatgttctcttcctacgtcaagaacaaggatccccaagattcaatcatattcggtgacgggaatcaaggcaaggttaaaggcttaggcaagattgcaatctcaaatgagcactctatttctaatgtattcttagttgagtcgcttggatataatttgttatccgtaagtcaattatgtaatatgggatataattgtctattcacaaatgtagatgtgtctgtctttagaagaagtgatggttcactagcttttaagggtgtattagacgacaaactctatttagttgattttgtaaaagaggaggccggtctagatgcatgcttaattgctaagactagcatgggctggctgtggcatcgccgcttagcacatgtggggatgaagaaccttcacaagcttctaaagggagaacacgtaataggtctagctaatgttactttcgaaaaagatagaccttgtgcagcttgtcaagcagggaaacaggtgggaagctctcatcatgccaaaaatgtgatgacaacatcaagacccctagagttacttcatatggacctcttcggacccgtcgcctatttaagcataggaggaattaagtatggtcttgttatagttgatgatttttcccgcttcacatgggtattctttttgcaggataaatctgaaacccaagggaccctcaagcgcttcctaaggagagctcaaaacgagtttgagctcaaggtgaaaaagataaggagcgacaatgggtccgagttcaagaaccttcaagtggaggagtatcttgaggaggaaggaatcaagcatgagttctccgctccctacacaccacagcaaaatggtgtagtacagaggaagaacaggacgcttatagacatggcgaagacaatgcttggagagttcaagaccccagagcgcttttggtcggaagccgtgaacacggcttgccacgccatcaaccgggtctaccttcattgcctcctcaagaagacttcgtatgagctactaaccggtaacaaacccaatgtttcgtatttccgagtttttgggagcaaatgctacattctagtgaagaagggtaggaattccaaatttgctcccaaagccgtagaagggtttttgttaggttatgactcaaatacaaaggtgtatagggtcttcaacaaatcatcgggtttggttgaagtctctagcgacgttgtatttgatgagactaatggctctccaagagagcaagttgttgatcttgatgatatagatgaagaagacgttccaacggccgcaatgcgcaccatggcgattggagatgtacggccacaggaacaaaaggagcaagatcaaccttcttcctcaacaatggtgcatcccccaactcaagacgatgaacaggttcatcaagaggaggcgtatgatcaagggggagcacaagatgttcatgtgatagaggaagaagcacaaccggcacctccaactcaagtccgagcgatgattcaaagggatcatcccgtcgaccagattttgggtgacattagcaagggagtaactactcggtctcgattagttaatttttgtgagcattactcttttgtctcttctattgagcctttcagggtagaggaggccttgctagatccggactgggtgttggccatgcaagaggagctcaacaacttcaaaaggaatgaagtttggacactggtgcctcgtcccaagcaaaatgttgtgggaaccaagtgggtgttccgcaacaaacaagacaagcacggggtggtgacaaggaacaaggcacgacttgtggcaaaaggttatgcccaagtcgcaggtttggactttgaggagacttttgctcctgtggctaggctagagtccattcgtattttgctagcatatgccgctcaccattctttcaggttgttccaaatggatgtgaagagcgctttcctcaacgggccaatcaaggaggaggtgtacgtggagcaaccccctggcttcgaggatgaacggtaccccgaccacgtctgtaagctctctaaggcgctctatggacttaagcaagccccaagagcatggtatgaatgccttagagactttttaattgctaatgctttcaaagttgggaaagccgattga

SEQ ID NO: 4950 - DNA, 4064 bp, Zea mays
  Clone ID: TF_ZmC119_1836
ttacaatttacatgaggctaggaagcctgggaaattcttatttaaaaagtcttgggtttcccatgtagcctcatcttccgaatgctggttccactgtatcttgtagaacttgagagtctttcttcgggtgaccctgtccttttgatccagaactcgaataggatgttccgagtaggttaaatctggttctaggacaacatcagttatttcaacggttcgatcaggaacccgaagacacttctttagttgtgacacgtggaacacattgtgcacagcagacaaggtttcggggagttggagtcgatacgccactggcccatatctttccagaataagaaaaggaccaatatatcgtggtgcaagttttcctttaactccgaaacgcgatacgcccttcattggtgagaccttcaagtagacatagtctccttcaagaaaatataagggcattcgccgtttgtctgcataactcttttgccgtgcttgagctttcttcatattatggataattctctgaaccttttcttcaacctctttcaccatatcaggtctaaagaagtatctttctccaggttcagaccaatttagcggagtccgacaccgtcgtccatataaagcttcaaagggtgccatcttgatactttcttggtagctattattatatgaaaactccgctaaaggtaaacattcatcccattttagtgagaaatccaggacacatgcccgcagcatatcttcaagtatttggttcactctctcagtttgtccactggtttgaggatgataggccgaactgtggagcagtttagtacccaggaatttatgaagttcttcccagaatttagatacgaattgaggtccacgatccgacactatagtctttggaacaccatgcaaactgagaatacgggtaatgtataactccgcataggtaatgacgggatatttaactttgaccgggagaaagtgggcgatctttgtaagtcgatcgatgataacccagatggagtcaaagccttttgcggttctgggcaatcccacaatgaagtccatgctgatgtcttcccatttccatgttgggattggcaaagattgtaatggaccagcagttttcatgtgtatggccttgacacgtctgcaggtgtcacacttagccacatagcgtgcaatttcaatcttcatttttgtccaccagtaatgttgctttaaatcttggtacatcttagtgcttccgggatgaatagaatagcgactaagatgtgcttcatcaagaatttgttggcggagctcttcggtctttggtactactatgcggtttttgaaccatatcacaccctgatcgtcttccttgaaacacttggctactccagcctttatcttttctcgaatgtgcttcatacccagattatccctttgagcatcaattatcctttgcaaaatgattgactcaagctttaactgatttagagtcccttgttggatgatcgccaggtttagcttttccatttcctgacacaaagtgttcttggaagtcttcgccataagacagtggcaggaagtcttacgactcaacgcatctgccaccacattggccttgcctgggtgataatggatctccaattcatagtctttgatgagctcaagccatcgtctttgtctcatattcaactctgactgggtgaagatgtacttcaaacttttgtggtccgtataaatgtgatagacattccccagcagatagtgacgccatattttgaggccatgaaccaccgcaactaactccaggtcatgagttggataatgttcttcatgctggcgtaactgccttgaagcataagctattactcggccttcttgcattaaaacacagccgagaccactgcctgatgcgtcacaatacacatcaaagggcttttcaatatccggttgagccaataccggagcagtggttaataatagtttaagctgctcaaaagcttcattacatttcgaagaccaattgaatttaatatcactcttcaataaacttgtgattggtttcacaagcttagaaaaatctggaatgaatcggtggtaataaccagccagcccaaggaaatttcggacttgatgtatagtggttgggggtttccactccaaaatatccttgactttgctgggatctaccgcaatccccttagcagataatacatgtcccataaattgaatctcctctagccagaatacgcacttactgaacttagcatataattgatgttcccttaagcgcgtcaatacgatccgcaagtgctgagcatgctcctcttcattcttggagtatatcaagatatcatcaatgaataccaccacaaacttgtccaactcgggcataaataccgacttcatcagatatgtgaagtgggcaggagcattcgtcagtccgaaagacataactagatattcaaataatccataccgcatggtgaatgcggtctttggtatatttttgggtcggatacggatctgatgataacccgacctgaggtcaatcttggagaatacccgagctccggtaagttgaccaaatagaatgtcaatccggggaagagggtacttattttttatggtgacctcattaaggggtctataatccacgcacatccgcagtgtttgatccttcttcttgacgaagatggctggacaaccccaatgtgaagaacttggccggataaatcctttttcaagtagatcttgcaattgggtcttgagttctgccagttcatttggaggcattcggtacgaccttctagaaataggagccataccgggcttcaactcaatcacaaattctacatctctttttagaggcaatcccggcagatcttctggaaagacgtctgggaactcacatactaccggaatatcttggatctccggtatgatagctccatacactctgccaattggtccagctggaatggctatggggatagacaaaagaatctcttcttggccataactcaaccagattgttctcagatcagtgttgaggattgctttatgatctatgtcttggccttttagaacaatcatgtttgttggaaagtcccgttcagccaatgttacgggcacttggtaagccacttctttagtaaatatttgtcccccaagcgaatgaatagtaaacccttcccttgattcagtatatggaatgcaatgtttttccacaaatttcttgcttatgaaagtatgcgaagcaccagaatcaaagagaataactgcagggtgattggccacgaggaacgtacccatcatcaccggttcgccttccggtgttgtggccacttgagtataatagatccatcctgttttccttgtatttttgcccgcagtactgtttgccgcatttcccttggaactctcggacctctgttgattatttgattgattctgcctcgggtatggacagtccttaataaaatgaccaaactttccacagttgaagcagccagttgaagaactaggtagggtggggaaacgagcaccaggggcactcggctgatttgtagaagtgggggcaatggtaggatgaatgaaaacaggctgtttgaacggataggacggtggacgaggcgaagaacgattctgattaaaaggtcggattaccaacctggttcgcttctcaggtccctgattggacctgtcacctccaaatctctttaattttccttggcctgtattcttggcttctactaccagtgccatgctgacagctctactgtaagtaagatctaggcaggtggccattttccgttggagccggtcgttgagtcctctcatgaagcaattcttcttcttcaggtcagtgtttacttggtcaatcgcatattgggataaatgattaaacttgttgagatactgcatcacagtatccccaccttgttttaatcgaataaactcctcttgtttcatgtgaagcactccctctggaacatagtgttcactgaatgctagattaaattcatcccaagtgatccgatgtccggctggttgaactgctacaaaatttccccaccaggtactcg

SEQ ID NO: 4951 - DNA, 1269 bp, Zea mays
  Clone ID: TF_ZmC143274_1
cttcgcccctacagatcgaaccaaggaggcagcaaccagcgcacgccactgcggcgctaggagctcgcagaagcgccgccccacgagagggagtccagagcatggaagagatccggtggcagagcaggtcggtcggagatgggagtcccggcgttctaccggtggctggcggaccgctacccgctgacggtgtctgacgcggaggaggaggagcccgtggagctcgagcccggcgccttcgtccccgttgacctccgccgccccaatcccaacggcctcgagtttgacaacctctacctcgacatgaatggtatcatccacccatgcttccaccccgagggccggccggcgcccaccacctacgacgaggtgttcaagtcgatttttgattacatcgaccacctcttcggcctcatccgccccaggaagcttctctacatggccattgatggtgttgctccaagggcaaaaatgaaccagcagaggtccaggcgattccgggctgctaaggacgcggctgatgcggcagcggaggaagagaggctgaggaaggagtttgaggcagagggtaggactctagcccagaaagagaagtcggaggcaattgactccaatgtcattactccagggacggagttcatgtttgtactatctacggcgcttcagtactacatacagctgaggctgaatcacacgcttggatggcagtctgtaaagataatactgtctgattccaatgtccctggagagggagagcacaaaattatgtcatacatccgcctgcagcgcaatcttcctggctttgatcccaatacacgccattgcttatatggcctggacgctgatttgattatgcttgctctagcgactcacgaggttcacttctcaattttaagagaggtgatctccatgccagggcaacatgaaaaatgttttctttgtggtcaagttgggcatttggctgctgaatgcagaggtcctagtcagcctgataattctgtggagctacctcctattcataaaaagaaataccagtttcttaacatatgggtgttgcgtgaatacctggcaaaggatttggaaattatagatgctcccttcaagataaactttgaacgtcttattgatgattttgtgtttatgtgtttctttgttggcaatgactttcttcctcatatgccaactttggaaattcgtgagggtgccattaatcttctcatgagtatctacaggtcggagttcacatcaatggggtgttacctaactgat

SEQ ID NO: 4952 - DNA, 4209 bp, Zea mays
  Clone ID: TF_ZmC951_336
ttacaggttctctggaggaaatggttgctggcataacttggccgtccaccttgccaccgggttggactgtcgagtgggaccctgcctcggcttttgatccacggacttacctcccgtgtcgaggtcgagatgctcattagttcccatgggtgtcttgatgggcttggcatccttcatcccaaacttgtttagaatgtcttgagtatactttgtttggctaatgaaggtgccttcttggagttgcttcacttgaaatcccaagaagtacttcaactcccccatcatagacatctcgaaattttgtgtcatgatcctacatgctcttggagcttgcttgagcccataaagcgccttagagagtttatagacatggttagggtactcaccatcttcaaagccgggaggttgctcaacatagacctcttccttgattggtccattgaggaaggcacttttcacgtccatttgataaagcttaaagccatggtaagtagcataggccaataatatgcgaattgactcaagcctagctacgggtgcataggtttcaccgaaatccaaaccttcgacttgggagtatcccttggctacaagtcgagctttgttccttgtcaccacaccatgctcatcttgcttgttgcggaagacccatttggttcctacaacattttgattaggacgtggaactaaatgccatacctcattcctagtgaagttgttgagctcctcttgcatcgccaccacccaatccgaatcttggagtgcttcctctaccctgtgtggctcaatagaggaaacgaaggagtaatgctcacaaaaatgtgcaacacgagatctagtagttacccccttatgaatgtcgccgaggatggtgtcgacggggtgatctcgttggattgcttggtggactcttgggtgtggcggcctttgctcttcatcctccttttcttgattatttgcatctcccccttgatcattgccgtcatcttgaggtagctcatttgcttgatcttctacttcatcaacttgagcttcatcctcattttgagtcggtggagatgcttgcgtggaggaggacggttgatcttgtgcatttgaaggctcttcgggttccttaggacacacatccccaatggacatgttccttagagcgatgcacggagcctcttcaatacctatctcatcaagatcaacttgctctacttgagagccgttagtctcatcaaacacaacgtcacaagaaacttcaacttgtccagtggacttgttaaagactctatatgcccttgtgtttgaatcatatcctagtaaaaagccttctacagtcttaggagcaaatttagattttctacccttaaattctattgaatcatcacttctcctaaagatagtgacacctatatcagtgaatagacagttgtagcccattttgcataattgagatacagaaagcaaattgtaatctaatgaatcttgatttccatccccgaatgtgatagctcgttggggatccttgtttttctcgtaggaggagaacatcttcttctcccctgtcatatggtttgtgcacccgctatcgatgatccaacttgagcccccagatgcataaacccaaacggttttgggtcctttggcattagaaacaagaactttgggtacccaaacacaagtcttggagcccttgtgtttgcccccaacaaacttggcaactactttgccggatttgttagtcaaaacataagatgcatcaaaagttttaaaagaaagactatgttcatttgatgcactaggagttttcttcttaggcaacttagcacgggttggttgcctagagctagatgtctcacccttatacataaaagcatggttagggccagagtgagacttcctagagtgaattctcctaattttgtcctcgggataaccggcagggtataaaatgtaactctcgttatcctgaggcatgggagccttgcccttaacaaagttagacaatcttttaggaggggcattaagtttgacattgtctcccctttggaagccaatgccatccttgatgccagggcctctcccattatagagcatacttctagcaaatttaaaattttcattttctaagtaatgctcggcaatttttgcatctaattttgatctagtacaaatagatacatgctcaacgatagatgtagagggtttgcaagattttaattctacaaccttagcatgtaacatgtcattcttagttctaaggtcggaaatagtagcattgcaaacatcaaaatctttagccttagcaagcaatttttctttttcaatcctaaggctagcaagagagatgttcaattcttcaatcctagcaagtaaatcatcatcattatttctagaattggtaattgaaacattacaaacatgagaatcaaccttagctaacaaattagcattttcatttctaaggttgtatattgtcacatggcaagtgcttagctcactagataatttttcacatttctcaatttctagagcataagcatttttaaccttaacatgtttcttattttccttaattaggaagtcctcttgagaatccaaaaggtcatccttttcatgaatagcactaattaattcatttaatttttccttttgttccatgttaaggttggcaaaaagggtacgcaaattatcttcctcatcactagcattatcatcactagaggactcatatgtagtggaggatttagatttaaccttcttctttttgccgtcctttgccatgaggaacttgtggccgacgttggggaagaggagtcccttggtgacggcgatgttggcggcgtcctcgtcggaggaggagtcggtggagctctcgtcggagtcccattcgcggcacacgtgggcatcgccgcccctcttcttgtggtacctcttcttttctctcctcttgcccttcttgtcgttatccctgtcactgtcacttgataatggacatttggcaataaagtgaccgggcttaccacacttgtagcaaacctccttggagcgggacttgtagtctttccccctcctttgtttgaggatttggcggaagctcttgatgacgagcgccatttcctcattgtcgagcttggaggcgtcgattggttgtctacttggtgtagactcctccttcttttcctccgtcgccttgaatgcgacgggttgagcttcggatgtggagggatcatcaagcttgttgatcttcctcgagccttcgatcatgcactcaaaactcacaaaattcccgattacttcctcgggggtcattagtgtatatcttgggttgccacgaattaattgtacttgagtagggttaagaaaaataagagatcttagaataaccttaaccattttgtggtcatcccatttcttgctcccgaggttgcgcacttgattcaccaaggtcttgagccggttgtacatattttgtggctcctcccctttgcgaagccggaaccgaccgagctccccctcgatcgtctcccgcttggtgatctttgtaagctcatctccttcgtgtgcggttttgagcacatcccaaacctccttggcgctcttcaacccttgtactttgttatactcctctctacttagagaagcgaggagtattgttgttgcttgagagttgaagtgctcgatttgggcaacctcgtcctcatcataatcttcatcccctacggatggtacctgtgcaccaaactcaacaacatcccatatacttttgtggagtgaggttagatgaaatcgcattaaatcactccacctagcgtaatcttcaccatcaaatgttggtggtttgcctaatgggacggaaagtaaaggtgtatgtttggaaatgcgagggtagcgtaggggaatcttactatacttcttacgctcttggcgcttagaagtgacggacgtcgcgtcggagccggaggtggatgccgatgaagaatcggtctcgtagtaaaccaccttcctcatcctctttttcttgtcctcactccgatgcggcttgtgggaagaggacttctccttccctttggaggagtccttcttcttctccttccttttggaggagtccttcttcttctccttcctcttggtgcgggactcttccaatgaaacactcccgtggcttgtagtgggcttttcgccggtctccatctccttcttggcgtgatctcccgacat

SEQ ID NO: 4953 - DNA, 1296 bp, Zea mays
  Clone ID: TF_ZM3617.C9.o1.fg
atggctctcatcatcaagagcttccgccaaatcctcaagcaaaggagggggaaggactataaacctcgctccaagagagtgtgctacaaatgtggtaagtccggtcattttattgctaaatgtccaatgtctaatgatagtgacaggggcaacgacaagaaggggaagaagaaggaaaagaagaggtactacaagaagaagggcggcgatacccacatgtgtcgggaatgggactccgacgagagctccaccgactcctccgacgacgaggatgccaccaacatcgccgtcaacaagggactcctcttccccaacgtcggccacaagtgcttcatggcaaaagacggcaaaaagaagaaggtacaatctagagccaccaaatatacaacatctagtgatgaaggtagctctagtgaagatgaagatgatttgcttactctttttgccaaccttaacatgcaacaaaaggaaaaattaaataaattaataggagccattcatgagaaggatgaacttttggatagccaagaggaattccttattaaagaaaataagaagcatgttaaagttgaaaagttaaatgcttgtaatgattcaattgtcagtcttagaaatgagaatgctagtttaattgctaagattgataaattgaatgaatcaatttctagccttagagatgaaaatgctagattaatttctaaggctaaagatttaaatgtttgcaatgattctatttccagtcttagaaatgagaatgctattttacatgctaagattgatgaattaaatgtttgcgaaccctctacatctactgttgatcatgtttccatttgcactagatgtagagatgtcaatgttgatgctataaatgatcaccttgctttaattaaacaacaaaatgatcatatagctcaattaactactaaaattaatgagcatgaaattgaaaatgaaaagtttaaatttgctagaagcatgctctataatgggagatgccctggcatcaagaatgacattggtttccaacagggaagcaatgtcaagcttaatacccctaagaaactgtctaattttgttaagggggagaagagaatgttctcctcctatgagaaaaacgaagatccccaacaagctatcacattcagggatggaaatcaagattctttagattataacttgctttcagtttctcaattatgcaaaatgggttacaactgtctttttagcgatgtaggtgttactgtctttagaaggagtgatgattcaatagcatttaagggagtgttagagggtcag

SEQ ID NO: 4954 - DNA, 366 bp, Zea mays
  Clone ID: TF_ZM4405.C3.o3.fg
atggctctcatcatcaagagctttcgccaaatcctcaagcaaaggaggggggaagactacaagtcccactccaagatggtttgctacaagtgtggtaagcccggtcatttcattgctaaatgtccattatctagtgatagtgacaggggcgacgacaagaagggaaagagaagagaaaagaagagatactacaagaagaagggcggcgatgcccatgtttgccgggagtgggactccaacgagagctccaccgactcctcctccgacaaggacgccgccaacatcgtcgtcaacaaaggcctcctcttccccaacgtcggccacaagtgcctcatggcaaaggatggcaagaagaagaagaaatga

SEQ ID NO: 4955 - DNA, 2259 bp, Zea mays
  Clone ID: TF_ZM5034.C4.o1.fg
atggctctcatcatcaagagcttccgccaaatcctcaagcaaaggagggggaaggactataaacctcgctccaagagagtgtgctacaaatgtggtaagtccggtcattttattgctaaatgtccaatgtctaatgatagtgacaggggcaacgacaagaaggggaagaagaaggaaaagaagaggtactacaagaagaagggcggcgatacccacatgtgtcgggaatgggactccgacgagagctccaccgactcctccgacgacgaggatgccaccaacatcgccgtcaacaagggactcctcttccccaacgtcggccacaagtgcttcatggcaaaagacggcaaaaagaagaaggtacaatctagagccaccaaatatacaacatctagtgatgaaggtagctctagtgaagatgaagatgatttgcttactctttttgccaaccttaacatgcaacaaaaggaaaaattaaataaattaataggagccattcatgagaaggatgaacttttggatagccaagaggaattccttattaaagaaaataagaagcatgttaaagttgaaaagttaaatgcttgtaatgattcaattgtcagtcttagaaatgagaatgctagtttaattgctaagattgataaattgaatgaatcaatttctagccttagagatgaaaatgctagattaatttctaaggctaaagatttaaatgtttgcaatgattctatttccagtcttagaaatgagaatgctattttacatgctaagattgatgaattaaatgtttgcgaaccctctacatctactgttgatcatgtttccatttgcactagatgtagagatgtcaatgttgatgctataaatgatcaccttgctttaattaaacaacaaaatgatcatatagctcaattaactactaaaattaatgagcatgaaattgaaaatgaaaagtttaaatttgctagaagcatgctctataatgggagatgccctggcatcaagaatgacattggtttccaacagggaagcaatgtcaagcttaatacccctaagaaactgtctaattttgttaagggggagaagagaatgttctcctcctatgagaaaaacgaagatccccaacaagctatcacattcagggatggaaatcaagattctttagattataacttgctttcagtttctcaattatgcaaaatgggttacaactgtctttttagcgatgtaggtgttactgtctttagaaggagtgatgattcaatagcatttaagggagtgttagagggtcaggtatacttagttgattttgatagagctgaacttgacacttgcttaattgctaagactaatatgggttggctctggcatcgccgactagcccatgttgggatgaagaatcttcacaagcttctaaagggagaacacattttgggaataacaaatgttcattttgagaaagacaagttcagcttaaggatcaaaaagataagaagcgataatgggacagagtttaagaattctcaaatagaaggatttcttgaggatgaggggatcaagcatgagttctcttctccctacacacctcaacagaatggtgtagtggagagaaagaatagaactctactagacatggcaaggactatgcttgatgagtacaagacaccggaccggttttgggctgaggcgattaacaccgcctgctactccatcaaccggttatatcttcaccgaatccttaagaagacatcttatgaactcctcaccggtaaaaagtccaatgtttcatattttagagtctttggtagcaaatgttttattcttgttaaaagaggtagaaaatctaaatttactcctaaggctgtagaaggctttttactaggatatgattcaaacacaagggcatatagagtctttaacaagtccactggactagttgaagtttcttgtgacattgtgtttgatgagactaatggctcccaagtggagcaagttgatcttgatgaattatatgatgaagaggctccgtgcgtcgcactaaggaacatgtccattggggatgtgtgtcctaaggaatccgaagagcctccacaagcacaagatcaaccgtcatcttccaatcaagcatctccaccaacccaaaatgaggaacatgctcaaggtgatgaagaagaagatcaagaagatgagccacctcaagaagaggtcaatgatcaagggggagatgaagataatcaagacaaggaagatgattaa

SEQ ID NO: 4956 - DNA, 4113 bp, Zea mays
  Clone ID: TF_ZM4939.C1.o6.fg
atgctgaatattgcacaatgcactgatcgggagaaggttttatatgcttctggacgtctgacaggtcctgctgctgactggtgggattcatatactgctgcccacgatgctgctgatactatcacttgggcagagttcagtacacaattcaggaactaccatattccagctggtatgataaagatcaagaagaaggagtttctgtcgctaaagcaaggaagtatgtcagtcagcgagtaccgcgacaagtttattcagttatccagatatgcccctgaagaagttgctgaagacgagaggaagcaggagcattttattgaaggacttaatggaccactgcagtatgctctagtggcacacacatttccatcatttcagagactgttagataaggctcttgctattgaacacaagcgtgttcagctgggagatttgaagagaaaggcaatatctcaaggacaaggaagcagcagtgttcgtcctcgctacagttcaccacagagtacaccgactcgaccaggaggaccacgcccagttcagcaatcaccactgaggactccacctcctcgacaggctacccctactggcaccccgacgaagttttcaggacagagtccaggcaccacatgtttcaagtgtgggaagaatggtcattatgcaaatgtctgcccacagaggatggctactactccagttcagaacaggcagcaaacaccaggttctggcaagggatattctattgccaaggttaatcaagtcagcgttgatgctactccggatggaggggacctcgtaattggtatgttttatgttaatgcaattcctgcaaccatattatttgattctggtgctacacattcattcatgtctgctcgttatgccaacacaaatgaaataccactgctaaatatgagaaaaccaatgatagtagtcacacctaaagggcctgttgaggcgaatcaaatgacacgtagattgacattgaccattatgggtagagaatttggagctactgctataatattagagtcaagcagtatagatctgatccttggtatgtcatggctaagaaaggcaaaggccgttatagcatgtggtagaggtaccgtagaactcactactactaagggagaaaggtttcaagttaacattgcagtaacctcctcacccatgcgtgcaatgttctttatacctaaggagtttgttggtaacaacatccgggtggttagagattttccggatgtctttccagaggagttaccagggatgccacctgagagagaagttgagtttgttattgacctcttacctggaaccgcccctatttctaaacggccctataggatgtccgtagaggagttgaaggaacttaagaagcagttaactgagttacaagaggctgggtacattcgtccgagttcctcaccttggggagcaccggtcttgtttgtacagaagaaggatgaatcgcagcggatgtgtgtggattatagatctcttaatgatgttacagtgaagaacaagtatccgttgccccgtattgaggatttatttgatcagatgagaggtgcaagagtattttcgaagattgatctccgatcgggataccatcagatgaggattagaccatcagatattcccaagacggctttctcgactcgatatggattatatgagtttactgttatgtcgtttggattaaccaatgcaccagcttattttatgaacttaatgaacaaggtgtttatggagtatttggacagattcgtcgtggtattcatcgacgatattcttatctattctaagagtgatagtgatcacgaggaacatctaaggatggtgctacagaaactacgagataaccagctatatgccaagttcagcaagtgcgagttttggattgacgaggtgccatttcttggtcatattatttccaatggaggaatttcagtggatcctgctaaggttaaggagataatggagtggagagtacccactacagttactgagattcgaagtttcttgggattagcaggctattatcggagatttattgaaggattttctaagattgctaaacctatgacttcacttttggagaagggaaaagaatttaagtgggacgagaagtgtcaagacagctttgatctattgaagaagaggttgatgtcgccaccagtattggttatgccagacctacagaaaggatttgatatctattgcgatgcatgtggccaaggcttaggatgtgtgctcatgcaagaaggacatgtgattgcctatgcatctcgtcagttgcggaagcatgaactgaactaccccactcatgacttggaactagcagcagttgtgcatgcacttaagatttggagacactacattatggggactaagtgccaagtatatacggatcataagagtttgaagtatatattcactcagaaggatctcaaccttaggcaacgccgttggttggagcttattaaggattatgatttggagattcactatcacccgggcaaggcgaatttggttgcagatgccttgagtcgcaaggagcatgttcattcagctattgttgcccagctacctgatgagattgttgaggatttcaggagacttaacctggggatagttactcatactgaaggagttactattgatgtggaacctactttggagcaggagatccgcaaaggacaaattggtgatgctaaaataaaagagattaaggatctgattactgaaggccgagttccggaattcacggaagatgagcaaggcattgtatggttcaaggatagaatgtgtgttcctgatattaaaagccttcgagagattatattgaaagaggcccatgactcggattactctattcatcctggtagtactaagatgtatcaggatttgaagcggaagtattggtggtatggattgaaaagagatgtagctgcacatgtggctatgtgtgatgtatgtcaaagagttaaggctgaacatcagaggccagctggactattgcatccactgaagatacccgagtggaagtgggaagagattggtatggattttatcactggattgcctcgcacccagaaaggatatgatgctatatgggtgattgtggatagattgactaaagtggctcacttcattcctgtgaagactacttataaaggttctcagctagcagagttatatatggctcggattgtgtgtttacatggagtaccaaagaagatcgtgtctgatcgaggttcacagtttacctcaagattttggagaagctttcatgagaatatgagtacaaagttgaattttagtacggcttatcaccctcagactgatggacagactgaaaggactaatcaagtattggaagatatgttgagagcttgtgcccttcagcatggaggaagttgggataagagtctgccttatgctgagttctcatataacaatagctatcaggccagtctgaagatgtcaccttttgaagctctatatgggaggaagtgcaggactcctttgtattgggatcagactggagagagacagttctttgggcctgaattgattcaagaagcagaagaacaagtccgtataattcgagagaatttgagagtggctcaaaccaggcaaaagagttatgctgataatagaaggaggccactggaatttgaagaaggagattatgtgtacctcaaggtgtcaccactgcgtggaatgaggagattcaaagttaagggcaaattgtcccctcgctatattggaccattcttgatctttaggcgagttggggagatggcataccaactcgagttacctgctagtctatcggatgtgcataatgtgttccatgtgtctcaactgaagaaatgtctccgtgtccctgaggaacagttaccgatggaagagctcagtgttcaaggtgatttgacttacacggagtacccgatcaagattttggatactttgactcgggttacgagaaataaggtgataaagatgtgcaaagttcaatggagccaccacggtgaagatgaagcaacttgggaaagagaagaagagcttcgcgtagattttccccaccttttccctagatcttcttag

SEQ ID NO: 4957 - DNA, 1206 bp, Zea mays
  Clone ID: TF_ZmC31816_33
ttatttttccttaataaggaattcctcttggctatccaagagttcatccttctcatgaataacccctatcaattcatttagtttttccttttgttgcatgttaaagttggcaaaaagactaaggaagtcatcttcatcatcactagaactaccctcatcactagatgtagtatgcttgggggtggttctagcttgtaccttctttttcttgtcgttctttgccatgaagcatttgtggccgacgttggggaagagaagtcccttgttaacggcgatgttagcggcgtccccgtcggaggaggagttagtggagctcatgtcggagtcccattcctgacacatgtgggcatcaccgcccttcttcttgtagtacttcttttcctttctctttcccctcttgtcatcgccactgtcactatcacttgacataggatatttagcaataaaatgaccgggcttaccacacttgtagcacaccctcttggagcggggtttgtagtccttccccctcttttgcttgaggatttggcgaaagctcttaatgatgagtgtcatttcctcgttgtcgagcttggaggcatcgatggggagcctacttgatgtagactcttctttcttctcctccatcgctttgaatgcgacgggttgcacctcgggtgtggaggtgtcaccttgctccaagttgactatttgtttggagctaaacttcttgcgctcatggcgcttagaagtgacggacggagcgtcggagccggaggtggagggtgacgaagaatcggtctcgtagtagaccactttcttcattttcttcttcttgtcgccactctggtgtgacttgacgcggggaggtgattcctcccttcctttggcgtcggacgcccttgatagagccttcccgtggcttgtggtcgtttctatctccctcttggcggatcctcgcgacatcgtcggagtcccactcccggcaaacatgggcatcgccgcccttcttcttgtagtatctcttcttttccttcctctttcccttcttgtcatcgcccctgtcactatcactagataatggacatctagcaataaaatgaccgggcttaccacacttgtagcaaactttcttggagcggggcttgtagtccttccccctcctttgcttgaggatttggtggaaaattttgctgatgagcgccatcttctcattgtcgagcttgg

SEQ ID NO: 4958 - DNA, 5073 bp, Zea mays
  Clone ID: TF_ZmC951_280
ttacggccgtaaggtgagcttccttagggtcggcttggaatctcccgtgtcgaggtcgagatgcccattggttcccatgggtgtcttgatgggcttggcatccttcattccaaacttggttagaatgtcttgagtgtacttcgtttggcaaatgaaggtgccctcttggagttgcttgacttggaatcctagaaaatacttcaactcccccatcatcgacatctcgaatttttgtgtcatgatcctactaaactcttcacatgtagactcgttagtagacccaaatataatatcatcaacataaatttggcatacaaacaagtcattttcaagagttttagtaaagagtgtaggatcggccttgccgacatgctcttgggcttgtttgagcccataaagcgccttagagagcctatagacatgattaggatactcactgtcttcaaagccaggaggttgctcaacatagacctcttccttgattggtccgttgaggaaggcacttttcacgtccatttgataaagcttaaagccatggtaagtagcataggctaataatatgcgaattgactcaagcctagctacgggtgcataggtttcaccgaaatccaaaccttcgacttgggaatatcccttggccacaagtcgtgctttgttccttgtcaccacaccatgctcatcttgcttgttgcggaagacccatttggttcctacaacattttggttaggacgtgaaactaaatgccatacctcgttcctcgtgaaattgttgagctcctcttgcatcgccaccacccaatccgaatcttgaagtgcttcctctatcctgtgtggctcaatagaggaaacaaaagagtaatgttcacaaaaatgtgcaacacgagatcgagtggttacccccttatgaatatcgccgaggatggtgtcgacggggtgatctctttgtattgcttggtggactcttgggtgtggcggccttggttcttcctcgtcctccttttcttgatcatttgcatctcccccttgatcattgccgtcatcttgaggtggctcatttgcttgatcttctacttcatcaacttgagcttcatcctcattttgagttggtggagatgctagcgtggaggaggatggttgatcttgtgtagttggaggctcttcggattccttaggacacacatccccaatggacatgttccttagcgctatgcatggagcctgttcttcacttatctcatcaagatcaacttgctctacttgagagccgttagtttcatcaaacacaacgtcacatgagacttcaactagtccagtggacttgttaaagaccctatatgcccttgtgtttgagtcataaccaagtaaaaagccttctacagttttaggagcaaatttagattttctacctcttttaacaagaataaagcatttgctaccaaaaactctaaaatatgaaatgttgggctttttaccggttaggagttcatatgatgtcttcttgaggattcggtgaagatataaccggttgatggcgtagcaggcggtgttgactgcttcggcccaaaaccggtccggtgtcttgtactcatcaagcatggttcttgccatgtccaatagagttcgattctttctctccactataccattttgttgtggcgtgtagggagaggagaactcatgcttgatgccctcctcctcaaggaagccttcgatttgagagttcttgaactccgtcccgttatcgcttctaattttcttgatccttaagccgaactcattttgagcccgtctcaagaatccctttaaggtctcttgggtttgagatttttcctgcaaaaagaatacccaagtgaagcgagaataatcatccacaataacaagacaatacttactcccgccgatgcttatgtaagcaatcgggccgaatagatccatgtggagtagctcaagcggcctgtcggtcgtcatgatgttcttgtgtggatgatggactccaacctgcttccctgcctgacatgcgctacaaatcctgtctttctcaaaatgaacatttgttaatcctaaaatgtgctctccctttagaagcttatgaagattcttcatcccaacatgggctagtcggcggtgccagagccaacccatgttagtcttagcaattaagcatgtgtcaagttcagctctatcaaaatctactaagtatagctgaccctctaacacacccttaaatgctattgaatcatcacttcttctaaagacagtgacaccttgatttccatccccgaatgtgatagctcgttgaggatcttggtttttctcatatgaggagaacatccttttctcccctgtcatgtggtttgtgcacccgctgtcgagtatccaacttgagcccccggatgcataaacccaaacggttttgggtcctttggcattagacacaagaactttaggtacccaaacacaagtctttgaccccttgtgtttgcccccaacaaacttggcaacgaccttgccggatttgttagtcaaaacataggatgcatcaaaagtcttaaatgaaatgttatgttcatttgatgcattaggagttttctttctaggcaatttagcatgggttggttgcctagagctagatgtctcacccttatacatgaaagcatgattagggccagagtgagacttcctagagggaattctcctaattttgctctcgggataaccggcagggtataaaatgtaaccctcgttatcctgaggcatgggagccttgcccttaacaaagttggacaatctcttaggaggggcactaattttgacattgtctcccctttggaagccaatgccatccttaatgccagggcgtctcccattataaagcatgctacgagcaaatttaaatttctcattttctaagttgtgctcggcaattttagcatctagttttgctatatgatcattttgttgtttaattaaagccatgtgatcatgaatagcattaacatcaatatctctacatctagtacaaatagatacatgctcaacaatagatgtagagggtttgcaagattttaattctacaaccttagcatgcaacatatcatttttagttctaaggtcggaaattgcaacattgcaaacgtctagttctttagccttagtaatcaatttttcattttctactctaaggctagcaagagaaatgtttaattctttaatcctagcaagcaaatcatcattattatctctaggattgggaattgaaacattacaaacatgagaatcaaccttagcatttaaactagcattttcacttctaaggttgtcaattatctcacggcaagtgcttagctcactagataatttttcacatttttctacttctagagcataagcctttttaaccttaacatgtttcttgttttctttaattagacaatcctcttgggagtccaaaaggtcatccttttcatgaatagcactaactaattcatttaatttttctttttgagctatgttaaggttggcaaaaagggaacgcaaattattttcctcatcactagcattatcatcactagaagattcatatttagtggaggagttagatttaacctttttccgtttgccgtcctttgccatgaggcacttgtggccgacgttggggaagaggagtcccttggtgacggcgatgttggcggcgtcctcgtcgtcggaggagtcgcttgagctctcgtcggaatcccattcccgacaaacatgggcatcgccgcccttgttcttgtagtaccttttcttctcctttcttctccccttcttgtcgtcgcctcggtcactgtcactagatataggacatttagcaataaaatgaccgggcttaccacatttgtagcaaaccatcttggagcgggacttgtagtctttccccctcctttgtttgaggatttggtggaagctcttgatgacgagcgccatctcctcattgtcaagcttggaggcgtctattggttgtcgacttggtgtagactcctccttcttctcctccgttgccttgaatgcaacgggttgggcttcggatgagtcgccaagctcgttgattttcctcgagccttctatcatgcactcaaaacttacaaaatgcccgataacttcctcgggggtcattttagtatatctaggattaccacgaatcaattgaacttgagtgggattaagaaaaatgagagatcttaaaataacatttaccacttcgtggtcatcccacttcttgctcccgaggttgcgcacttggttcaccaaagtcttgagccggttgtacatgtgttgtggctcctcccctttgtgaagccggaaccgaccgagctccccctcgatcgtttcccgcttggtgatcttggtgagctcatctccttcgtgcgcggttttgagcacatcccaaatctccttagcgctcttcaacccttgtactttgttatactcctctctacttagagaggcgaggagtattgtcgttgcttgtgagttgaagtgctcgatttgggccacctcatcctcatcatagttctcatcccctaccgacggtacctgtgcaccaaactcaacaacatcccatatacttttgtggagcgagattagatgaaatcgcattaaatcgctccacctagcgtaatcttcaccatcaaaagttggtggtttgcctaatgggacggaaagtaaaggtgtatgtttggaaatgcgagggtagcgtaaggggatcttactatacttcttgcgctcttggcgcttagaagtgacggagggcgcatcggagtcggaggtcgatgttgatgaagtgtcggtctcgtagtagaccaccttcctcatcctcttgtgcttgtcgcctttccgatgcggcttgtgggaagaagatttttccttcttctctttgtggtgagaagaagatttcttctccttccctttgttggaggagctcttcttcttctccctccttttggtgcgggactcttccgatgaagtgctcttgtagcttgtagtgggcttttcgccggtctccatctccttcttggcgtaatctcccgacat

SEQ ID NO: 4959 - DNA, 4704 bp, Zea mays
  Clone ID: TF_ZM4452.C2.o1.fg
atgtcgggagatcacgccaagagggagatcgtaaccagcggtgacaagtccgcaagctcgggaagaactcattcgagggagtccggccacaagcacaaggaggaatcctcttcctccaccaagtcacaacggagaggtgacaagaagaagatgaagaaagtggtctactacgagaccgactctttgtcaccctccacctccggcttcgaatcggcgtccgtcacttctaagcgccttgagcgcaagaacatatgggatattgttgagtatggagcacaggtaccgaaggtaggagacaaggactacgattcggacaaggccgaccaaattcggcactttaactcccaagccacaactatactcctcacctccttgtgtcgagaggagtataataaggtgcaagggttaaagatgggcaaagaaatttgggacgtcctcaagacagcgcacgaaggggacgaggtgaccaagatcaccaaacaagagacgatcgagggggagctcggtcgattcatcctcaaccaaggagaggagccacaagcaatgtacagccggctcaaaaccttagtcaaccaagtgcgcaacctcaagagcaccaaatgggatgaccatgaaatggtcaaggttattcttagatcactcatatttcgtaatcctactcaagttcaattaatacgtggtgatcctagatacaagctaatgtctcccgaggaagtgataggaaagtttgtgagctttgagttgatgatcaaaggctccaaacatatcgtcaacttggagcaaggcggcacctttacacccaaggtgcaacccgtcgcattcaaggcaatagaagaagaaaagaaggaacctatgccaagtaggattcccatcgacgcctccaagcttgacaacgaggagatggcgctcatcatcaagagcttccgccaaatcctcaagcaaaggagggggaaggactacaaaccccactccaaaagggtgtgctacaagtgtggtaagctcggtcatttcattgctaaatgtcctatgtcaagtgatagtgacaggggcgacgacaagaagggaaatagaaaggaaaagaaaaggtactacaagaataagggcggtgatgcccacgtgtgtcgggaatgggactccgacatgagctccaccgacacctcctccgacgaggatgccgcaaacatcaccgtcaacaagggacttctcttccccaacgtcggccacaagtgtttcatggcaaaggacggcaagaaaaagaaggttgaactcttggatagccaagaggaattccttattaaggaaaacaaaaagcatgttaaggtgaagaatgcttatgctcaggagatagaaaaatgtgaaaacttgactaaagagcttagcatttgccatgacactatctccaaccttagaactgagaatgttagtttaattgctaaggttgaaaaatcgaatgtttgtcatgattcaattgtcaatcttaaaaatgataatgctagattaattgctaagattgataaattgaatgaatcaattgctatccttaaaactgagaatgaaaagttaatttctaaggctaaagatttaaatgtttgcaatgtttatatttccaatcttagaaatgagaatgttattttacatgctaagattgatgaattaaatgcttgcaaaccctctacatctactgttgatcatgtcactatttgtactagatgtagagacattaatgttgatgctattcatgatcacctagcttcaattaaagaacaaaatgatcacatagctcaactaacggctaaaattaatgagcatgaaattgaaaatgaaaaatttaaatttgctagaagcatgctctatagtgggagacgccctggcattaaggatggcattggtttccaacagggaggcaatatcaaacttaatgctcccaaaagattgtctaattttgttaagggcaaagctcccatggctcaggataacgagggttacattttatatcctgctggttatcctgagcataagattaggagaattcatgctaggaaacctcataatgtttcacatcatgcttttatgtataaaaatgaggcttctagctctaggcaatcaacccatgttaaattgcctaaaaagaaaactcctactgcatcaaatgaacctaatgtttcatttaagacttttgatgcttcttatgtgcttactaacaaatcaggcaaagtagttgccaaatatattgggggcaaacaaaagggctccaagacttgtgtttgggtacccaaggattatgcatccgggggctcaagttggatcattgatagtggatgcacaaaccacatgacaggggagaaaaggatgttctcctcctacgagaaaaacgaagatccccaacgagctatcacattcggggatggaaatcaagatttaggtgttactgtctttagaagaagtgatgattcagtagcatttaagggagaaaaatcacaaacccaagagaccttaaaaggattcttgagacgggctcaaaatgagttcggtttaaggatcaagaaaataagaagcaataatgggatggagttcaagaactctcaaattgaaggctttcttgaggaggagggcatcaagcatgagttctcttctccctacacaccgcaacaaaatggtgtagtggagaggaagaatagaactctattggacatggcaaggaccatgcttgatgagtacaagactctggactggttttgggctgaggcaattaacaccgcctgctactccatcaaccggctctaccttcaccgaatcctcaagaaaacatcatacgaactccttaccggtaaaaagcccaatgtttcatattttagagtctttggtagcaaatgttttattcttgttaaaagaggtagaaaatctaaatttgctcctaaggttgtagaaggctttttactaggatatgattcaaacacaagggcatatagagtcttcaacaaatccactggattagttgaggtttcttgtgacattgtgtttgatgagactaatggctcccaagtggagaacatgtccatcggggatatgtatcctaaggaatccgaagagcctccacaagcacaagatcaaccatcatcttacatgcaagcatctccaccaactcaagatgaggatcaggctcaagataatgaagatgaagatcaagaggatgagccacctcaagaggaggacaatgatcaagggggagatgaccatgacaaagacaaggaagatgatcaagaaattcagggtcaacaaccgccacacccaagagtccaccaagcaattcaaagagatcaccccgtgaactccatcctcggcaatattcataagggggtaaccactcgatctcgagtcgctcatttttgtgaacattactcttttgtgtcctctattgagccatacagggtggaggatgtagtaagagactcgaattgggtgttggcaatgcaagaggagctcaacaacttcacgaggaatgaggtatggcatttagttccacgtcctaaccaaaatgttgtaggaaccaagtgggtattccgcaacaagcaagatgagcatggtgtggtgacaaggaacaaagcccgacttgtggccaaaggatattcacaagtcgaaggtttggatttcggtgaaacctatgcacccatagctaggcttgagtcaattcacatattacttgcctatgctacttaccatggctttaagctttatcaaatggacgtgaaaagtgccttcctcaatggaccaatcaaggaagaggtctatgttgagcaacctccaggctttgaagatagtgagtaccctaaccatgtttacaaactctcaaaggcgctttatgggctcaagcaagccccaagagcatggtacaaatgccttagagatttccttatcactaatggcttcaaagtcggaaaagccaatcctactctctttactaaaactattgcaaaagatttgtttgtatgccaaatttatgttgatgatatcatatttgggtctactaacaaatcaacttgtgaagagtttagtaggatcatgattcaaaaatttgagatgtctatgatgggggagttgaagtgttttctaggatttcaagtcaagcaactccaagaagacaccttcaccagccaaacacagtacattcaagacattcttaccaagtttggaatgaaggatgccaaacccatcaagacacccatgggaacaaatgggcatctcgacctcgacacgggagggtgtaaaattgataggaagagcacatcagggacttgtcagtttctggggagatccctggtgtcttgggcttcaaagaaacaaaactcagtagctctttctaacgccgaagccgagtatattgtcgtaggtcattgttgtgcacaattactttggatgaggcaaaccctcagggactatggctacaaattgagcaaattccctctcctgtgtgacaatgagagtgcaatccgcatggcggacaatcccgttgaacacagtcacactaagcacatagccattcggtatcactttttgagggaatcaccaacaaagggtggatatcgaggtgccaaaggttcaacacaaaccaataaaaagatcaaagttggggttcaaaagaaaggagcaaaagaatttgaagagaaccctggtctggtgcaccagattgtccggtgtgccacctaa

SEQ ID NO: 4960 - DNA, 4819 bp, Zea mays
  Clone ID: TF_ZmC6115_1
tgggtacccccgggggtccccgggaaaagccccgtccaccaaaacccgcatccataaacaagaaaaagaaaagaaaacccctgttgccagcgacagaagaagaaggggccccttctccttggttgcgttgcgcctccctcctgtctgcgtgcgtgcaatcgacgcagaggcgcgggcgctcgcaccaccacaaccacgacccgatggctttcatgcgctcccgctcaaatgcatcttctggcatgggagttgctcctaacattagggagacattcgttgagcttcaaatgaagaaggcattccgatatgttatcttcaaaatcgaagagaagcaaaagcaggtggttgtggagaagacaggggctactactgaaagctatgatgattttttggcctctctcccagagaatgactgccgatatgcgctgtatgattttgattttgttactggggagaatgtgcagaaaagcaagattttcttcattgcctggtccccatcgacatcccgcatacgtgctaagatgctgtactccacgtcgaaggaccgcatcaagtacgagcttgacgggttccactacgaaatccaggcgaccgacccatcggaggtggacatcgaggttctccgggagcgggctcactgaagctggttctccttttgaagggacctgtggaggacctaaacctccaaccaataaacaaggcaaggagccgggcggccccacaccaaaacccgcatccataaacaagaaaaagaaaagaaaacccccgctgccagcgacagaagaagaaggggtcccttctccttggttgcgttgcgcctccctcctgtctgcgtgcgtgcaatcgacgcagaggcgcgggcgctcgcaccaccacgaccacgacccgatggctttcatgcgctcccgctcaaatgcatcttctggcatgggagttgctcctaacattagggagacattcgtcgagcttcaaatgaagaaggcattccgatatgttatcttcaaaatcgaagagaagcaaaagcaggtggttgtggagaagacaggggctactactgaaagctatgatgactttttggcctctctcccagagaatgactgccgatatgcgctgtatgattttgattttgttactggggagaatgtgcagaaaagcaagattttcttcattgcctggtccccatcgacatcccgcatacgtgctaagatgctgtactccacgtcgaaggaccgcatcaagtacgagcttgacgggttccactacgaaatccaggcgaccgacccatcggaggtggacatcgaggttctccgggagcgggctcactgaagctggttctccttttgaagggacctgtggagggccgtgaaccttcagccagatgcaaattcaattatcaacgatgaagctcccgccgtggtgtttgttaataagttcctgtaagcatatcatttagtcgctatgcatgacactagctgaagcgctatctaagctctattggtatgaggtttggttgccgtgttgccgagcctgtaaacgaagcaagatttgcaaacttgttatattgtggtattgatgatactggattactggctgtgggttgttcgggaaaaaaaaaaaaaaaaaaaaaaaagtgggttcaacagccaagagtagtggtattcagtgcttcaagtgtggaggtcgtggtcatgtcataaaagagtgtccaaataatcgtgtgatccttgtgactgatgatggagaatatacatcagctagtgaagaagaagctgaagcaggaaatgaagatgacattgataaatctgaagaacatacgggatgtgaatttgagcatggtactactcttgtggttacacaaatcttgagtgttcaaatgaaagaagctgaaattggacaacgacataatctttttcaaacgcgagcaaaagtgcaagacaaagtagtaaaggtgatcattgatggagggagctgccataatcttgcaagtcgtgagatggttgaaaagcttgatatcaagattggttataaggtgaaagtttcgttcaagattggagagtatgttgacacagtggagtgcgatgttgcacccatgtctgtgtgtcacatgctgctaggaagaccttggcaatatgaccgatattctcagcattgtggaagaacaaatcaatacacgctagatctgaaagggagaaagtttgtactcaagcctatgacccctcaacaaatcatggttgaacatttacaaaagaaaactgaaattagtgcagcaagtagaggaggagaagagcaaaataaattgagtgccatccacaattcggactttgaagacgtgtttccacaagaaacaccggctggactacctccaattcgagggattgagcatcaaatcgatcttattctaggggctgcacttcctaaccgtccaccatatcgaaccaatcctgaagaaactaaggaaatacaaaggcaagtgcaagaacttcttaataaaggttttgttcgtgaaagcttaagcccttgtgttgttcctgtgattttagtacctaagaaagatggatcttggaggatgtgtgttgattgtagagctataaataatattaccgttcgctatcctattccacagctagatgatatgcttgatgaattaagtggttccacattttttactaaaattgatttgagaagtggataccatcaaataagaatgaaaactggagatgaatggaagactgcatttaaaacaaaatttgggttgtatgaatggttagtgatgccctttgggttgactaatgctcctagtacttttatgagattaatgaaccatgtcttaagaactttcattggaaaatttgttgttgtctacttcgatgatattctaatttacagcaagtcttttgatgaacatgtgaaacacattcgacaagttttagatgagcgtagaaaggagaaattatttgctaatcttgagaagtgcagtttttgcacagaccatgttgtgtttcttagctttgttgtttcagcaaaaggaatagaggtggatgaatccaaggtgaaagccatcaaggattggccagctccaacgaatgtaagtcaagtaagaagttttcatggtcttgctggtttttatagaagatttgtgcgagattttagtaccatcgcttcccctttaaatgaattgacaaagaaatgtgttgaatttaaatggggaaactcacaagaagatgcttttcaagaattgaagaaacgtttgactgaagcacctgtacttattcttcctgatttcactaaaacttttgaagtagaatgtgatgctagtgggattgggataggaggagttttaatgcaacaaggaaaacctatagcatattttagtgaaaaattgggaggtgctcaattaaattattctgtgtatgacaaagaattgtatgctttggtccgagcgcttgaaacatggcagcactacttatggccaaaagagtttgttattcattccgatcatgaagctttgaagtatttgaaaggacaagccaaactgaaccgtcgccatgccaaatgggttgagtttatcgaaacatttccatacattgtgaaatataagaaaggtaaggacaatgtggtcgctgatgccttgtctcgaaggaatgtgttgttgaatcaactagaggagtcacatggaggcggtctaacaggtcattttggacaaaagaagacttatgaaatgctcagtgatcatttctattggccaaagatgaggagagacgtcatcagatttgtggagcgttgtgtcacctgtcacaaagctaaattttcaaaaatggctcattttatcccatgcaacaagagcgacaatgcttcacatgttgccaatttgtttttcagagaaatcttgaggctacatggagtgcccaagaccatcgtatctgaccgtgatgtgaagtttgtgagctatttttggaaaacaatgtgggcaaagcttgggactaaacttttgttctccacaacatgccacccccaaactgatggacaaactgaagtggtgaatcgtacattatcaatgctgctgcgaacaatggtaaagaagaacttgaaggattgggaggaatgtttgccacacgtggagtttgcttataatagggcagtacattctacaactaatttatgcaccttcgaaattgtatatgggttcaaatctattgctccgatagatttgttgccccttccattgcaggaaagaactaatatagaagcttccaagtgtgctgcctatataaaaaagatacatgagaagactaaggaagcaattgagctcaaagcagtgcgcaaggctacaagcatgaacaagcataggaagaaagtgttatttgaaccgggggacttggtttggattcacttgcgcaaggagcgttttcctgagcagcgcaaatccaaattgatgccacgaggggatggtctatttcgtgtttttgccaagatcaatgataatgcatacaagatagatcttccaccaagctatggcgtgagcaacacgttcaatgttgctgacctcttaccatatacaagtgaagacacttcagagtcgaggacgactccttttcacggggaggaggatgatacgaccacgacattaagaaacacgttacaacccccaaggcatactacatcaactcaggtcccatcgacatcccgcatccgtgctaagatgttgtactcgacctcgaaggaccgcatcaagtatgagctcgatgggttccactacgagacccaggcgaccgacccatccgaggtggacattgaggtcctgcgggagtgggctcactga

SEQ ID NO: 4961 - DNA, 3381 bp, Zea mays
  Clone ID: TF_ZM4618.C1.o5.fg
atgtccggtggggatggacctcctcccgttttttatggtgacgattttccatattggaaaatttgtatggaagcatatttagaggctatagacattggtgtctacaaaaacgccacacaaggattccccgaacctagagatcccacaaatcttgtaggtgaagagtttaattatgagaaatggaatgtgaaggccaaaaacaccctttttagaggcctttgcaaagatgtgttcaatagagttagaaatcataaaaatgctcatgatttgtggatggacatttgtgctctacatgaaggaactaggagtgagcgtgaggagagatatcatattgctatgagaaagttaaattcttttgaaatgcttgctaatgaaaattccaatgctatttactcacgtctcaatattcttatagaggaagtgaatggcttggggcttactcaaatctcacaaccggatgttgtgaggaagattcttagtgtcctcccaattgacaaatatggacacattgtcactgttctgcatcaaatggatatttcagttaccacacctacacagatattgggaaagatcaatgctcatgagatgtacatgcacatcaatgacaaggaagagtcatcttccaagataaaggatttagctctcaaagcaaatcaagaaagaaaaggaaaagctaaagtacaaattgaggaagaatcatcaagtgatgatgaccttgatgctaacattaccttgatgcctaagaagaacaagttcaagggcaagaaagaagatgacatcgatgatgagaaaaaggaaaagagattcttcaagaggaaggatgggaagcacaagaggttccataaaaagaaaaatggaaaggcatatattgttggtgactggctcactgacattgagtcatcaagtggatcttcttcaagtgaagaagagaatgatgaaaaagttgccgccatcgccggggacttctcttcaccaccaccatcgccatcatcgacttctcacctatgcctcatggctagaggtgaatggaaggtacaaaatgatattcatataactgatgatagtgatagtgatagtgatgaggaatttgcttcaccttcctatgatgaactagctgacttgcttgaagaatacaatcaaatcattaggaagtcaaaagctaaatgtgataagttgaaaaatgaaaatgaatctttgaatgccaaatatgacatagttatgaaagctaatgctaaggataaatgtgacaagttaaatgaagctaatagggagttaaaagatagactagtgaaaatcaaggaagactatactaagattaaatttgatcatgataatcttcttgttgaaaatgaacttttatcttgtaatacacatgaggctattaaccctgttgttaagattgatgtagcaacctcatgtgatgatttgagtcaaggagagcaaactagtctacatgatgaattgaccgaaaaagttgaagtcttgactttagacaaccaaaaattgaagagatacttgactgatgcaactactagaggaaaggttgccattgagaacaatgatttcaataatgagttggcagtggataatgaaaggcttaaaaatgaggtcaagaaacttaagagtgaaaatgaacatcttgcaacaagtgtgcaaaagttcaacaagggccaatacctccaaaatgaattgctcatgaacactgtcatgaaaaacaacaatagtggtattggatacaatgcttttgtgcaaaagaaagttactactcaatacaagccaaagcagactcataggcctatcaaatgctttgagtgtggaaaagaaggtcactttgcccacaactgcaaatccaaaccaccaactcccttgcctaagcactcaagaccatttgctttcaatgctcattatgttctaagaaaagttgcaaatggaaaggtgaactacaagaccggtgggagccattgggttattgacagtggatgcacacaacatatgacaggcaacccacggatgttcacctcacttgatgagaatgttgatggacaagacaaaatcacatttggggacaattcaaaagagaaagttcaaggacttggcaaggtggcaatttcaaatgatctatcaatttcaaatgttctcttggttgcacctttgagcttcaatttattatcagtgggtcaactctgtgatcttggacttcaatgtttattcactccaatagaggttattgtatcaaaaatggatgatgaatcaatggtgttcaaagggtttagatacaacaatctctacttagtggatttcacctcagaagatgcagacttaagaacttgcctcttcaccaaagcatcacttggatggctttggcataggaggcttgcacatgttgggatgagcacactcaagaaggtattaaagaaggacatggttagaggattaaaggatgttgtatttgaaaaggacaagccttgtagtgcatgtcaagctgggaagcaagttgctaacacacatcttacaaaagctttcatgccaacatcaaggccactagaactacttcatttagatttatttggacctacaaattataagtttgccaagaaagctcaaaatgaatttgattgcaagatcaagaagattagaactgataatggtaaagaatttgacaacaccaacattcatgagtactgtgatgagattgggatcaagcatgaagtatctgcaacatatacacctcaacaaaatggagttgttgaaaggaaaaacaggaccttgttcacacttgcaagaacaatgattgatgagtataacacaccggagaggttttgggccgaagctgtcaacactgcatgttttgcatcaaacaggttatttcctcaccggctacttgcgaagactccctatgaactgctaaatgggaaaaagccagacgtctccttccgggtgttcagatgcaaatgctacatctacaagaaacgccatcacctagggaagtttcaaagatgttgtgatattggttttctattgggttattcattaaagtccaaagcatatcgagtattcaatcatgccactggcgtggtagaagaaacatatgatgtggaatttgatgagactaatggctcccaaggagcacttgaaaatcttgatgatgtaggtgatgagccacttagggaagcaatgaagaacatgccaattggagctatcaaaccaaaagaagatgaagaagaggtgcaaaacattgacatgccttcttcatcaaatgtaccacaagacgatgaaaaagatgagaggcatgcaaatgaagatacatttgtctctcatgaacaagcaagggtactgtcacacccgggttttaggggcaccaagacccaggcgcgaacataa

SEQ ID NO: 4962 - DNA, 3756 bp, Zea mays
  Clone ID: TF_ZM4900.C4.o1.fg
atgtcgggagatcacgccaagaagatggtgatcggcggagagaagtccgctacaagccacgggaaggctccatcaaattataatatgtggagtgataaaatgaggcatcatctaacctcactccacactagcatttgggatgttgttgagattggagtacaggtaccatcaccgggggatgaagactatgattcggacgaggtcgcccaaattcggcacttcaactctcaagccaccactatactcctcgcctctctaagtcgagaggagtataacaaggtgcaaggattgaagagcgccaaggaaatttgggacgtgctaaagaccgcgcacgaaggagacgaggtgaccaagatcaccaagcaggagacgatcgagggggagctcggtcgcttccggcttcgccaaggggaggagccacaagatatgtacaaccggctcaaaaccttggtgaaccaagtgcgcaacctcgggagcaaaaaatgggatggccatgaaatggtcaaggttattcttagatcactcgtttttcttaaccctacgcaagttcaattaattcgtggtgatcctagatatacactaatgtctcccgaggaagtgataggaaaatttgtaagctttgagttaatgatcaaaggctcaaagaaaatcatcgagcaagacggcccctccacgcccgaagcacaaccggtcgcattcaaggcaacagaggagaagaaggaggagtctacctcaagtagactacccatcgacgcctccaagctcgacaacgaggaaatggcgctcatcatcaagagtttccgccaaatcctcaagcaaaggagggggaaggactacaagccccgctccaagaaagtgtgctacaaatgtggtaagactggtcattttattgcaaaatgtccactatctagtgacagtgacaggggcgacgacaagaaaggcaagaggagagaaaagaggaggtactacaagaagaagggcagcgatgcccatgtgtgccgcgagtgggactccgacgagagttcctccgacgaggacgccgcccacatcgccgtcaccaagggactcctcttccccaacgtcggccacaagtgcctcatggcaaaggacggcaaaagaaagaaggtaaaatcaagatccttcactaaatatgcatcctctagtgatgaagatcattttagtgatgaggaagataatttgcgtattctttttgccaaccttaacatgcaacaaaaggaaaaattaaatgaattaattagtgctattcatgagaaggatgaactcttggactcccaagaggactttctaattaaggaaaataagaagcatgtcaaggttaaggatgcttatgctctagaagtagaaaaatgtgaaaaattatctagtgagctaagcaagtgccatgatattattaccaaccttagaaataagaatgctagtttaatagctaagattgattcaaatgtttgtgataattcaatttccaatcttagagatgataatgcaaatttgcttgctaggattgaaaaattgaatgattctcttactagccttagaaatgaaaatgaaaatgaaaatttgattactaaggctaaagacttagatgtttgcaatgttaccatttctaaccttagaagtgaaaatgatatattgcatgctaagaaaatgaaaaaaattaaatttgctagaagtatactctatagtgggagacgccctggcatcaaggatggcattggcttccaaagaggagacaatgtcaaagttaatgcccctcctaaaagattgtctaattttgttaagggcaaggctcccatggctcaggataacgaaggttacattttgtaccctgtcggttatcccgaacacaagattaggagaattcactctaggaagtctcactctggccctaatcatgcttttatgtataagggtgagacatctagctctaggcaatcaacccgtgcaaaattgcctaaaaggaaaactcctattgcatcaaatgattctaacatttcatttaagacttttgatgcatcttatgttttaactaacaaatccggcaaggtttatgcattcgggggctcaagttggatcatcgacagcgggtgcacaaaccatatgacaggggagaaaaagatgttctcctcctacgagaaaaaccaagatccccaacgagctatcacattcggggatggaaatcaaggtgttactgtctttagaagaagtgatgattcaatagcatttaatggagtgttagagggtcagctatacttggaaaaatctcatacccaagagaccttaaagggattcttgagacaggctcaaaacgagttcggcttaaggatcaagaaaattagaagcgacaacgggacggagttcaagaactctcaaattgaaggcttccttgaggagaagggcatcaagcatgagttctcttctccctacacaccacaacaaaatggtgtagtggagaggaagaatagaactctattggacatggcaaggaccatgcttgatgaatacaagacttcggatcggttttgggccgaggcggtcaacaccgcctgctatgccatcaaccgagtctttggtagcaaatgttttattcttgttaaaaaaggtagaaaatctaaatttgctcctaaggttgtagaaggctttttactaggatatgactcaaacacaagggcatatagagtcttcaacaagtcctctgggcaagttgaagtttcttgtgacattgtgtttgatgagactaacgactctcaagtagagcaagttgatcttgatgagataggtgatgaagaggctccgtgcgtcgcgctaaggaacatgtccattggggatgtgtgtcctaaggaatccgaagagccaccacatgcacaagatcaaccatcttcctcaatgcaagcatctccaccaactcaagatgaggatgaggctcaagataatgaaggagaagatcaagaagttgagccacctcaagaggagagcaataatcaagggggagatgcccatgatcaagacgaggaagatgaacaagctccgagaccgccacacccaagagtccaccaagcaatccaacaagatcaccccgtgaacaccatcctcggcgatattcaaaagggggtaactactcgatctcgtgttgctcatttttgtgaacattactcttttgtttcctctattgagccacacagggtagaggaagaactacaagattcggattgggtggtggcgatgcaagaggagctcaacaacttcactaggaacgaggtatgtcatttggttccacgtcctaatcaaaatgttgtaggaaccaagtgggtcttccgcaacaagcaagacgagcatggtgtggtgacaaggaacaaagcccgacttgtggccaagggagattcacaagtcaaaggtttggattttggtgaaacctatgcacccgtagctaggctagaatcaattcgcattttacttgcctatgctacttaccatggctttaagctttaccaaatggacgtgaaaagtgccttcctcaatggaccaatcaaggaagaggtctatgttgagcaacctcccggctttgaagatagtgagtaccctaactatgtatataaactctctaaggcgctttatgggctcaagcaagccccaagagcatggtatgaatgcctaagagactttcttatcactaatggcttcaaagttggaaaggtcgatcctactttatttactaaaactcttgacaatgatttgttt

SEQ ID NO: 4963 - DNA, 1983 bp, Zea mays
  Clone ID: TF_ZM4987.C1.o15.fg
atggtggtcaacgacaaggaaaaggagtccttcctcaacgagcctagagacgacaagccaaccgactcaggctcaagtcacaagaaaagagacgggaagaagaagaggcgcatcaagaagatcatctactacgacagcgatgcctcgtcttcttcaccacacgacgacgacgatgactcctcatcaaaaaagaaaccggttaatcaaaactattcatttgattattctcgtattccgtacaattctaatgctcatttgctatcaattcctcttggaaaacctccccactttgatggagaagactattctttctggagtcataaaatgcgtagtcatttattttctctccatcctagtatctgggagattgttgaaaatggaatgcactttgatagtattaacaatgccatgtttattaatgaacaaattcataaaaatgcccaagccactgctgttttgctagcatctctgtgcagggatgaatacaataaggttagcggcttggacaatgcaaagcagatctgggacacccttaagatatctcatgagggaaacgacaccaccatgatcaccaaaatggagttggtggaaggcgagctagggagattcgccatggtcaggggtgaagagccaatacaaacctacaacaggctcaagaccctggtcaataagattagaagctatggaagcacaagatggacggatcacgacgtcgtccgactcatgctcaggtcctttacagttattgacccccatcttgtgaaccttatccgtgaaaatcccaggtacacaaagatgacgcccgaggagatactcggaaaatttgtaagcggacgcatgatggttaaggaggcaaggtatgtagatgacgccttaaatggccctctgtccgtctacgagccgcagcccgttgcgctcaaggcaactagcagcaaggaggcactaccaagcaaggtagctcaagtggaggctgccggcctcaacgaagatgagatggcgcttatcatcaagcgcttcaagaccacatttaaagaacgcaaggagtaccccaacaagaataaaacaaggggaaagcgctcctgcttcaaatgcggtaagaatggtcattttattgctcaatgtcccgataatgaaaatgaccagggacaagaaagacatgggatgaaggagaagaagaaaagctataggaaggcgaaaggcgaggctcatcttggaaaagaatgtgattccgactgctccttatccgactccgacgatgagggactggcggccttggccttcgacaagtcgtcgttcttccccaatgaacgccacactttcctcatggccaaggagaagaagagaaaagaaatgttatcctctgaattgtctgtttgccatgaatcggtctctagtttaaagagtttaaatgatgaactaaatgctaagctagaggaagttaataaatctagttcctgtgtagaacatgttgttatttgcaatagatgcaaggactttgatgttaattcttgtgatgaacaccttatttctattgctaaactaaatgatgaggtggcaagtcttaatgctcaacttaagacttgcaaaattgattttgataagttaaaatttgctagggatgcctacaccattggtagacacccctcaattaaggatggacttggttttcgaaagaaagccaagaacttaacaagccaaaggctcccattcccaacaaggagaaagggaaggcccctatggctagtagtactcaaaggaatcatgctttcatttataataggaaaattgctagtcattccaattataataggagttatgatcatgatgcttttgattcacatgctatgtttgcctctagttctacttttgttcacggtttatgcatccgagggttcaagctggattatcgacagcggatgcacaaaccatatgacaggggagaagaagatgttcacctcctacgtcaagaacaaggattcctag

SEQ ID NO: 4964 - DNA, 3589 bp, Zea mays
  Clone ID: TF_ZmC4855_1
tttctttctggacccatgaaataaactttccatgaccaagagattgttctagcataataaattttatagattaaattgatactaaatttgtctaaacagaaatacccataaacaaaatagggactaaacgtctgtcttcaatgaatatttctggtgggctatgtgctcccccatcgtagtatcaaaaacaataatctaacggccctccaccatagtgagacttgtatcatttacggacaattccctgtggacaccttcgtttccaggattgtagtcccgaagtgcaaaatctttaggttgcttcggtgttggcagtggtgttgctttgttctccagcatggacacaactgttgacatgagtggcctgcaactcggattgtcttgagcgcacaggagtcctatatggatgcatcgtgaaacttcatcgagggagcaactctccgttacagatgagtcaagaaaatcttctggtttcccatctttccacatgttccatgcaaatgttataaggttagaaaaatccatgataagatatggtgagcttatctttaatccacttacaatctccaatataagaacaccaaagctgtaggtgtcagacttaactgaaaatgcacctttcattgcatattcaggagacatgtagccatatgtccctacaactcggttagtatttgcttggagctgatcaccagagaatatcctagccatgccgaaatctgatatctttgggttcatctccttatctagcaagatgttgcttgcttttagatctcgatgaattacagttaatcttgagtcatgatggagatacataattcctctagcaaccccctggattatcttgaaccttgttggccactgaagcattgattttcttgcagaagctaataagaataatataaaacagggcatatcagcaggcacacaggacatttatttgttggacatcattaacagtatcaaaaactggaatttcaaaataccaaagaggaagtaatccaagcttttgttgggtaagtactcataaactaacagcttctcatcttcatgaatacaacaaccgagaagcttaactaggttcttgtgctgcaactttgcaattaggactacttcatttttgaactcctccttgccttggccggaacccgtgctaagtctcttgacagctacttcctttgtgccttccaacattcccttgtacactttgccaaaacctcctttcccaagcaaattagattcagagaaattatctgttgctgtgacaatgttttcaaagctaataaatgggaagtttatgttcttgtccccagcgtcatcagtagaactcaagtattctagcatccttctcttttgaactctcttcttttgccgtttgcctctgcttttacatgtccagacaagggctccaagcatgagtagcagcacacacagtataattgggagtaaaattttcagcaaactgctcttccttcgaacttttttatacatgcaccaggaggggaagcgcccctaccagaaaacgacatggtatccagagctaggttttggcgccgccgctgcccgtaggctctgtccgtcgcctgagccgcatcacgtggccggcagatccggcgttggcggacaagctcggaggtggcagatcggtggcggggaagggcagagcgcgtgtggtgatcgagggaggattcagccgctcgccttctcttcttcctttcgtcctcctcctgctgttttgctcctctgcagctagcttgcggcgctctctgcaggtgcagggaggggagaggccggagggtcgaggaggatcgtggcgcgtgctgctgccaccagtcttgtgcggcgcgggagaagagggacagcagcaggtcgacgtctcacaggaaggcttgctcccttgccctcttgagatccgccgtccaagatgtgttgccccaccgagcggcagtccagcagatgggtctgggggcggtgattacaaagagagcgggctgttgctacgactagtgaggttggaggtactgcagattaattgagagaggggaaggaagcctggttcgtcttagtgtttgcaggcagtgatgatgatgagttcagaggagactgaagcaaaaaggttagaggaagaggctgaaaaaaggacaatgattcatggtgacaagaaagaagaggatccactaatcacaaaaagtgagatgagaaatgagatgaggagtatggttcaggaactcatgggactaggtatgattggccccaaggctttgcctatctcatctgaattaaaattagaactcgttccaaatgatgtgaagctagaaggaagcaagaattatttgagttggtctaggagagtgcgagtgctcttagaaggtaaatgagtggagcactatttagaagagggctgtgttgaacctgttgataggctcagccctgaatagagggtttggtataccaccaactcagttattgtgacgtggttgttagcatccatgtcttcgtctgtaagtaagatggtcgaagccatgcgtgctgttgcacaaatttggaagaccttgaacaatatgtattcgagaaaggagaatgtgatgatgatgatggagatccgaagtaaggcagatgcagtgaaacatacagggagaccagtggaacaatatgctagtgaaattcagtacttgtggagagaactagatcactacgctcctctgcaaatggtttgccctcaggatgcacaggttgtccacaagtgggtagaggacaggagagtaactcactttctaaagaatttggacccggagtttgagagcaggagagatgccttttgtcaccaagaaagtcttcctaccatggatgaagctgtgtcagcaatgattaatgaggaaagcaggctccgggtaatgacatctaatgatcctgcgaaatcagcctacaccgcaaatgatgatagagactgctataattgtggtgagaagggacacttgagctacaattgtcctcatcctcgtggcagtggtgaacgaggtggtggaactcgtggagccacttgtagtacctatggaagaggtcgtggaggttatggaagggggcgtggtggccgtgccaggggcagaggtcgtggtggccctcatgtcaatgtagcggttactgaagacaccccctcaatcaccctgactagggaacaagctaaacggtgggaagaatggcataagggcaaagaatccgagtgtccaaccagcactcctcttggttctgtggcaactacatccacccagcacttcggagaagagaactgggaagaggattgggactgaagtcaagcgtaatgggctatggttcatcaatcaagaggagcaagctttgtcagcaacaacagaaggaaataaaagggaaatcatgctgctacatcatcgattaggacatgtatcttttgagagcttgagtaaattgtaccctgattcctttaagggaatggagaaaggaactcttgtgtgtgatgcatgtgagcttgccaagcataccagatctacttaccctagtgttggacttcgtagcagtgattcatttatgttaatacattctgatgtttggggtt

SEQ ID NO: 4965 - DNA, 556 bp, Zea mays
  unsure (1)..(556): unsure at all n locations
  Clone ID: TF_6101958
ctctggcagctacatccaacaccactcggtgttgagtcatccagtcagctccgagaatgatgtccataccttctaatcccaaaatcaggagtgtggttttgaagattttacttcccagtgagataggcacatttcgatttaattggttcgttgcaatttttcccccaggcgttgctatcagaaaagacccttttgcatgatagaaaggcagntggcatttaatgctgaacttctagctaatgaagctatgagatgcactagaatcaaatagaattaatgcaggttgattaaaaactggaaagataccagtcatgatgggggctccttcaggtaactcctctacagtagtgaaattgagcttcccttgcctgacttgcaccttctgcttccttcctctatcttgatttggtgctggcatctgcctctactgattccttgggcaattcttggcataatgacccacatttccacaagtgaagcacttgttcccatttccctggtggaactattgctgctgctgaggttgattgttccttgaagcgggagctggaaagcg

SEQ ID NO: 4966 - DNA, 2063 bp, Zea mays
  Clone ID: TF_ZmC14166_340
atgtcgggaggtcacgccaagaaggagatggtgaccggcgagaagcccgccacaagccatgggaaggctccattcggggagtccggcaacaaggtgaagggatccccttcacacgacaagtcgcgtcagagcggtgaaaagaaaaagaagatgaagaaggtagtctactacaagaccgactcttcatcgccatccacctctggctccgacacgccgtccatcacttataagcgccatgagcgcaagaagtttagtaagatccccttacgctatcctcacatttcaaaacacacccctttactttccgtcccactaggcaaaccactgatttttgacggtgaagattattgtatgtggagtgataaaatgaggcaccatctaacctcactccacgctagcatttgggacattgttgagtttggtgcacatgaaccatccgtgggggatgaaggctatgactcggacgaagtagcccaaatccagcacttcaactcacaagccaccactatactcctcgcctctctaagtcgagaggagtataacaaggtgcaagggttgaagagcaccaaagagatttgggatgtactcaagaccgcgcacgaaggagatgaggtgaccaagatcatcaagagggaaatgattgaggcggagctcggtcacttcatgcttcaccaaggggaggatccacaagccatgtacaaccgactcaagaccttggtgaaccaagtgcgcaacctcgggagcactaaatgggatgaccatgaaatggtcaaggttattcttaggacactcgtatttcttaatcctactcaagttcaattaaatcgtgatccaagatacaaactaatgtctcccgaggaagtaataggaaaatttgtgagctttgagttgatgatcaaatgctccaagaaaatcatcgagcaaggcgcctcctccacacccgatgtgcaacccgtggcatttaaggcaactgaggagaataaagaagactctacacctagtagggtccccatcgacgcctccaagctcgacaacgaggaaatgacgctcatcatcaagagctttcgccaaatccttaagcaaaggagggggaaggactacaagccccgctccaagaaagtttgctacaactgtggtaagtccggtcattttattgcaaaatgtccattgtctagtgatagtgacaggggcgacaacaagaatggaagagaaaagaagaggtactacaagaagaagggcggcgatgcccatgtttgccaggagtgggactccgacgagagctccaccgactcctcctccgacaaggatgccgccaacatcgccgtcaccaaaggcttcctcttccccaacgtcggccacaagtgtctcatggctaaggacggcaagaagaagaaggtacattctagagatacccccaaatacactacatctgatgatgagcgtagctctaatgataataatgatgatttaatttctctctttgccaaccttaccatggaccaaaagaaaaaattaaatgaattaatagaaaccattaacgagaaggatgatctcttggaatgccaagaggacttgctcgttaaggaaaataaaaaatttgttaagttgaaaaatgcttatgctctagaagtagaaaagtgtgaaaacttatctaaagagcttagcatttgcaatgattcaatttcctgtcttatagatgagaatgctagtttaaatgctaagatagaagaattgaatgtttgcaaaccctttccatctattgttgaacatgtcactatttgtactagatgtagagatattaatgttgtagctattgatgatcaccttgccatgattaaagaacaaaatgatcacatagctaaattaaatgctaaaattgtcgagcatggactagaaaatgaaaatttcaaatttgctcaaagcatgctttataatgggagacaccctggcattaaggatggtattggtttccaacaagggagccaaagcaacaccaaacttaatgccccaaagaacaaattgtctaattttgttaagggtaaggctcccatggttcaggatag

SEQ ID NO: 4967 - DNA, 4031 bp, Zea mays
  Clone ID: TF_ZmC74_151
tgcagtatgcacaagccttcaacgacttatgccagtatgcagggtatcatgctgattctgatgagaagaagagggatcgcttccgcaggggtctcaataccaagctgcgggaacgactcaacactgtccgggctgatagcttcaatgagttggtcaacatggccatctcccaggaggattgcattgttgctcactgggcagagaagaagagaaaggcaccaatggcagcaccatccgctcaggctcagaggttccggactgtttctcacaatcagagcaggggttttcagcagcaggcaggcagatgggtgatcaggccacctcagcagcagcagcagctggcacccaaccgctatccagctcccgccccaaggaacaatcagcctccgcagcagcagcagttccgccagggcaacgggaacaagtgtttcacttgtggcaatgtgggccactatgccaagaattgtcccaggaaccagcagagacagatgccagcaccgaatcaagacaagggaagaaagcagaaggtgcaagtcaggcaagggaagctcaacttcactgctctagaggaagtgccagaaggagctcctatcatgaccggtaccttttcagtttataatcaacctgctttaattctgtttgattctggtgcatctcatagtttcattagccaaaagttcagtgctaattgcaaactgccattctctcactcaaaagggtcattcatgatagtcacacctgggggtaaaattgcaactaaccaattaaaccaaagtgtgcctattcaactgggaagccacattgtcaaaaccactcttcttgtgttgggattggaaaatgtggacattattctaggagcaaattggatgaccttgcaccaagttgtgcttgatgtagccagtcgtaccgtggaagttaattctcctttctgcgggaatttcactttgattctgcctagtcagggttcttctcagtcatgtgctttctctatgacggagttacccctgaagaagatcccagtggtctgtgagtatgcagatgtctttcctgatgaattgccagggatgccaccggaccgggatattgaattcgccatcgagttgcaaccgggaacggccccaatttccaagaggccctaccgaatgccacccgctgagttggcagagttgaaaaagcagttgcaagagttgctggataagggatttattcgcccaagcacttcgccttggggatgtccagcgctatttgtgaagaagaaggatgaaagcttgaggctgtgtatagattaccaccctcttaatgcggtaactatcaagaacaagtatcctttgcctcgtattgacgttctctttgaccagttggtcggggccaaggtgttttccaagatagaccttcgctctggctaccatcagatcaaaatacgagcaagtgatattccgaagacggcattctcaaccagatatgggctgtatgaattcttggtgatgtcattcgggctgacaaatgcaccagcatacttcatgtatctgatgaattctgttttcatgccggaattggacaagttcgtagtggttttcatcgatgatattctggtgtactcgaagaacgaagaagaacatgccgggcatttgcatgtagtgcttcaacgtctgcgagagcaccacctttatgccaagctatccaagtgtgatttttggctaaaggaaatcaaattcttgggtcacactatctctcaggagggaatagttgttgatcctgataaagtgcaagaggtaatgaactggaggccaccaacgtctgttcgccagattcggagttttctgggattggccggttattaccgaagatttattccggacttctctcggattgcgaagcctattactgagttgctgaagaaagaagtcaagtttgcgtggagtcagaagtgcgaagatgccttccatgcattgaggcagcatctgaccaccgcaccagttttggcgcaacccgacagcagcaagccttttgatgtgtattgcgatgcctctggcaccgggctaggttgtgtcttgatgcaagacaaccgagtcattgcttatgcctcaagagcactcaggcctcatgagcaaaattatcctactcatgaccttgagttagcagcagtggctgatcttaacatgaggcagagaagatggctagagctgatcaaggattatgacctggaggtacattatcacccagggaaagctaatgtggtagctgatgccttgagtcggaagttgcaatgcaactgcattctgatggattctcgcgttaacaccttgtgtgatgagttgagcaagatgcaaattgaaatgattccttctggttctttgtctcacatttctgttgagccagctttgcaagaccagattatcatggcccagctcagtgacaagggagtgcagattatcaagaagaatctccatcagaaggttgagaagtatgattgtttccgccaggatgagaagggtgtgttatggttcaaaagcagattggtaattcctaaggaccgggatcttaagaagaaaattttggatgaggctcatctctccaaattctctatgcatccgggaagcaccaagatgtaccatgatctgaagcttttgtactggtggaccagaatgaagagggagatagcccagtatgtatcagagtgtgacacctgtcagagggttaaggcaagccacttgaagtccgctggagctttgcgaccactgtccgtaccttcgtggaagtgggacgatatcagcatggatttcattgtgggtctgcccaacacctctcgtcatcatgatttaatttgggttattgtggaccgattgacgaaggtggcacattttcttcctatgcacaccactgataaggctcagaagtatgcagaattgtatatcgaccggatcgtgtgtttgcatggattacctcggaccattgtttctgaccgaggagctcaatttgttgccagattttgggaacaattgcaagagtctttgggaaccaagctaatcaggagttcagcttaccacccacagactaatggtcagacggaaagggtaaaccagattctggaagatatgctgagagcttgtgcgatcgattgtggcaagaactgggataagcacctctccttggcagagtttgcttataacaatagttatcagtccagcctaaagatggcaccttttgaagctctctatgggagaaggtgcaggacaccactcaattggtctcagcctggtgaaagagaagtttttggacctgatttggtgactgaagccgaaaggaaggtcaagctgatcaggaagaatctagaagctgctcaggccaggcagaagagctatcatgacaaaagaaggaaacctctccagttcgaggtgggaagttttgtatacctcaaggtatcacccaccaagggagtgcagaggtttggaatcaaaggcaagctagcccctcgttacattggaccttatgagatcgttgaagcatgtggacccgtggcatacaagctgaagttaccttcaaagatgtctgccattcacagcgtattccatgtatctcagctaaagaagtgtgttcgattgccgactgagattctagcagagccagaattggagatagagccagatctctcgtaccaagagtacccctccaagattctggattgcaaggaaagatcaactcgggctaaatcgatcaagatgttcaaggtccagtggagtaatcactcagaggaggaagctacttgggaaaccgaggaattcttaagatccaacttccccgattgcctacctaaggaagctgtggtagtagaaagcacctatttggctagaaaccttaagaaaaccataggaaaagaattaaaagattgtaatcttgccgacggagagtacgtgctcatccccgagcaaggacctgtccaagaggaggaccaggagcaggcttcagaggctgctattgaggatctccccgcagccccagcagttgaaggcaagccccggttctatgcataa

SEQ ID NO: 4968 - DNA, 5418 bp, Zea mays
  Clone ID: TF_ZmC74_196
atgaattcacctacccccgccagtggaggagactctcgtttcagttctgacttcctttctcgcgatggctttccttccatcttgtgggaagtgcttaactccgccggttaccctacgccccctatgtacacggtgcagttgtatgaggagcatcgggtacctcgttgtcgggtctggctaactttggaggctcatccccttcagccgggttggcgttctcttgactctgagacgattggactcaggacggacgacaccgttgaggcagcagccatgaagactctgacgactttctgtggctaccatcccctggagatggtgatgcaccccttgggactcttccctactgaaaagaaggatgatcccatgtggtgtaaccgcgtgagccatgtgaaggatgtatgggcaatgtatcctgacttggttgggagggtcactgttcagtgcatgagtgcgctgtaccgccttcaggcccttcagagcgatgctatgacacttcttgctaacactgctcaggctgccaagctcactctcgatagtcgggaagattttgtggtcgacctatccacagagttggtggagaaggatctgcaggtggaaaggctgagccagcgtattaccaccctggagcagcaagtggagatccgagataacactattgatgtcttggagaaccagctccacgacgtgcagagggaactcgaggaagccaatgaccacttggacatgcaccacctggagatggaggccaatgaagcaggaagcgagggagaagaggctcccgaggagctaggaccagcccctggtgccaatgggactacctccgcgatgcctccttcacccatggcagcgaggcagcgtcgcgggcagaatgagcaagctcccccgccacctcctccagctcccacagtgcaggagctgatggcccagcagaatgagattctgcgacagctcttgcagcgccagccccaccaacagcatcatggtggaggccagcatcagcgacctccggctatggcaacataccaggagtttctgagcacgcagccgcccttgttcaccaaggcagaggatccgttggacgccgacgtgtggcttcgcgtcgtcgagtccaagtttcccctcctcacgggagactgccctgatgaggccaaggctcgcttcgccgcacagcagcttcgcggcccagctcggacttggtgggaccacttccgtgctatgctccccgctgatcatgaagtatcttgggaggaattcaagaccgccttcagaggacaccacattccagctggcattcttgatcggaagttgaatgaattcctggccctcaatcaaggaacccgcacggtactgcagtatgcgcaagccttcaacgacttatgccagtatgcagggtatcatgctgattctgatgaaaagaagagggatcgcttccgcaggggtctcaataccaagctgcgggaacgactcaacactgtccgggccaatagcttcaatgagttggtcaacatggccatctctcaggaggattgcattgttgctcaccgggtagagaagaagaggaaggcaccaatggcagcaccatccgctcaggctcagaggttccggattgtttctcacaatcagagcaggggttttcagcagcaggcaggcagatgggtgatcaggccacctcagcagcagcagcagccggcacccaaccgctatccagctcccgccccaaggaacaatcagcctctgcagcagcagcagttccgccagggcaatgggaacaagtgtttcacttgtggcaatgtgggccactatgccaagaattgtcccaggaaccagcagaggcagatgccagcaccaaatcaagacaagggaagaaagcagaaggtgcaagtcaggcaagggaagctcaacttcactgctctagaggaagtgccagaaggagctcctatcatgaccggtaccttttcagtttataatcaacctgctttaattctgtttgattctggtgcatctcatagtttcattagccaaaagttcagtgctaattgcaaactgccattctctcactcaaaagggtcattcatgatagtcacacctgggggtaaaattgcaactaaccaattaaaccaaagtgtgcctattcaactgggaagccacattgtcaaaaccactcttcttgtgttgggattggaaaatgtggacattattctaggagcaaattggatgaccttgcaccaagttgtgcttgatgtagccagtcgtaccgtggaagttaattctcctttctgcgggaatttcactttgattctgcctagtcagggttcttctcagtcatgtgctttctctatgacggagttacccctgaagaagatcccagtggtctgtgagtatgcagatgtctttcctgatgaattgccaggaatgccaccggaccgggatattgaattcgccatcgagttgcaaccgggaacggccccaatttctaagaggccctaccgaatgccacccgctgagttggcagagttgaaaaagcagttgcaagagttgctggataagggatttattcgcccaagcacttcgccttggggatgtccagcgctatttgtgaagaagaaggatgaaagcttgaggctgtgtatagattaccgccctcttaatgcggtaactatcaagaacaagtatcctttgcctcgtattgacgttctctttgaccagttggtcggggccaaggtgttttccaagatagaccttcgctctggctaccatcagatcaaaatacgagcaagtgatattccgaagacggcattctcaaccagatatgggctgtatgaatttttggtgatgtcattcgggctgacaaatgcaccagcatacttcatgtatctgatgaattctgttttcatgctagaattggacaagttcgtagtggttttcatcgatgatattctggtgtactcgaagaacgaagaagaacatgccgggcatttgcatgtagtgcttcaacgtctgcgagagcaccacctttatgccaagctatccaagtgtgatttttggctaaaggaaatcaaattcttgggtcacactatctctcaggatggaatagctgttgatcctgataaagtgcaagaggtgatgaaatggaggccaccaacgactgttcgccagattcggagttttctgggattggccggttattaccgaagatttattccggacttctctcggattgcgaagcctattactgagttgctgaagaaagaagtcaagtttgtgtggagtcagaagtgcgaagatgccttccatgcattgaggcagcatctgaccaccgcaccagttttggcgcaacccgacagcagcaagccttttgatgtgtattgcgatgcctctggcaccgggctaggttgtgtcttgatgcaagacaaccgagtcattgcttatgcctcaagagcactcaggcctcatgagcaaaattatcccactcatgaccttgagttagcagcagtggttcatgcattgaagatgtggaggcactacctgatgggaacccactgcaacatcttcactgatcataagagccttaagtacatttttactcaggctgatctcaacatgaggcagagaagatggctagagctgatcaaggattatgacctggaggtacattatcacccagggaaagctaatgtggtagctgatgccttgagtcggaagttgcaatgcaactgtattctgatggattctcgtgttaacaccttgtgtgatgagttgagcaagatgcaaattgaagtgattccttctggttctttgtctcacatttctgttgagccagctttgcaagaccagattatcatggcccagctcagtgacaagggagtgcagattatcaagaagaatctccatcagaaggttgaaaagtatgattgtttccgccaggatgagaaaggtgtgttatggttcaaaagcagattggtaattcctaaggaccgggatctcaagaagaaaattttggatgaggctcatctctccaaattctctatgcatccgggaagcaccaagatgtaccatgatctgaagcttttgtactggtggaccagaatgaagagggagatagcccagtatgtatcagagtgtgacacctgtcagagggttaaggcaagccacttgaagtccgctggagctttgcgaccactgtccgtaccttcgtggaagtgggacgatatcagcatggatttcattgtgggtctgcccaacacctctcgtcatcatgattcaatttgggttattgtggaccgattaacgaaagtggcacattttcttcctgtgcacaccactgataaggctcagaagtatgcagaattgtatatcgaccggatcgtgtgtttgcatggattacctcggaccattgtttctgaccgaggagcccaatttgttgccagattttgggaacaattgcaagagtctttgggaaccaagctaatcaggagttcagcttaccacccacagactgatggtcagacggaaagggtaaaccagattctggaagatatgctgagagcttgtgcgatcgattgtggcaagaactgggataagcacctctccttggcagagtttgcttataacaatagttatcagtccagcctaaagatggcaccttttgaagctctctatgggagaaggtgcaggacaccactcaattggtctcagcctggtgaaagagaagtttttggacctgatttggtgactgaagccgaaaggaaggtcaagctgatcaggaagaatctagaagctgctcaggccaggcagaagagctatcatgacagaagaaggaaacctctccagttcgaggtgggaagttttgtatacctcaaggtatcacccaccaagggagtgcagaggtttggaatcaaaggcaagctagcccctcgttacattggaccttatgagatcattgaagcatgtggacccgtggcatacaagctgaagttaccttcaaagatgtctgccattcacagcgtattccatgtatctcagctaaagaagtgtgttcgattgccgactgagattctagcagagccagaattggagatagagccagatctctcgtaccaagagtacccctccaagattctggattgcaaggaaagatcaactcgggctaaatcgatcaagatgttcaaggtccagtggagtaatcactcagaggaggaagctacttgggaaaccgaggaattcttaagatccaacttccccgattgcctacctaaggaagctgaagatggcattgggacgcgagccctagacacgacaaaacttgggatttgcctcgggtttgggcagggagacagaccagatttcctggctccatatctcctcaccggccagccaccgttccttagctccggcaagcgtatttccgcccgccat

SEQ ID NO: 4969 - DNA, 4347 bp, Zea mays
  Clone ID: TF_ZmC951_333
tcaatcaaagttccgagaatcaagaatgtttagctcattcctaagtttcgtaaaggttttctcatctaatggcttgacaaagatatcggcgagttgttctttggtgctaacataagcaatctcgatatcccccttttgttggtgatctctcaaaaagtgataccgaatggctatgtgcttagtgcggctgtgttcaacgagattatccaccatgcagattgcactctcattatcacataagagagggactttgcttaatttgtagccatagtcccgaagggtttgcctcatccaaagtaattgcgcgcaataatggcctgcggcaatatactcggctttgacagtagaaagagctactgagttttgtttctttgaagcccaagacaccagggatcttcccaacaactgacaagtccctgatgtgctcttcctatcaattttacaccctgcccaatcaacatcggaatatcctattaaatcaaaggtggatcccttggggtaccaaagaccaaacttaggtgtatgaactaaatatctcaagattcttttcacggccctaaggtgaacttccttaggatcgacttgaaatcttgcacacatgcatacagaaagcataatatccggttgagatgcacataaatagagtaaagatcctatcatcgaccggtataccttttgatctatggatttacctcccgtgtcgaggtcgagatgcacattggttcccatgggtgtcttgatgggtttggcatccttcattccaaacttggtgagtatgtcttgaatatacttggtttggctgatgaaggtgccctcttggagttgctttacttgaaatcctaggaaatactttaactcccccatcatagacatctcgaatttttgaatcatgatcctactaaactcttcacatgtagatttgttagtagacccaaatatgatatcatcaacataaatttggcatacaaacaaatcatttgcaatggttttagtaaagagtgtaggatcagcttttccaactttgaaaccattagtgataagaaaatctcttaggcattcataccatgctcttggggcttgcttgagcccgtaaagcgccttagagagtttatacacgtggttagggtactcactatcttcaaagccgggaggttgctcaacatagacctcttccttgattggtccattgaggaaagcactcttcacgtccatttgataaagctcattcctcgtgaagttgttgagttcctcttgcattgccaatacccaatccgaatctcttaatgtgtcttccaccctgtatggctcaatagaagacacaaaagagtaatgttcacaaaaatgagcgacacgagatcgagtggttacccccttatgaatatcgccgaggatggagttcacggggtgatctcgttgtatcgcttggtggactcttgggtgacgcggtctttgaccctgtacttcttgtccatcttccttgtcttgatcatcattatctcccccttgatcattgtcctccttttgaggtggctcatcttcttgatcttcattttcatcatcttgagcttgatcctcatcttgggttggtggagatgcttgctctacttgagagccattagtctcatcaaacacaatgtcacaagaaacctcaactaatccagtggatttgttgaagactctatatgcccttgtgtttgagtcatagccaagtaaaaagccttctacagccttatgagcaaatttaaattttctacctcttttaacaagaataaaacatttgctaccaaagactcggtccggcgtcttgtactcatcaagcatggtcctcaccatgtcaagtagagttctattcttcgtctccactacaccattttgttgaggtgtgtagggagaagagaactcatgcttgatgccctcctcctcaagaaagccttctatttgagagttcttgaactccgtcccattgtcgcttcttatctttttgattctcaatccgaactcattttgagctcgtctcaagaatccctttaaagtctcttgggtttgtgatttttccaaaccttgatttccatccccgaatgtgatagctctttgggcatcttcgtttttctcgtaggaggagaacattcttttcgcccctgtcatatggtttgtgcacccgctatcaattatccaacttgagcccttggattcataaaccttgggtacccaaacacaagtcttgcagcccttgtgtttgtccccaacatatttggcaactattttgcctgatttgttagttaaaacataagaagcatcaaaagtcttaaatgaaatgttatgatcatttgatgcaacaagagatttctttttaggcattttaacatgggtagaatgcctagagctagaagcttcactcttatacataaaagcatgatgggaaatagagtgagtcttcttagcatgaattctcctaatcttgtgctcaggataaccagcaggatataaaatgttaccctcgttatcctgagccatgggatccttgcccttaacaaaattagacaatattttagggggattaagcttgacattgtctccctgttggaagccaatgccatcattaatgccagggcgtcttccattatagagcatgctcctagcaaatttaaatttttcattttctatttcatgctcattgattttactagttagttgtgttatgtgatcattttgttgtttaattaaagctaggtgatcatagatagcatcaacattaatgtctctacatctcatgcaaatggaaacatgatcgacagtggatgtagagggtttgcaagcatttaattcatcaatcttagcatgtaacatggcattctcatttctaagattggaaatagaaacattgcaaacatttaaatctttagccttagaaattagtttatcattctcaatcttaaggctagaaattgattcattcaatttgtcaatcttagcaatcaaactagcattatcatttttaaggttgacaagagaatcatcacaaacatttaatttctcaaccttagcaattaatttggcattttcaattctaaggttggagatagtgtcatggcaaatgctaagctcactaattaatttttcacatttctctaattcctgagcataagcattttttaccttaacaagctttttgttttccttaataaggaattcctcttggctatccaagagttcatccttctcatgaatagcacctatcaattcattcaatttttccttttgttgcatgtttaggttggcaaaaagagcaagtaaatcatcctcatcttcactagagctaccctcatcactagatgttgtatatttagtggaggctctagattttaccttcttctttttgccgtcctttgccatgaggcacttgtggccgacgttggggaagaggaggcctttggtgacggcgatgttggcggcgtcctcgttggatgaggagtcggtggtgctttcgtccgaatcccattcccgacacacgtgggcatcgccgcccttcttcttgtagtacttcttcttttccttcctccttaccttcttgtcatcgcccctgtcactggcactagaaataggacattttgctataaagtgaccggtcttaccacacttgtaacacaccttcttggaacggggtttgtagtctctccccttcctttgcttgaggatttggcaaaagctcttgatgatgagcgccatttcctcgttgtcgagcttggaggcatcgatggggagcctacttgaggtagactcttctttcttctcctctgtcactttaaatgcgacgggttgcacctcgggtgtggaggtgccgccttgctcgacaatttgtttggagcctttgatcatcaactcaaagctcacaaactttcctataacctcctcgggacacattagcttatatctaggatcaccacgaattaattgaacttgtgtaggattacaaaaaacaagtgatcttagaatagccttgaccatttcatggtcatcccatttggtgctcctgaggttgcgcacttggttgaccaaggtctttatccggttgtacatggcttgtggctcctctctaaacttcttgcgctcatggcgcttagaagtgacggacggagtgtcggagccggaggtagaaggcgacgaggaatcagtctcatagtagaccacctttttcatcttctttttcttatcgccgctccgatgtgacttggcatgtgaaggggatcccttcatcttgttgccggactcccccgatggagccttcctgtggcttgtagacttgtcaccgccggtcatgatctccttcttggcgtgttctcccgacat

SEQ ID NO: 4970 - DNA, 666 bp, Zea mays
  Clone ID: TF_ZM3970.C1.o1.fg
atgtcgggaggtcacgccaagaaggagatggtgaccggcgagaagcccgccacaagccatgggaaggctccattcggggagtccggcaacaaggtgaagggatccccttcacacgacaagtcgcgtcagagcggtgaaaagaaaaagaagatgaagaagaaaatcatcgagcaaggcgcctcctccacacccgatgtgcaacccgtggcatttaaggcaactgaggagaataaagaagactctacacctagtagggtccccatcgacgcctccaagctcgacaacgaggaaatgacgctcatcatcaagagctttcgccaaatccttaagcaaaggagggggaaggactacaagccccgctccaagaaagtttgctacaactgtggtaagtccggtcattttattgcaaaatgtccattgtctagtgatagtgacaggggcgacaacaagaatggaagagaaaagaagaggtactacaagaagaagggcggcgatgcccatgtttgccaggagtgggactccgacgagagctccaccgactcctcctccgacaaggatgccgccaacatcgccgtcaccaaaggcttcctcttccccaacgtcggccacaagtgcctcatggcaaaggacggcaagaagaagaaggttgtcggggaccataattag

SEQ ID NO: 4971 - DNA, 2502 bp, Zea mays
  Clone ID: TF_ZM4272.C5.o5.fg
atgaagactctgacgactttctgtggctaccatcccctggagatggtgatgcaccccttgggactcttccctgctgagaagaaagatgaccccatgtggtgtaactgcctcactctcgacagtcgagaagattttgtggtcgatttatcctccgagttggtggagaaggatctgcaggtggaaaagctgagccagcgcattaccaccttggagcagcaggtggaggtccgagacaacactattgatgtcttggagaaccagctctacgatgtgcagagggaactcgaagaagcaaatgaccacctggacatgcaccacttggagatggaggccaatgaagccggaagagagggagaagaggctcccgaggagctaggaccaacccctggtgccaatgggactacctccgcgatgcctccttcacccctcttgcagcgccagccccaccctcagcagcatggtggaggccagcatcagcgacctccggcagtggcaacctaccaggagttcctgagtacgcagccacccttgttcaccaaggtagatgatccgttggacgccgacgtgtggctccgcgtcgttgagtccaagtttcccctcctcacgggagactgccctgatgaagccaagtctcgcttcgccgcacagcagcttcgcggccctgctcggacttggtgggaccactttcgtgctatgctccccgctgatcgtgaagtgtcttgggaggaattcaagactacttttagaggacaccacatcccagctggcatccttgatcgcaagctgaatgagtttctggcgcttaatcaaggaacccgtacgtatgcagggtaccatgctgattctgatgagaagaagagagaccgctttcgcaggggtcttaacaccaagctacgggaacgactcaacactgtccgggctgatagcttcaatgagttggttaacctggccatctcccaggaggattgcattgtagctcaccggacagagaagaagaggaaggcaccaatggcagcaccatccgctcaggcccagaggttcaggattgtttctcacaatcagagcaggggtttccagcagcagacaggaagatgggtgatcaggccacctcagcagcagcagccgacacccaaccgctttctagctcccgctccaaggaacaatcagcctccgcagcagcagcagttccgccagggcaatgggaacaagtgtttcacttgtggcaatgtgggccactatgccaagaattgtcccaggaaccagcagaggcagatgtcagcaccaagtcaagacaagggaagaaagcagaaggtacaagtcaggcaagggaagctcaacttcactactctagaggaagtacctgagggagctcctatcatgaccggtatcttttcagtttataatcaacctgctttaattatgtttgattctggtgcatctcatagtttcattagccaaaagttcagtgctaaatgtgaactgccattctctcactcaaaagggtcatttatgatagtcacacctgggggtaaaatttcaactaatcaattaaaccaaagtgtgcctattcaactgggaagccacattgtcaaaaccacccttcttgttttgggtttggaaaatgtggacattattctgggagctaattggatgaccttgcaccaagttgtgcttgatgtagccagccttaccgtggaaatcaattctccgttctgtgggaacttcaccttaattctgctcagtcaaggttctactcagtcatgtgctttctctatgatagagttacctctgaagaaaaccccagtggtctgtgagtatgcagatgtcttccgtgatgaattgccaggaatgccaccagaccgggatattgaatttgccatggagttgcaaccgggaacgacaccaatttccaagaggccctaccgaatgccacccgttgagttggcagaattgaagaagcaattgcaggagttgctggataagggatttattcgcccaagtacttcaccttggggatgtccagcactgtttgtgaagaagaaggatgaaagcttgaggctgtgtatagattaccgccctcttaatgcggtaactatcaagaacaagtatcctttgcctcgtattgatgttctttttgaccagttggtcggggccaaggtgttttccaagatagaccttcgctccggctatcatcagatcaagatacgagcaagcgatattccgaagacgacattctcaaccagatatgggctatatgaattcttggtgatgtcattcgggctgacaaatgcaccaacatatttcatgtatttgatgaattctgttttcatgcctgaattggacaaattcatagtggtgttcatcgatgatatcttggtgtactctaagaacgaagaagaacatgtcgggcatttgcatgtagtgcttcaacgtctgcgagagcaccacctttatgccaagttgtcaaaatgcaagacaactgagtcattgcttatgccttaa

SEQ ID NO: 4972 - DNA, 5274 bp, Zea mays
  Clone ID: TF_ZM4326.C1.o11.fg
atgaattcacccacccccgccagtggaggagactctcgtttcagttctgacttcctttctcgcgatggctttccttccatcttgtgggaagtgcttaactccgccggttaccctacgccccctttgtacacggtgcagttgtatgaggagcatcgggtacctcgttgtcgggtctggctaactttggaggctcatccccttcagccgggttggcgttctcttgactctgagacgattggactcaggacggacgacaccgttgaggcagcagccatgaagactctgacgactttctgtggctaccatcccctggagatggtgatgcaccccttgggactcttccctgctgagaagaaggatgatcccatgtggtgtaaccgcgtgagccatgtgaaggatgtgtgggcaatgtatcctgacttggttgggagggtcactgtccagtgcatgagtgcgctgtaccgccttcaggcccttcagagcgatgctatgacacttcttgctaacaccgctcaggctgccaagctcactctcgacagtcgggaagattttgtggtcgacctatccacagagttggtggagaaggatctgcaggtggagaggctgaaccagcgtattaccaccctggagcagcaagtggagatccgagacaacactattgatgtcttggagaaccagctccacgacgtgcagagggaactcgaggaagccaatgaccacttggacatgcaccacctggagatggaggccaatgaagcaggaagcgagggagaagaggctcccgaggagctaggaccagcccctggtgccaatgggactacctccgcgatgcctccttcacccatggcagcgaggcagcgtcgcgggcagaatgagcaagctcccccgccacctcctccagctcccacagtgcaggagctgatggcccagcagaatgagattctgcgacagctcttgcagcgccagccccaccaacagcatcatggtggaggccagcatcagcgacctccggctatggcaacataccaggagtttctgagcacgcagccgcccttgttcaccaaggcagaggatccgttggacgccgacgtatggcttcgcgtcgtcgagtccaagtttcccctcctcacgggagactgccctgatgaggccaaggctcgcttcgccgcacagcagcttcgcggcccagctcggacttggtgggaccacttccgtgctatgctccccgctgatcatgaagtatcttgggaggaattcaagactgccttcagaggacaccacattccagctggcattcttgataggaagttgaatgaattcctggccctcaatcaaggaacccgcacggtactgcagtatgcgcaagccttcaacgacttatgccagtatgcagggtatcatgctgattctgatgaaaagaagagggatcgcttccgcaggggtctcaatactaagccgcgggaacgactcaacactgtccgggccaatagcttcaatgagttggtcaacatggccatctctcaggaggattgcattgttgctcaccgggcagagaagaagaggaaggcaccaatggcagcaccatccgctcaggctcagaggttccggattgtttctcacaatcagagcaggggttttcagcagcaggcaggcagatgggtgatcaggccacctcagcagcagcagcagccggcacccaaccgctatccagctcccgccccaaggaacaatcagcctccgcagcagcagcagttccgccagggcaatgggaacaagtgtttcacttgtggcaatgtgggccactatgccaaaaattgtcccaggaaccagcagaggcagatgccagcaccaaatcaagacaagggaagaaagcagaaggtgcaagtcaggcaagggaagctcaacttcactgctctagaggaagtgccagaaggagctcctatcatgaccggtaccttttcagtttataatcaacctgctttaattctgtttgattctggtgcatctcatagtttcattagccaaaagttcagtgctaattgcaaactgccattttctcactcaaaagggtcattcatgatagtcacacctgggggtaaaattgcaactaaccaattaaaccaaagtgtgcctattcaactgggaagccacattgtcaaaaccactcttcttgtgttgggattggaaaatgtggacattattctaggagcaaattggatgaccttgcaccaagttgtgcttgatgtagccagtcgtaccgtggaagttaattctcctttctgcgggaatttcactttgattctgcctagtcagggttcttctcagtcgtgtgctttctctatgacggagttgcccctgaagaagatcccagtggtctgtgagtatgcagatgtctttcctgatgaattgccaggaatgccaccggaccgggatattgaattcgccatcgagctgcaaccgggaacgaccccaatttctaagaggccctaccgaatgccacccgctgagttggcagagttgaagaagcagttgcaagagttgctggataagggatttattcgcccaagcacttcgccttggggatgtccagcgctatttgtgaagaagaaggatgaaagcttgaggctgtgcatagattaccgccctcttaatgcggtaactatcaagaacaagtatcctttgcctcgtattgatgtcctctttgaccagttggtcggggccaaggtgttttccaaaatagaccttcgctctggctaccatcagatcaaaatacgagcaagtgatattccgaagacggcattctcaaccagatatgggctgtatgaattcttggtgatgtcattcgggctgacaaatgcaccagcatatttcatgtatctgatgaattctgttttcatgccagaattggacaagttcgtagtggttttcatcgatgatattctggtgtactcgaagaacgaagaagaacatgccgggcatttgcatgtagtgcttcaacgtctgcgagagcaccacctttatgccaagttatccaagtgtgatttttggctaaaggaaatcaaattcttgggtcacactatttctcaggatggaatagctgttgatcctgataaagtgcaagagatgatgaattggaagccaccaacgactgttcgccagattcggagttttctgggattggccggttattaccgaagatttattccggacttctctcggattgcgaagcctattactgagttgctgaagaaagaagtcaagtttgtgtggagtcagaagtgcgaagatgccttccatgcgttgaggcagcatctgaccacagcaccggtattggcgcaacccgacagcagcaagccttttgatgtgtattgcgatgcctctggcaccgggctaggttgtgtcttgatgcaagacaaccgagtcattgcttatgcctcaagagcactcaggcctcatgagcaaaattatcccactcatgaccttgagttagcagcagtggttcatgcattgaaaatgtggaggcactatctaatgggaacccactgcaacatcttcactgatcataagagccttaagtacatttttactcaggctgatctcaacatgaggcagagaagatggctagagctgatcaaggattatgacctggaggtacattatcacccagggaaagctaatgtggtagctgatgccttgagtcggaagttgcaatgcaactgtattctgatggattcccgtgttaacaccttgtgtgatgagttgagcaagatgcaaattgaagtgattccttctggttctttgtctcacatttctgttgagccaactttgcaagaccagatcatcatggcccagctcagtgacaagggagtgcagattatcaagaagaatctccatcagaaggttgaaaagtataattgtttccgccaggatgagaaaggtgtgttatggttcaaaagcagattggtaattcctaaggaccaggatctcaagaggaaaattttggatgaggctcatctctccaaattctctatgcatccgggaagcaccaagatgtaccatgatttgaagcctttgtactggtggaccagaatgaagagggagatagcccagtatgtatcagagtgtgacacctgtcagagggttaaggcaagccacttgaagtccgctggagctttgcgaccactgtccgtaccttcgtggaagtgggacgatatcagcatggatttcattgtgggtctacccaacaccttccgtcatcatgattcaatttgggttattgtggaccgattgacgaaagtggcacattttcttcctgtgcacaccactgataaggctcagaagtatgcagaattgtatattgaccgaatcgtgtgtttgcatggattacctcggaccattgtttctgaccgaggagcccaatttgttgccagattttgggaacaattgcaagagtctttgggaaccaagctaatcaggagttcagcttaccacccacagactgatggtcagacggaaagggtaaaccagattctagaagatatgctgagagcttgtgcgaacgattgtggcaagaactgggataagcacctctccttggcagagtttgcttataacaatagttatcagtccagcctaaagatggcaccttttgaagctctctatgggagaaggtgcaggacaccactcaattggtctcagcctggtgaaagagaagtttttggacctgatttggtgactgaagccgaaaggaaggtcaagctgatcaggaagaatctagaagctgctcaggccaggcagaagagctatcatgacagaagaaggaaacctctccagttcgaggtgggaagttttgtatacctcaaggtatcacccaccaagggagtgcagaggtttggaatcaaaggcaagttagcccctcgttacattggaccttatgagatcatagaagcatgtggacccgtggcatacaagctgaagttaccttcaaagatgtctgccattcacagcgtattccatgtatctcagctgaagaagtgtgttcgattgccgactgagattctagcagagccagaattggagatagagccagatctctcgtaccaagagtacccctccaagattctggattgcaaggaaagatcaactcgggctaaatcgatcaagatgtttaaggtccagtggagtaatcactcagaggaggaagctacttgggaaaccgaggaattcttaaggtccaacttccccgattgcctacctaaggaagctggtatgtaa

SEQ ID NO: 4973 - DNA, 1908 bp, Zea mays
  Clone ID: TF_ZM4326.C1.o12.fg
atgaagactctgacgactttctgtggctaccatcccctggagatggtgatgcaccccttgggactcttccctgctgagaagaaggatgatcccatgtggtgtaaccgcgtgagccatgtgaaggatgtgtgggcaatgtatcctgacttggttgggagggtcactgtccagtgcatgagtgcgctgtaccgccttcaggcccttcagagcgatgctatgacacttcttgctaacaccgctcaggctgccaagctcactctcgacagtcgggaagattttgtggtcgacctatccacagagttggtggagaaggatctgcaggtggagaggctgaaccagcgtattaccaccctggagcagcaagtggagatccgagacaacactattgatgtcttggagaaccagctccacgacatggcagcgaggcagcgtcgcgggcagaatgagcaagctcccccgccacctcctccagctcccacagtgcaggagctgatggcccagcagaatgagattctgcgacagctcttgcagcgccagccccaccaacagcatcatggtggaggccagcatcagcgacctccggctatggcaacataccaggagtttctgagcacgcagccgcccttgttcaccaaggcagaggatccgttggacgccgacgtatggcttcgcgtcgtcgagtccaagtttcccctcctcacgggagactgccctgatgaggccaaggctcgcttcgccgcacagcagcttcgcggcccagctcggacttggtgggaccacttccgtgctatgctccccgctgatcatgaagtatcttgggaggaattcaagactgccttcagaggacaccacattccagctggcattcttgataggaagttgaatgaattcctggccctcaatcaaggaacccgcacggtactgcagtatgcgcaagccttcaacgacttatgccagtatgcagggtatcatgctgattctgatgaaaagaagagggatcgcttccgcaggggtctcaataccaagctgcgggaacgactcaacactgtccgggccaatagcttcaatgagttggtcaacatggccatctctcaggaggattgcattgttgctcaccgggcagagaagaagaggaaggcaccaatggcagcaccatccgctcaggctcagaggttccggattgtttctcacaatcagagcaggggttttcagcagcaggcaggcagatgggtgatcaggccacctcagcagcagcagcagccggcacccaaccgctatccagctcccgccccaaggaacaatcagcctccgcagcagcagcatttccgccagggcaatgggaacaagtgtttcacttgtggcaatgtgggccactatgccaaaaattgtcccaggaaccagcagaggcagatgccagcaccaaatcaagacaagggaagaaagcagaaggtgcaagtcaggcaagggaagctcaacttcactgctctagaggaagtgccagaaggagctcctatcatgaccggtaccttttcagtttataatcaacctgctttaattctgtttgattctggtgcatctcatagtttcattagccaaaagttcagtgctaattgcaaactgccattttctcactcaaaagggtcattcatgatagtcacacctgggggtaaaattgcaactaaccaattaaaccaaagtgtgcctattcaactgggaagccacattgtcaaaaccactcttcttgtgttgggattggaaaatgtggacattattctaggagcaaattggatgaccttgcaccaagttgtgcttgatgtagccagtcgtaccgtggaatcagggttcttctcagtcgtgtgctttctctatgacggagttgcccctgaagaagatcccagtggtctgtga

SEQ ID NO: 4974 - DNA, 3537 bp, Zea mays
  Clone ID: TF_ZM4448.C1.o5.fg
atggcaacctaccaggagtttctgagcacgcagccacccttgttcaccaaggcagaggatccgttggacgccgacgtgtggcttcgcgtcgttgagtccaagtttcccctcctcacgggagactgccctgatgaggccaaggctcgcttcgccgcacagcagcttcgcgaccctgctcggacttggtgggaccacttccgtgctatgctccccgctgatcgtgaagtgtcttgggaggaattcaagactgccttcagaggacaccatatcccagctggcattcttgatcggaagttgaatgaatttctggcccttaatcaaggaacccgcacggtactgcagtatgcgcaagccttcaacgacttatgtcagtatgcagggtaccatgctgattctgatgaaaagaagagggaccgcttccgcaggggtctcaataccaagctgcgggaacgactcaacactgtccgggcagatagcttcaatgagttggtcaacatggccatctcccaggaggagtgcattgtagctcaccgggcagagaagaagagaaaggcaccaatggcagcaccatccactcaggctcagagtttccagattgtttctcacaatcagagcaggggttttcagcagcaggcaggcagatgggtgatcaggccacctccgcagcagcagccggcacccaaccgctttccagctcccgctccaaggaacaatcagcctctgcaacagcagcagttccgccagggcaatgggaacaagtgtttcacttgtggcaatgtgggccactatgccaagaattgtcccaggaaccagcagaggcagatgccagcaccaaatcaagacaagggaagaaagcagaaggtgcaagtcaggcaagggaagctcaacttcactactctggaggaagtacctgaaggagctcctatcatgaccggtatcttttcagtttataatcaacctgctttaattctgtttgattctggtgcatctcatagtttcattagccaaaagttcagtgctaaatgtgaactgccattctctcactctaaagggtcattcttgatagtcacacctgggggtaaaatttcaactaatcaattaaaccaaagtgtgcctattcaactgggaagccacattgtcaaaaccactcttcttgtgttgggtttggaaaatgtggacattattctgggagctaattggatgaccttgcaccaagttgtgcttgatgtagccagtcgtaccgtggaagttaattctctgttctgtgggaacttcaccttaattctacccagtcgaggttctactcagtcatgtgctttctctatgacggagttacctctgaagaagatcccagtggtctgcgagtatgcagatgtctttcctgatgaattgccaggaatgccaccagaccgggatattgaatttgccatcgagttgcaaccaggaacagccccaatttccaagaggccctaccgaatgccacccgctgagttggcagaattgaagaagcaattgcaggagttgctggataagggatttattcgcccaagtacttcgccttgggggtgtccagcactgtttttaaagaagaaggatgaaagcttgaggctgtgtatagattaccgccctcttaatgcggtaactatcaagaacaagtatcctttgcctcgtattgatgttctttttgaccaattggttggggccaaggtgttttccaagatagaccttcgctctggctaccatcagatcaagatacgagcaagtgatatcccaaagacggcattctcaaccagatatgggctatatgaatttttggtgatgtcattcgggctgacaaatgcaccagcatatttcatgtatctgatgaattctgttttcatgcctgaattggacaaattcgtagtggtgttcatcgatgatattttggtgtactcaaagaacgaagaagaacatgtcgggcatttgcatgtagtgcttcaacgtatgcgagagcaccacctttatgccaagttatccaagtgtgacttttggctaaaggaaatcaaattcttgggtcacactatctctcaggcaggaatagttgttgatcctgataaagtgcaagaggtgatgaactggaagccaccaacgactgtccgtcagattcagagttttctgggattagctggttattaccgaagatttattccggatttctctcgaattgcgaagcctataactgagttgctgaagaaagaagccaagtttgtttggagtcagaagtgcgaagatgccttccatgcattaaggcagcatctgaccacagcactagtattggcgcaacccgacaacagcaagccttttgatgtgtattgcgacgcctctggcactgggctaggttgtgtcttgatgcaagacaaccgagtcatcgcttatgcctcaagagcactcaggcctcatgagcaaaactatcccactcatgacctcgagttggcagcagtggttcatgcactaaaaatgtggaggcactatttaatgggaacccactgcaacatcttcactgatcataagagccttaagtacatttttactcaggctgatctcaacatgaggcagagaagatggctagaactgatcaaggattatgatctggaggtacattatcacccaggaaaagctaatgtggtagcagattccttgagtcggaagttgcaatgcaattgtattctgatggattctcgcattaacaccttgtgtgatgagttgagcaagatgcaaattgaagtgattccttctggttctttgtctcacatttttgttgagccagctttgcaagaccagattatcatggcccagctcagtgacaagggagtgcagtttatcaagaagaatctccatcagaaggttgagaagtataattgtttccgccaagatgaaaagggagtcttgggaaccaagctaatcagaagttcagcttaccacccacagactgatggccagacggaaagggtaaaccaaatcctggaggatatgctgagagcttgtgcaatcgattgtggcaagaactgggatgagcccctctccttggcagagtttgcttataacaacagttatcaatccagcctaaggatggcaccttttgaagctctctatggaagaaggtgtaggacaccactcaattggtctcaacctggagaaagaggagtttttggacctgacttagtaaatgaagccgaaaggaaggtcaaactaatcaggaagaatctagaagctgctcaggccaggcagaagagttaccatgatagaagaaggaaacctctccagttcgaggtgggaagttttgtatacctcaagccgaagaagtgtgttcgattgccgaccgagatcatagcagagccagaattggagatagagccagatctatctaccaagaatacccttccaagattctggatagcagagaaagatcaactcgggctaaatcgatcaagatgtacaaggtccagtggagtaatcactcagaggaagaagctacttgggaaaccgaggaattcttga

SEQ ID NO: 4975 - DNA, 4068 bp, Zea mays
  Clone ID: TF_ZM4550.C1.o14.fg
atggcaacttaccaggagtttctgagcacgcagccacccttgttcaccaaggcagagaatccgttgaacgccgacgtatggcttcgcatcgtcgagtccaagtttcccctcctcaccgaagactgccctgatgaggccaaggctcgcttcgccgcacagcagcttcgcggttctgctcggacttggtgggaccacttctgtgctatgctccccgctgatcgtgaagtatcttgggaggaattcaagactgccttcagaggacaccacatcccagctggcattcttgatcggaagttgaatgaatttctggtccttaatcaaggaacccgcacggtactgcagtatgcgcaagccttcaacgacttatgccaatatgtagggtatcatgctgattctgatgaaaagaagaggggtcgcttccgcaggggtctcaataccaagctgcgggaacgactcaacactgtccgggctgatagcttcaatgagttggtcaacatggccatctcccaggaggattgcattgttgctcaccgggcagagaagaagagaaaggcaccaatggcagcaccatccgctcaggctcagaggttccagattgtttctcacaatcagagcaggggttttcagcagcaggcagacagatgggtgatcaggccacctcagcagcaacagcagccggcacccaaccgctttccagctcccgccccaaggaacaatcagcctccgcagcagcagcagttccgccagggcaatgggaacaagtgtttcacttgtggcaatgtgggccactatgccaagaattgtcctaggaaccagcagaggcagatgccagcaccaaatcaagacaagggaagaaagcagaaggtgcaagtcaggcaagggaagctcaacttcactactctggaggaagtacctgaaggagctcctatcatgatcggtatcttttcagtttataatcaacctgctttaattctgtttgattctggtgcatctcatagtttcattagccaaaagttcagtgctagatgtaaactgccattctctcactcaaaagggtcattcatgatagtcacacctggggccatccatatcgtggaagttaattctccgttctgcgggaacttcaccttagttctgcctagtcaaggttctactcagtcatgtgctttctctatgacggagttacctctgaagaagatcccagtggtctgtgagtatgcagatgtcttccctgatgaattgccaggaatgccaccagaccgggatattgaattcaccatcgagttgcaaccgggaacggccccaatttccaagaggccctaccgaatgccacccgctgagttggcagaattgaagaagcaattgcaagagttgctggataagggatttattcgcccaagcacttcgccttggggatgtccagcactgtttgtgaagaagaaggatgaaagcttgaggctgtgtatagattaccgccctcttaatgcggtaactatcaagaacaagtatcctttgcctcgtattgatgttctttttggccagttggtcggggccaagatcaagatacgagcaagtgatattccgaagacgacattctcaaccagatatgggctatatgaattcttggtgatgtcattcgggctgacaaatgcaccagcatatttcatgtatctgatgaattctgttttcatgccggaattggacaagttcgtagtggttttcatcgatgacattttggtgtactcaaagaacgaacaagaacatgctgggcatttgcatgtagtgcttcaacgtctgcgagagcatcacctttatgccaagttatccaagtgtgatttttggctaaaggaaatcaaattcttgggtcacactatctctcaggctggaatagctgttgatcctgataaagtgcaagaggtgatgaactggaagccaccaacaactgtccgtcagattcagagttttctgggattagctggttattaccgaagatttattccggacttctctcgaattgcgaagcctataactgagttgctgaagaaagaagtcaaatttgtttggagtcagaagtgcgaagatgccttccatgcattgaggcagcatctgaccacagcaccagtattggcgcaacctgacaacagcaagccttttgatgtatattgcgatgcctctggcaccgggctaggttgcgtcttgatgcaagacaaccgagtcattgcttatgcctcaagagcactcaggcctcatgagcaaaactatcccactcatgacctcgagttggcagcagtggttcatgcattaaagatgtggaggcactatctaatgggaacccactgcaacatcttcactgatcataagagccttaagtacatttttactcaagctgatctcaacatgaggcagagaagatggctagagctgatcaagaattatgacctggaggtacattatcacccaggaaaagctaatgtggtagcagatgccttgagtcggaagttgcaatgcaattgtattctgatatattctcgcattaacaccttgtgtgatgagttgagcaagatgcaaattgaagtgattccttctggttctttgtctcacatttctgttgagccagctttgcaagaccagattatcatggcccagctcagtgacaagggagtgcagattatcaagaagaatctccatcagaaggttgagaagtataattgtttccgccaggatgaaaagggtgtgttatggttcaaaagcagattggtaattcctaaagatcaggacctcaagaggaaaattttggatgaggctcatctctccaaattctctatgcatccgggaagcaccaagatgtaccatgatctgaagcctttgtactggtggaccagaatgaagagggagatagcccagtatgtatcagaatgtgacacctgtcagaggataaatgcaagccacttgaaatcagctggagctttgcaacccctgtccataccttcgtggaagtgggacgacatcagcatggatttcattgtgggtctgcccaacacctctcgtcatcatgattcgatttgggttattgtggaccgactgacaaaagtggcacattttcttcctgtgcacaccactgataaggctcagaagtatgcagaattgtatattgaccggatcgtgtgtttgcacggattacctcggaccattgtttctgaccgaggagcccaatttgttgccagattttgggaacaattgcaagagtctttgggaaccaagctaatcaggagttcagtttatcacccacagactgatggtcagacggaaagggtaaaccaaattctggaggatatgctgagagcttgtgcaatcgattgtggcaagaactgggataagcacctctccttagcagagtttgcttataacaatagttatcaatccagcctaaagatggcaccctttgaagctctctatggaagaaggtgtaggacaccactcaattggtctcaacctggagaaagagaagtttttggacctgacttagtgactgaagccgaaaggaaggtcaaactaatcaggaagaatctagaagctgctcaggccaggcagaagagttaccatgacagaagaaggaaacctctccagttcgaggtgggaagttttgtatacctcaaggtatcacccaccaagggagtgcagaggtttgggatcaaatgcaagctagcccctcgttacattggaccttatgagatcatagaagcatgtggacccgtggcatataagctgaagttaccttcaaagatgtctgccattcacagtgtattccatgtatctcagctaaagaagtgtgttcgattgccgaccgagatcatagcagagccagaattagagatagagccagatctatcgtaccaagagtacccctccaagattctagattgcaaagaaagatcaactcgggctaaatcgatcaagatgtacaaggtccagtggagtaatcactcagaggaggaagctacttgggaaaccgaggaattcttgagatccaacttccccgattgcctacctagggaagctggtacgtaa

SEQ ID NO: 4976 - DNA, 2844 bp, Zea mays
  Clone ID: TF_ZM4641.C1.o4.fg
atgggcaaccaaaaatttgctaagtccatgatgagaagatcatacacctttgaagttgtaatttctaaaagcacatatcatatcatgcatatatcttacgccttgcattcattagattgcaatcttgccgacggagagtacgtgctcatccccgagcaaggacctgtccaagaagaggaccaggagcaggcttcagaggctgccattgaggatctccccgcagccccagcaattgaaggcaagccccgctatggtgggtacaagtgcggtcactgcacggcggcagccggggtcagtggagcagtgtatgccaaggcgatgaattcacccacccccgccagtggaggagactctcgtttcagttctgacttcctttctcgcgatggctttccttccatcttgtgggaagtgcttaactccgccggttaccctacgccccctttgtacacggtgcagttgtatgaggagcatcgggtacctcgttgtcgggtctggctgactttggaggctcatccccttcagccgggttggcgttctcttgactctgagacgattggactcaggacggacgacaccgttgaggcagcagccatgaagactctgacgactttctgtggctaccatcccctggagatggtgatgcaccccttgggactcttccctgctgagaagaaggatgatcccatgtggtgtaaccgcgtgagccatgtgaaggatgtgtgggcaatgtatcctgacttggttgggagggtcactgttcagtgcatgagtgcgctgtaccgccttcaggcccttcagagcgatgctatgacacttcttgctaacaccgctcagactgccaagctcactctcgacagtcgggaagattttgtggtcgacctatccacagagttggtggagaaggatctgcaagtggaaaggctgagccagcgtatcaccaccctggagcagcaagtggagatccgagacaacactattgatgtcttggagaaccagcttcacgatgtgcagagggaacttgaagaagcaaatgaccacttggacatgcaccacctggagatggaggccaatgaagcaggaagcgagggagaagaggctcccgaggagctaggaccagcccctggtgctaatgggactacctccgcgatgcctccttcacccatggcagctaggcagcgtcgcgggcagaacgagcaggttcccccgccacctcctccagctcccacagtgcaggagctgatggcccagcagaatgagattctgcgacagctcttgcagcgccagccccacccccagcagcatggtggaggccagcatcagcgacctccggctatggcaacataccaggagtttctgagcacgcagccgcccttgttcaccaaggcagaggatccgttggacgccgacgtgtggcttcgcgtcgtcgagtccaagtttcccctcctcacaggagactgccctgatgaggccaaggctcgcttcgccgcacagcagcttcgcggccctactcggacttggtgggaccacttccgtgctatgctccccgctgatcgtgaggtatcttgggaggaattcaagactgccttcagaggacaccacatcccagctggcattcttgatcggaagttgaatgaatttctggcccttaatcaaggaacccgcacggtactgcagtatgcgcaagccttcaacgacttatgccagtatgcagggtatcatgctgattttgatgaaaagaagagggatcgcttccgcaggggtctcaataccaagctgcgggaacgactcaacactgtccgggctaatagcttcaatgagttggtcaatatggccatctctcaggaggattgcattgttgctcatcgggcagagaagaagaggaaggcaccaatggcagcaccatccgctcaggctcagaggttccggattgtttctcacaatcagagcaggggttttcagcagcaggcaggcagatgggtgatcaggccacctcagcagcagcagcagccggcacccaaccgctaccctgctcccgccccaaggaacagtcagcctctgcagcagcagttccgccagggcaatgggaacaagtgtttcacttgtggcaatgtgggccactatgccaagaattgtcccaggaaccagcagaggcagatgccagcaccaaatcaagacaagggaagaaagcagaaggtgcaagtcaggcaagggaagctcaacttcacggctctggaggaagtcccagaaggagctcctatcatgaccggtaccttttcagtttataatcaacctgctttaattctgtttgattctggtgcatctcatagtttcattagccaaaagttcagtgctaaatgcaaactgccattctctcactcaaaagggtcattcatgatagtcacacctggaggtaaaattgcaactaatcaattaaaccaaagtgtgcctattcaactgggaagccacattgtcaaaaccactcttcttgtgttgggattggaaaatgtggacattattctaggagcaaattggatgaccttgcaccaagttgtgcttgatatagccagccgtaccgtggaagttaattctcccttctgcgggaacttcactttaattctgcctagtcagggttctactcagtcatgtgctttctctatgacagagttacccctgaagaagattccagtggcaaacacaaagcctgagggagacctcgcagtacctgcaaacgaagctcaagctgtgatctctatgcggccgactgaggagatgaaaagaatcaaccttgggttcgctgatgcacgcagggctgccatcatcaactccagccttgacgacaaatag

SEQ ID NO: 4977 - DNA, 1218 bp, Zea mays
  Clone ID: TF_ZM4714.C6.o4.fg
atgtcgggaggtcacgccaagaaggagatggtgaccggcgagaagcccgccacaagccatgggaaggctccattcggggagtccggcaacaaggtgaagggatccccttcacacgacaagtcgcgtcagagcggtgaaaagaaaaagaagatgaagaaggtagtctactacaagaccgactcttcatcgccatccacctctggctccgacacgccgtccatcacttataagcgccatgagcgcaagaagtttagctatgactcggacgaagtagcccaaatccagcacttcaactcacaagccaccactatactcctcgcctctctaagtcgagaggagtataacaaggtgcaagggttgaagagcaccaaagagatttgggatgtactcaagaccgcgcacgaaggagatgaggtgaccaagatcatcaagagggaaatgattgaggcggagctcggtcacttcatgcttcaccaaggggaggatccacaagccatgtacaaccgactcaagaccttggtgaaccaagtgcgcaacctcgggagcactaaatgggatgaccatgaaatggtcaaggttattcttaggacactcgtatttcttaatcctactcaagttcaattaaatcgtgatccaagatacaaactaatgtctcccgaggaagtaataggaaaatttgtgagctttgagttgatgatcaaatgctccaagaaaatcatcgagcaaggcgcctcctccacacccgatgtgcaacccgtggcatttaaggcaactgaggagaataaagaagactctacacctagtagggtccccatcgacgcctccaagctcgacaacgaggaaatgacgctcatcatcaagagctttcgccaaatccttaagcaaaggagggggaaggactacaagccccgctccaagaaagtttgctacaactgtggtaagtccggtcattttattgcaaaatgtccattgtctagtgatagtgacaggggcgacaacaagaatggaagagaaaagaagaggtactacaagaagaagggcggcgatgcccatgtttgccaggagtgggactccgacgagagctccaccgactcctcctccgacaaggatgccgccaacatcgccgtcaccaaaggcttcctcttccccaacgtcggccacaagtgcctcatggcaaaggacggcaagaagaagaaggttgtcggggaccataattag

SEQ ID NO: 4978 - DNA, 4989 bp, Zea mays
  Clone ID: TF_ZM5061.C1.o2.fg
atgaagactctgacgactttctatggctaccatcccctggagatggtgatgcaccccttgggactcttccctgctaagaagaaggatgatcccatgtggtgtaaccgcgtgagccaggtaaaggatgtgtgggcgatgtatcctgacttggttgggagggtcaccgttcagtgcatgagtgcgctgtaccgccttcaggcccttcagagcgatgctatggcactccttgctaacaccgctcaaactgccaagctcactctcgacaatcgggaagattttgtggtcgatctatccactgagttggtagagaaggatctgcaagtggagaggctgagccagcgcatcaccaccttggagcagcaggtggagatccgagacaacactattgatgtcttggaaaaccagcttcacgatgtgcagagggaactcgaggaagcaaatgaccacttggacacgcaccacctggagatggaggccaatgaagccggaagcgagggagaagaggctcccgaggagctaggaccagcccctggtgcccatgggactacctccgcgatgcctccttcacccgagtttctgagcacgcagccgcccttgttcaccaaggcagaggatccgttggacgccgacgtgtggcttcgcatcgtcgagtccaagtttccccttctcacgggagactgccctgatgaggccaaggctcgcttcgctgcacagcagcttcgcggccctgctcggacttggtgggaccacttccgtgctatgctccccgctgatcgtgaagtgtcttgggaggaattcaagactgccttcagaggacaccacatcccagctggtattcttgatcggaagttgaatgaatttctggcccttaatcaaggaacccgcacggtactgcagtatgcgcaagccttcaacgacttatgccagtatgcagggtaccatgctgattctgatgaaaagaagagagaccgcttccgctggggtcttaataccaagctgcaggaacgactcaacactgtccgggctgatagcttcaatgagttggtcaacatggccatctcccaggaagattgcattgtagctcaccgggcagagaagaagagaaaggcaccaatggcagcaccatccgctcaggctcagaggttctggattgtttctcacaatcagagcaggggttttcagcagcaggcaggcagatgggtgatcaggccacctcagcagcagcagccggcacccaaccgctttccagctccagccccaggaaacaatcagcctccgcagcagcagcagttccgccagggcaatgggaacaagtgtttcacttgtggcaatgtgggccactatgccaagaattgtcccaggaaccaacagaggcagatgccggcaccaaatcaagacaagggaagaaagcagaaggtgcaagtcaggcaagggaagctcaacttcactactctggaggaagtacctgagggagctcctatcatgaccggtatcttttcagtttataatcaacctgctttaattctgtttgattctggtgcatctcatagtttcattagccagaagctcagtgataaatgtgaactgccattctctcactcaaaaggtgtgcctattcaactgggaagccacattgtcaaaaccactcttcttgtgttgggtttggagaatgtggacattattctgggagctaattggatgaccttgcaccaagttgtgcttgatgtagccagccgtaccgtggaagttaattctccgttctacggaaacttcaccttaattctgcctagtcaaggttctactcagtcatgtgctttctctatgacggagttacctctaaagaagatcccagtggtctgcgagtatgcagatgtctttcctgatgaattgccaggaatgccaccagaccgggatattgaattcgccaccgagttgcaaccgggaacgacaccaatttccaagaggccctaccgaatgccacccgttgagttggcagaattgaagaagcaattgcaagagttgctggataagggatttattcgcccaagtacttcgccttggggatgtccagcactgtttgtgaagaagaaggatgaaagcttgaggctgtgtatagattaccgccctcttaatgcggtgactatcaagaacaagtatcctttgcctcgtattgatgttctttttgaccagttggtcgaggccaaggtattttccaaaatagaccttcgctctggctaccatcagatcaagatacgagcaagtgatattccgaagacgacattctcaaccagatatgggctatatgaatttttggtgatgtcgttcgggctgacaaatgcaccagcatatttcatgtatctgatgaattctgttttcatgcctgaattggacaaattcgtagtggttttcatcgatgatattttggtgtactcaaagaacgaagaagaacatgccgggcatttgcatgtagtgcttcaacgtctgcgagagcaccacctttatgccaagttatccaagtgtgatttttggctaaaggaaatcaaattcttgggtcacactatctctcaggtaggaatagctgttgatcctgataaagtgcaagaggtgatgaactggaagccaccaccaactgtccgtcagattcggagttttctgggattagctggttattaccgaagatttattccggatttccctcgaattgcgaagcccataactgagctgctgaagaaagaagccaaatttgtttggagacagaagtgcaaagatgccttccatgcattaagacagcatctgaccacagcaccagtattggcgcaacccgacaacagcaagccttttgatgtatattgcgatgcctctggcaccgggctaggttgtgtcttgatgcaagacaaccgagtcatcgcttatgcctcaagagcactcaggcctcatgagcaaaactatcccactcatgacctcgagttggcagcagtggttcatgcattaaaaatgtggaggcactatctaatgggaacccactgcaacatcttcactgatcatacgggccttaagtacatctttactcaggctgatctcaacatgaggcagagaagatggctagagctgatcaaggattatgacctagaggtacattatcacccaagaaaagctaatgtggtagcagatgccttgagtcggaagttgcaatgcaattgcattctgatggattctcgcattaacaccttgtgtgatgagttgagcaagatgcaaattgaagtgatcccttctggttctttgtctcacatttctgttgagccagctttgcaagaccagattatcatggcccagctcagtgacaagggagtgcaaattatcaagaagaatctccatcagaaggttgagaagtataattgtttccgccaagatgaaaagggtgtgttatggttcaaaagcagattggtgattcctaaagaccaggacctcaagaggaaaattttggatgaggctcatctctccaaattctctatgcatccgggaagcaccaagatgtaccatgacctgaagcctttgtattggtggaccagaatgaagagggagatagcccaatatgtattagaatgtgacatctgtcagaggataaaggcaagccacttgaaatcagctggagctttgcaacccctgtctataccttcgtggaagtgggatgacatcagcatggatttcattgtgggtctgcccaacacctctcgtcatcatgattcgatttgggttattgtggaccgactgacaaaagtggcacattttcttcctgtgcacaccactgataaggctcaaaagtatgcagaattgtatattgaccggatcgtgtgtttgcacggattacctcggaccattgtttctgaccgaggagcccaatttgttgccagattttgggaacaattgcaagagtctttgggaaccaagctaatcaggagttcagcttaccacccacagactgatggtcagacagaaagggtaaaccaaattctggaggatatgctgagagcttgtgcaatcgattgtggcaagaactgggataagcacctctccttggcagagtttgcttataacaatagttatcaatctagcctaaggatggcaccttttgaagctctctatggaagaaggtgcaggacaccactcaattggtctcaacctggagaaagagaagtttttggacctgacttagtgactaaagctgaaaggaaggtcaaactaatcaggaagaatctagaagctgctcaggccaggcagaagagttaccatgatagaagaaggaaacctctccagttcgaggtgggaagttttgtatacctcaaggtatcacccaccaagggagtgcagaggtttgggatcaaaggcaagctagcccctcgttacattggaccttatgagatcttagaagcatgtggacccgtggcatataagctgacgttaccatcaaaaatgtctaccattcacagtgtattccatgtatctcagctgaagaagtgtgttcgattgccgaccgagatcatagcagagccagaattggagatagagccagatctatcgtaccaagagtacccctccaagattctggattgcaaagaaagatcaactcgggctaaatcgatcaagatgtacaaggtccagtggagtaatcactcagaggaagaagctacttgggaaaccgaggaattcttgagatccaacttcctcgattgcctacctaaggaaactgttgcaaagagaatgacattcgaagagcagttttaccttaataataacaataatcacccatttcctataagtctcacccttcgcttcaccctgggaggactctggcccaaatctcgggacaaaattcctttaaggggggaaggctgtgacacctcagtgtcacctagggtttctctcaaaatgccaaaccaaggaccatcattttatgtgaaccaaattaagcatgagcatcaattgacttaa

SEQ ID NO: 4979 - DNA, 2640 bp, Zea mays
  Clone ID: TF_ZM5066.C9.o8.fg
atgaaggctattaaccctgttgttaagattgatgtagcaacctcatgtgatgatttgagtcaaggagagcaaactagtctacatgatgaattgaccgaaaaagttgaagtcttgactttagacaaccaaaaattgaagagatgcttgactgatgcaactactagaggaaaggttgctattgagaaaaatgatttcaacaatgagttggcagcagataatgaaaggcttaaaaatgagagtggtattggatacaatgcttttgtgcaaaagaaaacaactactcaatacaagccaaagcagactcatatgcctatcaaatgctttgagtgtggaaaagaaggtcactttgcccacaactgcaaagccaaaccaccaactcccttgcctaagcactcaagaccatttgctttcaatgctcattatgttctaagaaaagttgcaaatggaaaggtgaactacaagaccgatgggagccattgggttattgatagtggatgcacacaacatatgacaggcaacccacggatgttcacctcacttgatgagaatgttgatggacaagacaaaatcacatttggagacaattcaaaagggaaagtgcaaggacttggcaaggtggcaatttcaaatgatttatcaatttcaaatgttctcttagttgcacctttgagcttcaacttattatcagtgggtcaactctgtgatcttggacttcaatgcttattcactccaacagaggttattgtatcaaaatggatgatgaatcaatggaggcttgcacatgttgggatgagcacactcaagaaggtattaaagaaggacatggttagaggattaaaggatgttgtatttgaaaaggacaagccttgtagtgcatgtcaagctgggaagcaagttgctaatacacatcctacaaaagctttcatgtcaacatcaaggccactggaactacttcatatggatttatttggacctacaaattatgtaagtgttggtggcaaccactactatctggtgattgttgatgatttctcaagatacacttgggtgttctttctccatgacaaatctgaagttgcgtctatattcaagaagtttgccaagaaagctcaaaatgaatttgattgcaagatcaagaagattagaagtgataatggtaaagaatttgacaacaccaacattcatgagtactgtgatgaaattgggatcaagcatgaagtatctgcaacatatacacctcagcaaaatggagttgttgaaaggaaaaacaggaccttgatcacacttgcaagaacaatgattgatgagtataacacaccagagaggttttgggctgaagctgacaacactgcatggtatgcatcaaacaggctatttcctcatcggctgcttgcgaagaccccctatgaactgctaaatgggaaaaagccagacgtctccttccggtccaaagcatatcgagtattcaatcatgccactggcgtggtagaagaaacatatgatgtggaatttgatgaggctaatggctcccaaggagcaattgaaaatcttgatgatgtaggtgatgagccacttagggaagcaatgaagaacatgccaattggagctatcaaaccaaaagaagatgaagaagaggtgcaaaatattgacaggccttcttcatcaaatgtaccacaagatgatgacaaagatgagaggcatgcaaatgaagatacatttgtctctcatgaacaagcaaggaccctggagaagcccccacaagatgcaagaatcattggaacaaagtgggtgttcagaaataaacaagatgatcaaggcttgattgtaaggaacaacgcaagacttgttgcaaagggattctctcaagttgaaggcttagattttggagagacctttgcaccggttgctcgactggaagccatccatatcctacttgcatatgcatcatgctatgatataaaactttatcaaatggatgtaaaaagtgcatttttaaatagcttcataaatgaacttgtatatgttgagcaaccacctggatttgaagaccctagatatcctaaccatgcttacaggttgtccaaggcactatatgggctaaagcaagctccaagggcttggtatgagcgtcttcgtgacttcctcatcgaaaagggtttcaagatcgggaccgtcgacacaactctattcacaaagaaacataacagtgatattttcatttgtcaagtatatgttgatgacataatctttggctcgacaaatgactatcattgcaaggaatttggtgagttgatgtcgaaggagttcgagatgtcaatgattggtgagctgacgtacttcctcggctttcaagtcaagcaaatgaaagatggtaactttctctcacaagagaagtataccaaagacttgttgaaaaggttcaacatggaaaagtgcaaaccaatcaagacacctatgccaactaatggaaatctcgacctagatgagggaggtaacccggttaatcaaactctctaccgttctatgattggtagtttattgtaccttaccgcatctaggcccgatatcatgtttagtgtctgcatgtgtgctagatttcaatctaatcctaagaaagctcatcttcgcgctgttaaataa

SEQ ID NO: 4980 - DNA, 990 bp, Zea mays
  Clone ID: TF_ZmC2309_2
ctcgaggcggcgggaaaattacaaaactcgcccgcccaaagccccaattcaccacccaaatcctctctgccgcccgccgatggccaccgccgccgccatggccgatgacgacgacttcgcctcgccgccgctcgccccgcgtgcgcgggaggaaggaggaggcagaggcgtgtaccaggtgggcggcgtgccggtggagttcccctacaagccctacgggacgcagctggcgttcatgggacgggtcatcgcgacgctcgaccgtgcccggcggcaggggcgctcccacgcgctcctcgagtcgcccacaggcaccggaaagtcgctctccctcctctgctccgcgctcgcctggcagcggcactacccgctccgttcccctcccgcctctcgttatgaacgtggtcgtgactatggtggtgggcgtgcaccgcgaggtggtggtggtggtggtggtggtgaccgcttcaagtgtgggaaacctggtcattttgctagagagtgcccatctggggatggtgggagaggggacagatatggtgggagagatgacaggtatggtggcggtggcggtggcggtggcggtcgttatggttctgaccgtggtggtgaccgatactctggccgtagccgagatggcggcagctatgggggtggcgatcgctacagccgtgaccgatcaggtccttactgatggccttagttcttgattgagaagtatgtgccatccaggtatgaaagtctatctactattataaggcttgttattgtgtctggaactttgttatcctgtagttggagtcgacatgtaccgtgagaaatcagctgctttgttatagaccgtattactgaccggtttattatcgtttcctgcttgccaggcatatgacttggtcatagtgcttggcgcttggatcctgcatgtttgcttgatgtgctatttggctattaaaagatggattttgtccaaaaaaaaaaaaaaaagcggcc

SEQ ID NO: 4981 - DNA, 5184 bp, Zea mays
  Clone ID: TF_ZmC36592_155
ctaggtggcttcctcttctccttctctgctccactgaactttacagagcttcacttctgaggtgcgggtctttctgactgctgaatcaagaatcttcactggtttctcacgatattgaagatctttctgaatctgcactgtttcttcttcgaggtgactttctggtgcttgcaggcacttgcggagctgggataagtggaacacattgtggatgtcggacatggattctggtagttccaggcggtatgcggcgggtcctaccttgccaatgatgggatagggacctacaaaacgtggggctagcttccctttgacttggaaccttctgaccccacgcattggagaaaccttaaggtagacgaagtctccttcctcaaatcggagttccctccgcctgttatctgcgtaactcttctgtcgactctgagcttcaagcaaccttctgcggatcagtgcaactttctcctctgcctccttgacaaaagcaggtccttctagtgctttttcccccacgttggaccacatgagaggggtctggcattttcgtccgtacagagcttcgaatggtgacatcttgatgctggactgatagctattgttgtaggagaactctgcgtaaggtagactggactcccaacttctatcaaaagctaaaacacatgctcttaacagatcttcaaggactttgttgaccctttctgtctgcccatctatctgagggtggtacgcggtgctgaaatctagcttggtgcccatagctttctgaaggcttgtccagaatttggatgtgaactgggttcctctgtctgatactatcttccttgggatgccatggagtctgactatctccttgaggtagatccgggcaagggtggctcctccaaaggtagttttcactggaatgaaatgggctaccttggtgaggcgatctattattacccagatggagtcattccctttctgcgtccggggtagtccggtcacgaagtccatgcctatttcttcccacttccattcaggtatcgggaggggttgcagtaggccagcaggtttttggtgttcggccttcgtccgttggcagatgtcacatcgggccacatactgagctatttctttcttcatccccttccaccagtatctggtcttgaggtccaggtacatcttggtagttccggggtggatggagtaggccgagtcgtgagcttccttgagtaggacttctcgggcctccccttttggtacacacagacggtgtttgaaccaaaggactccttggtcatctgtcctgagatccgggagttgttccttgcgggctttctccacaagccttgccgtctctgggtctagatgttgagctttgcagatgatgtcttctagcattggcttgacttcgagactgtcgttgtttcccagacaggcatttagttgtgccgattcttccttccagtcttctagaaagttagtcccttttattccgaatggctttcgactgagagcgtcggctaccacattggccttcccggggtgatagtggatttctaggtcataatccttgatcagttctaaccatcttcgctgaaggaggttgagatcaggttgagtgaatatgtacctcagactcttgtgatcggtgaaaatatggcatttgtttccgattaggtaatgcctccatatctttaaggcatgcactatggctgccaattccagatcatgggtggggtaattctgctcatgcggcttgagtaggcgtgatgcgtaagcaatgactctctcgttctgcattagtacacaccctaagccttgcctcgaagcatcacagaagacaacaaaatcttgatgaatatctggcagtgatagaacgggtgccgttgtgagtttcttttttatgatttggaaactttcttcacattttggggtccacacaaatttgtgatctttcttgagaagttctatcattggtcttgctatgctggagaatcctttgatgaagcggcggtaataccctgccattcctaggaagcttcgaacttcactgacgttggttggttgcctccattttgacactgcttctactttggaggggtccacttctattccttctgcggttaagatatgcccaaggaaggctatcttttccaaccagaattcacatttactgagtttggcatacagctggtgtgctctgagtttcccaaggacgatccgaaggtgacgcttatggtcttcgcggttcttggagtaaataaggatgtcgtcgatgaagactacgacaaacttatctagctcttccataaacactttattcatgaggttcatgaaaaaggcgggtgcgtttgtcagtccgaacggcattactgtgaattcatattgcccgtaccgagtgacaaatgcagtcttttggatgtccgcttccttgatcctcaattgatggtatccagacctcaggtctatcttggagaagtacttggctccttgaagctgatcgaagaggtcgtcgatccgagggagtgggtatttgttcttgatagtcaccgcattgagagggcggtagtcaacacacatcctcaaactctcatcctttttctttacaaataaagctggacatccccatggtgaagtacttggacgaataaaccccttgtctaacaattcttgcaattgcttcttcaattctgccaattccgcgggaggcatcctatagggtctcttggagataggagcagtcccgggttgcaattcgatggcgaactcaatatctcggtcaggtggcatccctggcaactcatctgggaaaacatctgggtagtcacagaccactgggatcttttccaccggggattctatcataacaaaggcacaagatcgggtacaaccctggtcgggtaaatacaaaacagtctcgccataagcaggggaatggatttcaatggctctggctgcaatgtccaagactgcctgatgcctggtcaaccagtcagttcccaaaataatatccacgctatccaatcctaaaatgagaagggtggttctaatcaccagactaccaaattttataggcacttgcctgttgatttgataagtggcaactctgcctccgggtgttgaaattgtaatgcccccatcggtatggtgaaagggaaactggcatttggcactaaacttggcactgataaaactatgtgaagcaccggaatcaaacagaacaatagcgggaaaatttaaaactgtaaagataccagtcatgacgggtgctccctctggaatatcagccatggtggtgaagttcagcctgccctgcctcacttgcaccttctgcctcttgccttggttctgattgacattctgcccctgcctctgctggttcctggggcaattcttggcataatgcccagtgttgccacacgtgaagcatcttttgtcatttgcctggcggtactgctgctgctgctgattgcccctctgagctggaaattgggtgcggttgggtgcctgctgctgttgctgctgcggtcggatcacccatcgcccttgctgctgctgcggtcccctgccctgggtgtcggacacaatcctgaagcgctgtggctgagctgagggtcctgccacaggggtcttcctcttcttctctgcctgtctagctgtaatgcagtcctcctgggagatagccatgttgaccaactcattgtaactgttggccctgacggtgttgagacgatcacggagcttagtgatgagccccctcctgaacctatccctcttcttctcatctgtatctgcatgatatcccgcatactggcacaaatcattaaaagcctgggcatactgcaacactgtcctgtttccctgagtgagtgccaaaaactcattgagcttcctgtccatgatcccggctggtatatggtgtcctctaaaagctgccttgaactccctccactccacctctcggtcctctggctgcatagcaagaaaatgatcccaccaagtccttgcaggtccgcgaagttgctgggtggcgaacctgactttggtgacctctgagcaaactccatgtagcagtgggaatttggattccaccactcgcagccacacatctgcgtcgagtgggtcctccgccctcgtgaacaatggaggctgggtgctaaggaattcctggtatgtagccgccgcggggtgacgctgatggtctccaccaccataatgctgaggtggtggctgacgttgagccagctgcctcaggatctcattctgctgagccatgagctcctgcagagtgggaggtggtggcggcggtggaggaacgcgctcgttctggccacgacgctgcctcccggccatctgaaaaaccatatacatacttaacaccacatcagcagtgtccacactggaggcaggctcatctcctccctcgatgtcgacatcctcgttggcctcctggtcttggatctcctggtgatgcatgtccaggtgctcgttagcctcagcgagctgctgctgagtgttaatgagctgatcctctagaacctcgatggtgttctccctggtgcccactagctcctccaactcctgaatatcagtggatagctgctccacctgcaagtccttctccaccatttcttgagacaagtcaaccacgagttcctctctgttatccaacgtaatctttgttgcctccagcagcgccatcagatgggacattgcctcaccgcgcatcacctgcagatggtacagggcattcatgcaccgtacagtcaagtgcgcggtctgtcctgggtagatggcccagatatccttggcatgctccacccgatccttccacattgggtcgtcctccctctcagcggggaacaagccaatggggtgggtagccagctccaaaggatggaatccgcagaaggtagtcagtccatgcagagcgatcgcctcgatcgtgtcctctgctcggtatccgaaagactcggagtccaaagagcgccagcctggctgcaggggatgaggctccaaagtcatccacactctacagcgaggcactcggtgcttctcgaactgctgcaccgcgtactgagggggtgtcgtgtatccagccccctgaagtacctcccacaaaatgcggggaaagccctctcgtgcaagtccgtcagtgtgggtcagtgcatttccgtcattagaggatccgtgggaagtcat

SEQ ID NO: 4982 - DNA, 6224 bp, Zea mays
  Clone ID: TF_ZmC24054_2
atgcgctcgcgctcccgtgcggcgctccgccgccgctcgctcgccttgggccgccgatcttcctctgccgccacccgccagccatcccgccccgcagttctgcccaccgctccagctccagccccatcctccggcggcatcgccgctgcagccacccccgtcctcacaatcgcctcaacatctggtttggaagctggggaggggaactaccatagtttccccctcacggtaagccctacaaagggggatttttgcttgcaggagcagatcaaggatgctttgccccatgtttttcattcccgcagagacaaagttccgtcagatttggatctgcagaagcacgccgcaactgctaatggcacgtctctgcttgctgcgtcagcttcagcgccaaaatcaacaaggaagttttattcagagacatcttcaatcggagatcctgtagatctattggcaccggcccgaatcccggtcttagagaagaggaaatgggcagtgggcagctcgccggtttttccgcctgactgcaatgaagttgatttcaatttcaatgcgagcaatgctacttcacatcagctggctgtggacggcggacatgacttgagaagttatggccgacttcatttcggtcagcacaaggctgacgccccggtactggaagaaggtggatggagtgtggtgaggcctaaattctggtggcgcaagactgttgaaaatcttaagagatctccgactcagcagcaacatgacacgaaaggtaccagcaccttcaagacaaagcttcagggtaaatgctacaactgcctctcgccagatcacttcgcttttcgttgctcggcgcttactcgttgctggcagtgcctacattttggccatagggctagggcatgcccagggatttactacagaagcaggcacaattcaactcctccccaacctgaaccagtgcagcattcaatgcagtacaccagcaatgtcaactccaggcaccaacaacaccagcgacagctcaactctcttcttaaggaacagaaacaggcccctgaacctgtgctcaacttttctccagttcaacacaacaaatcctacctccgtgcagctcaggagggccagaacatggaggctcgctacccaggtgacccaagggcaagaccgtcgcgcgccttctgtgcagtttcggcgactggctcaatccgtcgtcgcagggatgatctcatcagcaaggcggtggtgtgctcattcgatggaaatagccatgaggttgacaccattgtggcaggagacatgttgagagagaagttcaatctctgccatggtcagtatcaacttgtcaaacatttcccagaacagttttttattatctttcctgatgcaagaaccaagcaatgggctattgatagaagatcagtttcttatcgtgggcgtgagtttcatttcggtgactggtcagaagagagctatgctagaaagaccagctgggagtttagagttaaggtccgggtggaagggattcctgttcactgctggggtgaggaggtggcatcaagggccttaggcaggagctgcactattcattatgttcaggagcgctctaggcgtagagagcgtacccgttcttttgacctttgggcatggtgctctgacccctgtgaaatccctaaggaggtgtggctaacggtgtctgaacccgaccctgaattaccacctataagtacccctctgcctcttgtgggtgctcaccatgctgaaccgacagatctgaaaaaaggccatgtgtacacgcttcgcaaccatattgaagtggttgaggatctctgcttcattcatgggaggaacactaggggtgggcctatgaatcggaagcctcgcagagagttcgtgtggagctatggtgtttctgactctgctggtgaaaagcgggagcgttcagaggagttcagaggcagggagaccatgcgtcgggactgggaccatgatgatgatgaagattttcaccagcataggcatcagggcactcgtcggcagcgtagcctctctgggtgggcgcgttcctcgcgatgccgtggtggtgtggaggactgctacagctcgagtggaagatacaggccatccactcctttccggcgtagggggatggggatggggcagccagggcgctggactcccaagataaagaacaaaaaggtctcttttgcagatcctgtcatcactgctatctggcctacagatgtttctaaagggcacatctctgctgaaaattccatttcactgggaggtatggatcttggcactcaagctatggaggaataccaatgttctgcacatcccaaggtatctgtcccaattgcatcatattctgttaatgctctaatccattcatggtcgactagggggacagattctgctccagtccctattattagtggtagtcatcttgcaaatgaaacaatacaaggagatttatgtatccagaatgtgcaagtcgagtccaatttttccaattctgaaccaaacagtcaaaggaatgtcgttgctaatgaagatcgacaatgcattttacctactaatgaggttccacctattggacacgaatcatcaacacattccacccctcggccactagaaaatcagctgaactcaaatgataggttgcagattttcattgaatcaatcacaaacacaccagaaccgcccctcatcctgtcccctccgaacagcaacacacttgccacatcaccagtactaggggggtcagataatctagatgctaatgtaactataaatgctggcacacctgccatacaatatcaaggttcaagtgcgtcgatctccaataaccatgtaaattcttttgaacagattgaaggccttttctcaagacctctcaacaaggatcagatggagtggagaaatggttactatccaatgaatacaaattgctgtattttttcttggaatgtgagaggtctgaatgatcccgctaagcgagaaagtgtgaggcaaacaattctttctacgcacgcaactttagtttgtcttcaagagacaaaaattatgaactggactaacgatttattaaaggacactgtgggttacaagcttgcaaagcagactgcgcacttgccctctattggagcatcgggtggaattcttattgcttgtgatgaggacttttttgatattactccagttacttacgcttcaacctactcattatcagttcgactcctagaactggaccttatcggtaaaaagttcacttggtcaaatgaacaggatgatcctacgatgtctaggattgatagattgatggcaactactgagtggcatgggctctatccagcggctaatttgcaggcattgtgttccatgacttcggaccactctccgttattaatgcagggccactctccttgtaatttctataaggggttccgttttgaatcctactgggtacacattgacgggttcaaagatgtagtccaacaagcttggacgaccacagttaactcctctgatgccattcttcggttacatgttaaaatggtccgcacggccaaagctcttaaagcttggagacgacgcacggtcggtaacatcaaagtgcaattggctatcattaagattgtccttaccatgctggaaaaggcacaggaaaatagaacactttctagtgaggaacttgacttcaggagaaggctaaaaatcaaaattcttggccttgcaggcatccaattatctattgctagacaacattccagacagacctgggtgcggttgggtgatgcgaacacaaatttttttcatttgatggccaatcacagaaaaagaaaaaactttatcagatccttgaattgtggagactgcctgttaactagtcaggaagataagctacgagaggctcatagacatttcctagagatccttggcactagaggcgggaggactagtgttgttcgttgggaaaatctaggctactcgccttttgagttatccgagttggacaccatgatcaatgatgatgagattaggaatgcggttatgggcatgcattcagagaaagcgcctggacctgatggttttatagggcttttctacaaggaatgttttgaggtgattagagaagacctttccaaagcgatcaatgatttttatcatcataaatgcaaaagtttgcatttggtcaatgaggcaaacattgttcttctaccaaaaagggagaaccctgacaggatagatctatttagaccaatcagccttatcaatagttgcatgaagattataaccaaaataatggcaacaaggctggcgccgcgtatgaatgaaattgtctccactacccaaaatgccttcattcaaaagcgatcaattcatgataacttcctctacgtccagaaagtgattaaaaaacttcacaagagcaaacaagcagccctatttgtcaagctagacatatcaaaggcttttgactctcttaattgggcatatcttctagacgtcttaaaagccctaggcttcacccaaaaatggagagattggattgctaccatccttggatcatcttcatccaaaatcatcattaatggccagcaaaccaaagaaatcaagcacatgagaggggtgcgtcagggtgacccactatcgccttttctcttcatccttgcaatggatcccctacaacgaatgattgaaagggcagctcatgaggggctactgggccaggtattacccaatggggcaaagtttcgttgttctctttatgcagacgatgcgggggtgtttgttagagcagacaaactagatctcaaagttctaaaaagaattctagaagctttcgaatggtgttcaggtctgaagatcaattttgagaaaacagagattttcccaatacgttaccctgaatctttatggtcaaatttaatggaagtttttccaggcaagtactctaacttccctggcaagtatctcgggctaccgcttcacttcaggaatattaaaagaatagagtttcaacctctaattgagaaaataaataaaaggcttgctgggtggaaagatgtcgatctatttaatgcatctacgattgtaacaattggtgatggcaaaatggctgatttctggagatcaagctggattcagggtcaggccccaaagaacattgcgccaaccttattcatgaaagcaaagaggaaaaatatctcagtgtgccaagcccttacaaacaatcgctggatgcacttttgttctccttacacacatgaggatgagataaaagaattcatttccctctggcaaggttctcgtgtcccatgccaaagcacaggtctaaggcccgaccttaatcgtggtgaaaacggtcggaaacaaccgaaagctgctgtgtattttcgaacttggagaggccatcttcagaatctacttggatatgctttgtctgtatattgtgtttataagatgctcaagtccttgcagagcgcagtctttaagaagtcaggttctgttgatcctgtaacaataacgataacgattttcttgagacattttgacattggcattgatgttgcgctgttatctcagtacatatctttgatgttcattgggatgttagttgtcatatctgttcgaggtttcttggcaaatgttatgaaattcttcttcgctagttctagagttgggagtcggtctacaaccaatgttgtccttgtcctatcagagatcatggccaggtacttcatatcttccattctcctcataagaaaaagcctggcaaatgaatataggtattccggtgatcattactgcggtgttttgggtggtgatatccaatttgacttctaccaccgctggtttgatgctatatttttggctagtgcgttcctctccttgcttcttatatctgcccaatacaccaccaggcaaacagacaagcatccgattgattgatgcatcttgcccacaatgtgtgcatgttgtctttttaaccagtattcatccaagtgacgggacacgggattcattgtaatgcagtctgcacgatactactttttgactaggacaattgtggaagcccatattaggaattgattatgactttgtaaaatagcttgaaactagtgtcgtagcaccgtagcacggtatgttggtgtatcttatatatttttttggctgtttcatgtataacacacttcgcgacaactctgaatggtagatagatctgtttcttc

SEQ ID NO: 4983 - DNA, 5301 bp, Zea mays
  Clone ID: TF_ZmC36592_119
ttatgcataaaaccggggcttgccttccaaagcagtggcaggcaggtcctctggtgcaggctcgggggctggatctggggctacctcctgagcagctccttgctccggcacgaggatgtactctccgtcagcaagattacagtcgactcctttgggtagaaagtcggggaagcgagagcgtagaaaatcctcagtctcccatgtagcttcttctgctgaatggtgactccactgaaccttatacattctgaccgaccttgcccgagttgatctttccttctgatctaataccttgacggggtactcttggtaggacaagtctggttctatctcaatggctggttctggtagcacttcagtgggtaggcgaacgcatttccgcagttgagatacatggaacacattgtgaactgacgacatgtgaggtggtaattccaattgataggccacgggtccacaacttgccttgatctcatagggtccaatgtagcgaggagctaacttgcccttgatcccgaatctctgaacacccttggtgggtgataccttaagatagacatgatctcccacctcaaattgtaggggcttccgcctcttatcatgatagctcctttgcctggcctgagcagcttccaagtttttggtaataaccctgacttttgcctcagcctcgagtactaaatctggcccaaaaatttccctttctcctgcttgagaccaatttagtggggtcctacaccttctcccatatagggcctcaaaaggtgccatcttcagactggattgataactgttattgtaagaaaactccgccaaagacagacacttatcccaatccttcccataatgtagtgcacatgctcgcaacatgtcttccaaaatctgattcaccctttctgtttggccatctgtttgagggtgatatgctgagcttcggatgacatgggtcccaagtgactcttgcaattgctcccaaaatcgtgccacaaatggtgctcctctgtcagatataatggttttgggaataccatgcaaccttattatctgatcaacataaatttcagcgtacttctctgccctgtgggtggtatgcactggcaagaaatgagcagtcttggtcaacctgtccacaataacccaaatagaatcatggtgcctggaggtattgggtaatcccactatgaagtccatacaaatgtcctcccatttccaagatggtatgggaaggggttgcaaagggcctgctgccttcaagtgactagctttaattctctggcaggtgtcacactcggatatgtacttggcaatttctcttttcattctagtccaccaatatagagatctgagatcatggtacatcttgttgctaccagggtgcatggagaatttagagaggtgagcttcatctagtatcttctttctaagctcagggtcctgaacacccttatccccaacatgtgccctgactatctgttcttgcagtgtgggctccatagagatatagcttaggtcacccgaagaaacaacttccaggttcagcttgcacaactcatcacacagggtggtcactcccacatccatgctcatacaattgcactggacctttctgctcaaggcatctgccacaacattggccttccctgggtggtaatgcacctccaaatcatagtccttgattaactccaaccatctcctttgcctcatgttcagatctgcttgagtgaagatgtatttgagactcttgtgatcagtgtagatgttacagtgagctcccatcaagtagtgtctccatatctttagagcatggactaccgctgccaattctagatcatgtgtagggtagttctgctcatggggcctgagtgcccgggaagcataagcaatcactctattctcttgcatcaagacgcatcccaatccggtaccggaagcgtcacaataaacttcaaatggcttggtgctgtcaggttgggccagcactggggctgttgtcaaatgctgcctcaaggcatgaaaggcatcttcacacttttggctccactcaaatttgactccctttttcaacagtttagtcattggcttggccattctggagaaatccggaataaatcgtcgataataccctgccaatcccaggaaactccgaatctgctttactgtagtcgggggcttccaatccatcacctcctgcaccttctcaggatcaacggatatcccatcctgggaaattgtgtgacccaagaatttaatctccttcagccagaactcacatttagacaacttagcataaagatgatgctcgcgcagtcgctgaagcacaatgtgcaggtgctcagtatgttcgtcctcattcttggaatagaccagaatatcatcaatgaaaacgagcacgaacttgtccaattctggcataaacactgagttcatcaggtacatgaaataagccggggcattggtcagcccaaaagacatcaccagaaactcatacagtccatatctggtagagaaagctgtcttgggaatatcgctagcacggatcttgatctgatggtaccctgagcgaaggtctatcttggagaataccttggctcctaccaactgatcaaacagaacatcaatgcggggcagtgggtatttgttcttaatagttaccgcattgagagggcggtagtcaacacacatcctcaaactctcatcctttttcttcacaaataaggctggacatccccatggtgaagtgcttggacgaataaaccccttgtccaacaattcttgcaattgtttcttcaattccgccaattccgcgggaggcatcctatagggcctcttggagataggagcagtcccgggttgcaattcgatggcgaactcaatatctcggtcaggtggcatccctggcaattcgtctgggaaaacatctgggtagtcgcagaccactgggatcttttccaccggggattctatcataacaaaggcacaagatcgggtacaaccctggtcgggtaaatataaaacagtctcgccataagcaggggaatgaatttcaatggctctggctgcaatgtccaatactgcctgatgcctagtcaaccagtcagttcccaaaataatatccacgctatccaatcctaagatgagaagggtggttctaatcaccagactaccaaattttataggcacttgcctgttgatttgataagtggcaactctgcctccgggtgttgaaattgtaatgcccccatcggtatggtgaaagggcaactggcatttggcactaaacttggcactgataaaactatgtgaagcaccggaatcaaacagaacaatagcgggaaaatttgaaactgtaaagataccagtcatgacgggtgctccctctggaatatcagccatggtggtgaagttcagcctgccttgcctcacttgcaccttctgcctcttgccttggttctgattagcattctgcccctgcctctgctggttcctggggcaattcttggcataatgcccagtgttgccacacgtgaagcatctgttgtcatttgcctggcggtactgctgctgctgttgattgcccctctgagctggaaattgggtgcggttgggtgcctgctgctgctgctgaggtcggatcacccatcgcccttgctgctgctggggtcccctgccctgggtgtcggacacaatcctgaagcgctgtggctgagctgagggtcctgccacaggggtcttcctcttcttctctgcctgcctagcagtaatgcagtcctcttgggagatagccaggttgaccaactcattgtagctgttggccctgacggtgttgagacgatcacggagcttagtgctgagccccctcctgaatctgtctctcttcttctcatctgtatctgcatgatatcccgcatactggcacaagtcattaaaggcctgggcatactgcaacactgtcctgttgccctgagtgagtgccaagaactcattgagcttcctgtccatgatcccggcaggtatatggtgtcctctaaaagctgccttgaactccctccactccacctctcggtcctctggctgcatagcaagaaaatgatcccaccaagtccttgcgggtccgcgaagctgctgggtggcgaacctgactttggtgacctctgagcaagccccatggagtagtgggaatttggattccaccactcgcagccatacatctgcgtcaagtgggtcctccgcccttgtgaacaatggaggctgggtgctgaggaattcctgataggtggccgccgcggggtgacgctgatggtctccaccaccataatgctgaggtggtggctgacgctgagccagctgcctcaggatctcattctgctgagcaatgagctcctgcagagtgggaggtggtggcggcggtggaggaacgcgctcgttctggccacgacgctgcctttcggccatactcgactcaggggaaggtggtcttcccgagccggcagtgtccacactggaggcaggctcatctcctccctcgatgtcgacgtcctcgttggcctcttggtcctggatctcctggtgatgcatgtccaggtgctcgttagcctcaacaagctgccgctgagtgttaatgagctgatcctctaggacctcgatggtgttctccctggtgcccaccagctcctccaattcctgaatatcagtggatagctgctccacctgcaagtccttctccaccatttcttgagataaatcaaccacgagctcctctctgttatccagcgtgatctttgttgcctccagtagtgccatcagatgggacattgcctcaccgcgcatcacctgcagacggtacagagcattcatgcaccgtactgtcaagtgcgcagtctgacctgggtagatggcccagatatccttggcgtgctccacccgatccttccacattgggtcgtcctccttctcagcggggaacaagccaatggggtgggtagccagctccaagggatggaatccgcagaaggtagtcaatccatgcagagcgatcgcctcgatcgtgtcctctgcccggtacccgaaagactcggagtccaaggagcgccatcctggctgcaggggatgaggctccaaggtcatcctcaccctacagcgaggcactcggtgcttctcgaactgctgcaccgcgtactgagggggtgttgcgtacccggccccctgaagtacttcccacaagatgcggggaaagccctctcgtgcaagtctgtcagtgtgggtcagtgcatttccgtcatcggaggatccgtgggaagtcat

SEQ ID NO: 4984 - DNA, 4554 bp, Zea mays
  Clone ID: TF_ZmC36592_137
ttatgcataaaaccggggcttgccttccaaggcagtggcaggcgggtcctctggtgcagactcgggtgctggatctggggctacctcctgagcagctccttgctccggcacgaggatgtactctccgtcagcaagattacagtcgactcctttgggcagaaagtcggggaagcgagagcgtagaaaatcctcagtctcccatgtagcttcttctgctgaatggtgactccactgaaccttgtacattctgaccgaccttgcccgagttgatctctccttttgatctactaccttgacggggtactcttggtaggacaagtctggttctatctcaatgtctggttccggtagcacttcagtgggtagacgaacacatttccgcagctgagatacatggaacacattgtgaactgctgacaggtgaggtggcaattccacttgataggctatgagtccacaagcctccttgatctcgtagggtccaatatagcgaggagctaacttgcccttgatcccgaatctctgaacacccttggtgggtgataccttaagatagacatgatctcccacctcaaactgtagaggcttccacctcttatcatgatagctcctttgtctggcctgggcagcttctaggttcttcttgataattctgacctttgcttctgcttcaagtactaaatcgggcccaaaaatttccctttctcctgcttgagaccaattgagtggggtcctacaccttctcccatataatgcctcaaaaggtgccatcttcaaactggactgatagctgttattgtaagaaaactccgccaaagacagacacttgtcccaatcctttccataatgtagtgcacacgctcgcaacatgtcttccaaaatttgattcaccctttctgtctggccatcagtttgggggtggtatgctgagcttcggatgacatgggtcccaagtgactcttgcaattgctcccaaaatcgtgccacaaatggtgctcctctgtcagatataatggttttgggaataccatgcaaccttactatctgatcaacataaatttcagcgtacttctctgccctgtgggtggtatgcactggcaagaaatgagcagtcttggtcaacctgtccacgataacccaaattgaatcatggtgcctggaggtattgggtaatcccactatgaagtccatacaaatgtcctcccatttccaagatggtatgggaaggggttgtaaatggcctgctgccttcaagtgactagccttaattctctggcaagtgtcacattcggatatgtacttggcaatttcccttttcattctagtccaccaatatagagatctgagatcatggtacatcttgttgctaccagggtgcatggagaattttgaaaggtgagctccatccaatatttgctttctgagctcagggtccttgggaacaaccaatcgatctccaaaccatagaattcccttgctgtcctgtcggaaacacttgtatttttctgtcttttgcttgatcatatctttgataacctgaacacccttatcctcaacctgtgccctgactatctgttcttgcaatgtgggctccaccgagatatagcttaggttacccgaagaaacaacttccaggttcagcttgcacaactcatcacacagggtggtcactcccacatccatgctcatacaattacactgggcctttctgctcaaggcatctgccacaacattggccttaccagggtggtaatgcacctccaaatcatagtccttgattaactccaaccatctcctttgcctcatgttcagatctgcctgagtgaagatgtatttgagactcttgtgatcagtatagatgttacagtgagctcccatcaagtagtgtctccatatcttaagagcatgaactacagctgccaattctagatcatgtgtagggtagttctgctcatggggcctgagtgcccgggaagcataagcaatcactctgctctcttgcatcaagacacatcccaaaccagtaccagaagcatcacaataaacttcaaatggcttggtgttgtcaggttgggccagcactggggctgttgtcaaatgctgcctcaaggtatgaaaagcatcttcacactttcggctccactcaaatttgactcccttctttaacagttcagtcattggcttggcaattctggagaaatccggaataaatcgtcgataataccctgccaatcccagaaaactccgaatctgcttcactgtagtcgggggtttccaatccattacctcttgcaccttctcaggatcaactgatatcccatcctgagaaattgtgtgacccaagaatttgatttccttcagccagaactcacatttagacaacttagcatacaattgatggtcacgcagtctctgaagtacagtatgcaagtgtttggtgtgctcggcttcattcttggaataaaccagaatatcatcaatgaaaacgaccacgaacttgtctaactctggcatgaatactgagttcatcaagtacataaaataagccggggcattggtcagcccaaaagacatcaccagaaactcatacagtccatatctggtagagaaagccgtcttgggaatatcgctagcacggatcttgatctgatggtatcctgagcgaaggtctatcttggagaataccttggctcctaccaactgatcaaacagaacatcaatgcggggcaatgggtatttgttcttaatagttaccgcattgagaggacggtagtcaacacacatcctcaaactctcatcctttttcttcacaaataatgctggacatccccatggtgaagtgcttggacgaataaaccccttgtcgaacaactcttgcaattgcttcttcaattctgccaattccacgggaggcatcctatagggtctcttggagataggagcagtcccgggttgcaactcaattgcgaactcaatgtctcggtcaggtggcatccctggtaattcttccggaaacacatccgggtaggcacagactactgggatctctttcactggggactctaacataacaaaggcacaagatcgggtacaaccctggttgggtaaatacaaaacagtctcgccataagcaggggaatggatttcaatggctctggctgcaatgtccaatactgcctgatgcctggtcaaccagtcagctcccaaaataatatccacgctatccaatcctaagatgagaagggtggttctaatcaccagactaccaaattttataggcacttgcctgttgatttgataagtggcaactctgcctcctggtgttgaaattgtaatgcccccatcggtatggtgaaagggcaactggcatttggcactaaacttggcactgataaaactatgtgaagcaccggaatcaaaaagaacaatagcgggataatttaaaattgtaaagatacaagtcatgacgggtgctccctctggaatatcagccatggtggtgaagttcaacctgccttgcctcacttgcaccctctgcctcttgccttggttctgattagcattctgcccctgcctctgctggttcctggggcaattcttggcataatgcccagtgttgccacaagtgaagcacctgttgtcatttgcctggcggtactgctgctgctggttattcctctgagctggaaactggttgcggttgggtgcctgctgctgctgctgctgaggtcggattacccatcgcccttgctgctgctggggtcccctgccctgggtgtcggacacaatcctgaagcgctgtggctgagctgagggtcctgccacaggggtcttcctcttcttctctgcctgcctagctgtaatgcagtcctcttgggagatagccatgtttaccaactcattgtagctgttggccctgacggtgttgagacgatcccggagcttagtgctgagcccccttccgaatctgtccctcttcttctcatctgtatccgcatgatatcccgcgtactggcacaagtcattaaaggcctgggcatactgcaacactgtcttgttgccctgagtgagtgccaagaactcattgagtttcctgtccatgatcccggcgggtatatggtgtcctctaaaagctgccttgaactccctccactccacctctcggtcctctggctgcatagcaagaaaatgatcccaccaagtccttgcgggtccgcgaagctgctgggtggcgaacctgactttggtgacctctgagcaagccccatggagtagtgggaatttggattccaccactcgcaaccatacatctgcgtcaagtgggtcctctgcccttgtgaacaatggaggctgggtgctgaggaattcctgataggtggccgccgcggggtgacgctggtggtctccaccaccataatgctggggtggtggctgacgttgagccagctgcctcaggatctcattctgctgagccatgagctcctgcagagtgggaggtggtggcggcggtggaggaacgtgctcgttctggccacgacgctgcctcccggccat

SEQ ID NO: 4985 - DNA, 5034 bp, Zea mays
  Clone ID: TF_ZmC36592_140
ttacataccgactcctttgggtagaaagtcggggaagtgagagcgtagaaaatccttagtctcccatgtagcttcttctgctgaatggtgactccactgaactttatacattctgaccgaccttgcccgagttgatctctccttttgatctaataccttgtcggggtactcttgataggataagtctggttctatctcaaggtctggttccggtagcacttcagtgggtaggcgaacacatttccgcagctgagatacatggaacacattgtgaactgctgacatgtgaggtggcaattccaattggtaggccacgggtccacaacttgctttgatctcatagggcccgatgtagcgaggagctaacttgcccttgatcccgaatctctggacacccttggtgggtgataccttaagataaacatggtctcccacctcaaactgtagaggcttccgcctcttgtcatgatagctcttttgcctagcctgagcagcttctaagttctttgtaataactctgaccttttcctctgcttcaagtaccaaatctggcccaaaaatttccctctctcctgcttgagaccaattcagtggggtcctacaccttctcccatataatgcctcaaaaggtgccatcttcagactagactgatagctgttattgtaagaaaactctgccaaagacagacacttgtcccaatcctttccgtagtgtagtgcacatgctcgcaacatgtcttccaaaatctgattcaccctttctgtctggccatctgtttgtggatggtatgctgagcttcggattacttgtgtcccaagtgattcttgtagcttctcacaaaagcgtgccacaaacagtgctcctctgtcggatataatggtctttggaataccatgcaatcttactatctgatcaatgtaaatttccgcatacttttctgtcttgtgggtggtgtgtactggcaagaaatgagcggtcttggtcaacctgtccacaataacccaaatagaatcatggtgcctggaggtattgggtaatcctacgataaaatccatgcaaatgtcctcccatttccaagatggtatgggaaggggttgcaaagggcctgctacctttaagtgactggccttgattctctggcaggtgtcacactcggatatgtactcggcaatttccctcttcattctggtccaccaatatagagatctgagatcatggtacatcttgttgctaccagggtgcatggagaatttggaaaggtgagcttcatccagtatcttctttctgagctcagggtccttgggaacaaccaatcgatctccaaaccatagaattcccttgctgtcctgtcggaaacacttgtatttttctgccttttgcttgatcatatctttgataacctgaacacccttatcctcaacctgtgccctgactatagggtggtaactcccacatccatgttcatacaattgcactgggcctttctgctcaaagcatttgagactcttgtgatcagtgtagatgttacagtgagctcccatcaagtagtgtctccatatcttaagagcatgaactacagctgccaattctagatcatgtgtagggtagttctgctcatggggcctgagtgctcgggaagcataagcaatgactctgttctcttgcatcaagacacaccccaatcctgtaccagaagcatcacaataaacttcaaatggcttggtgttgtcaggttgagccagcactggggctgttgtcaaatgctgcctcaaggtatgaaaagcatcttcacacttttggctccactcatacttgactcctttcttcaatagttcagtcattggtttggcaatccctgccaaacccagaaaacttcgaatctgccttactgtagccgggggtttccaatccattacctcttgcaccttctcaggatcaactgatatcccatcctgagaaattgtgtgacccaagaatttgatttccttcagccagaactcacacttagacaacttagcatacaactgatggtcacgcagtctctgaagtacagtatgcaaatgtttggtgtgctcggcttcattcttggaataaaccagaatgtcatcaatgaaaacgaccacgaacttgtctaactctggcataaatactgagttcatcaagtacatgaaataagccggggcattggtcagcccgaaagacatcaccaaaaactcatacagcccatatctggtagaaaaggtcgtcttgggaatatcgctggcacggatcttgatttgatggtaacctgagcgaaggtctatcttggagaataccttggctcctaccaactgatcaaacagaacatcaatacggggcagtgggtatttgttcttgatagtcaccgcattgagagggcggtagtcaacacacattctcaaactctcatcctttttcttcacaaataaagctggacatccccatggtgaagtacttgggcgaataaaccccttgtccaacaactcttgcaattgcttcttcaattctgccaattccacgggaggcatcctatagggtctcttggagataggagcgatctcgggttgcaattcgatggcgaactcaatatctcggtcaggtggcatccctggcaattcatccggaaaaacatccgggtagtcacggaccactgggatcttttccactggggactctatcataacaaaggcacaagaacgggtgcatccctggccaggtaaatacaaaacagtctcgccataagcaggggaatgaatttcaatggccctggctgcaatatccaatactgcctgatgcctggtcaaccagtcagctcccaatataatatccacgttatccaatcctaagatgagaagggtggttctaatcacaaggctaccgaattttataggcacttgcctgttgatttgataagtggcaaccctgcctcctggggttgaaattgtaatgcccccatcggtgtggtgaaagggcaactggcacttggcactaaatttggcactgataaaactatgcgatgcaccagaatcaaatagaataatagcaggataattcaaaactgtaaagataccagtcatgacgggtgctccctcgggaatatcagccatggtggtgaagttcagcctgccctgcctcacttgcaccttctgcctcttgccttggttctgattgacattctgcccctgcctctgctggttcctggggcaatttttggcataatgcccggtgttgccacaggtgaaacacctgttatcatttgcctggcggtactgctgctgctgctggttggtcctctgagctggaaactgggtacggttgggtgcctgctgctgttgctgctgtggtcggatcacccatctcccttgctgttgttggggtcccctgttctgagtgtcggacacaatcctgaagcgttgtggctgagcggaaggtcctgccacaggggtcttcctcttcttttctgcctgtcgagctgtaatgcagtcctcctggaagatagccatgttgaccaactcattgtagctgttggccctgacggtgttgagacggtcatggagcttagtgctgagccccctcctgaacctgtctctcttcttctcatctgtatccgcgtggtatcccgcatactggcacaagtcattaaaagcctgggcatactgcaacactgtcctgttgccctgagtgagtgccaaaaactcattgagcttccggtccataatcccggctggtatatggtgtcccctgaaagctgccttgaactccctccattccacctctcgatcctctggctgcatggcaagaaaatggtcccaccaagtccttgtgggtccgcgaagctgctgggtgacgaacctgactttggtaacctctgagcaagctccatggagtagcgggaatttggattccaccactcgcaaccacacatctgcatcaagtgggtcctctgccctggtgaacaatggaggctgggtactaaggaactcctggtaggtagctgccgcggggtgacgctgatggtctccaccaccatagtgctgaggtggtggctgacgctgagctagctgcctcaaaatctcattctgctgagccatgagctcctgcagagtgggaggtggtggcggcggtggaggaacgcgctcgttctggcccgacgctgcctcccggccatttgactcgggggaaggtggtctccctgaaccagcagtgtccacactagaggcaggctcctctcctccctcgatgtcgacgtcctcgttggcctccatgtcctggatctcctgatgatgcatgtccaagtgctcattagcctcggcaagctgctgctgggtgttaatgagctgatcctcgagaacttctatggtgttctccctggtgcccactagctcctccaactcttggatatcagtggatagctgctccacctgcaagtccttctccaccatttcagtggacaaatcaaccacgagctcctctctgttgtccaacgtaatctttgttgcctccagcagtgccatcagatgggacatcgcctcaccgcgcatcacctgcagacggtacagagcattcatgcaccgtacggtcaagtgcgcagtctgtcctgggtagatggcccagatatccttggcatgctccacccgatccttccacattgggtcgtcctccctctcggtggggaacaagccaatggggtgggtagccagctccaaaggatggaatccgcagaaagtggtcaacccatgcagagcgattgcctcgatcgtgtcctcagctcggtatccaaaagactcggagtccaaggagcgccagcctgactgcaggggatgaggctccaaggtcatcctcaccctacagcgaggtactcggtgcttctcgaactgctgcaccgcgtactgagggggtgtcatgtatccggccccctgaagtacctcccacaaaatgcggggaaagccctctcgtgcaagtccgtcagtgtgagacagtgcattcccgtcgtctgaggatccgtgggaagtcat

SEQ ID NO: 4986 - DNA, 5127 bp, Zea mays
  Clone ID: TF_ZmC36592_141
ttatgcataaaaccggggcttgccttccaaagcagtggcaggcaggtcctctggtgcaggcccgggtgctggatctggggctacctccttagcagctccttgctccggcacaaggatgtactctccgtcagcaagattacagtcgactcctttgggcagaaagtcggggaagcgagagcgcagaaaatcctcagtctcccatgtagcttcttctgctgaatggtgactccactgaaccttgtacattctgaccgaccttgcccgagttgatctttccttttgatctaataccttgacggggtactcttggtaagacaagtctggttctatctcaatgtctggctccggtagtacttcagtgggtagacgaacgcatttccgcagctgagacacatggaacacattatgaactgctgacatgtgaggtggcaattctacttgataggccacgggcccacaacttgccttgatctcatagggtccaatgtagcgaggagctaacttgcccttgatcccgaatctctggacacccttggtgggtgataccttaaggtagacatgatctcccaccacaaactgtagaggcttccgcctcctatcatgatagctcctttgcctggcctgagcagcttctaagttcttggtaataaccctgacctttgcctctgcctcgagtaccaagtctggtccaaaaatttccctttctcctgcttgagaccagtttagtggtgtcctgcaccttctcccatacaaagcctcaaaaggtgccatcttcagactggattggtagctgttattgtacgaaaactctgccaaagacagacacttgtcccaatccttcccgtagtgtagtgcacatgctcgcaacatgtcttccaaaatctgattcaccctttcggtctggccatctgtttgtgggtgatatgctgagcttcggattacttgggttccaagtgattcttgcagtttttcccaaaagcgtgccacaaacagtgctcctctgtcagatataatggtcttgggaataccatgcaatctcactatctgatcaacataaatttcagcatacttctctgtcttgtgggtggtgtgcactggcaagaaatgagcagtcttggtcaacctgtccacgataacccaaatagaatcatggtgcctggaggtattgggtaatcccactatgaagtccatgcaaatgtcctcccatttccaagatggtatgggaaggggttgtaaagggcctgctgccttcaagtgactagcctttattctctggcaagtatcacactcggatatgtacttggcaatttctcttttcattctagtccaccaatataaagatctgaggtcatggtacatcttggtgctaccagggtgcatggagaatttggaaaggtgagcttcatctagtatcttctttctgagctcagggtccttaggaacaaccaatcgatctccaaaccatagaattcccttgctgtcctgtcggaaacacttgtatttctctgccttttgcctgatcataaccttgataacctgaacacccttatcctcaacctgtgccataactatcagctcttgcaatgtgggctccaccgagatatagcttaggttacccgaataaacaacttccaggctcagcttgcacaacttatcacacagggtggtaactcctacatccatgctcacacaattgcactgggcctttctgctcaaggcatctgccacaacatttgccttccctgggtggtaatgcacttctaaatcataatccttgatcaactctaaccatctcctttgcctcatgttcagatctgcctgagtgaaaatgtacttgagactcttgtgatcagtgtagatgttacagtgagctcccatcaagtagtgtctccatatcttaagagcatgaactacagctgccaattctagatcatgtgtagggtagttctgctcatggggcctgagtgcccgggaagcataagcaatcactctgttctcttgcatcaagacacatcccaaaccagtaccagaagcatcacaatagacttcaaatggcttggtgttgtcatgttgagctagcactggggctgttgtcaaatgttgcctcaaggtatgaaaggcaccttcacacttttggctccactcaaatttgactcccttcttcaacagttcagtcattggcttggcaattctggagaaatccggaataaatcgtcgataataccctgccaatcccagaaaactccgaatctgcttcactgtagtcgggggtttccaatccatcacttcctgcaccttctcaggatcaactgatatcccatcctgagaaattgtatgacccaagaatttaatctccctcagccagaactcacacttagacaacttagcataaagatgatgatcacgcagtcgctgaagcacaatgtgcaggtgctcagtatgttcgtcctcattcttggaatagaccagaatatcatcaatgaaaacgaccacgaacttgtccaattctggcataaacactgagttcatcaggtacatgaaataagccggggcattggtcagcccaaaagacatcaccagaaactcatatagtccatatctggtagagaaagccgtcttgggaatatcgctggcacggatcttgatctgatggtatcccgagcgaaggtctatcttggagaatactttggctccaaccaactgatcaaacagaacatcaatgcggggcagtgggtatttgttcttgatagtcaccgcattgagagggcggtaatcaacacacatcctcaaactctcgtcctttttcttcacaaatgaagctggacatccccatggtgaagtgcttggacgaataaaccccttgtccaacaattcttgcaattgtttcttcaattctgccaattccgcgggaggcatcctatagggtctcttggagataggagcagtcccgggttgcaattcgattgcgaactcaatgtctcggtcaggtggcatccctggcaattcgtccggaaaaacatccgggtagtcacggaccactgggatcttttccactggggattctatcatgacaaaggcacaagaccgggtacaaccctggtcaggcaaatatagtgtggttccaccacaagttggtgagtgcacctcaatggctctagctgcaatatctatcacagcctgatttctggtcaaccaatcagttcccaatataatatccacactctccaaacccaaaatgagaaggttggttttaattatcagactaccaaactttataggcacattcttgttaatttgataagtggcaaccctgcctcctggggttgaaattgtgatacctccattggtgtggtgaaaaggcaattggcacttggcactaaattttgcgctgataaaactatgcgatgcaccagaatcaaatagaataatagcaggataattcaaaacggtaaagataccagtcatgacgggtgctccctctggaatatcagccatggtggtgaagttcagcctgccctgcctcacttgcaccttctgcctcttgccttggttctgattagcattctgcccctgcctctgctggttcctggggcaattcttggcataatgcccagtgttgccacaagtgaagcatcggttgtcatttgcctggcggtactgctgctgctggttattcctctgagctggaaactggttgcggttgggtgcctgctgctgctgctgaggtcggattacccatcgcccttgctgctgctggggtcccctgccctgggtgtcggacacaattctgaagcgctgtggctgagctgaaggtcctgccacaggggtcttcctcttcttctctgcctgtctagctgtaatacagtcctcttgggagatagccatgttgaccaactcattatagctgttggccctgacggtgttgagacgatcccggagcttagtgctgagccccctcctgaacctatccctcttcttctcatctgtatctgcatggtatccagcatactggcacaagtcattaaaggcctgggcatactgcaacactgtcctgttgccctgagtgagtgccaagaactcattgagtttccggtccatgatcccggcaggtatatggtatcctctaaaagctgccttaaactctctccactccacctctcggtcctctggctgcatagcaagaaaatgatcccaccaagtccttgcaggtccgcgaagctgctgggtggcgaacctgactttggtgatctctgagcaaactccatggagtagtgggaatttggattccaccactcgcagccatacatctgcgtcaagtgggtccttggaggcaggctcatctcctccctcaatgtcgacgtcctcgttggcctcctggtcctggatctcctggtgatgcatgtccaggtgctcgttagcctcagcaagctgctgctgagtgttaatgagctgatcctcgaggacctcgatggtgttctccctggtacctaccagctcttccaactcctgaatatcagtggatagctgctccacctgcaagtccttctccaccatttcctgagataggtcaaccacgagctcctctctgttatccagcgtgatctttgttgcctccagcagtgccatcaggtgggacattgcctcaccgcgcatcacctgcagacggtacagagcattcatgcaccgtactgtcaaatgcgcagtctgacctgggtagatggcccagatatccttggcatgctccacccgatccttccacattgggtcgtcctccttgtcagcggggaacaagccaatggggtgggtagccagctccaagggatggaatccgcagaaggtagtcaatccatgcagagcgatcgcctcgatcgtgtcctctgcccggtatccaaaagactcggagtccaaggaacgccagccgggctgcaggggatgaggctccaaggtcatcctcacccgacagcgaggcactcggtgcttctcgaactgctgcaccgcgtactgagggggtgtcgtgtatccagccccctgaagtacctcccacaaaatgcggggaaagccctctcgtgcaagtccgtcagtgtgggtcagtgcatttccgtcatcggaggatccgtgggaagtcat

SEQ ID NO: 4987 - DNA, 5265 bp, Zea mays
  Clone ID: TF_ZmC36592_144
ttacataccgactcctttgggcagaaagtcggggaagcgagagcgtagaaaatcctcagtctcccatgtagcttcttctgctgaatggtgactccactgaaccttgtacattctgaccgaccttgcccgagttgacctctccttttgatctaataccttcacggggtactcttggtaggacaagtctggttctatctcaatgtctggttccggtagcacttcagtgggtaggcgaacacatttccgcagctgagatacatggaacacattatggactgctgacatgtgaggtggtaattccaattggtaggctacgggtccacagcttgccttgatcttatagggtccaatgtagcaaggggctaacttgcccttgatcccgaatctctggacacccttggtgggtgataccttaagatagacatgatctcccacctcaaaccgtagaggtttccgcctcttatcatgatagctcctttgcctggcctgagcagcttccaagttcttggtaataaccctgacctttgcctctgcctcgagtactaaatccggcccaaaaatttccatttctcctgcttgagaccaatttagtggggtcctacaccttctcccatataatgcctcaaaaggtgccatcttcagactggactgatagctgttattgtaagaaaactctgccaaggaaagacacttgtcccaatcctttccgtagtgtagtgcacatgcccgcaacatatcttccaaaatctggttcaccctttctgtctggccatccgtttgagggtgatatgctgagcttcggattacttgggtcccaagtgattcttgcagtttctcccaaaagcgtgccacgaacagtgctcctctgtcagatataatggtctttggaataccatgcaatcttactatctgatcaacataaatttcagcgtacttctctatcttgtgggtggtgtgcactggcaagaaatgagcggtcttggtcaacctgtccacaataacccaaatagaatcatggtgcctggaggtattgggtaatcccactatgaagtccatacaaatgccctcccatttccaagatggtatgggaaggggttgcaagggacctgctgccttcaagtgactagcctttatcctctggcaagtgtcacactcggatacgtacttggcaatttcccttttcattctagtccaccaatatagagatctgagatcatggtacatcttgttgctgcccgggtgcatagagaatttggaaaggtgagcttcatctagtatctgctttctgagctcagggtccttgggaacaaccaatcgatctccaaaccatagaattcccttgctgtcctgtcggaagcacttgtatttttctgccttttgcttgatcatatctttgataacctgaacacctttatcctcaacctgtgccctgactatctgctcttgcaacgtgggctccaccgagatatagcttaggtcacccgaagaaacaacttccagattcaatctgcacaactcatcacacagggtggtcactcccacatccatgctcatacaattgcactgggcctttctgctcaaggcatctgccacaacattggccttaccagggtggtaatgcacttccaaatcatagtccttgatcaactctaaccatctcctttgcctcatgttcagatctgcctgagtgaagatgtatttgagactcttgtgatcagtatagatgttacagtgagctcccatcaagtagtgtctccatatcttaagagcatgcaccacagccgccaattccagatcatgagtggggtagttctgctcatggggcctgagtgcccgggaagcataagcaatgactctgttttcttgcatcaagacacatcccaatccggtaccagaagcatcacaataaacttcaaatggcttggtgttgtcaggttgggccagcactggggctgttgtcaaatgttgcctcaaggtatgaaaggcatcttcacacttttggccccactcaaatttgactcccttcttcaacagttcagtcattggtttggcaattttggagaaatccagaataaatcgtcgataataccctgctaatcccagaaaactccgaatttgcttcactgtagtcgggggttcccaatccgttacctcttgtaccttctcaggatcaactgatatcccatcctgagaaattgtgtgacccaagaatttaatctccttcagccagaactcacacttactcaacttagcatacaactgatgatcacgcagtctctgaagtacagtatgcaagtgtttggtgtgctcggcttcattcttggaataaaccagaatgtcatcaatgaaaacgaccatgaacttgtctagttctggcatgaatactgaattcatcaagtacataaaataagccggggcattggtcagcccaaaagacatcaccaaaaactcatagagcccatatctggtagagaaagccgtcttgggaatatcgctggcacggatccggatctgatggtatcctgagcgaaggtctatcttggagaataccttggctcctaccaattggtcgaacagaacatcaatgcggggcagcgggtatttgttcttgatagtcaccgcattgagaggacggtagtcaacacacatcctcaaactctcatcctttttcttcacaaatagtgctggacatccccatggtgaagtgcttggacgaataaaccccttgttcaacaactcttgcaattgcttcttcaattctgccaattccgcgggaggcatcctatagggtctcttggagataggagcagtcccgggttgccattcgatggcgaactcaatatctcggtcaggtggcatccctggtaattcatctgggaaaacatctgggtagtcacagaccactgggatcttttccactggggactctaacatcacaaaggcacaagatcgggtacaaccctggttgggtaaatacaaaacagtctcgccataagcaggggaatggatttcaatggctctggctgcaatatccaatactgcctgatgccgggtcaaccagtcagctcccaaaataatatccacgctatccaatcctaagatgagaagggtggtcctaatcacaagactaccaaattttataggcacttgcctgttgatttgataagtggcaactctgcctcctggtgttgaaatggtaatgcccccattggtgtggtgaaaaggcaactggcacttggcactaaatttggcactgataaaactatgcgatgcactagaatcaaaaagaataatggcaggataacttaaaactgtaaagataccagtcatgacgggtgctccctctggaatatcagccatggtggtgaagtttagcctgccctgcctcacttgcaccttctgtctcttgccttgggtctgattgacattctgcccctgcctctgctggttcctggggcaatttttggcataatgcccagtgttgccacatgtgaagcacctgttgtcatttgcctggcggtactgttgctgctgctgattgttcctctgagctggaaattgggtgcggttgggtgcctgctgctgctgcggtcggatcacacatcgcccttgttgctgctggggtcccctgccctgggtgtcggacacaatcctgaagcgctgtggctgagctgagggtcctgccacaggggtcttcctcttcttctctgcctgtctagctgtaatgcagtcctcctgggagatagccatgttgaccaactcattgtaacggttggccctgacggtgttgagacggtcacggagcttagtgctgagccccctcctgaacctatccctcttcttctcatctgtatctgcatgatatcccgcatactggcacaaatcactaaaagcctgggcatactgcaacactgtcctgttgccctgagtgagtgccaaaaactcattgagcttcctgtccatgatcccggctggtatatggtgtcctctaaaagctgccttgaactccctccactccacctctcggtcctctggctgcatagcaagaaaatgatcccaccaagtccttgcaggtccacgaagctgctgggtggcgaacctgactttggtgacctctgagcaagctccatggagcagtgagaatttggattccaccactcgcaaccatacatctgcatcaagtgggtcctccgcccttgtgaacaatggaggctgggtgctaaggaattcctggtatgtagccgccgcggggtgacgctgatggtctccaccaccataatgctgaggtggtggctgacgttgagccagctgcctcaggatctcattctgctgagccatgagctcctgcagagtgggaggtggtggcggcggtggaggaacgcgctcgttctggccacgacgctgcctcccggccatactcgactcgggggaaggtggtcttcctgagccagcagtgtccacactggaggcaggctcatctcctccctcaatgtcgacgtcctcgttggcctcctggtcctggatctcctggtgatgcatgtccaggtgctcgttagcctcagcaagctgctgctgagtgttaatgagctgatcctctagaacctcgatggtgttctccctggtgcctaccagctcctccaactcctgaatatcagtggatagctgctccacctgcaagtccttctccaccatttcttgagacaagtcaaccatgagttcctctctgttgtccaacgtaatctttgttgcctccagcagtgccatcaggtgggacattgcctcaccgcgcatcacctgcagacggtacagggcattcatgcatcgtacagtcaagtgcgcggtctgtcctgggtagatggcccagatatccttggcatgctccacccgatccttccacattgggtcgtcctccctctcagcggggaacaagccaatggggtgggtagccagctccaaaggatggaacccgcagaaggtagtcaatccatgcagagcgattgcctcgatcgtgtcctctgctcggtatccgaaagactcggagtccaaagagcgccatcctggctgcaggggatgaggctccaaggtcatcctcactctacagcgaggcactcggtgcttctcgaactgctgcaccgcgtactgagggggtgtcgtgtatccggccccctgaagtacctcccacaaaatgcggggaaagccctctcgtgcaagtccgtcagtgtgggtcagtgcatttccgtcatcggaggatccgtgggaagtcat

SEQ ID NO: 4988 - DNA, 1894 bp, Zea mays
  Clone ID: TF_ZmC36592_146
ctactggttcctggggcaattcttggcataatgcccagtgttaccacaagtgaagcatctgttgtcatttgcctggcggtactgctgctgctggttattcctctgagctggaaactggttgcggttgggtgcctgctgctgctgcggtggtctgatcacccatctcccttgctgctgctgggggcccctgccctgggtgtcggacacaatcctgaagcgctgtggctgagctgagggtcctgccacaggggtcttcctcttcttctctgcctgcctagctgtaatgcagtcctcttgggagatagccatgttgaccaactcattgtagctattggccctgacggtgttgagacgatctcggagcttagtgctgagcccccttctgaatctgtccctcttcttctcatctgtatctgcatgatatcccgcgtactggcacaagtcattaaaagcctgggcatactgcaacactgtcctgttgccctgagtgagtgccaagaactcatttagcttcctgtccatgatcccggcaggtatatggtgtcctctaaaagctgccttaaactctctccactccacctctcggtcctctggctgcatagcaagaaaatgatcccaccaagtccgtgcaggcccgcgaagctgctgggcggcgaacctgactttggtgacctctgagcaagctctatggagtagtgggaatttggattccaccactcgcaaccacacatctgcgtcaagtgggtcctccgcccttgtgaacaatggaggctgggtgctaaggaattcctgataggtggccgccgcggggtgacgttggtggtctccaccaccataatgctgaggtggtggctgacattgagccagctgcctcaggatctcattctgctgagccatgagctcctgcagagtgggaggtggtggcggcggtggaggaacgcgctcgttctggccacgacgctgcctcccggccatctgaaaaaccacatacttacttaacaccacagttccaaatcctggacacctagtgagcgaacgaagcaacactcgactcgggggaaggtggtcttcccgagccagcagtgtccacactggaggcaggctcatctcctccctcaatgtcgacgtcctcattggcctcctggtcctggatctcctggtgatgcatgcccaggtgctcgttagcctcagcaagctgctgctgagtgttaatgagctgatcctcgagaacctcgatggtgttctccctggtgcctaccagctcctccaactcctgaatatcagtggatagctgctccacctgcaagtccttctccaccatttcctgagataggtcaaccaccagctcctctctgttatccagcgtgatctttgttgcctccagcagtgccatcagatgggacattgcctcaccgcgcatcacctgcagacggtacagagcattcatgcaccgtactgtcaagtgcgcagtctgacctgggtagatggcccagatgtccttggcatgctccacccgatccttccacattgggtcgtcctccttctcagcggggaacaagccaatggggtgggtagccagctccaagggatggaatccgcagaaggtagtcaacccatgcagagcgatcgcctcgatcgtgtcctctgcccggtacccgaaagactcggagtccaaggagcgccagcctggctgcaggggatgaggctccaaagtcatcctcaccctacagcggggcactcggtgcttctcgaactgctgcaccgcgtactgagggggtgtcgtgtatccggccccctgaagtacttcccacaaaatgcggggaaagccctctcgtgcaagtccgtcagtgtgggtcagtgcattttcgtcatcggaggatccatgggaagtcat

SEQ ID NO: 4989 - DNA, 4788 bp, Zea mays
  Clone ID: TF_ZM4508.C4.o1.fg
atggctatctcccaagaggactgcattacagctagacaggcagagaagaagaggaagacccccgtggcaggaccctcagctcagccacagcgcttcaggattgtatccgacacccagggcaggggaccccagcagcaacaagggcgatgggtaatccgacctcagcagcagcagcaggcacccaaccgcaaccaatttccagcacagcggaataatcagcagcagcagtaccgccaagccaatgacaacaggtgcttcacttgtggcaacactgggcattatgccaagaattgccccagaaaccagcagaggcaggggcagaatgctaatcagaaccaaggcaagaggcagaaggtgcaagtgaggcaaggcaggctgaacttcaccaccatggctgatattccagagggagcacccgtcatgactggtatctttacagtattaaattttcctgctattgttctttttgattccggtgcttcacatagttttatcagtgccaagtttagtgccaaatgccagttgccctttcaccacaccgatgggggcattacaatttcaacaccaggaggcagggttgccacctatcaaatcaacagacacgtgcccataaagtttggtagtctaataattaaaaccaccctcctcattttggggttggatagtgtggatattatattgggaactgactggttaaccaggcatcgagcagttattgatattgcagccagggccattgaggtgcactcaccaacctgtggtgaaactacattatatttgcccgatcagggatgcacccgttcttgtgctttcgttatgatagattccccagtggaaaggatcccagtggtctgtgactacccagatgttttcccagatgaattgccaggaatgccacctgaccgagatattgagttcgccatcgaattgcaacccggggctgctcctatctccaagagaccctataggatgcctcccgcggaattggcagaattgaagaaacaattgcaagagttgttggacaaggggtttattcgcccaagcacttcaccatggggatgtccagcactatttgtgaagaaaaaggatgagagtttgaggatgtgtgttgactaccgtcctcttaatgcggtgactatcaagaacaaatacccgctgccccgtattgatgttctgttcgatcaattggttggagccaaggtattctccaagatagaccttcgctcaggataccatcagatcaagatccgtgccagtgacattcccaagacagctttctctaccagatatgggctgtatgagtttttggtgatgtctttcgggctgaccaatgccccggcttattttatgtacttgatgaactcagtattcatgccagagttagacaagttcgtggttgtttttattgatgatattttggtctattccaagaatgaagatgagcatactgagcacctgcacatcgtacttcaacgactgcgcgatcatcatctttatgctaagttgtccaaatgtgagttttggctgaaggagatcaaattcttgggtcacacaatttctcaagatgggatatcagttgatcctgaaaaggtacaagaggtaatggattggaaacccccgactacagtgaagcagattcggagttttctgggactggcagggtattatcgacgatttattccggatttctccagaattgccaaaccaatgactgaactgttaaagaagggagtcaaatttgagtggagtcaaaagtgtgaagatgccttccataccttgaggcagcatttgacaacagccccagtgctagctcaacctgacaacaccaagccatttgaagtttattgtgatgcttctggtactggattgggatgtgtcttgatgcaagagagcagagtgattgcttatgcttctcgggcactcaggccccatgagcagaactaccctacacatgatctagaattggcagctgtagttcatgctcttaagatatggagacactacctgatgggagctcactgtaacatctacactgatcacaagagtctcaaatacatcttcactcaggcagatctaaacatgaggcaaaggaggtggttagagttgatcaaggattatgatttggaagtgcattaccatccagggaaggccaatgttgtggcagatgccttgagcagaaagacccagtgtaattgtatgggcatggatgtgggagtgaccaccctgtgtgatgagttgtgcaagctgaacttggaagttgtttcttcgggtaacctaagctatatctcggtggaacccacattgcaagagcagataatcagggcacaagttgaggataagggtgttcaggttatcaaggatatgatcaagcaaaaggcagagaaatacaagtgtttccgacaggacagcaagggaattctatggtttggagatcgattggttgttcctaaggaccctgagctcagaaagaagatactagatgaagctcacctttccaaattctctatgcaccctggtagcaccaagatgtaccatgacctcagatctttatattggtggactagaatgaaaagagaaattgccaagtacatatctgaatgtgatacttgccagaggataaaggctagtcacttgaaggcagcaggccctttgcaaccccttcccataccatcttggaaatgggaggacatttgcatggactttatagtgggattacccaatacttctaggcaccatgattctatttgggttatcgtggacagattgaccaagactgctcatttcttgccagtgcataccacccacagggcagaaaagtacgctgaaatttacgttgatcagatagtaaggttgcatggtattcccaagaccattatatctgacaggggagcaccatttgtggcacgattttgggagcaattgcaagagtcacttgggacccatgtcatccgaagctcagcatatcacccccaaacagatggccagacagaaagggtgaatcaaattttggaagacatgttgcgagcatgtgcactacattatggaaaggattgggacaagtgtctgtctttggcggagttttcttacaataacagctatcagtccagtttgaagatggcaccttttgaggctttgtatgggagaaggtgcaggacaccactaaactggtctcaagcaggagaaagggaaatttttgggccagacttggtactcgaggcagaggcaaaggtcagggtgattaccaagaacttggaagctgctcaggctaggcaaaggagctatcatgataagaggcggaagcctctacagtttgaggtgggagatcatgtctatcttaaggtatcacccaccaagggtgttcagagattcgggatcaagggcaagttagctcctcgctatattggaccctacgagatcaaggaggcttgtggacccgtagcctatcaagtggaattgccacctcacatgtcggcagttcataatgtgttccatgtatctcagctgcggaaatgcgttcgtctacccactgaagaactcccagaaccagaccttgagatagaaccagatttatcctaccaagagtaccccgtcaaggtgctagatcaaaaggaaagatcaactcgggcaaggtcggtcaggatgtataaggttcaatggggtcaccattcagcagaagaagctacatgggagactgaggattttctacgctctcgcttccccgactttctacccaaaggagtcgactgtaatcttgctgacggagagtacatcctcgtgccggagcaaggagctgctcaggagtggactttacccctcacgcgacctgagacgaggtctctcattccggttatggtgggtacaagtgcggtcactgcacgacggccagtcggggtcagtgaggcattgtacgccaaggcgatgacttcccacggatcctccgatgatggaaatgcactgacccacactgacgggcttgcacgagagggctttccccgcattttgtgggaagtacttcagggggctggatacacgacaccccctcagtacgcggtgcagcagttcgagaagcaccgggtgccccgctgtagggtgaggatgaccttggagcctcatcccctgcagccaggctggcgctccttggactcagagtctttcgggtaccgggcagaggacacgatcgaggcgatcgctctgcatggattgactaccttctgcggattccatcccttggagctggctacccaccccattggcctgttccccgctgagaaggaggacgacccaatgtggaaggatcgggtggagcatgccaaggatatctgggccatctacccaggtcagactgcgcatttgacagtgcggtgcatgaatgctctgtaccgtctgcaggtgatgcgcggtgaggcaatgtcccacctgatggcactgctggaggcaaccaagatcatgctggataacagagaggagctcgtggttgacctatctcaggaaatggtggagaaggacttgcaagtggagcagctatccactgacattcaggagttggaggagctggtaggtaccagggagaacaccattgaggtccttgaggatcagctccttaacactcagcagcagcttgctgaggctaacgagcacctggacatgcaccaccaggagatccaggaccaggaggacaacgaggacgttgacattgagggaggggatgagcctgcctccagtgtggacactgctggctcgggaagaccaccttcccccgagtcaagtgttgcttcgttcgctcactag

SEQ ID NO: 4990 - DNA, 987 bp, Zea mays
  Clone ID: TF_ZM4508.C4.o2.fg
atggccgggaggcagcgtcgtggccagaacgaacgcgttcctccaccgccgccaccacctcccactctgcaggagctcatggctcagcagaatgagatcctgaggcagctggctcagcgtcagccaccaccccagcattatggtggtggagaccaccagcgtcaccccgcggtggccacctatcaggaattcctcagcacccagcctccactattcacaagggcggaggacccacttgacgcagatgtatggctgcgagtggtggaatccaaatttccactgctccatggagtttgctcagaggtcaccaaagtcaggttcgccacccagcagcttcgcggacctgcaaggacttggtgggatcactttcttgctatgcagccagaggaccgagaggtggagtggagggagtttaaggcagcttttagaggacaccatatacccgccgggatcatggacaggaagctcaatgagtttttggcactcactcagggcaacaggacaatgttgcagtatgctcaggcctttaatgacttgtgccagtatgcgggatatcatgctgatacagatgagaagaagagggacagattcagaagggggctcagcactaagctccgggatcgtctcaacaccgtcagggccaacagctacaatgagttggtcaacatggcttttttccccaagaggactgcattaaagctagacaagcagagaagaagaggaagacccccgtggggaccccagcagcaacaagggcgatgggtaatccgacctcagcagcagcagcaggcacccaaccgcaaccaatttccagcacagcggaataatcagcagcagcagtaccgccaagccaatgacaacaggtgcttcacttgtggcaacactgggcattatgccaagaattgccccagaaaccagcagaggcaggggcagaatgctaatcagaaccaaggcaagaggcagaaggtgcaagtgaggcaaatttaa

SEQ ID NO: 4991 - DNA, 2226 bp, Zea mays
  Clone ID: TF_ZM4508.C5.o1.fg
ctcagcacccagcctccactattcacaagggcggaggacccacttgacgcagatgtatggctgcgagtggtggaatccaaatttccactgctccatggagtttgctcagaggtcaccaaagtcaggttcgccacccagcagcttcgcggacctgcaaggacttggtgggatcactttcttgctatgcagccagaggaccgagaggtggagtggagggagtttaaggcagcttttagaggacaccatatacccgccgggatcatggacaggaagctcaatgagtttttggcactcactcagggcaacaggacagtgttgcagtatgctcaggcctttaatgacttgtgccagtatgcgggatatcatgctgatacagatgagaagaagagggacagattcagaagggggctcagcactaagctccgggatcgtctcaacaccgtcagggccaacagctacaatgagttggtcaacatggctatctcccaagaggactgcattaaagctagacaagcagagaagaagaggaagacccccgtggtaggaccctcagctcagccacagcgcttcaggattgtatccgacacccagggcaggggaccccagcagcaacaagggcgatgggtaatccgacctcagcagcagcagcaggcacccaaccgcaaccaatttccagcacagcggaataatcagcagcagcagtaccgccaagccaatgacaacaggtgcttcacttgtggcaacactgggcattatgccaagaattgccccagaaaccagcagaggcaggggcagaatgctaatcagaaccaaggcaagaggcagaaggtgcaagtgaggcaaggcaggctgaacttcaccaccatggctgatattccagagggagcacccgtcatgactggtatctttacagtattaaattttcctgctattgttctttttgattccggtgcttcacatagttttatcagtgccaagtttagtgccaaatgccagttgccctttcaccacaccgatgggggcattacaatttcaacaccaggaggcagggttgccacctatcaaatcaacagacacgtgcccataaagtttggtagtctaataattaaaaccaccctcctcattttggggttggatagtgtggatattatattgggaactgactggttaaccaggcatcgagcagttattgatattgcagccagggccattgaggtgcactcaccaacctgtggtgaaactacattatatttgcccgatcagggatgcacccgttcttgtgctttcgttatgatagattccccagtggaaaggatcctagtggtctgtgactacccagatgttttcctagatgaattgccaggaatgccacctgaccgagatattgagttcgccatcgaattgcaacccggggctgctcctatctccaagagaccctataggatgcctcccgcggaattggcagaattgaagaaacaattgcaagagttgttggacaaggcactatttgtgaagaaaaaggatgagagtttgaggatgtgtgttgactaccgtcctcttaatgctgtgactatcaagaacaaatacccgctgccccgtattgatgttctgttcgatcaattggttggagccaaggtattctccaagatagaccttcgctcaggataccatcagatcaagatccgtgccagtgacattcccaagacagctttctctaccagatatgggctgtatgagtttttggtgatgtctttcgggctgaccaatgccccggcttattttatgtacttgatgaactcagtattcatgccagagttagacaagttcgtggttgtttttattgatgatattttggtctattccaagaatgaagatgagcatactgagcacctgcacatcgtacttcaacgactgcgcgatcatcatctttatgctaagttgtccaaatgtgagttttggctgaaggagatcaaattcttgggtcacacaatttctcaagatgggatatcagttgatcctgaaaaggtacaagaggtaatggattggaaacccccgactacagtgaagcagattcggagttttctgggactggcagggtattatcgacgatttattccggatttctccagaattgccaaaccaatgactgaactgttaaagaagggagtcaaatttgagttgagtcaaaagtgtgttaaagacttccatagtagaggcagcctctga

SEQ ID NO: 4992 - DNA, 4335 bp, Zea mays
  Clone ID: TF_ZM4589.C1.o8.fg
atggccgggaggcagcgtcgtggccagaacgagcgcgttcctccaccgccaccaccacctcccactctgcaggagctcatggctcagcagaatgagatcctgaggcagctggctcaacgtcagccaccacctcagcattatggtggtggggaccaccaacgtcaccccgcggcggccacctatcaggaattcctcagcacccagcctccactattcacaagggcggaggacccacttgacgcagatgtatggctgcgagtggtggaatccaaattcccactactccatggagtttgctcagagatcaccaaagtcaggttcgccacccagcagcttcgcggacctgcaaggacttggtgggatcattttcttgctatgcagccagaggaccgagaggtggagtggagagagtttaaggcagcttttagaggacaccatatacctgccgggatcatggaccggaaactcaatgagttcttggcactcactcagggcaacaggacagtgttgcagtatgcccaggcctttaatgacttgtgccagtacgcgggatatcatgcagatacagatgagaagaagagggacagattcagaagggggctcagcactaagctccgggatcgtctcaacaccgtcagggccaacagctacaatgagttggtcaacatggctatctcccaggaggactgcattacagctaggcaggcagagaagaagaggaagacccctgtggcaggaccttcagctcagccacaacgcttcaggattgtgtccgacacccaaggcagggggccccagcagcagcaagggcgatgggtaatccgacctcagcaacagcagcagcaggcacccaaccgcaatcaatttccagcacagcggaataatcagcagcagcagtaccgccaagccaatgacaacaggtgcttcacttgtggcaacactgggcattatgccaagaattgccccaggaaccagcagaggcaggggcagaatgcaaatcagaaccaagggaagaggcagaaggtgcaagtaaggcaaggcaggctgaacttcaccaccatggctgacattccagagggagcacccatcttgactggtatctttacagttttgaattatcctgctattgttctttttgattctggtgcatcacacagttttatcagtaccaaattttgtgccaagtgccaattgccttttcaccacaccaatgggggtattacaatctcaacaccaggaggcagggttgcctcctatcagatctgtaggcacgtaccaattaagctgggtagtctcatattcaaaactaccctaatgataatggggttggatagtgtggatattatattgggagctgactggttgaccaggcaccaagcagttatggatattgcagccagagccattgaggtgcactcaccaacttgcggtgagaccacactgtatttgcgtgaccggggttgtacccgaccttgtgcttttgttatgttagaatccccagtggaaaagatcccagtggtctatgactatccggatgtttttccggatgaattgccaggaatgccacctgaccgagatattgagttcgccatcgaattgcaacccgggactgctcctatctccaagagaccttataggatgcctcccgcggaattggcagaattaaagaaacaattgcaagagttgttggacaaggggtttattcgtccaagcacttcaccatggggatgtccagcattatttgtgaagaaaaaggatgagagtttgaggatgtgtgttgactaccgtcctctcaatgcggtgactattaagaacaaatacccgctgccccgcattgatgttctgtttgatcagttggttggagccaaggtgttctccaagatagaccttcgctcgggataccatcagatcaagatccgtgccagcgacattcccaagacggctttctctaccatatatggactgtatgagtttctggtgatgtcttttgggctgaccaatgccccggcctatttcatgtacctgatgaactcagtgtttatgccagaattggataagttcgtggttgttttcattgatgatatactgagactgcgtgatcatcagttgtatgctaagctgagtaagtgtgagttttggctaaaagagatcaaattcttgggtcacacaatttctcaggatgggatatcagttgatcctgagaaggtacaagaggtaatggattggaaacccccgactacagtgaagcagattcggagttttctgggattggcagggtattaccgacgatttattccggatttctccagaattgccaaaccaatgactgaattgttgaagaagggagtcaaatttgagtggagccaaaagtgtgaaggtgcctttcataccttgaggcagcatttgacaacagccccagtgctagctcaacctgacaacaccaagccatttgaagtctattgtgatgcttctggtactggtttgggatgtgtcttgatgcaagagaacagagtgattgcttatgcttcccgggcactcaggccccatgagcagaactaccctacacatgatctagaattggcagctgtagttcatgctcttaagatatggagacactacttgatgggagctcactgtaacatctacactgatcacaagagtctcaagtacattttcactcaggcagatctgaacatgaggcaaaggagatggttagagttgatcaaggattatgatttagaagtgcattaccacccagggaaggcaaatgttgtggcagatgccttgagcagaaaggcccagtgcaattgtgtgagcatggatgtaggagttaccaccctgtgtgatgagttgtgcaagctgaacctggaagttgtttattcgggtaacctaagctatatctcggtggagcccacattgcaagagctgatagtcagggcacaggttgaggataagggtgttcaggttatcaaggatatgatcaagcaaaaggcagagaaatacaagtgtttccgacaggacaacaagggaattctatggtttggagatcgattggttgttcctaaggaccctgagctcagaaagaagatactggacgaagctcacctttccaaattctccatgcaccctggtagcaacaagatgtaccatgatctcagatctctgtattggtggactagaatgaaaagggaaattgccaagtacatatccgagtgtgatacttgccagaggataaaggctagtcacttgaaggcagcaggccctttgcaaccccttcccataccatcttggaaatgggaggacatttgcatggacttcatagtgggattacccaatacctccaggcaccatgattctatttgggttatcgtggacaggttgaccaagactgctcatttcttgccagtgcacaccacccacaagacagagaagtatgctgaaatttatgttgatcagatagtgagattgcatggtattcccaagaccattatatctgacagaggagcactgtttgtggcacgcttttgggaaaaactgcaagaatcacttggaacccaagtaatccgaagctcagcatatcacccacaaacagatggccagaccgaaagggtgaatcagattttggaagacatgttgcgagcatgtgcactacactacgggaaggattgggacaagtgtctgtctttggcagagttttcatacaataacagctaccagtccagtctgaagatggcaccttttgaggctttgtatgggagaaggtgcaggaccccactaaactggtctcaagcaggagaaagggaaatttttgggccagacttggtactcgaggcagaggcaaaggtcagggttcttaccaagaacttagaagctgctcaggccaggcaaaggagctatcatgataggaggcggaagcctctacagtttgtggtgggagatcatgtctaccttaaggtatcacccaccaagggtgtccagagattcgggatcaagggcaagttagctcctcgctacattggaccctatgagatcaaggcaagttgtgggcccgtggcctatcaagtagaattgccacctcacatgtcagcagttcataatgtgttccatgtgtctcagctgcggaaatgcgttcgtctacccactgaagtactaccggagctagacattgagatagaaccagacttgtcttaccaagagtaccccgtcaaggtattagatcaaaaggaaagatcaactcgggcaaggtcggtcagaatgtacaaggttcagtggagtcaccattcagcagaagaagctacatgggagactgaggattttctgctgatagtcgcctag

SEQ ID NO: 4993 - DNA, 4644 bp, Zea mays
  Clone ID: TF_ZM4783.C4.o3.fg
atgacttcccatggatcctccgatgacgaaaatgcactgacccacactgacggacttgcacgagagggctttccccgcattctgtgggaggtacttcagggggctggatacacgacaccccctcagtacgcggtgcagcagttcgagaagcaccgggtgccccgctgtagggtgaggatgaccttggagcctcatcccctgcagccaggctggcgctccttggactccgagtcttttgggtaccgggcagaggacacgatcgaggcgatcgctctgcatgggttgactaccttctgcggattccatcccttggagctggctacccaccccattggcttgttccccgctgagaaggaggacgacccaatgtggaaggatcgggtggagcacgccaaggacatctgggccatctacccaggacagactgcgcatttgacagtacggtgcatgaatgccctgtaccgtctgcaggtgatgcgcggtgaggcaatgtcccatctgatggcactgctggaggcaacaaagatcacgctggataacagagaggagctcgtggttgacctatcacaagaaatggtggaaaaggacttgcaggtggagcagctatccactgatattcaggagttggaggagctggtaggcaccagggagaacaccatcgaggttctcgaggatcagctcattaacactcagcagcagcttgctgaggctaacgagcacctggacatgcatcaccaagagatccaggaccaggaggccaacgaggacgtcgacattgagggaggagatgagcctgcctccagtgtggacaccgctggctcgggaagaccaccttcccccgagtcaaatggccggaaggcagcttttagaggacaccatataccagccgggatcatgtacaggaagctcaatgagttcttggcactcactcagggcaacaggacagtgttgcagtatgcccaggcctttaatgacttgtgccagtacgcgggatatcatgcagatacagatgagaagaagagggacagattcagaagggggctcagcactaagctccgggatcgtctcaacaccatcagggccaacagctacaatgagttggtcaacatggctatctcccaagaggactgcattacagctaggcaggcagagaagaagaggaagacccctgtggcgggaccctcagctcagccacagcgcttcaggattgtgtccgacacccagggcagggggccccagcagcagcaagggcgatgggtaatccgacctcagcagcagcagcagcagggacccaaccgcacccaatttccagctcaaaggggcaatcaacagcagcagcagtaccgccaagccaatgacaacaggtgcttcacttgtggcaacactgggcattatgccaagaattgccccaggaaccagcagaggcaggggcagaatgtcaatcagaaccaaggcaagagacagaaggtgcaagtgaggcaaggcaggctgaacttcaccaccatggctgatattccagagggagcacccgtcatgactggtatctttacagttttaaattatcccgctattgttctttttaattccggtgcttcacatagttttatcagtgccaagtttagtgccaaatgccagttgccctttcaccataccgatgggggcattacaatttcaacaccaggaggcagagttgccacttatcaaatcaacaggcaagtgcctataaaatttggtagtctggtgattagaaccacccttctcgtcttaggattggatagcgtggatattattttgggagctgactggttgaccaggcatcaggcagtattggacattgcaaccagagccattgaaatccattcccctgcttatggcaagactgttttgtatttacccaaccagggttgtacccgttcttgtgcctttgttatgatagaatccccagtggaaaagatcccagtggtctgtgactatccggatgtttttccggatgaattgccaggaatgccacctgaccgagatattgagttcgccatcgaattgcaacccgggaccgctcctatctccaagagaccctataggatgcctcccgcggaattggcagaattgaagaaacaattgcaagagttgttggacaaggggtttattcgtccaagcacttcaccatggggatgtccagcattatttgtgaagaaaaaggatgagagtttgaggatgtgtgttgactaccgccctctcaatgcggtgaccataaagaacaaatacccgttgcctcgcattgatgttctgtttgatcaattggttggagccaaggtattctccaagatagaccttcgctcaggataccatcagatcaagatccgcgctagcgatattcccaagacggctttctctaccagatatggactgtatgagtttctggtgatgtcttttgggctgaccaatgccccggcttatttcatgtacctgatgaattcagtgtttatgccagaattggataagttcgtggttgtcttcattgatgatattctggtttattccaagaatgaagccgaacacaccaaacacttgcatactgtacttcagagactgcgtgatcatcagttgtatgctaagctgagtaaatgtgagttctggctgaaggagattaaattcttgggtcacacaatttctcaggatgggatatcagttgatcctgagaaggtgcaagaggtaatggaatggaaacccccggctacagtgaagcagattcggagttttctgggattggcagggtattatcgacgatttattccggatttctccagaattgccaagccaatgactgagctgttgaagaagggagtcaaatttgagtggagccaaaagtgtgaagatgccttccataccttgaggcagcatttgacaatagccccagtgctggcccaacctgacaacaccaagccatttgaagtttattgtgatgcttctggtactggtttgggatgtgtcttgatgcaagagagcagagtgattgcttatgcttctcgggcactcaggccccatgagcagaactaccctacacatgatctagaattggcagttgtagttcatgctctgaagatttggagacactacctgatgggagctcactgtaacatctacactagtcacaagagtctcaaatacatcttcactcaggcagatctgaacatgaggcaaaggagatggttagagctgatcaaggactatgatttagaagtgcattaccacccgggtaaggccaatgttgtggcagatgccttgagcagaaaggcccagtgtaattgtatgagcatggatgtgggagtaaccaccctgtgtgatgagttgtgcaaactgaacctggaagttgtttcttcgggtaaactaagctatatctcggtggagcccacattgcaagaacagattgtcagggcacaggttggggataagggtgttcaggttatcaaagatatgatcaagcaaaaggcagaaaaatacaagtgtttccgacaggatagcaagggaattctatggtttggagatcgattggttgttcccaaggaccctgagcttagaaagaagatactagatgaagctcacctttcaaaattctccatgcaccctggtagcaacaagatgtaccatgatctcagatctctatattggtggactagaatgaaaagggaaattgccaagtacatatccgagtgtgatacttgccagaggataaaggctagtcacttgaaggcagcaggccctttgcaaccccttcccataccatcttggaaatgggaggacatttgtatggacttcatagtgggattacccaatacctccaggcaccatgattctatttgggttatcgtggacaggttgaccaagactgctcatttcttgccagtgcataccacccacagggcagagaagtacgctgaaatttatgttgatcagatagtaaggttgcatggtattcccaaaaccattatatcggacagaggagcaccatttgtggcacgattttgggagcaactacaagagtcacttgggacccatgtcatccgaagctcagcataccacccccaaacagatggccagacagaaagggtgaatcaaattttggaagacatgttgcgagcttgtgcactacattatggaaaggattgggacaagtgtctgtctttggcagaattctcttacaataacagctatcagtccagtttgaagatggcaccttttgaggcactatatgggagaaggtgtaggaccccacttaattggtctcaagcaggagaaagggaaatttttgggccagacttggtactcgaggcagaggcaaaggtcagggtgattaccaaaaacttggaagctgctcaggctaggcaaaggagctatcatgataagaggcggaagcctctacagtttgaggtgggagatcatgtctatcttaaggtatcacccaccaagggtgttcagagattcgggatcaagggcaagttagctcctcgctatattgggccctacgagatcaaagaggcttgtggacccgtagcctatcaagtggaattgccacctcacatgtcagcagttcataatgtgttccatgtatctcagctgcggaaatgcgttcgtctacccacctaa

SEQ ID NO: 4994 - DNA, 1050 bp, Zea mays
  Clone ID: TF_ZM4853.C2.o5.fg
atggccgggaggcagcgtcgtggccagaacgagcgcgttcctccaccgccaccaccacctcctactctgcaggagctcatggctcagcagaatgagatcctgaggcagctggctcaacgtcagccaccacctcagcattatggtggtggggaccaccaacgtcaccccgcggcggccacctatcaggaattcctcagcacccagcctccactgttcacaagggcggaggacccacttgacgcagatgtgtggctgcgagtggtggaatccaaatttccactgctccatggagtttgctcagaggtcaccaaagtcaggttcgccacccagcagcttcgcggacctgcaaggacatggtgggatcattttcttgctatgcagccagaggaccgagaggtggagtggagggagtttaaggcagcttttagaggacaccatatacccgccgggatcatggacaggaaactcaatgagttcttggcactcactcagggcaacaggacagtgttgcagtatgcccaggcctttaatgacttgtgccagtatgcggggtatcatgcagatacagatgagaagaagagggacagattcagaagggggctcagcactaagctccgggatcgtctcaacaccgtcagggccaacaactacaatgagttggtaaacatggctatctcccaagaggactgcattacagctaggcaggcagaaaagaagaggaagacccccgtggcaggaccctcagctcagccacagcgtttcagaattgtgtccgacacccagggcaggggacctcagcagcagcaagggcgatgggtaatccgacctcagcagcagcagcaggcacccaaccgcatccaatttctagctcagaggggcaatcagcagcagcagcagtaccgtcaagccaatgacaacaggtgcttcacttgtggcaacactgggcattatgccaagaattgccccaggaaccagcagaggcaggggcagaatgcaaatcagaaccaaggcaagagacagaaggtgcaattttatcagtaccaaatttag

SEQ ID NO: 4995 - DNA, 4410 bp, Zea mays
  Clone ID: TF_ZM4906.C5.o3.fg
atgacttcccacggatcctcagacgacggaaatgcactgtcccacactgacaggcttgcacgagagggctttccccgcattttgtgggaggtacttcagggggccggatacacgacacctcctcagtacgcggtgcagcagttcgagaagcaccgagtgccccgctgtagagtgaggatgaccctggagcctcatcccctacagccaggctggcgttcactggactctgagtcctttggataccgggctgaggacacgatcgaggcaattgctctgcatgggttgaccactttctgcggattccatcccttggagctgtctacccaccccattggcttgttccccgtagaaagggaggacgacccgatgtggaaggatcgggtggagcacgccaaggacatctgggctatctacccaggtcagactgctcacttgacagtacggtgcatgaatgccctgtaccgtttgcaagtgatgcgtggtgaggcaatgtctcatctgatggcattattggaggcaacaaagatcaccttggacaacagaaaagagcttgtggttgatttgtccactgagatggtggaaaaggacttacaggtggagcagctatccaatgagatccaagagctggaggaattagtgggtaccagagagaacaccatcgaggttctcgaggatcagctcattaacacccagcagcagcttgccgaggctaatgagcacctggatatgcatcgccaggagatccaagacatggaggccaacgaggacgtcgacattgagggaggagaggagcctgcctccagcttggacactgcgggctcagggagaccaccttcccccgagtcgagtatggccgggagagcgcgtcgtggccagaatgagcgcgttcctccaccgccgccaccgcctcccactctgcaggagctaatggctcagcagaatgagatcttgaggcagctagctcagcgtcagccaccacctcagcactatggtggtggagaccatcagcgtcaccccgcggcagctacctaccaggagttcctcagtacccaacctcctttgttcactagggcagaggacccacttgatgcagatgtgtggttgagagtagtggaatccaaattcccgctactccatggagtttgctcagaggtcacaaaagtcaggttcgctacccagcagcttcacggacccgcaaggacttggtgggatcattttcttgctatgcagccagatgaccgagagggcaacaggacagtgttgcagtatgctcaggcttttaatgacctgtgccagtatgctgggtatcatgcagatacggacgagaagaagagagacaggttcaggagggggctcagcactaagctctgtgaccgtctcaacaccgtcagggccaacagctacaatgagttggtcaacatggccatctcccaggaggactgtatcacagctcgtcaggcagaaaagaagaggaagacccctgtggcaggaccctcagctcagccacagcgcttcaggattgtgtctgacactcagagcaggggacctcagcagcagcaagggcgatgggtgatccgaccagagcagcagcaacaacaggcacccaaccgcacccagtttccagctcaagggaacaatcagcagcagcagtatcgccaggcaaatgacaacaggtgtttcacatgcggcaacaccggacattatgccaagaattgccccaggaaccaacagaggcaggggcagaatgtgaatcagaatcaaggcaagatacagaaggtgcaagtgaggcagggcaggctgaacttcaccaccatggctgatattccagagggggcacccgtcatgactggattggatagcgtggatattatattgggagctgactggttgaccaggcatcaggcagtattggatattgcagccagggccattgaaattcattcccctgcttatggcgagactgttttatatttgcccgaccagggatgcacccgttcttgtgccttcgttatgatagaatccccagtggaaaagatcccagtgagaccttataggatgcctcccgcagaattggcagaactgaaaaagcaattgcaagagttgttggacaaggggtttattcgcccaagtacttcgccttggggatgtcctgctttattcgtaaagaaaaaggatgaaagtttgagaatgtgtgttgattaccgccctctcaatgcggtgactatcaagaacaaatacccactgccccgcattgatgtattgttcgatcagttggtgggagccaaggtcttctccaaaatagaccttcgctcgggttaccatcagatcaagatccgtgccagtgatattcccaagacggctttctctaccagatatgggctctatgaatttttggtgatgtcttttgggctgaccaatgccccggcttattttatgtacttgatgaactcagtattcatgccagagttggacaagttcgtggtcgttttcattgatgatattctggtctattccaagaatggagacgaacatactgagcatctgcacatcgtgcttcagcgactgcgcgatcatcgtctttatactaagttgtctaaatgtgaattctggctgaaggaaattaaattcttgggtcacacaatttctcaggatgggatatcagttgatcctgagaaggtacaagaggtaatggattggaaacccccgactacagtgagaattgccaaaccaatgactgaactgttaaagaagggagtcaagtatgattggagccaaaagtgcgaagatgcctttcatactttgaggcagcatttgaccacagccccagtgctggctcaacctgacaacaccaagccctttgaagtttattgtgatgcttctggcactggtttgggatgtgtcttaatgcaagatgacaaggtaattgcttatgcctcccgagcactcagaccccatgagcagaactaccctacacatgatctggagttagcagctgtggttcatgctctcaaaatatggagacactacttgatgggagctcactgtaacatttacacggatcacaagagcctcaaatacattttcactcaggcagatttaaacatgaggcagaggatatggttggaattaatcaaggactatgatttggaagtacattaccacccgggcaaagccaatgttgtggcagatgccttgagcagaaaagcccagtgcaattgtatgagcatagatgcaagagttaccaccctgtgtgatgagttgtgcaagctgaacctggaagttgtttcttcaggtgccttaagttatatctcggtagagcccacattgcaagagcaaatagtcagggcacagattaaggataagggtgttcaggttatcaaagacatgatcaagcagaaggcagaaaaatacaagtgcttccgtcaggacaacaagggaattttatggtttggagatagattggttgttcccaaggaccctgagctcagaaagaagatactagatgaagctcacctttcaaaattctacatgcacccgggcagcaacaagatgtaccatgatctcagatccttatactggtggaccaggatgaagagggaaattgccaagtacatatccgagtgtgacacctgccaaaggattaaagccagtcatttgaaggcagcatgccctttacaaccccttcccataccatcttggaaatgggaggacatttgcatggactttatcgtgggattgcccaatacctccaggcaccatgattccatttgggttattgtggacaacttgaccaagaccactcatttcttgccagtacacaccacccacaggacagagaagtatgcagaaatctacattgaccagatagttcgtctgcatggaataccaaggactatagtctcagacagaggagcaccatttgtggcacgattttgggaacaattgcaggaatcacttaggacctatgtcatacgaagctcagcataccatccccaaacagatggccagacagaaagggtaaaccagattttggaagacatgttgagggcatgtgtactgcactacggaaaagattgggacaagtgtctttctttagcagagttttcttataataacagctaccagtccagtctaaagatggcactttttgaagctttatatgggagaagatgtagaaccccgctgaattggtctcaagcaggagagagggaaatatttgggccagatttggtacttgaagcagaggcaaaggtcagagtcatcaagaagaacttagaagctgctcaggccaggcaaaagagctatcatgacaagaggaggaagcctctgcagtttgaagtgggagaccatgtttatcttaaggtgtcacccaccaagggtgtccagagattcggatcaagggcaagttag

SEQ ID NO: 4996 - DNA, 4266 bp, Zea mays
  Clone ID: TF_ZM4995.C3.o8.fg
atggatcctaagggaaaggggatggtggtcaacgacaaggagaaggagtccatcttcaacgagccaagagatgacaagcccactgactcaggctcgagtcataagaagaaggacgggaagaagaagaggcgcatcaagaagatcatctactacgacagcgatgcatcttcttcttcaccaaaagacgatgacgatgaagattcttcgtcaaagaaaaagacggttaatcaaaactattcttttgattattcccgcatgctgtacaattcgaatgctcatttgctatcaattccacttggtaaacctccacactttgatggagaagactactctttctggagtcataaaatgtgtagctatttattttctctccatcctagcatctgggaaattgttgaaaacggaatgcactttgataacactgacaatgccgtttttataaatgagcaaattcataagaatgcccaagctactactgtgttgctagcatctctttgcagggatgagtacaataaggtgagtggcttggacaatgccaagcaaatctgggacaccctcgagatatctcatgagggaaacgacgccaccatgatcaccaaaatggagttggtggaaggcgagctaggaagattcacgatgatcagggcagaggagccaacacaaacctacaacaggctcaaggccctggtcaacaagattcgaagctatggaagcacaagatggacggatcatgatgtcgtccgactcatgctaaggtcatttactgtaattgacccccatcttgtcaatcttattcgtgagaatcctaggtacaccaagatgacgcccgaggagattcttggaaaatttgtgagcgggcgcatgatggtgaaggaggctcgatacgtggacgatgctctaaatggtacactacccgtctacgagcttcaacctgttgctcttaaggcaaccagtagcagggaggcgcttccaagcaaggtggcacaagtagaggctgctggcctcaacgaggatgagatggcgcttatcatcaagcgcttcaagaccgcgcttaaaggacgcaaggagtaccccaacaagaacaaaacaaggggaaagcgctcctgctttcaatgcggtaagactggtcactttattgcaaattgtcccgataatgatagtgaccagggacaagaaaagagcgagaagaaggagaaaaagaagaactacaggaaggcaaagggcgaggcgcaccttggaaaggaatgggactcggactgctcctctttcgactctgacgacgaaggacttgctgcctcagccttcaacaaatcctcactcttccccaacgaacgccatacatgtcttatggccaaggagaaaaaggtatgtgttcgggacacacccaagtacacttcatctagtgatgaagaatcctccgatgatgaagtagattactctagtttatttaaagataaattgctagagaagcaagaagatattttgtatgaagagcatgacaaatttattagtgttcaaaaatctcttgctctagaaattaagagaaatgaaatgctatcctctgagttgtctgcttgccatgaatctgtttctagtttaaggagtttaaatgatgatttaaatgctaagctagaagaagttaataaatctagttcatgtgtagagcatgctgttatttgtaatagatgtaaggattttgatgttgatgcatataatgaacatattgtttctattacaaaatcaagtaatgaggtggcaagtcttaatgctcaacttaagacttgcaaggacgattttaataaattgaaatttgttagggatgcctacactattggtagacacccttcaattaaggatggacttggttttcgaaaggaaaccaagaacttaacaagccaaaaggatcacgttctcaacaaggagaaagggaaggcccctatggtttatgcatccgggggttcaagctggattatcgacagcagatgcacaaaccacatgacgggggagaagaagatgttcacctcctatgtcaagaacaaggattcccaggatacgatcatctttggagatgggaaccaaggcaaggtcaaaggcttgggcaagatagccatcaccaacgagcactccatatcgaatgtatttctagtagggtcgcttggttacaaccttctgtatggaggacatgtgttaggactaaccaatgtttgtttcgataaagataggccttgtgcagcatgtcaagcagggaaacatgtgggaagtactcatcatagcaagaatatgatgacaacatcaagaccactggagcttcttcacatggacctcttcggacccgttgcctaccttagcatcgggggaagtaagtatggtcttgtaatcattgatgatttttcccgcttcacttgggtgttctttttgcaagataaatcagaaacccaagggaccctaaagcgctttctaaggagggctcaaaacgaatttgagctaaaggtgaaaaagataaggagcgacaacgggtccgagttcaagaatctgcaagttgaggagtatcttgaggaggaaggcgtcaagcacgagttctccgctccctacacaccacaacaaaatggtgtggtagataggaaaaacacgacacttatccacatggcgagaacgatgcttggagagttcaagatgcccgagcggttttggtcggaagctgtgaacacagcttgccacgccataaaccggctctatctgcatcaccttctcaagaagacctcctacgaactccttaccggtaacaaacccaacatctcaaactttcgtgtatttgggagcaaatgttacattctggtgaagaaaggtagacattctaaatttgctcccaaggcagtagaagggtttttactagggtatgactcaaatacaaaggcgtatagagtcttcaacaaatcatcgggtttggttgaagtctctagcgacgttgtatttgatgagactaatggctctccaagagagcaagttgatcttgatgacatagatgaagatgatgttccaaaggccgcaatgcgcatgatggcgattggtgatgtgcgaccacaggaacaacaggagcaagatcagccatcgtcctccacaatggtgcatcctccaactcaagacggtaaacaggaagagctcaacaacttcaagagaaatgaagtttggagtctggtgccacgtccaaagcaaaatattgtgggaaccaagtgggtgttccacaacaagcaagacgagcatggggtggtgacaagaaacaaggctcgacttatggcaaaatgttacgcccaagtcgcaggtttggatttcgaggagacttttgctcctgtggctaggctagagtctattcaaattctattatcctatgtcgctcaccactctttcaggctatttcaaatggatgtgaagagcgctttcctcaatgggccaataaaggaggaggtatacgtggaacaaccccctggctttgaggatgacaggtaccccgactatgtgttcaagctctctaaggcgctctatggacttaagcaagccccaagagcatggtatgaatgccttagagatttcctaattgttaatgccttcaaggttgggaaagccgatcccactctttttacaaagacttgtgatggtgatctttctgtgtgccaaatttatgtcgatgacataatatttggttctactaatcaaaagtcttgtgaggagtttagcagggtgatgacacaaaagtttgagatgtcgatgatgggagagttgacctacttccttgggttccaagtaaagcaactcaaggacgacaccttcatctcccaaacgaagtacacacaagatcttctcaagcggtttgggatgaaggacgccaagcccgtgaagactccgatgggaaccgacgggcatgttgacctcaacaaaggaggtaagtccgttgatcaaaaggcataccggtctatgatagggtcattactttatttatgtgcaagtagaccagacattatgctaagtgtatgcatgtgtgctagatgtaaatccgaccccaaggaatgtcaccttgtggccgttaagcgaattcttagatatttagtttctacgccttgtttcgggatctggtatccaaaggggtctacctttgacttgattggatactcagactccgattatgccgggttcaaggttgataggaagagcacatcggggacgtgccaatttctaggaaagtccctggtgtcctggagttctaagaaataa

SEQ ID NO: 4997 - DNA, 1026 bp, Zea mays
  Clone ID: TF_ZM4997.C1.o9.fg
atgtggaaggatcgggtggagcatgccaaggatatctgggccatctacccaggacagactgcgcacttgactgtacggtgcatgaatgccctgtaccatctgcaggtgatgcgcggtgaagcaatgtcccatctgatggcgctgctggaggcaacaaagattacgctggataacagagaggagctcgtggttgacttatctcaagaaatggtggagaaggacttgcaggtggagcagctatccactgatattcaggagttggaggagctggtgggcaccagggagaacaccatcgaggttgtagaggatcagctccttaacactcagcagcagcttgctgaggctaacgagcacctggacatgcatcaccaggagatccaggaccaggaggccaacgaggacgtcgacatcgagggaggagatgagcctgcctccaatacagatgagaagaagagagacaggttcaggagggggctcagcactaagctccgtgatcgtctcaacaccgtcagggccaacaactacaatgagttggtcaacatggctatctcccaagaggactgcattacagctaggcaggcagagaagaagaggaagacccctgtggcaggaccctcagctcagccacagcgcttcaggattgtgtccgacacccagggcaggggaccccagcagcagcaagggcgatgggtgatccgacctcaggagcagcagcaggcacccaaccgcacccaatttccagctcagaggagcaatcagcagcagcagcagtaccgccaggcaaatgacaacaggtgcttcacatgtggcaacactgggcattatgccaagaattgccccaggaaccagcagaggcaggggcagaatgtcaatcagaaccaaggcaagagacagaaggtgcaagtgaggcagggcaggctgaacttcaccaccatgactgatattccagagggagcacccgtcatgactggtatctttacagttttgaattatcctgctattattctatttgattctggtgcatag

SEQ ID NO: 4998 - DNA, 668 bp, Zea mays
  Clone ID: TF_20507166
gatggctgatcagtcttctggtcagatgtttggggtgcgggagagatacgcacccaaactgacttcttcttctttggaggagcagcactcccagctctgcactgcggggggggggaccttatgagaagatagcctcttgaacaccgagaggcgtttgccgggctcttctaaacgatgccaaactgacctcttgcccaccgggtatgacctgtcaaattccagacggtcacgcaagcgacctggggtcttcagctgcagagggccggcctgaatggcagggcaccgagaggcttgatgtccgagcttgaaacacctaaaacagcgaggggggcaccgacacgaagccacgagatggtttggagagagacagttgaagcatctcccgcggaggttcacactggtccctctccgcgccgaagcacaacgagactgctttctgctcttcaccacctgccagccatcctccttgtcgaccggcaccaggtcttcacgccggcacagcctcctctccttgtcacagagcttcggccttgctatggtagaagtgcgtacttccaactccagggaggtggcgctagaagaggaaaggagggcctctttataggagtgcaccgtaccaccagaggaggaacccgaagcgttgtcatcccatcgctggaacttggacc

SEQ ID NO: 4999 - DNA, 5292 bp, Zea mays
  Clone ID: TF_ZM5054.C12.o3.fg
atggatcctaaagggaagggaatcgtgatcaacgacaaggagaaggagtccttcgtcaacgagccaagggatgacaagtccaacgactcaggctcgggccacaggcgcaaagatgggaagaagaagacaagacacatcaaggagatcgtctactacgacagcgatgagtctacttcctcccaaaaggacgacgaccacaacgagtacgagagaaagaaaccggtcaattcgaacttttcttttgattactctcgtattcctcaaagtactaatgctcatttattatctattccacttggtaaacctcctcattttgatggagagtactacggattttggagtcacaaaatgcgtagtcacttgttctctctccatcctagcatatgggagattgtagaaagtggaatgcactttgatagtacggatagtcccatgtttattaatgaacagattcataaaaatgcacaagctactactgtgttgctagcctctttgtgcagggacgagtaccataaggtgagcggcttggacaatgccaagcagatctgggacaccctcaagatctctcatgaggggaatgatgtcaccttgctcaccaagatggagttggtggagggcgagcttggacggtttgcaatgataaggggcgaggagccaactcaaacatacaaccggctcaagacccttatcaacaaaataaggagctacggaagcacgcgatggacggatcacgacgtcgtccgcctaatgctaaggtcctttaccgttcttgatcctcatttggtgaacaatattcgtgaaaatcctaggtacaccaagatgtcgcccgaagaagttctggggaagttcgtaagcgggcgaatgatgatcaaggaggcaagatatgtggacgacgcgttgaacggtcctattcatgagcctcaacccattgctctcaaggcaacgaggagcaaggaggcgctaccgagcaaggtggcgcaagttgaggcggtcgggctaaataatgaggagatggccctcatcattaagcgcttcaagacggcgcttaaaggtcgcaagggacagacaagcaagaccaagacaaaggagaagcgctcgtgcttcaaatgtggtaagattggtcatttcattgctaaatgtcccgataatgaaagtgaccaggaaaaggggaacaaaagggagaagaagaagcattacaagaaggccaagggcgaggcacatatcggaaaggagtgggattcggattgctcttcctccgactccgacaatgaaggactcgccgccaccgccttcagcaagtcatccctcttccccaacgagcgtcacacttgcctcatggcaagggagaagaaagtaagcactcatgatactagtacttatgcttcttcaagtgaggatgagtctagtgatgatgatgagatagattactcatgcttattcaagggattagatagatctaaaattaataagattaatgagttgattgatgctttgaatgacaagaatagattactagaaaaacaagaggatcttttatatgaggagcatgataaatttgttagtgcacaaaattctcttgctctagaaattaaaaggaatgaaatgctctctagtgaattatctacttgtcatgaatccatctctaaattaaaaagtgttaatgatgatttgaatgctaagttagaaatagctagtaaatcaacatcttgtgtagaaattgttgaaacttgcaataggtgtaaagattttgacattgatgcttgtagtgaacacctagtttcaatttccaaacttaatgatgaattggctagtcttaatgctcaacttaagactagcaagagtaattttgataagctaaaatttgcaagggatgcctacacaattggtagacacccctcaattaaggatggacttggctacaagaaggaagccaagaacttcacaagccataaggctcccatctccgccaaggagaaagggaaggcccctatggctagtagtgagcaaaagaaccatgcctttatgtaccatgataggagacaatctagaaatgcttataggagatgtaacgcatatgatgcttttgattctcatgacatgtttgcttctagttcttcttatgtgcatgatagaaatgttggttatgcatccgggggttcaagctggattatcgacagcggatgcacaaaccatatgacgggggagaagaagatgttcacctcctacgtcaagaataaggattcccaagattcaattatattcggtgatgggaatcaaggcaaggtaaaagggttagttgagtctcttggttacaatttgctatctgttagtcaactatgcaatatgggatataattgtctttttacaaatgtagatgtgtctgtctttagaagaagtgatggttcactagcctttaagggtgtattagacggcaagctttacttagttgattttgcaaaagaagaggccggtctagatgcatgcttaattgctaagactagcatgggctggctgtggcatcgccgcttagcacatgtggggatgaagaaccttcacaagcttctaaagggagaacacgtgataggtttgactaacgtacaattcgaaaaagatagaccttgtgcagcttgtcaggcaggtaaacaggtgggaggagcgcatcacagcaagaatgtgatgaccacatcaagacccctggagctgctacatatggacctcttcggacccgtcgcctatctaagcataggaggatgtaagtatggtttagttattgttgatgacttttcccgcttcacttgggtgttctttttgcaggataagtctgaaacccaagggaccctcaagcgcttcctcaggagagctcaaaatgagtttgagctcaaggtgaagaagataaggagcgacaacgggtccgagttcaagaaccttcaagtggaggagttccttgaggaggaagggatcaagcacgagttctccactccctacacaccacagcaaaatggtgtggtagagaggaagaacaggacgctaatcgatatggcgaggacgatgcttggagaattcaagacccccgagcgtttttggtcggaagccgtgaacacggcttgccacgccatcaacagggtctaccttcatcgcctcctcaagaagacttcgtatgagctactaaccggtaacaaacccaatgtatcttactttcgtgtatttgggagcaggtgctacattctagtgaagaagggtagaaattctaaatttgctcctaaagctgtagaagggtttttgttaggttatgactcaaatacaaaggcgtatagagtcttcaacaaatcatcgggtttggttgaagtctctagcgacgttgtatttgatgagactaatggctctccaagagagcaagttgttgattgtgatgatgtagatgaagaagatgttccgacggccgctatacgaaccatggcgattggagaagtgcggccacaggaacaagatgaacgagatcaaccttcttcctcaacaacggtgcatcccccaactcaagacgatgaacaggttcatcaaaaggaggcgtgtgatcaagggggagcacaagatgatcacgtgatggaggaagaagcgcaaccggcacctccaacccaagttcgagcggtgattcaaagggatcatcccgtcgaccaaattttgggtgacattagcaagggagtaactactcgatctcgattagttaatttttgtgagcattactcctttgtctcttctattgagcctttcagggtagaggaggccttgctagatccggattgggtattggccatgcaggaggaactcaacaacttcaagcgcaatgaagtttggacactggtgcctcgtcccaagcaaaatgttgtgggaaccaagtgggtattccgcaacaaacaggacgagcacggggtggtgacgaggaacaaggctcgacttgtggcaaaaggttatgcccaagtcgcaggtttggactttgaggagacgtttgctcctgtggctaggctagaatcaattcatatcttgctagcatatgtcgctcaccattctttcaggttgtaccaaatggatgtgaagagcgctttcctcaatgggccaatcaaggaggaggtgtacgtggagcaaccccttggcttcgaggatgaacggtaccccgaccacgtgtgtaagctctctaaggcgctctatggacttaagcaagccccaagagcatggtatgaatgccttagagacttcttaattgctaatgctttcaaggttgggaaagccgatccaactctttttactaagacttgcgacggtgatctttttgtgtgccaaatttatgtcgatgacataatatttggttctactaaccaaaagtcttgtgaagagtttagcagggttatgatgcagaaattcgagatgtcgatgatgggcgagttgaactacttccttgggtttcaagtgaagcaactcaaggacggcaccttcatctcccaaacaaagtacacgcaagacttgctgaagcggtttgggatgaaggacgccaagcccgcaaagactccgatggggaccgacggacacaccgacctcaacaaaggaggtaagtccgttgatcaaaaagcataccggtcaatgatagggtctttactttatttatgtgctagtagaccggatattatgcttagcgtatgcaagtgtgctagatttcaatccgatcctaatgagtgtcacttagtggcggtgaagcgaattcttagatatttggttgctacgccttgcttcgggctctggtatctaaaggggtctacctttgacttggttggatactcagattccgactatgctggatgtaaggtcgataggaagagtacatcagggacgtgccaattcttaggaaggtccctggtgtcgtggaactctaagaaacaaacctccgttgccctatccaccgctgaggccgagtatgttgccgcagggcagtgttgcgcgcaactactttggatgaggcaaaccctcagggactttggctacaatctgagcaaagtcccactcctatgtgacaatgagagcgctatccgcatggcggaaaatcctgttgaacacagccgcacaaagcacattgacatccggcatcactttttgagagaccatcagcaaaagggcgatatcgaagtgtttcatgttagcaccgagaaccagctagccgatatctttaccaagcctctagatgagaagaccttttgcaggctgcgtagtgagctaaatgtcttagattcgcggaacttggattga

SEQ ID NO: 5000 - DNA, 5567 bp, Zea mays
  Clone ID: TF_ZmC19623_3
atgcggagttcatcgtcttccggggctgagcccgagtccgagccctggggtcgggcgaagcggagttcgtcgtcttccggggctgagcccgagtccgagccctgggtcgggcaaagcggagttcgtcgtcttccggggctgagcccgagtccgagccctgggtcgggcgaggcggagcttcctatggcgctcgaggacggacttggctgctgtcagccgcactctgccgagtggcgcagcagtcggagcggcgcaggcagcgctgtccttttgtcaggccggtgtttcacttgtggtaacaccggacattatgccaagaattgcccaagaaaccagcagaggcaggggccgaatgccaaccagaaccaaggcaacaggcagaaggtgcaagtgaggcaaggcaggctgaacttcaccaccatggctgatatttcagagggagcacccattatgactggtatcttttcagttttgaattatcctgcaattattctttttgattctggtgcatcacatagttttatcagtgccaaatttagtgccaagtgccaattacctttccatcataccaataggggtattacaatttcaacaccaggaggcagggttgccacctaccaaatcaacaagaatgtgcctataaagtttggtagtttgataatcaaaaccaacctcctcattttgggtttggatagtgtggatatcatattgggaactgactggttaaccaaacatcaggccacgatggatattgcagctagggccattgaggtgcactcaccgacttgtggtgaaaccacattatatttgcctgaccagggttgtacccgttcttgtgccttcgttatgatagggtccccagtggaaaggatcccagtggtctgtgactacccagatgttttttcgaatgaattgccatggatgccacctgaccgagacatcgagttcgcgattgagttgcaacccgggactgctcctatctccaagagaccctataggatgcctcccgcggaattggcagaactgaagaagcaactgcaagagttgttggacaaggggttcattcgcccaagcacttcaccgtggggatgtccggccttatttgtgaagaaaaaggatgagagtttgaggatgtgtgttgactaccgccctctcaatgcggtgaccatcaagaacaaatacccgccgccccgcatcgatgttctgttcgatcagttggtgggagccaaggtattctccaagatagaccttcgctcaggataccatcagatcaagatccgtgccagcgatattcccaagacggctttctctaccagatatggactctatgagtttctggtgatgtcttttgggctgaccaatgccccggcttatttcatgtacttgatgaactcagtatttatgccagaattggacaagttcgtggtcgttttcattgatgatatcctagtctattccaagaatgaagatgaacatactgagcacctgcacatcgtgcttcaacgactgcgcgatcatcatctttatgctaagttgtctaagtgtgagttctggctgacggagattaaattcttgggtcacacaatttctcaggatgggatatcagttgatcctgagaaggtacaagaggtaatggattggaaacccccgactacagtgaggcagattcggagttttctgggattggcagggtattatcgacgatttattccggatttctccagaattgccaagccaatgactgaactgttgaagaagggagtcaaatttgagtggagccaaaagtgtgaagatgccttccataccttgaggcagcatttgacaacagccccagtgctggctcaacctgacaacaccaagccatttgaagtttattgtgatgcttctggtactggtttgggatgtgtcttgatgcaagagaacagagtgattgcttatgcttcccgagcactcaggccccatgagcagaactaccctacacatgatctagaattggcagctgtagttcatgctcttaagatatggagacactacttgatgggagctcactgtaacatctacactgatcacaagagtctcaaatacatcttcactcaggcagatctgaacatgaggcaaaggagatggttagagttgatcaaggactatgatttggaggtgcattaccatccaggcaaggccaatgttgtggcagatgccttgagcagaaaggcccagtgtaattgtatgagcatggatgtgggagtcaccaccctgtgtgatgagttgtgcaagctgaacctggaagttgtttcttcgggtgacctaagctatatctcggtggagcccacattgcaagagcaaatagtcagggcacaggttgaggataagggtgttcaggttatcaaggatatgatcaagcaaaaggcagaaaaatacaaatgtttccgacaggacagcaagggaattctatggtttggagatcgattggttgttcccaaggaccctgagctcagaaagaagatactggatgaagctcacctttcaaaattctccatgcaccctggtagcaacaagatgtatcatgatctcagatctctatattggtggactagaatgaaaagggaaattgccaagtacatatccgaatgtgacacctgccagagaatcaaggccagtcacttgaaggcagcaggccctttgcaaccccttcccataccatcttggaaatgggaggacatttgcatggactttatagtgggattacccaatacctccaggcaccatgattctatttgggttatcgtggacagattgaccaagacggctcatttcttgccagtacacaccacccacaagacggagaagtatgctgaaatttatgttgatcagatagtgaggttgcatggtattcccaagaccattatatcggacagaggagcactgttcgtggcacgcttttgggagaaactgcaagaatcacttgggacccatgtaatccgaagctcagcataccaccctcaaacagatggccagacagaaagggtgaatcagattttggaagacatgttgcgagcatgtgcactacattatggaaaggattgggacaagtgtctgtctttggcagagttttcctacaataacagctaccagtccagtctgaagatggcaccttttgaggcattatatgggagaaggtgtaggaccccactgaattggtctcaagcaggagaaagggaaatttttgggccagacttggtactcgaggcagaggcaaaggtcagggtcattaccaagaacctggaagctgctcaggccaggcaaaggagctatcatgacaagaggcggaagcctctacagtttgaggtgggagatcatgtctatcttaaggtatcacccaccaagggtgtccagagattcgggatcaagggcaagttagctcctcgctacattggaccctacgagatcaaggcaacttgtggacccgtagcctaccaattggaattgccacctcacatgtcagcagttcataatgtgttccatgtatctcagctgcggaaatgcgttcgcctacccactgaagtgctaccggaaccagacattgagatagaaccagacttatcctaccaagagtaccccgtcaaggtattagatcagaaggagagatcaactcgggcaaggtcgatcagaatgtataaggttcagtggagtcaccattcagcagaagaagctacatgggagactgaggattttctacgctctcgcttccccgactttctgcccaaaggagtcggtatgtaacctcgctgacggagagtacatcctcgtgtcggagcaaggagctgctaaggaggtagccccggatccagcacccgagcctgccccagaggatctgcctgccccagctttggaaggcaagccccggttttatgcaaaacttagataacaaggatagtctaagttgtggatttaatttaagaagggcttccttctgaagttgcaaagagaatgacattcgaagagcagttaacaagagaaacttgagtataaagaaagagtagcaccaacacaccttccagcaccctccaagggacgctacctaaatctcgggacgagattcctttaaggggggagggctgtaacaccccaggtgttactcagggtgtccatacaggagtttccccttttacccattatcacatgaagattaaattgggcaaagtgtaccacacttgagattctaggtcctaagcaagagtaatccactttggatgtcatgccctagcttatcatgcacatctaagtggggatctcccaaaaccctagagcaaaacccccataggtaattataaccctaattgaagccatgatcaaaagagcatgtaaacatcaagaccatggcttggacccaatataaaggttgtaatacactcaataacctaccattaatagtaaggaagtacccacaaaaagtttgcagaaaagtcctaaaaagatcaccaaaggttgaaaacaagggagaaatgcagattttgcctaagttaaaaaccaacccttgagcaaagatccctcatgttcaccttgatccccttttcaaaatctgtcgacccaattgacaaaaaggcgccaaactaaccctagaacaccctggaaagagatgacacctaccctagggcgctagacacgacttgacaccccttttgtctcggtttggaccctgctgacacagcaaacttctcccctctctatctctctgtccagaccaaatctcgacttggaacccacaacaaaaaggtaggatttggagcagagaagtgaccgtacacagtgaccttgccgagatatgcacgccatggcgctcaaaccggccgttgaaccttggcagacgcaaccatccacgtgttcgacgcatgctggcacccgggggcgcgctcagtgcacgccggtgcgcgaacccccgcgcgcccgcggccacccgtgaccacgcccgcgccaaggctataaagcccgccccagcgctcggttgcttcccccgttgcctcgtccgtacttcgccggacttgcccgagccagccgttgcctccggcgacctccccgcgacccgccagtgccgcccgaacgccaccgccgtggccaacccctctccagccatcctccgttcgatccaagcccccagaaagtttcctggtgaagccgtgaaccttgctcaagctttacccgggagcccgcgtcaccggagaggccaaatcgcgctcaccggagttaaagaactcgccggcgcacgtggaccgggtaaaccccttcgccattttccgattcctcgcgcgtatggcctctgtgtcatcccgtggagctcctcgtgcccattaattgaactcccccgccgtggtttggccggagcaggcatcgccgtcgacctccgccgcctgcgcacgtggaccgagcagctgctcgcaccatccccgtcgcctgtttcgtttcagactcccccccagtatattccttcccgatcagagaccccccgcacgtaatgtcatttgtattgccgtcatatttgtagctgatatatatagtgtatatttaagatc

SEQ ID NO: 5001 - DNA, 2102 bp, Zea mays
  Clone ID: TF_ZmC951_442
ttatgtagtgatccttgatgcaccataactcttcttaactcgatcaaccttgactttgcaagtcttcttcttcacccctggctttgggatcctggtctccttgaccttctcccgtgcactcggtacctcgaacctcttcttgcctccatccttggcttgatcgattgtctcactattcaccattaagataccgattttaaagcgccagaaccacatgaatatctttaccatgttatggtgtactttccatctaagtaggcggagttcctttacacttatgtctgatcctttatcctgaccttttcttgttgcaattactcgacttgtggaggtacccaagtcctgatcgctccatttcttgctcatcttcccttttccaccttgagacttaggtagatgaccatgcttaccacacatgtagcagaagcgtcgctcaacctgacttgacacttgttgtttgtctttttgcttagtgagggtcatcttggagggtgcacgtctttgattcttcatgagcggacatgaagtgatcatatggtccttatcgttgcatccaaagcatctcctcattccttcatccttgtctttgtgtggacaagacgcaatgaagtgacctaattccttgcacttgaagcacctcctttttcctctcccctttttgctcttggatgacatagagagatgatcagtgcaaacaacatgactaattgaatttttacctttttccttgttcatgttgatttcttcatttattgctttaggagcatccttcttatggagtttaacacttgctgcggtttctcccgtctcaagcttcttcaccatgcgtccgtggatatcttgaggaggttgagcaatgcgtcttctccttagttgctttgctttcttgttcccgcacaatttcttttgtgaccctgcagcttgatgcttattcaaacattggctttcttttgacaagcaggggttagcacatggtgatgaaatatctgaatgtgtacttgtgcaagaatgaagttcacatgaatttaagttcgtaattacgacctcatgagcaacttcaagcatgatatgcctatccaagagattatcatgataacaagacaataagtcatatttttgagtcagagcaaggttatcatgactcaacaattctactttattcctaagcatagaattttcaattttaagttgagcaacatcagataatacatcatgattatttctttgctcaaataaaatagattcataccgttggaccaaattatcatgagagcactttagctcctcatgttctttggtcatcttctccaggctgtcgttggttttgatgagagtctcctctagcctgagaagcgtctcgccttgttccttgttcctactcaacaacttaaccaagagcactttgtcttctttgttgagattggtgtagaaccgacgaatctcctcttcttccgcatcaccggtctcattttccctgtcattattattagtggaagcaatacaggaaaatgtaccttgtggtgatgaagactcatcctcgctatcatcctcatattcctcctcatcatcgctttcgtctccactatcattgttagcaataagacatttataactagtggaagacaaacctgtcggtgaggtggattcatcgtttggttgccatcgtttttcctctccctttgaaaggttagtaccacaagcaacatagggagtagaagtagtacaattggactcagaatattttattttaattctagtccatagatcatgagcatcaacaaataaatcactatcactactcatgatggcaaaataagcacctctagaaagagagtcaactaagatgttgcaagcatggtgattaagagatagacatcttagttcagtattagaagggtttttactaatattagagggaaaaatacttctactaaagatctgtctcaaatcaggatcaatatgcatgaaagcattataaatagagacagaccaagatttataattagaaccatcgcctaaaagaagttctagagttacctcttgtgacgacatcgtcatctccggacggctaagcccacacggagaggcatagctcgtatacc

SEQ ID NO: 5002 - DNA, 721 bp, Zea mays
  Clone ID: TF_LIB5117-011-Q1-PF1-F3
tgccgaggccgaaccaccaggcgcgacgagcactcccaggattggtcgccctaccatcagcgtggtcgcggccgcgatcgggattgccgttcctcgccccgcctttctcggtcgccggcccggtctggtcgcaccgagcaatccccaccttggtgttacaatccaccatagcgacatgctcaatttcccgcaccggcccccaacaaccgcaataccagggaagcatttgcagaagaagaaagccggccagcgccccggcggtgcggctgggcaagcatcctcggtcaccaacccccaccagcacccacaaccgtggctgctgctcctccgggggctacgcccgtggtgtgtttcaactgtggcgaggaggggcattgccaagtggagtgcaagcaacccccgacgtgcttcaaatgcaagaggatggaccatccgacattgctttgcccagaccagtcgacggaggggagctcatgctctttggctatgccctggatgatttgggcttcctccagatggacttgtcggagccggcggctacaccctccctgaccgccctcgtctcggccttggggggtaagacggcctctccggcgatcatcatggacgagcttcgacacctcttccgtccggattgggattgggaggtgactccgatctccgatcacgatttcacggcagtgtacccggacctggttagcctccgctaccacactcacag

SEQ ID NO: 5003 - DNA, 5064 bp, Zea mays
  Clone ID: TF_ZmC363_1
atcctgaggacggatgatttctacctgcaagaatatttttattgggagcatggtgggatcttactgcaaagttccttataatgctctttgaaagggaattaggcttacacctagttcctaaataattttggtggttgaattgcccaacacaaatctttggactaactagtttcccccgcggccggccgggcaccccggcgctgcctgcgcccgccgccgacggggagaccatccgctgggtccaatgggcggcgaatgccgcgccctcaatccaagttatgcgaatctaagacatttagctcactgcacagcctgcaaaaggtcttctcatctaaaggcttggtaaagatatcggctagctggttctcggtgcaaacataaaacacttcgatatctcccttttgctggtggtctctctgaaagtggtgacggatggctatgtgcttagtgcggctgtgttcaacaagattatccgccatgcggattgcactctcattgtcacataggagtgggacttcgctcaaattgtagccaaagttccgaagggtttgcctcatccaaagtagttgcgcgcaacactgacctgcggagacataatcggcctcagcggtggataggggaacggaagtatgtttcttatacctccaagacaccagggaccttcctaggaatttgcacgtccctgatggactcctcctaccacccctgaattcggcaaaatcagagactattcgagtaaggtggtaacgcaccttggtgaaccagctcaaaccttgtatgacaccatgatgcaccctcatccaccggacactgtagtggctgttgctggatcaggtgatgcagcttttatcgaggagatgggagtcctggaactcaacacgtcatatgagctggtttgtggaatacctctcgtttaccactgcgatcaatgttgaatatgtttcgcaagagatttgtgtagtagaattgttcaacaggcatgttgcagtggcctgggtttcgggtctgtttgcactgaaacttgctgacgacgagatcatacccttcaattacgtctcttatgcctccgaactggaggagtgcacaaaagatatcgtagataaatgtaaaggatttcctgtcagtttctctcctttgcagaactccatcaagcagctcgagagtgctgccaccaaaatttacaaagagaagaagttgctgcaagcagaaaactggagcctaaagacaagtaagtatacgctgaaagtcagggagataaacgaccggttgatgatggccgagcgagcgttcaccaaccgagaaggactggtcgggagaccatggtacaagcatatgatatatgcatcatcggatcaagacgactgggggaccaaagccttccctggtatagtctcggccatggacaaggctaagaagtccaacacaaccgagacgtggcgactgctgcagcacgagatttacagggttgccagggctgtgtccaaggcttctgcagtcctggatggtaaactaacatgatgtgcacgtgcactgcagattttcattctattctacatagatcgaagtacccgatggattcagtttccatttcgtttcttgaaagctgaagtgcgtggaatacctgtcaggcatcattggataattgtgtaaataatgaagaaatatgctcaagttagtgtcctatgaataaagaatagtggaatcatctctcacgatgattcccttgagagtatcgccaatcattttactggggtcataatctaacaaaaacccttctacagctttgggagcaaatttggaattcctacctttcttcacgttttgctgtggtgtgtagggagtggagaaatcgtgcttgattccttcctcctcaaggtactcctccacttgaagattcttgaactcggacccgttgtcgctccttatcgttttcaccttgagttcaaattcgttttgagctctccttaggaagcgctttagggtcccttgggtttccgttttatcctgcaaaaagaatgcccaagtgaagcgggaaaaatcatcaacaataacaagaccatacttacttcccccgatgttgaggtaggcgacgggtccgaagaggtccatgtgaagtagctccaaaggtcttgatgtggtcatcacattcttgctatgatgagaacttcccacctgtttacctacttgacaagcttcacaaggtctatcttttttgaaagttacattggttagacctaacacatgttctccctttagaagtttatgaaggttcttcatcctaacatgtgctagacggtgatgccacaaccagcccatgctagtcttagcgattaagcatgcatctagaacagcctcctccgaaaaatcaactaaatagagtttgtcgtctagtacacccttaaaagctaatgaaccatcactccttctaaagacagacacatctacattggtaaataagcaattgtaacccatattacatagttgactaacggacaacaagttatacccgagcgattcaactaagaacacattagatatggaatgctcggatgaaatagctatttttcctagtcctttaaccttgccttgattcccgcctccaaagatgatcgaatctttggaatctttgttcttgacgtaggaggtgaacatcttcttctcctctgtcatctggtttgtgcatccgcagtcgacaatccagcttgagccctcggatgcataaacccaactcttgttgggtcctacaaggttagtaacaatagccttagggacccaaatgcaagtcttgtctcccttgcatttggcccccaatttcctagcaaccactttcttatttttgcatgagagtacaaaatcagtgttgcaggcatgaaagacagtagcagattcattttgcattttcctaggcacatgatgaacaacattgtttctaggcatattcctactatgcacaaaggaagaacttgaaacaatcatggcatgtgaatcataagcattataactcctattataatgagcattcctagaaaattttctatcataaataaatgcatgattcttttgactactactatccataggagccttccctttctccttgttgagaatgggagccctttgacttgttaagttcttggcttcccttcgaaagccaagcccatccttaattgagggatgtctaccaatggtgtaggcatccctagcaagttttaatttgtcaaagtcatctttgcaagtcttaagttgggcattaatactttccacttcatcatttaattttgcaatagaattaaggtgctcaacacatgcatcaatattgaaatccttacacctattacaaatcacaacgtgctctacacaaggactagatttattaactacttctagcttagcatttaaatcatcattcaaaatcttcaagctagaaatagattcattgcaaatagataactcagaagatagtaattcattccttttaatctctaaggcaagagacttttgaacactaacaaatttgtcatgttcctcatacaagatgtcctcttgcctctctagcagtctatctttttcattcaatgcatcaatcaactcattaatcttttctactttagccctatctaatcctttgaacaagctagtgtaatctacttcatcatcactagagtcctcatcactagaagtagagtacttaggagtttctcgagcgtttaccttcttctcctttgccattaggcaagtatggcgctcgttggggaagagcgacgatttgttgaaggccgaggcggcgagtccttcatcatcggagtcagacgaagaacaatccgattcccactctttgccaaggtgcgcctcgcccttcgccttcttgtaggccttctttttctccctcttcccatgtctttcgtcttcctggtcattttcattatcgggacattgagcaataaaatgacctgtcttaccgcacttgaagcaggaacactttccttttgccttgttcttgtttgagtactccttgcgtcccttcaatgctatcttgaagcgcttgataatgagggccatttcatcctcgtttagcccggccgcctcaacttgcgccaccttgctaggtagcgcctccatgctacttgttgctttgagagcaacggtttgaggctcgtagatgggcattggaccattcaatgcctcatcaatgtatcttgcttccttgatcatcatacgcccgcttacaaactttccgagtatttcctcgggcgtcatcttggtgtacctaggattctcacggattgagttcacaagatgaggatcaagtacagtgaaggacctgagcataagtcggacgatgtcgtggtctgtccatctcgtgcttccaaggctcctaatcttgttgaccagggtctttagcctgttgtacatttgggttggctcctcccccctgatcattgcgaaccttcccagttcgccttccaccaactccatcttggtgatcatggtggcgtcattcccctcatgagaaatcttgagggtgtcccaaatttgcttggcattatctaagccgctcaccttgtggtactcgtccctgcacaaggatgctagcaaaacagttgtagcttgtgcatttttatggatttgctcattaatgaaaacggggttgtcagtgctatcaaaaagcatttcgttttcaacgatctcccaaatacttggatggagagagaataggtgactacacattttgtgactccaaaatgagtagtcttctccatcaaagtgcggaggtttcccaagtggaattgaaagtaaatgagcattggagttaaacggaatacgagaataatcaaaagaaaagtttgagttaaccgatttctttttctcgtcgtcgtcgtctctttgggaagaagaagattcgtcgctgtcgtagtagactatcttcttgatacgcctcttcttcttcccgtccttcttcttatgatttgagccagagtcagtgggcttgtcttcccttggctcattgaggaaggactccttatccttgtcattgaccaccgtcccctttcccttaggattcat

SEQ ID NO: 5004 - DNA, 4125 bp, Zea mays
  Clone ID: TF_ZM4793.C2.o5.fg
atggagttggtggagggtgagctgggaagattcgcgatgatcaggggagaggagccaacacaaacgtacaataggttcaagaccctggtcaacaagattaggagctatggaagcacaagatggacggaccacgacgtcgtccgacttatgctcaggtcttttaatgttattgaccctcatcttgtgaacctcatccgtgaaaatctcaagtacataaagatgacgcccgaggagatactcggaaagtttgtgagcgggagcatgatggtgaaagaagcccgatatgtagacgacgcacttaatggtccattacccgtctacgagcctcaacccgttgctctcaaagcaacaagcagcagggaggcgctaccaagcaaggtggcacaagttgaggcggtcgggctaaacgaagatgagatggctctaatcatcaagcgtttcaagaccgcgctaaaaggtcgcaaggagtatcccaacaagagcaaagcaaagggaaagtgctcctgttttaaatgcggtaagactggtcattttatagcacaatgccccgataataacaatgaccaggaacaagaaaagcatgggaagagggagaagaagaaggcctacaagaaggcaaagggtgaggcgcaccttggcaaagaatgggatttggactgctcttcttccgactccgacgaagaagaacttgctgcctcagccttcaacaagtcctctctctttcccaatgaacgccacacttgcctcatggcaaaggagaaaaaggtaagcgttcgagaaacccctaagtatactacttcaagcgatgatgattctagtgatgatgaagtagattataccgattcatttaagggtttagatagagcaaaagtagataaaattaatgagttaattgatgctctaaatgaaaaagatagattgctagagaagcaagagggcattttatatgaagaacatgacaaatttgttagtgtacaaaagtctcttgctttagaaactaaaagaaataaaatgttatcgtctgaactgtctgtgtgccatgaatcaatatctagtttaaagattttgaataatgatttaaatgttaagctagaggtagccaataaatctagttcatgtgtagaacatgttgccatttctaataggtgtaaggattttgatgttgatgcttgcgttgaacaccttacttctattaccaaattaaatgataaggtggcaagtcttaatactcagcttaagacttgcaaaaatgattttgataagctaaaatttgctagggatgcctacaccattggtagacaccactcaattaaggatgggcttggttttcgaaaggaagccaagaacttaacaagccaaaaggctcccattctcgccaaggagaaagggaagggccctatggctagtagcgttcaaaagaatcatgctttcctgtataatagaaaaattgctagtcataataggagatatgatcatgatgcttgtttatgcatccgggggctcaagctggattatcgacagcggatgcacaaaccacatgacgggggagaagaagatgttcacctcctacgtcaagaacaaggattcccaggatacaatcatatttggagatgggaatcaaggcaaggtcaaagaaggagcgatggttcattagcgtttaagggtgtactagatggcaaactctacttagttgatttttcgaaagaggaggccgatctagatgcatgcttaatctctaagactagtatgggctggttgtggcatcgccgtctagcacatgttgggatgaaaaacgttcacaaacttctaaagggagagcatgtgttaggactaaccaatgtatgtttcgaaaaagatagaccttgtgcagcttgtcaagcagggaaacaggtgggaagcactcatcacaacaagaatgtgatgacatcatcaagaccactggagctactacatatggacatctttggacccgtcgcctaccttagcatcgggggaacaaaatggtgtggtagagaggaagaacaggacgctcatcgacatggcgaggacaatgcttggagagtccagacgcctgagcggttttggtcagaagttgtgaacacagcttgccacgccataaaccggctctaccttcatcgcctcctcaagaagacctcgtatgaacttcttaccggtaacaaacccaatgtctcttactttcgtgtatttgggagcaaatgctacattttggtgaagaaatgtagacattccaaatttgctcccaaagttgtagaagggtttttactagggtatgactcaaatacaagggcatatagagtcttcaacaaatcatcgggtttggttgaagtctctagcgacattgtatttgatgagaataatggctctccaagagagcaagttgatcttgatgatatagatgaagatgatgttccgacggccgcaatgcgcgccatggcgattggagatgtgcgaccacaggaacaacaaaagcaagatcaaccttctacctcaatgatggtgcaaccccaactcaagatgatgaacaggttcctcaagaagaggcgtgtgatcaagggggagcacaagaagaacaaacctttcagggtagaagaggccttgcaagatccggactgggtgttggccatgcaggaagagctcaacaactttgagaggaatgaagtttggagcctggtgccacgtccaaagcaaaactttgtgggaaccaagtgggtgttccgcaacaagcaagacgagcacggggtggtgacaagaaacaaggctcgacttgtggcaaaaggttatgcccaagtcgcaggtttggaattcgaggagacttttgctcctgtggctaggttagagtctattcgaatattattagcctatgttgctcaccactctttcaggttgtttcaaatggatgtgaagagcgctttcctcaacgggccaatcaaggaggaggtttacgtggaacaaccccctggctttgaggatgacaggtaccccgaccacgtttttaagctctctaaggcgctctatggacttaagcaagccccaagagcatggtatgaatgccttagagatttcttaattgctaatgctttcaaggttgggaaagccaatcccactcttttcactaagacttgtgacagtgacctctttgtgtgccaaatttatgtcgatgacataatatttggttctactaatcaaaagtcttgtgaggagtttagcagggtgatgacacagaaatttgagatgtcgatgatgggagagttaacgtacttccttgggttccaagtgaagcaacttaaggatggcactttcctctcccaaacgaagtacacacaagatcttctcaagcggtttgggatgaaggacgccaagcccgcgaagacaacaatgggaaccgatggacatgtcgacctcaagaaaggaggtaagtccgttgatcaaaaggcataccgatctatgatagggtcattactttatgtatgtgctagtagaccggatattatgcttagcgtatgcatgtgtgctagatttcaatccgatccaagggaatgtcaccttgtggccgttaagcgaattcttagatatttagttgctacgccttgcttcgggatctggtatccaaaggggtctacctttgacttgattggatactcagactccgattatgctggatgcaaggttgataggaagagtacatcagggacgtgccaattcttaggaaggtccctggtgtcttggagttctaagaaacaaacctccgttgccctatccaccactgaggccgagtatgttgccgcaggacagtgttgcgcgcaactactttggatgaggcaaaccctctcggactttggctacaatctgagcaaagtcccactcatatgtgacaatgagagtgcaatctgcatggcggataatcctgttgaacacagccgcactaagcatatagacatccggcatcactttttgagacaccaccagcaaaagggagatatcaaagtgttctatattagcaccgagaaccagctagccgatatctttaccaagcttttagatgagaaaaccttttgcaggctgcgaagtgagctaaatgttctagatttgcgtaacttggattga

SEQ ID NO: 5005 - DNA, 4683 bp, Zea mays
  Clone ID: TF_ZM5106.C2.o13.fg
atggatcctaagggaaaggggatggtggtcaacgataaggagaaggaatccgtcttcaacgagccaagagacgataagcccactgactctggctcaagtcacatgaaaaaggacgagaagaagaagagggacgagtaccacaaggtgagcggcttgtataatgccaagcaaatttgggacaccctcaagatctctcatgaggggaatgacgccaccatgatcaccaaaatggagttggtggaaggcgaactaggaaggtccttcactatacttgatcctcatcttgtgaattctatccgtgaaaatcctaggtacaccaagatgacgcccgaggaaatactcggaaagtttgtaagcgggcgtataatgatcaaggaagcaagatacattgatgaggcattgaatgcaacaagtagcagggaggcactacctagcaaggtggcgcaagttgaggcggccgggctaaataaggatgaaatggccctcattatcaagcgcttcaagaccgcattgaagggttgcaaggagtactcaaacaagaacaaggcaaagggaaagtgttcctgcttcaagtgcggtaagacaggtcattttattgctcaatgtcccgataatgaaaatgaccagggagacgaaagacatgggaagagagagaacaagaaggtttacaagaaggcgaagggcgaggcacaccttggcaaagagtgggactcggattgttcttcgtccgactccgacgacgaaggactcgccgcctcggccttcaacaaatcgtcgctcttccccaacgagcgccatacttgcctaatggcaaaggagaagaaggtaaatgctcaagaaactcctaagtactctacttctagtgatgatgactctagtgatgatgaagtagattacactagcttgttcaaaggattagatagagctaaagtagaaaagattaatgagttgattgatgcattgaatgaaaaagatagactgctagagaggcaagaggacatcttgtatgaggaacatgacaaatttgttagtgttcaaaagtctcttgccttagagattaaaaggaatgaattactatcttctgaattatctatttgcaatgaatctatttctagcttgaagattttgaatgatgatttaaatgctaagctagaggtagttaataaatctagtccttgtgtagagcatgttgtaatttgcaatagatgcaaagattttaatgttgatgtttgtgatgaacatttaatttctatttctaaattaaatgatgaagtagcaagtcttaatgctcaacttaagacttgcaaaagtgattttgataaattaaaatttgctagggatgcctacactgttggtagacacccctcaattaaggatgggcttggctttaagagggaagccaagaacttaacaagccaaagggctcccattttcaacaaggaaaaagggaaggctcctatggctagtaatagtcaaaagaatcatgcatttatttatgatagaaaattttctaggaatgctcatcataataggagttataatgcttatgattcacatgccatgattgtttcaagttcttcctttgtgcatagtagaaatatgactagaaacaatgttgttcatcatgtgcctaagaaaatgcaaaataaatctgctactgtttttcatgcctgcaacactgattttgtactttcatgtaaaaataagaaagtggtcgctaggaaattgggggcaaaatgcaagggagataaaacttgcatttgggtccctaagactattgttactaaccttgtaggacccaacaagagttgggtttatgcatccgggggctcaagctggattatcgacagcggatgcacaaatcacatgacgggggagaagaagatgttcacctcctacgtcaagaacaaagattcccaagattcgatcatctttggagacgggaatcaaggcaaggttaaaggactaggaaaaatagctatttcatccgagcattccatatctaatgtgttcttagttgaatcgctcgggtataacttgttgtccgttagtcaactatgtaatacgggttacaattgcttatttaccaatgtagatgtgtctgtctttagaaggagtgatggttcattagcttttaagggtgtactagacgacaaactctatttagttgatttttcgaaggaggaggccggtctagatgcatgcttaatcgctaagactagcattggctggctgtggcatcgccgtctagcacatattgggatgaagaaccttcataaacttctaaagggagaacatgtgttaggtctaaccaatgtaactttcaaaaaagatagaccttgtgcagcttgtcaagcaggtaaacaagtgggaagttctcatcatagcaaaaatgtgatgaccgcatcaagacctttggagctacttcacatggacctcttcggacccgtcgcctacctcagcatcgggggaagtaagtatggtcttgttattgttgatgatttttcccgcttcacttgggtattctttttgcaggataaaacagaaacccaagggaccctaaagcgcttcctaaggagagatcaaaacgaatttgagctcaaggtgaaaaagataaggagcgacaacgggtccgagttcaagaatctgcaagtggaggagtaccttgaggaggaaggaatcaagcacgagttctttgctccctacacaccacagcaaaacggtgtggtagagaggaagaacaggacgcttatagacatggcgaggacgatgcttggtgaattcaagactcccgagcggttttggtcggaagctgtgaacacagcctgccacgccataaaccgggtctaccttcatcgcctcctcaagaagacgtcgtacgaacttctaaccggtaacaaacccaacgtatcatactttcgtgtatttgggagtaaatgttatattctagtgaagaaagttaggaattccaaatttgctcccaaggctgtagaagggtttttgttaggatatgactcaaatacaaaggcgtatagggtcttcaacaaatcatcgggtttggttgaagtctctagcgatgttgtatttgatgagactaatggctctccaagagagcaagttgatcttgatgatgtagaggaagatgacgttccaacggctgcaatacgcaccatggcaattggagatgtgcgaccacaggaacaaaaagagcaagatcaaccttcttcctcaacaatggtgcatcccccaactcaagacgatgaacagatacaagcaaagcaagatttaaggatacgtaccttcgcgactggccgcctgggactggctagcccgcctggctggctagtggctgcgcgcctgccacttgctgtctgggactggctgtcctactcgtttgtctcttttattgagcctttcagggtagaagaggctttgctagatccagactgggtgttagccatgcaggaagaactcaataacttcaagcgaaatgaagtttggaccctggtgccacatccaaagcaaaatattgtgggaaccaagtgggtgttccgcaacaagcaagacgagcacagagtggtgacaaggaacaaggctcgacttgtggcaaaaggttatgcccaagtcgcaggtttggactttgaggagacttttgctcctgtggctaggctagagtctattcgcattttgttagcctatgtcgctcaccattccttcaggttgttccaaatggatgtaaagagcgccttcctcaatgggccaatcaaggaggaggtgcacgtggagcaaccccctagctttgaggatgaacggtaccccgaccatgtgtgtaagctctctaaggcgctctatggacttaagcaagccccaagagcatggtatgaatgccttagagattttctaattgctaatgctttcaaggttgggaaagccgatccaactcttttcactaagacttgtgatggtgatctatttgtatgccaaatttatgtcgatgacataatatttggttctactaaccaaaagtcttgtgaagagtttagcagggtgatgacacagaaattcgagatgtctatgatgggcgagttgaactacttccttgggtttcaagtgaagcaactcaaggacgacaccttcatctctcaaacgaagtacacgcaagacttgctcaagcggttcgggatgaaggacgccaagcccgcaaagactccaatgggaaccgacggacatgtcgacctcaacaaaggaggtaagtccgttgatcaaaagacatatcggtctatgataggttctttgctttatttatgtgctagtagaccggatattatgctaagcgtatgcatgtgtgctagatttcaatccgacccaagggagtgtcaccttgtggccgttaagcgaatacttagatatttagttgctacgccttgcttcgggatctggtatccaaaggggtcaacctttgacttgattggatattcagattccgattatgctagatgcaaggtagataggaagagtacatcagggacgtgccaattcctaggaaggtccctggtgtcttggagttctaagaaacaaacttccgttgccctatccaccgctgaggccgagtatgttgccgcaggacagtgttgtgcgcaactactttggatgaggcaaaccctccgggactttggctactga

SEQ ID NO: 5006 - DNA, 4635 bp, Zea mays
  Clone ID: TF_ZmC951_321
ctaagggtttgcctcatccaaagtagttgcgcgcaaaaatgtcctgcggcaatatactcggcttcggcggtagaaagagctacggaattttgcttctttgaagcctaagacaccaaggaccttcccaagaactggcaagtccccgatgtgctctttcttttgatcgacggatttacctccctcgtcgaggtcgagatgcccattggttcccatgggtgtcttgatgggtttggcatccttcattccaaacttgcttagaatatcttgagtatacttcgtttgacttaggaaggtaccctcttggagttgcttcacttgaaaacctaagaagtacttcaactcccccatcatagacatctcgaatttttgtgtcatgatcctactaaattcttcacatgtagactcgttagtagacccaaatataatatcatcaacatagatttggcatacaaacaagtcattttcaagagttttagtgaataaagtaggaccggcctttccgactttgaatccattagtgataaggaaatctctaaggcattcataccatgctcttggggcttgcttgagcccataaagcgccttagagagtttataaacatggttagggtactcactatcttcaaagccgggaggttgctcaacatagacctcttccttgattggtccattgaggaaggcacttttcacgtccatttgataaagcttaaagccatggtaagtagcataggccaataatatgcgaattgactcaagcctagctacgggtgcataggtttcaccgaaatccaaaccttcgacttgtgagtatccgttggccacaagtcgagctttgtttcttgtcaccacaccatgctcatcttgcttgttgcggaagacccatttggttcctacaacattttggttaggacgtggaactaaatgccatacctcattcctagtgaagttgttgagctcctcttgcattgccaccacccaatccgaatcttgtagtgcttcctctaccctgtgtgcctcaatagaggaaacaaaagagtaatgctcacaaaaatgtgcaacacgagatctagtggttacccccttatgaatgtcgccgaggatggtgtcgacggggtgatctcgttggattgcttggtggactcttgggtgtggcggcctttgttcttcatcctccttgtcttgatcatttgcatctcccccttgatcattgccgtcatcttgaggtggctcatttgcttgatcttctacttcatcaacttgagcttcatcctcattttgagttggtggggatgcttgcgtggaggaggatggttgatcttgtgcatttggaggctcttcggattccttaggacacacatccccaatggacatgttccttagcgcgatgcacagagcctcttcaatacctatctcatcaagatcaacttgctctacttgagagccgttagtctcatcaaacacaacgtcacaagaaacttcaacttgcccagaggacttgttaaagactctatatgcccttgtgtttgaatcatatcctagtaaaaagccttctacagtcttaggagcaaatttagattttctacctcttttaacaagtataaagcatttgctaccaaagactctaaaatatgaaatgttgggctttttaccggttaggagttcgtatgatgtcttcttgaggattcggtgtagatataaccggttgatggcgtagcaggcggtgttgaccgcctcggcccaaaaccgatccgaagtcttgtactcatcaagcatggttcttgccatgtccaatagagttatattctttctctccactacaccattttgttgtggcgtgtagggagaagagaactcatgcttgatgccctcctcttcaaggaagccttcaatttgagagttcttgaactccgtcccgttgtcgcttcttattttcttgatccttaagccgaactcattttgagcccgtctcaagaatccctttaaggtctcttgggtttgagatttttcccaaacggttttgggtcctttggcattagaaacaagaactttgggtacccaaacacaagtcttggagcccttgtgtttgcccccaacaaacttggcaactacgttgctggatttgttagttaaagcatatgatgcattaaaagttttgaatgaaatgtcatgatcatttgatgcattaggagttctcttcttaggcaacttagcacgggttggttgcctagaactagatgtctcacccttatacatgaaagcatggttagggccagagtgagacttcctagagtgaatcctcctaattttgctctcgggataaccggcagggtacaaaatgtaaccctcgttatcctgaggcatgggagccttgccctttacaaagttagacaatcttttaggaggggcactaagtttgacattgtctcccctttggaagccaatgccatccttgatgccagggcgtctcccattataaagcatactacgagcaaatttaattttttcattctccaagttatgctcggcaattttagcatctaattttgctatatgatcattttgttgtttaattaaagacatgtgatcatgaatagcattaatatcaacatctttacatctagtacaaatagatacatgctcaacgatagatgtagagggtttgcaagattttaattctacaaccttagcatgcaatatatcgttttcacttctaaggttagaaatagtagcattgcaaacatcaaaatctttagccgtagcaattaatttttcattttcatttctaaggctaacaagagataaattcaattcttcaatcttagcaagcaaatcatcattatcattcctaagattaggaattgaaacattacaagcatttgaatcaaccttagctaacaaattagcattttcatttctaaggttgtcaatggtctcatggcaagtgcttagctcactagatattttttcacatttctcaacttctagagcataagcatttttaactttaacatgcttcttgttttctttaataagaaagtcctcttgggagtccaagagatcatccttctcatggatggcactaattaattcatttaatttctccttttgttgcatgtttaagttagcaaaaagagtgtgcaagttatcttcctcatcactagcattttcatcactagaggattcatatctagtggaggatttagatttaaccttcttctttttgccgtcctttgccatgaggcacttgtggccgacgttggggaagagaagtcccttggtgacggcgatgttggcggcgtcctcgtcgtcggaggagtcgctagagctttcgtcagagtcccactcccgacaaacatgggcatcgccgcccctcttcttgtagtatttcttcttctcctttcttctccccttcttgtcgtcgcccctgtcactgtcactagatataggacattttgcaataaaatgaccgggcttaccacatgtgtaacacactttcttggagcgagatttgtagtccttccccttcctttgtttgaggatttggcggaagctcttgatgacgagcgccatttcctcattgtcgagcttggaggcgtcgattggttgtctacttgatgtagactcctccttcttctcctccgtcgccttgaatgcgaccggttgtgcttcgggtgtggaggaggtgccttgctcgatgattttctttgagcctttaatcattagctcaaagctctcaaattttcctatgacttcctcgggagacattagcttatatctaggatcacctcgaattaattgaacttgtgtagggttaaggaatacgagggatctaagaataaccttgaccatctcatggtcatcccatttttcgctcccgaagttgcgcacttggtttaccaaggtcttcaagcggttgtacatagcttgtggatcctccccttggtgaagcatgaagcgaccgagctccccctcgatcgtttcccgcttggtgatctttgtcacctcgtctccctcgtgcgcggtcttgagtacgtcccaaatttccttcgcactttttaacccttgcaccttattatactcctctcgacttagagaggcgaggagtatagtagtggcttgggagttaaagtggtgaatttgggccacctcgtccgagtcgtagtcttcatcccctatggatggtacctgtacaccaaactcaacaacattccatatacttttgtggagtgaggttagatgaaatttcattaaatcactccacctagcataatcttcaccgtcaaaggttggcggtttgcctaatggaacggaaagtaatggagtatgtctataggtacgaggataatgtaaggggatcttactaaacttcttacgctcatggcgcttcgaagttatggagggcgcgtcggagccggaggtagaaggtgatgaagtgtcggtctcgtagtagaccactttcctcatcttctttattttgtcgccactccgatgcgacttgtgagaagaagtcttattttccttcttcttctccttcctcttctccttgttgcgagactcttccgatgaagccttcccatggcttgtagtgggcttgtcgccggtctccatctccttcttggcgagttcttccgacat

SEQ ID NO: 5007 - DNA, 1605 bp, Zea mays
  Clone ID: TF_ZmC14166_298
atgggcatttggtggttgagggctataaatatcccccaaccaccacaactccaagcatccaagttttctgaagttctcattcaatacaagaatcatgccaagagggagatcgtgaccggagacaagctcgcaagctcagggaggactctctcaagggagtccgacaacaagcacaaggaggaatcctcttcctccatcaagtcccatcaaagaggcgacaagaaaaaggagatgaagaaagtggtctactacaagagcacgaagtatagtaagatgcctcttcgatatccctgtatttctaagcgcgctcctctactttctgttccattaggaaagccaccatattttgatggtgaagattactctatgtggagtgataaaatgaggcatcatctaacctcactccacgaaagcatatggaatattgttgagtttggagcacaggtacctatggtagggaacgagggctacgactcggacgaggtcgcccaaattaggcactttaactcccaagccacaactatactcctcgcctccttgtgtcgagatgagtataataaggtgcaagggttaaaaagtgtcaaagaaatttgggacgtcctcaagacggcgcacgaaggggacgaggtgaccaagatcaccaagcgcaaaacgatcaagggagaactcggtcgattcatcctcaacaagggagaggagccacaagcgatgtacaatcggctcaagaccttggtgaaccaagtgcgcaacctcgggagcacaaaatgggatggccatgaaatggtcaaggttattcttagaacacttgtttttcgtaatcccactcaagtgcaactaatccgtggagatcctagatataaacagatgtctcccgataagcttccgccaaatcctcaagcaaagagggggaaggactacaaaccccgctccaagagggtgtgctacaagtgtggtaagcccagtcattttattgctaaatgtccaaattctagtgatagtgataggggcgatgacaagaagaggaagaagaaagagaagaagagatactacaagaagaagggcggcgatgcccacgtgtgtcgggaatgggacttcgatgagagctccaccgacccctccgccgacgaggacgccgccaacatcgctgtcaacaagggcctcctcttccccaacgtcgaccacaaatgtttcatggctaaggatggtaagaaaaagaagcatggaacaaaaggaaaaaaattaaatgaattaatagaagctattcatgagaaggatgatctcttggaaagccaagaggacttccttattaaagaaaacaaaaaacatgtcaaattgaaaaatgcttatgctcaggaagtagaaaaatgtgaaaacttgactaaggagcttagcgtttgccataattcaattaccagtcttagaaatgagaatgctaatctaaatgctaagattgatgaattgaatatttgcaatgaatcaatttctagccttagaactgaaaatgctagtttagtttctaaggttaaagagttaaatgtttgcaatgattctatttcctgtcttagaaatgagaataccatattacatgctaagatagaagattaa

SEQ ID NO: 5008 - DNA, 2110 bp, Zea mays
  Clone ID: TF_ZmC4916_442
ccgaaccatgggataaaccactgggccatctctgtgattgatctcttgtggttattgtgttttgttgagactcctctctagccacttggcaatactgtgctaacgtttaaccaagtttttgtggcattaagttcaagttttacaggatcacctattttccccccccctctaggtgctctcaattggtatcggagccgttctcttcaagaaagggactaaccgcccaaagagatggatcctaagggcaaggggattgtgatcaatgacaaggagaaggagtcattcatcaacgagcccaaggatgacaagcctaccgactcgggctcgggccacaaatgcaaagatgggaagaagaagaagacaagacgcatcaaggagatcgtctactacgacgacagcgatgagtccacttcttcccaaaaggacaacgacgacaacgactacgagagaaggaaaccggttaattcgaacttttcttttgactactctcgtattccgcaaagtacaaatgctcatttgctctccattccacttggcaaacctcctcactttgatggagaggactacggattttggagccacaaaatgcgtagtcacctgttctatctccatccgagcatatgggagattgtggaaagtggaatgaaatttgatagctcggatagtcctatgtttatcaatgaacagattcatagaaatgcacaagctactactgtgttgttagcctctttgtgcagggacgagtatcataaggtgagcggcttggataatgccaagcagatctgggacaccctcaggatctcacatgaggggaacgacgtcaccttactcaccaaaatggagttggtggagggcgagcttggaagattcgcaatgatcaggggagaggagccaacccaaacatacaaccggctcaagaccctcatcaacaagataaggagctacggaagcacacaatggacggaccacgacatcgttcgtctaatgctaaggtcctttactgtacttgatccacatttggtgaacaatatccgtgaaaatcctaggtacaccaagatgtcgcccgaagaagttcttggaaaatttgtaagcgggcgaatgatgatcaaggaggcgagatatgtcaacgacgcgttgaacggtccaatccatgagcctcaacccattgctctcaaggcaacgaggagcaaggaggcgctacctagcaaggtggcgcaagttgaggcggctgggctcaatgatgaagaaatggccctcatcatcaagcgcttcaatacggcgctaaagggtcgcaaggggcagccaagcaagaccaagacaaaggggaagtgctcatgcttcaaatgtggtaaggttggtcattttattgctaattgccccgacaatgatagtgaccaggaacaagagaacaagagggagaagaagaagaactataataaggcaaaaggcgaggcacatcttggcaaggagtgggactcagattgttcgttgtccgactccgacaacgaaggactcgccgccactgccttcaacaagtcatccctcttccccaacgagcatcacacttgcctcatggcaagggaaaagaaggtaagcactcataatactagtacttacgcttcctcaagtgatgaagaatctagcgatgatgaagtagactattcatgtttattcgagggcctagatagaactaaggttgataagattaatgaattaattgatgcattgaatgataagaataggttattagaaaagcaagaggatcttttgtatgaagaacatgataagtttgtagaggcacaaaaatcccttgctttagaaattaaagggaatgaaatgctttcttgtgaattgtctacatgccatgactctatttctagcttaaagagcataaatgatgatttgactgctaagttagaaataggtaataaatcaacatcttgtgtagaacatgttgcaatttgcaataggtgtaaagattttaatgttgatgcttgtagtgaacatctagtttcaatttctaatttgaatgatgaagtggctagtcttaatgcccaacttaagactagcaagagtgtatttacaaactaaaattgcaagggatcccgaa

SEQ ID NO: 5009 - DNA, 2661 bp, Zea mays
  Clone ID: TF_ZM4578.C2.o8.fg
atggagtggataagaaagacagagaattttattgatcgtgcttttgctttgtcaagaggcacggatgtgcgatgtccatgtagtatgtgtcgggtttgtagatgccaagacaagagaactctgtcggggcacctttgcaaatatggctacatgcctaactatgaagtctgggtgtatcacagcgaggagttgccccgtgaaaatgtgtttgaagcccacaacaatgatgacgtggaatatgatagaatggaagagatgcttcaagatttaagggaggatcctgattttgtgtttccaccacatagtaaggagctacctccagatgttaaaaagttctttgacctccttaaggctgcagaagaaccattgcatgaacacacaaaagtttccatccttgctttcgtgactcgacttatggctattaagtctaagtacgtgttctcgaacaattgttacaacgagctcttgatcttaatcagcgaagtgtttccaccaaatcacaagatgccgaaagacgtgtatcaatgcaggaaactgctctctggtctagatggggtagagacagaggaggggagacaggtgggaaatgttgatgatgaggtagagacagaggaggggagacaggtgggagatgatgatgaggtagagacagaggaggggaggcaggtgggagatgatgatgaggtagagacagaggaggcagagacatggtggggatgccatgatactggtggttttggacatgatagccatagtggatggcgtgaatggcctgaggatgcaagtggatggccaagagatggagggtcaggagttgggggagctagtgggtcaagggaaggagaagcttgtggttttggaagtgggggagttggaggggcttgggtggatagtagtttcactggcacaggtcgtcgaaggcaagtaaagaaagtgttgggcaacatatgtcgtatgaaatggcctggattggtgatagaggatggtaaggaggtccctgtcacaagatgggatcaatatgcccttgcaataaatgcgcaacatgggaatgcacaagctgcagtttggcacgacttctggaaacattacaagttgcctgaaggagatactcatacggaacacgcacactccgtgttccataggaatgcggcaagtgttgttggggatatgatgtactatgctcgaatccagcattcgattccatggatagctgtcaatgatgctgcttggcatgcgttatgtcgttactgggcttcagttgaattcaaggcaaagtctgtgcgacacagttccaatcgtggaaccgagtcgtatcacaggtatggaggtgatgatcactttcgtttggcaaaacgaatggaagctagcactggtgcagtgcccagtgatgttcaaatataccttagggggcacagaggaccagatcctgcaaatccagatgtgttgtacagccaaaaggcaacagatcgtgtggctgcatatggcgaggcgatgactagtcagcacggaccagactatgactggaggacctcacctattgatcctcaggctgtgtatgcaagtggtggaaaagctcatggaaggtacacaatgtttgctaacgtcatcgactcgagccagacccctccagctaccttgccgacgcatgaacaagaggacaggttagactttgtcgataccctcttgaatagtggaggtatcgatggtgatcggcgaccccatcttgttaatagttgtcataagaaagttgtggagatcaataaggtccaaaagaaaagaaaacaccctcaaactcatgcatcaacaaagaataaacaacggaaagagaccacaggaaagataagttatgcagtgacaggaaccattccatatgatgatgcagtaatttttggaacactagtcattcacacaaccatcgccatcgtgttgtatgatcctcgtacgacacattcctttatcagttcccagtttgcaacaaagtatggtatctttaagtgtcccttaagatcaagaaagaccatcagtacacccgaaggaaaaacgttagtgaactacatatgtccgaaagtaagcgttaaaatcaacgggatagattttccagctgatctcctagtcatagaaacaatgggaaaggatgtgattcttggaaagaattggttacaaagaactaaggcgatgatgaaccccaatggaaatgaagtaaatgatgccgacgacaatattcctaccttaacaactaggaacgagaaaaatgagtcacagaggtatttgatgaatggaatgaagaacaacaaaagaaatagaaaaatgtttggatacatgattagttcatctcaaccacaagcaaaagccccgaaacacatggatacccaaacagaagaatcaagtcagactcagctacatgagatacagacaccgaatcaaccctcaccccctgttggtcaagcaaagttgactcgtaaagaactcaaagcaagaggtggttgctattattgcaaaaatgaaggacatcttattcgcgaatgtcccaagaagcgtctagaccgaataaagaagaaagctgccaagcatgacctaagcaataattcagaagacccaccattttataagtacgatgatgaaggacgcttggttagtatacatttcggagcagagaagtaa

SEQ ID NO: 5010 - DNA, 3007 bp, Zea mays
  Clone ID: TF_ZM4622.C5.o3.fg
atggatcctaagggaaaggggatggtggtcgacaacaacgagaaggagtctatcttcaacgagccgaaggatgacaagcctaccgactcgggctcgggccacaagcgcaaagacgggaagaagaagaaaacaaggcgcatcaaggagatcgtctactacgacaacgacgaatcttcctcttcccaaaaggacgacgacgactacgagaaaaagaaaacggtcaattcaaacttttcttttgattactctcgtattcctcaaagtacaaatgctcatttattatctattccacttggcaaacctcctcattttgatggagaggactacggattttggagtcacaaaatgtgtagtcacttgttctctctccatcctagtatatgggagattgtagagagtggaatgcactttgatagtacggatagtcccatgttcattaatgagcaaattcataaaaatgcacgagctactactgttcttctagcttctttgtgcagggatgaataccacaaagtgagcggcttggataacgccaagcaaatttgggacaccctcaagatctctcatgaggggaatgacgtcacaatgctcaccaagatggagttggtggagggcgaactcgggagattcgctatgataaggggagaagagccaacccaaacgtacaaccggctcaagacccttgtcaacaagataagaagctatggaagcacgcgatggacggaccatgacgtcgtccgcctaatgctaaggtcttttactgtccttgatcctcatcttgtaaacaatattcgtgagaatcctaggtacaccaagatgacgcccgaggagatacttggaaagttcgtgagcgggcgaatgatgatcaaggaagcaagatacatggacgacgcattgaatggtccaatcaatgagcctcaacctcttgctctcaaggcaacaagaagcaaggagacgctacctaacaaggtggcacaaatcgaggctgccggacttaatgatgaagagatggctctcatcatcaagagattcaagacgacgctaaaaggtcgcaaggggcagccaagcaagaccaagacaaaggggaagcgctcatgcttcaaatgtggtaagcttggtcattttattgctagctgtcccgacaatgatagtgatcaggatcaagggaacaagagggagaagaagaagaactataagaaggcaaagggcaaggcgcatctaggcaaggagtgggattcggattgctcctcttccgactccgacaatgaaggactcgccgccaccgccttcaacaagtcatccctcttccccaacgagcgccacacatgccttatggcaagggagaagaaggtatgtactcgaaactctacttatgcttcttcaagtgaggatgaatctagcgatgaggatgaaatagattattcatgtttatttaaaggcctagatagaaccaaggtagataaaattaatgaattgattgatgccttgaatgataagaataggcttttagaaaagcaagaggatttgttgtatgaagaacatgacaaatttgtagaagcacaaaaatctcatgctctagaagttaaaagaaatgaaatgctttcttgtgaattatcttcttgccatgagacaatttctaacttaaggaacattaatgatgatttgaatgctaagttagaaatagctagtaaattaacatcttgtgtagaaattgttgcaacttgtaataggtgtaaagattttgacattgatgcttgtagtgaacacctagtttcaatttccaaacttaatgatgaattggctagtcttaatgctcaacttaagactagcaagagcgaatttgataagctaaaatttgcgagggatgcctacacgattggtagacacccctcaattaaggatggacttggcttcaagagggaagccaataacttaacaatccataaggttcccatccccgccaaggagaaagggaaggctcctatggcaagtagtactaaaaagaaccatgcttttatgtatcataacacgagacatgctagaaatgactatagaagttatgattcacatgctatgtttgcttctagttcttcttatatgcatgatagagatatgtctaggagatatgttcatcatgtgcctagaaagaatattgttcatgtttctaggaaagttatggatggtccttctacaatatatcatgctttaaatgcttcctttactatttgtagaaaggataggaagatagttgctaggaaattaggggcaaaatgcaagggtgataaaacttgcatttgggtccctaagacaattgtgactaaccttgtaggacccaacaagagttggggttatgcatccgggggttcaagctggattatcgacagcggatgcacaaaccatatgacgggggagaagaagatgttcacctcctacgtcaaaaacaaggattcccaagattcaatcatatttggtgatgggaaccaaggcaaggtgaaaggtttaggcaagactgcaatttcaaatgagcactctatctctaatgtgtttttagttgagtcccttggatataatttgctatctgttagtcaattatgtaatatgggatataattgtctatttacaaatgtagatgtgtctgtctttagaagaagtgatggttcactagcttttaagggtgtattagacggcaaactttacttagttgattttgcaaaagaagaggccggtctagatgcatgcttaattgctaagactagcatgggctggctgtggcatcgccgcttagcacatgtggggatgaagaactttcacaagcttcttaagggagaacacgtgataggtttaactaacgtgcaatttgaaaaagatagaccttgtgcagcttgtcaagcaggtaaacaagtgggaggagcacatcacagcaagaatgtgatgaccacatcaagacccctggagctgctacatatggacctcttcggtcctgtcgcctatctaagcataggaggaa

SEQ ID NO: 5011 - DNA, 648 bp, Zea mays
  Clone ID: TF_ZM4895.C2.o1.fg
atggatcctaaggggaagggaatcgtgatcaacgataaggagaaggagtccttcgtcaacgagcccaaagatgacaagcctaccgactctggctcgggccatagacggaaggaagggaagaagaagaagacaaggcgtatcaaggagatcgtctactacgacgacagcgacgaatcttcctcttcccaaaaggacaacgacgacaacgactatgacaaacaaaagacggcaacaaggagcaaggaggcgctacccagcaaggtggcgcaaattgaggcggccggtcttaatgatgaagagatggccctcatcatcaaaagattcaagacggcactgaagggtcgcaagggacagccaagcaagactaagaccaagggaaagcgatcatgcttcaaatgcggtaggcttggtcattttattgctaactgtcccgacaatgatagtgaccaggagcacgggagcaagagggaaaagaagaagtattacaagaaggccaagggcgaggcacatatcggaaaggagtgggattcggattgctcctcctccgacttcgacaatgaaggactcgccgccactgccttcaataagtcatccctcttccccaacgagtgtcacacatgccttatggcaagggaaaagaaggtgtaa

SEQ ID NO: 5012 - DNA, 5112 bp, Zea mays
  Clone ID: TF_ZmC951_398
ttataccaaagacgaagttccttttgcgtttgagcttttactctctcccccaaggatgaagtccttttccttgatgctcatttctcccccaaagacgagagagttgctcggagtgatggcgaagtatgagttacggagtggaagcctttgtcttcgccgaagactccaattccctttcaatatacctatgacttggtttgaaataaacttttgatccacggacttacctcccgtgtcgaggtcgagatgcccattagttcccatgggtgtcttgatgggtttggcatccttcatcccaaacttagcaagaatgtctcgagtgtacttcgtttggctaatgaaggtgccctcttggagttgcttgacttggaatcctagaaaatacttcaactcccccatcatcgacatctcgaacttctgtgtcatgatcctactaaactcttcacatgtagactcgttagtagacccaaatataatatcatcaacataaatttggcatacaaacaagtcattttcaagagttttagtaaagagtgtaggatcggccttgccgactttgaagccattagcaataaggaaatctctaaggcattcataccatgctcttggggcttgcttgagcccataaagcgccttagagagcctatagacatgattaggatactcactgtcttcaaagccgggaggttgctcaacatagacctcttccttgattggtccgttgaggaaggcacttttcacgtccatttgatagagcttaaagccatgataagtagcataggccaataatatgcgaattgactcaagcctagctacgggtgcataggtttcaccgaagtccaaaccttcgacttgtgaataccctttggctacgagtcgagctttgttccttgtcaccacaccatgctcatcttgcttgttgcggaagacccatttggttcctacaacattttggttaggacgtggaactaaatgccagacctcattcctcgtgaaattgttgagctcctcttgcatcgccaccacccaatccgaatcttggagagcttcctctaccctgtgtggctcaatagaggaaacaaaagagtaatgttcacaaaaatgagcaacccgagatcgagtagttacccccttatgaatgtcgccgaggatggtgtcgacggggtgatctcgttggattgcttggtggactcttgggtgtggcggtcttggttcttcctcatcctccttttcttgatcatttgtatctcccccttgatcattgctatcatcttgaggtggctcgtcttcttgattttgctcttcatcattttgagcctcatcctcattttgagttggtggagatgcttgcatggaggaggatggttgatcttgtgtacttggaggctcttcggattccttaggacacacatccccgatggacatgttccttagcgcgatgcatggagcctgttcttcacctatctcatcaagatcaacttgctctacttgagagccgttagtttcatcaaacacaacgtcacaagagacttcaactagtccagtggacttgttaaagaccctatatgcccttgtgtttgagtcataaccaagtaaaaagccttcggttaggagttcatatgatgtcttcttgaggattcggtgaagatataaccggttaatggcgtagcaggcggtgttgactgcttcggcccaaaaccggtccggtgtcttgtactcatcaagcatggttcttgccatgtccaatagagtccgattcttcctctccactacaccattttgttgtggcgtgtagggagaagagaactcatgcttgatgccctcctcctcaaggaaactttcaatttgagagttcttgaactccgtcccattgtcgcttcttattttcttgatccttaagccaaactcattttgagctcgtctcaagaatccttttaaagtttcttgggtttgagatttttcctgtaaaaagaatacccaagtgaagcgagaataatcatccacaataactagacagtacttactcccgccgatgcttatgtaagcgatcgggccgaatagatccatgtgtaggagctccagtggcctgtcagtcgtcattatgttcttgtgtggatgatgagtgccaacttgcttccctgcttggcatgcgctacaaatcctgtctttctcaaaatgaacattggttagtcctaaaatgtgctctccctttagaagtttatgaagattcttcatcccaacatgggctagtcgacggtgccagagccaacccatgttagtcttagcaattaaacatgtgtcgagctcagctctatcaaaatctactaagtatagctgaccctctaacacacccttaaatgctattgaatcatcacttcttctaaagacagtgacacctttgaccaacccttgatttccatccccaaatgtgatagctcgttggggatctttgtttttctcatatgaggagaacatccttttctccccggtcatgtggtttgtgcacccgctgtcgagtatccaacttgagcccccggatgcataaaccttgccggatttgctagtaagcacataagatgcatcaaaagttttaaatgaaatggcatgatcatttgatgcattagtggttttctttctaggcaacttggcatgggttggttgcctagatctagatgtctcacccttatacatgaaagcatgattagggccagagtgagacttcctagaatgaatctttctaattttgctctcaggatagctggcagggtataaaatgtaaccctcgttatcctgaggcatgagagctttgcccttaacaaagttagacaagttcttaggaggggcattaagtttgacattgtctcccctttggaagccaatgccatccttgatgccagggcgtctcccattataaagcatgctacgagcaaatttaaatttctcattttctaagttgtgctcggcaattttagcatctagtttagctatatgatcattttgttgcttaattaaaaccatgtgatcatgaatagcattaatatcaacatctctacatctagtacaaatggaaacatgctcaatggtagatgtagagggtttgcaagattttaattctacaaccttagcatgcaagatatcattcttagttctaaggtcggaaatggtagtattgcaaacatcaaaatccttagccttagcaagcaatttttcattctcaattctaagactagtaagagaaatgttcaattcttcaatcctagtaatcaaatcatcattattatctctaggggtgaaaattgaaacatcacaagcatgagaatcaaccttagcatttaaaatagcattttcattcctaaggttgtcaattatttcacggcaagtgcttagctcactagataatttttcacatttttctacttctagagcataagcctttttaaccttaacatgttttttgttttctttaattagacaatcctcttgggaatccaaaaggtcgtccttttcatgaatagcactaaccaattcattcaatttttctttttgagctatgttaaggttggcaaaaagggaacgcaaattatcttcctcatcactagcattgtcatcactagaggattcatatttagtggaggatttagatttaaccttctttttgccgtcctttgccatgaggcacttgtggccgacgttggggaagaggagtcccttggtgacggcgatgttggcggcgtcctcgtcgtcggaggagtcgcttgagctctcgtcggagtcccattcccgacaaacatgggcatcgccgcccttcttcttgtagtatcttttcttctcctttcttctccccttcttgtcgtcgcctcggtcactgtcactagaaataggacatttagcaatataatgaccgggcttaccacacctgtagcaaaccttcttggagcgggatttgtagtctttccccctcctttgtttgaggatttgtcggaagctcttgatgacgagcgccatttcctcattgtcgagcttggaggcgtcgattggttgtcgacttggtgtagcctcctccttcttctcctccgttgccttgaatgcaacgggttgggcttcggatgggtccccaagctcgttgattttcctcgagccttctatcatgcactcaaaacttacaaaatgcccgataacttcctcgggggtcattttagtatatctaggattaccacgaatcaattgaacttgagtgggattaagaaaaatgagagatcttaaaataacatttaccacttcgtggtcatcccacttcttgctcccgaggttgcgcacttggttcaccaaagtcttgagccggttgtacatgtgttgtggctcctcccctttttgaagccggaaccgaccgagctccccctcgatcgtttcccgcttggtgatcttggtgagctcatctccctcgtgcgcagttttgagcacatcccaaatctcctttgcatttttcaacccttgcactttgttgtattcttccttgcttagagaggcaaggagtatggttgtggcttgagagttgaagtgctcgatttgggccacctcatcctcatcatagttttcatcccctacggatggtacctgcgcaccaaactcaacaacatcccatatgcttttgtggagcgagattagatgaaatcgcattaaatcgctccacctagcgtaatcttcaccatcaaaagttggtggtttgcctaatgggacggaaagtaaaggtgtatgtttggaaatgcgagggtagcgtagggggatcttactatacttcttgcgctcttggcgcttagaagtgacggagggcgcatcggagtcggaggtagaggttgatgaagtgtcggtctcgtagtagaccacctttctcatcctcttgtgcttatcgcctttccgatgcggcttgtgggaagaagatttttccttcttttctttgtggtgagaagaagatttcttctccttccctttgttggaggagctcttcttcttctccctccttttggtgcgggactcttccgatgaagtgctcccgtagcttgtagtgggcttttcgccggtctccatctccttcttggcgtgatctcccgacat

SEQ ID NO: 5013 - DNA, 4995 bp, Zea mays
  Clone ID: TF_ZM4685.C3.o1.fg
atggatcctaagggaaaggggatggtggtcaacaacaacgagaaggagtctatcttcaacgagccgaaggatgacaagcctaccgactcgggctcgggccacaagcgcaaagacgggaagaagaagaagacgaggcgcatcaaggagatcgtctactacgacagcgacgaatcttcctcttcccaaaaggatgacgacgactacgagaaaaagaaaacggtcaattcaaacttttcttttgattactctcgtattcctcaaagtacaaatgctcatttattatctattccacttggtaaacctcctcattttgatggagaggactacagattttggagtcacaaaatgcgtagtcacttgttctctctccatcctagtatatgggagattgtagagagtggaatgcactttgatagtacggatagtcccatgtttattaatgagcaaattcataaaaatgcacaagctactactgttcttctagcttcattgtgcagggatgaataccacaaagtgagcggcttggataacgccaagcaaatttgggacaccctcaagatctctcatgaggggaatgatgtcacaatgctcaccaagatggagttggtggaaggcgaactcgggagattcgctatgataaggggagaagagccaactcaaacgtacaccaagatgacgcccgaggagatacttggaaaattcgtgagcgggcgaatgatgatcaaggaagcaagatacgtggacgacgcattgaatggtccaatcaatgagcctcaacctcttgctctcaaggcaacaagaagcaaggagacgctacctagcaaggtggcacaaatagaggcggccggacttaatgatgaagagatggctctcatcatcaaaagattcaagacgacgctaaaaggtcgcaaggggcagccaagcaagaccaagacaaaggggaagcgctcatgcttcaaatgtggtaagcttggtcattttattgttaactgtcccgacaatgatagtgatcaggatcaagggaacaagagggagaagaagaagaactataagaaggcaaagggcgaggcacatcttggaaaggagtgggattcggattgctcctcttccgactccgacaatgaaggactcgtcgccaccgccttcaacaagtcatccctcttccccaacgagcgtcacacatgccttatggcaagggagaagaaggtatgtactcgaaacactacttatgcttcttcaagtgaggacgaatctagtgatgaggatgaaatagattattcatgtttatttaagggcctagatagaaccaaggtagataaaattaatgaactaattgatgccttgaatgacaagaataagcttttagaaaagcaagaggatttgttgtatgaagaacatgacaaatttatagaagcacaaaaatctcatgctctagaagttaaaagaaatgaaatgctttcttgtgaattatcttcttgccatgagacaatttctaacttaaggagcattaatgatgatttgaatgctaagttagaaatagctagtaaatcaacatcttgtgtagaaaatgatgttatttgcaataggtgtaaagattttgacattgatgcttgtagtgaacacatagcctctattgcaaaattaaatgatgaaattgctagtcttaatgcccaacttaagactagcaaaagtgaatttgacaaattaaaatttgcaagggatgcctacacaattggtagacacccctcaattaaggatggtcttggcttcaaaagggaagtcaagaacttaacaagccataaggcttccatctccacaaaggagaaagggaaggcccctatggcgagaaatgctaaaaagaaccatgccttcatgtaccatgatagaaaattttctagaaatgttcatgatgataggagttgtaatgcttataatgcttttgactctcatgccatgtttgcttctagttcttcctatatgcatggtagaaatgtgtttagaagaaatgttgttcatcatatgcataggagaaatgttcctaggaaagttaatgaaccttctacaatttatcatgcctgtgatgcttcatttgcaatttgtagaaaggatagaaaggacccaacaagagatgggtacctaagtcccaagcctaaatttgccttgcaggtttatgcatccgggggttcaagctggattatcgacagcggatgcacaaaccatatgacgggggagaagaagatgttcacctcctacgtcaagaacaagaactcccaagattcaataatattcggtgatgggaaccaaggcaagttgagtcccttggatataatttactatctaagaagtgatggttcactagcttttaagggtgtattagacggcaaactttacttagttgattttgcaaaagaggaggccggtctagatgcatgcttaatagctaagactagcatgggctggctgtggcatcgccgcttagcacatgtggggatgaagaaccttcacaagcttttaaagggagaacatgtgataggtttaactaacgtgcaattcgaaaaagatagaccttgtgcagcatgtcaagcaggtaaacaggtgggaggagcacatcacaacaagaatgtgatgaccacatcaaggcccctggagctgctacatatggacctcttcgaacccgtcgcttatctaagcatagggggaagtaagtatggtttagttattgtggatgacttttcccgcttcacttgggtattctttttgcaggataagtctgagacccaaggaaccctcaagcgcttcctaaggagagctcaaaacgagtttgagctcaaggtgaagaagataaggagcgacaacgggtccgagttcaagaaccttcaagtggaggagtaccttgaggaggaagggatcaagcacgagttctccgctccctacacaccacagcaaaatggtgtggtagagaggaagaacaggacactaatcgatatggcgaggatgatgcttggagaattcaagacccccgagcgtttttggtcgaaagctgtgaacacggcttgccacgccatcaacagggtctaccttcaccgcctcctcaagaagacgtcatatgagcttctaaccggtaacaaacccaatgtatcttactttcgtgtatttgggagcaaatgctacattctagtgaagaagggtagaaattctaagtttgctcccaaagctgtagaagggtttttgttaggttatgattcaaatacaaaggcgtatagggtcttcaacaaatcatcgggtttggttgaagtctctagcgatgttgtatttgatgagactaatggctctccaagagagcaagttgttgatcttgatgatgtagatgaagaagatgttccgacggccactatacgaaccatggcgattggtgaagtacgaccacaggaacaaaaggagcaagatcaaccttcttcctcaactatggtgcatcccccaactcaagacgatgaacagattcatcaacaggaggtgtgtgatcaagggggagcacaagatgatcatgtgatggaggaagaagcgcaacctgcacctccaacccaagttcgagcgatgattcaaagggatcatcccgtcgatcaaattctaggtgatattagcaagggagtaactactcgatctcgattagttaatttttgtgagcattactcctttgtctcttctattgagcctttcagggtagaagaggccttgctagatccggactgggtgttggccatgcaagaggagctcaacaacttcaagaggaatgaagtttggacgctggtgcctcgtcctaagcaaaatgttgtgggaaccaagtgggtgttccgcaacaaacaagacgagcacggagtggtgacaaggaacaaggctcgacttgtggcaaaaggttatgcccaagtcgcaggtttggactttgaggagacttttgctcctgtggctaggctagagtccattcgtattttgctagcatatgccgctcaccattctttcaggttgttccaaatggatgtgaagagcgctttccttaacgggccaatcaaggaggaggtgtacgtagagcaaccccctggcttcgaggatgaacggtaccccgaccatgtgtgtaagctctctaaggcgctctatggacttaagcaagtgaagcaactaaaggatggcaccttcatctctcaaatgaagtacacgcaagacttgctgaagcggtttgggatgaaggatgccaagcccgcaaatactccgatgggtaccgacggacacactgatctcaacaaaggaggtaagtccgttgatcaaaaggcataccggtcaatgataccgttggcataccgaccatgtgctagtagaccggatattatgcttagcgtatgcatgtgtgctagatttcaatctgatcctaaggagtgtcacttagtggcagtgaagcgaatccttagatatttagttgctacgccttgcttcgggctctggtatccaaaggggtctacctttgacctaattggatattcagattccgactatgctggatgtaaggtcgataggaagagtacatcggggacgtgccaattcttaggaaggtccttggtgtcatggaattctaagaaacaaacctctgttgccctatccaccgctgaggccgagtatgttgccgcaggacagtgttgcgcgcaactactttggatgaggcaaaccctcagggactttggctacaatctgagcaaagtcccactcctatgtgataatgagagtgctatccgcatggcggaaaatcctgttgaacacagccgcacaaagcacatagacatccggcatcactttttgagagaccaccagcaaaagggagatatcgaagtgtttcatgttagcaccgagaaccagctagccgatatctttaccaagcctctagatgagaagaccttttgcaggttgcgtagtgagctaaatgtcttagattcgcagaacttggattga

SEQ ID NO: 5014 - DNA, 1470 bp, Zea mays
  Clone ID: TF_ZM4548.C3.o10.fg
atgtcgggagatcacgccaagaaggagatggagaccggcgaaaagcccactacaagccacaggagcacttcatcggaagagtcccgcaccaagaggaaggagaagaaagactcctccaaagggaaggagaagaagaaggactcctccaaagggaaggagaagaaatcttcttcacacaaagagaagaaggagaagtcttcctcccacaagccgcaacggagtggggacaagaaaaagaggatgaggaaagtggtctactacgagaccgattcttcatcgacatccacctccggctccgacgcggcatccgtcacttctaaacgccaagagcgtaagaagtatagtaagattcccctatgctaccctcgcatttctaaacatacacctttactttccgtcccattaggcaaaccaccaacttttgatggtgaagattatgctaggtggagtgatttaatgcgatttcatctaacctcactccacaaaagtatatgggatgttgttgagtttggtgcacaagtaccatccgtaggggatgaagactatgatgaggatgaggtggcccaaatcgagcacttcaattctcaagcaacaacaatactcctcgcctctctaagtagagaggaatacaacaaggtgcaagggttgaagaatgcaaaggagatttgggatctactcaagaccgcgcacgagggtgatgaactcaccaagatcaccaagcgggaaacgatcgagggggagctcggtcgctttcgtcttcgccaaggggaggagccacaagatatgtacaaccggctcaaaaccttggtgaaccaaatgtgcaacctcgggagcaagaaatgggatgaccacgaggtggttaaggttattcttagatcactcatcttccttaaccccactcaagttcaattaattcgtggtaatcctagatatacactaatgactcccgaggaagttatcgagaattttgtgagctttgaatgtatgatcaagggctcaaagaagatcaacgagcttgatgatccctccacgtccgaagcacaaccggtggctttcaaggcgacggaggagaagaaggaggagtctacaccaagtagacaaccaatcgacgcttcaaagctcgacaacgaggagatggctttaatcatcaaaagctttcgccaaatcctcaagcaacggaaggggaaggattacaaatcccgttccaagaaggtttgctacaagtgtggtaagtccggtcactttattgctaaatgtccattatcaagtgacagtgacagggataacgacaagaagggcaagaggagagaaaagaagaggtaccacaagaagaggggcggcgatgcccatgtgtgccgcgagtgggactccgacgagagctccaccgactcctccgacgacgaggacgccgccaacatcgtcgtcaccaagggactcctcttccccaacgtcggccacaagtgcctctga

SEQ ID NO: 5015 - DNA, 4158 bp, Zea mays
  Clone ID: TF_ZM4639.C2.o6.fg
atgaccggcggtgacaaatccgcaagcttgggaagaacccattcaagggagtctggccacaagcataaggaggaatcctcttcctccatcaagtcacaacggagaggtgacaagaagaagaagatgaagaaagtggtatactacgagaccgactcttcgtcaccctccacctccggctccgaatcggcgtccatcacttctaagcgccatgagcgcaagcagtatagtaagatgcccctccgctatccttgcatttctaaacgcactccattactttccgttccccaaggcaaaccaccattttttgatggtgaggactattgtatgtggagtgataaaatgaggcatcatctaacctcactccacaaagcatatgggacattgttgagtatggagcgcagatataagctaatgtctcacgaggaggttataagaaagtttgtgagctttgagttgatgatcaaaggctccaaacaaatcgtcgagcaaggcggcacctccacacccgaggtgcaacccgtcgcattcaaagcaacggaagaaaagaaagaagagtctacatcaagtaggctccccatcgacgcctccaagctcgacaacgaggaaatggcgctcatcatcaagagcttccgccaaatcctcaaacaaaggagggggaaggattacaagccccgctctaagaaagtatgctacaaatgtggtaagtccggtcattttattgctaaatgtccattatctagtgatagtgacaggggcgacgacaagaagggagagaggaaggagaagaagagctccaccgactcctccttcgacgaggatgtcgccaacatcgccgttaacaagggtcttctcttccccaacgttggccacaagtgcctcatggcaaaggacggcaaaaggaagaatgtaaaatctagagcctctatcaaatatacaacatctagtgatgagggtagctctagtgaagatgaggatgatttacttactctttttgccaaccttaacatgcaacaaaaggaaaaactaaatgaattgataggtgtcattcatgagaaggatgaactcttggatagccaagaggaattccttattaaggaaaataaaaaacatgttaaggtaaaaaatgcttatgctcaggaagtagaaaaatgtgaaaatttgactaatgagcttagcatttgtcatgacactgtttccaaccttagaaatgaaaatgctagtttaattgctaaggtggaaaaatcaaatgtttgcaatgattcaattatcaatcttagaaatgaaaatgctaatttaattgtaaagattgataaattgaatgaatctctttctagccttaagaatgaaaatgatagcttaattttaaaggctaaagatttgattgtttgcaatgattccatttcctgtcttagagataaaaatgtcatgctaaaatctaagatagatgaattaaaatcttgcaaaccctctacatccactgttgatcatgtttctatttgcatgagatgtagagatattaatgttgatgctattcatgatcatctagccttaattaaagaacaaaatgatcacatagctcaactaactgctaaaattaatgagcataagatagagaatgaaaattttaaatttgctagaagcatgctctataatgggagacgccctggcatcaatgatggcattggtttccaacagggaagcaatgtcaaacttaatgtccctaaaagattgtctaattttgttaagggcaaggctcccatggctcaggataacaagggttacattttatatcctgctggttatcctgagcacaagattaggagaattcatgctaggaagtctcattctgtttcccatcatgcttttatgtacaagaatgaggcatcaatctctaggcattctacccatgttaaaatgcctaaaaagaaaactcctactgcatcaaatgaacctaatgtttcattcaaaactcttgatgctttatatgtgcttactaacaaatcaggcaaagtagttgccaaatatgttgggggcaaacacaagggctccaagacttgtgtttgggtacccaaggtttatgcatccgggggctcaagttggattattgatagcggatgcacaaaccacatgactggggagaaaaggatgttctcctgctacgagaaaaacgatgatccccaaatagctatcacattcggggatggaaatcaaggtttggaaaaatctcaaacccaagagaccttaaaaggattcttcagacgagctcaaaatgagttcggattaaggataaaaaagataagaagcgacaacgagacggagttcaagaactcacaaatagaaggctttcttgaggaggagggcatcaagcatgagttctcttctccctacacaccccaacaaaatggtgtagtggagaggaagaatagaactctactagacatggcaaggaccatgcttgatgagtacaagtctccagaccggttttgggctgaggcgattaacaccgcctgctactccatcaaccggctctacctttaccgaatcctcaagaagacatcttatgaactcctcaccggtaaaaagcctaatgtttcatattttagagtctttgatagcaaatgttttattcttattaaaagaggtagaaaatctaaatttgctcctaaggttgtagaaggctttttactaggatatgattcaaacacaagggcatatagagtcttcaacaaatccactagattagttgaggtttcttgtgacattgtgtttgatgagactaatggctcccaagtggagcaagttgatcttgatgaattagatgatgaagaggctctgtgcgttgcgctaaggaacatgtccattgggggaatgtgtgtcctaaggaatccgaagagcctccacaagcgcaagatcaaccgtcatcttccatgcaagcatctccaccaacccaagatgaggatcaagctcaagacaatgaagaagaagatcaagaagatgagtcacctcaagaggagggcaatgatcaaggggggagatgacaatgatcaagacaaggaagatgatcaagaagtacagggtccaagaccgccacacccaagagtccaccaagtgattcaaagagatcaccccgtgaactccatcctcggcgatattcataaggggccatacatggtggaggatgcactaagagattcagattgggtgttggcaatgcaagaagagctcaacaacttcataaggaatgagtgggtattccgcaacaagcaagatgagcatggtgtggtgataaggaacaaagcccaacttgtggccaagggatattcacaagtcgaaggtttggatttcggtgaaacctatgcactcgtagctaggcttgagtcaattcatatattacttgcctatgctacttaccatggctttaagctctatcaaatggacgtgaaaagtgccttcctcaatggaccaatcaaggaagaggtctatgttgagcaacctcccggctttgaagatagtgagtaccctaaccatgtctataaactctcaaaggcattttatgggctcaagcaagccccaagagcatgccaaaccaagtacattcaagacttacttaccaagtttggaatgaaggatgccaagcccatcaagacacccatgggaacaaatgggcatctcgacctcgacacgggaggttattcagatgctgattgggcagggtgtaaaattgatagaaagagcacatcagggacttgtcagttcttgggaagatccctggtgtcttgggcttcaaagaaacaaaattcagtagctctttctaccgctgaagccgagtatattgtcgcatgtcattgttgcgcgcaattgctttggatgaggcaaacccttagggactatggctacaaatttagcaaagtccctctcctatgtgataatgagagtgcaatccgcatggcggataatcccattgaacacaaccgcactaagcacatagccattcggtatcactttttgagggatcaccaacaaaggggggatatcgagattgcttatgttagcaccaaagaacaattagccgatatctttaccaaaccattagatgagaaaatctttaccaaacttaggaatgagctaaacaatcttgattctcggaactttgattga

SEQ ID NO: 5016 - DNA, 4338 bp, Zea mays
  Clone ID: TF_ZM4981.C1.o3.fg
atgtacaaccggctcaagactttggtgaaccaagtgcgcaacctcgggagtaagaaatgggatgaccatgagatggttaaggttattctaatatccctcgtttttcttaaccctacgcaagttcaattaattcgaggaaatcctagatatacactaatgtctcccaaggaggtaattgggaattttgtgagctttgaattgatgatcaaaggctcaaggaagatcaacgagcttgacggcccctccatgttcgaagcacaaccggtcatattcaaagcaacagaggagaagaaggaggagtctacatcaagtagacaaccaatcgacgcctcaaagctcgacaatgaggagatggcgctcatcatcaagagcttccgccaaatcctcaagcaaaggagggggaaggactacaaatcccgctccaagaaagtgtgctacaaatgtggtaagtccggtcattttattgcaaaatgtccattatctagtgatagtgacaggggcgacgacaagaaggggagaagaaaggagaagaagagatactacaagaagaagggcggcgatgcccatatttgccgggaatgggactccgacgagagctccaccgactcctcctccgacgaggatgccgcaaacatcgccgtcaccaagggtattctctttcccaatgtcggccacaagtgcctcatggcaaaggacggcaaaaggaagaaggtaaaatcaagatcctccactaaatatgaaacctctagtgatgaggataatgctagtgatgaggaggataatttgcgtactctttttgccaacctaaacatgcaacaaaaagaaaaactaaataaattaattagtgatattcatgagaaggatgatctcttggactctcaagaggacttcctaattaaagaaaataagaaacatgttaaggttaaaaatgcttatgctctagaagtagaaaaatgtgaaaaactatctagtgagctaagcacttgccatgatgttattaccaaccttagaaatgagaatgcaaatttgattgctaaggttgattcaaatgtttgtgatgcttcaattcccaatcttacaaatgataatgttgatttgcttgctaagattgaagaattgaatatctctcttgctagccttaggattaaaaatgaaaaattgcttgctaaggctaaagaattagatgtttgcaatgcttccacttctaaccttagaagtgaaaatgatattttacatgctaagattgttgaactaaaaacttgcaaaccctctacatctaccgttgagcatgtttctatttgcactagatgtagagatgttgatattgatgctattcgtgatcacatggtcttaattaagcaacaaaatgatcatatagcaaaattagatgctaaaattgccgagcatgaacttgaaaatgaaaaatttaaatttgctcgtagtatgctttatagtgggagacgccctggcatcaaggatggcattggcttccaaaagggggacaatgtcaaaattaatgcccctcctaaaagattgtccaattttgttaagggcaaggctcccatgcctcaggataacgagggttacattttgtaccctgccggttatcctgaaagcaaaattaggagaattcactctaggaagtctcactctagccctaatcatgcttttatgtataagggtgagacatctagctctaggcaatcaacccgtgctaaattgcttagaaataaaaatcctattgcatcaaatgatcataatatttcttttaaagtttttgatgcatcctatgttttaactaacaaatctggcaaggtttatgcatccgggggctcaagttggatcattgatagcgggtgcacaaaccacatgacaggggagaagaagatgttctcctcctacgagaaaaaccatgatccccaaagagctatcacattcggggatggaaatcaagattctttagattacaacttgctttcagtttcgcaattatgtaaaatgggctacaactgtctttttacggacataggtgtcactgtctttagaagaagtgatgattcaatagcatttaagagagtgttagagggtcagctatacttagtagattttgatagagctgaactcgacacttgcttaattgctaagactaacatgggttggctctggcatcgccgactagcacatgttggaatgaagaatcttcacaaacttctaaagggagaacacattttgggactaacaaatgttcattttgagaaagacaggatttgtagcgcatgtcaggcagggaagcaagttggagttcatcatccacacaagaacatcatgacaactgacaggccgcttgagctcctacacatggacctattcggcccgattgcttacataagcatcggcgggagtaagtactgtctagttattgtggatgattattctcgcttcacttgggtgttatttttgcaggaaaaatcccatacccaagaaaccttaaaaggattcttaagacgggctcaaaatgagttcggcttaaggatcaagaaaattagaagcgacaacgggacggagttcaagaactcacaaatcgaaggcttccttgaggaggagggcatcaagcatgagttctcttctccctacacgccacaacaaaatggtgtagtggagaggaagaatagaactctattggacatggcaagaaccgtgcttaacgagtacaagacttcggatcggttttgggccgaggcggtcaacaccgcttgctacgccatcaaccggttgtatctacaccgaatcctcaagaagacatcatacgaactcctaaccagtaaaaagcccaatatttcatattttagagtctttggtagcaaatgctttattcttgttaaaagaggtagaaaatctaaatttgctcctaagactgtagaaggctttttactaggatatgattcaaacacaagggcatatagagtctttaacaagtcttctggacaagttgaagtttcttgtgacgttgtgtttgatgagactaacggctctcaagtagagcaagttgatcttgatgagataggtgatcaagaggctccgtgcatcgcactaaggaacatgtccaatggggatgtgtgtcctaaggaatccaaagagcctccaaatgcacaagatcaaccatcctcctccacgcaagcatctccaccaactcaagatgaggataaggctcaaaatgatgacggagaagatcaagagattgagccacctcaagatgacgagaatgatcaagggggagatgcaaatgatcaagacaaggaggatgaagttccaaggccgccacacccaagagtccaccaagcaattcaacgagatcaccccgtcgacaccattatcggcgacattcacaagggggtaaccactagatctcgtgttgcacatttttgtgagcattactcttttgtttcctctattgagccacacagggtagaggaagcactacaagattcggattgggtggtggcgatgcaagaggagctcaacaacttcactaggaatgaggtatggcatttggttccacgtcctaatcaaaatgttgtaggaaccaagtgggttttccgcaacaagcaagatgagcatggtgtggtgacaaggaacaaagcccgacttgtggccaagggatattcacaagtcgaaggtttggatttcggtgaaacctatgcacccgtagctaggcttgagtcaattcgtatattacttgcctatgctacttaccatggctttaagctttatcaaatggacgtgaaaagtgccttcctcaatggaccaatcaaggaagaggtctatgttgagcaacctcccagctttgaagatagtgagtatcctaaccatgtgtataaactctctaaggcgctttatgggctcaagcaagctccaagagcatggtctactaacgaatctacatgtgaagaatttagtaggatcatgacacagaaattcgagatgtcaatgatgggggagttgaagtacttcttgggatttcaagtgaagcaactccaagaggccaccttcattcgccaaacaaagtatattcaagacattctaaacaagtttgggatgaaggatgccaagcccatcaagacacccatgggaaccaatgggcatctcgacctcgacacgggaggtaaatccgtcgatcaaaagaaagagcacatcggggacttgccagttcttgggaagatccttggtgtcttgggcttcaaagaagcaaaattctgtagctctttctaccgccgaagccgagtatattgccgcatgccattgttgcgtgcaactactttggatgaggcaaacccttag

SEQ ID NO: 5017 - DNA, 3216 bp, Zea mays
  Clone ID: TF_ZM4544.C6.o6.fg
atggatcctaagggaaaggggatggtggtcaacgacaaggaaaaggactccatcttcaatgagccaagagacgacaagcccactgactcaggctcgagtcacaagaagagggacgggaaaaggaagaggcgcatcaagaagatcatttactacgacagtgatgcctcatcatcttcactaagggatgacgacaacgacgacgactcttcgtcaaagagaaagacgatggaactagtggaaggcgagctggggaggttcatgatgatcaggggagaggagccaactcagacctacaataggctcaagaccctggtcaacaagatccgaagctatggaagcacaagatggacggatcatgatgtcgtccaactcatgctaaggtcatttactgtaattgacccccatcttgttaatcttatttgtgaaaaccctaggtacaccaagatgacgcccgaggaggtccttggaaaattcgtgagcaggcgcatgatggtgaaggaggcgcgatacatggacgacgcgctaaatggtccactgtccatctacgagtcgcagcccgttgctctcaaagcaacaagcagcaaggaggcgctaccaagcaaagtagcacaagtggaggctgccgtgctcaacaaggacgaaatggcacttatcatcaagcgcttcaagaccgcgctaaaaggacgtaaggagtactccaacaagaacaagacaaggggaaatcgctcctgcttcaaatgcggtaagactgatcatttcattgcacaatgtcccgataatgataatgaccagggacaagaaaagagcgggaagagggaaaagaagaactacaggaatgcgaagggcgaggcgcacctaggaaaggagtgggattctgactgctcttcatccgactccaacgatgaaggattggctgcctcggccttcgacaagtcttcactcttccccaacgaacgtcatacatgtcttatggccaaggaaaagaaggtacatattcgagatacccctaagtacacttcttctagcgatgaggaatcttctgatgatgaagtagattactcggatttatttaaggggttagatcgtgctaaagtagagaaaattaatgaattaattgatgctctaaatgaaaaagatagactactagaaaagcaagaggacattttgtatgaggaacatgacaagtttgttagtgttcaaaaatctcttgctttagaaattaagagaaatgaaatgctatcttctgagttatgtgcttgccatgaatctgtctctagtttaaagaattcaaatgatgaattaaaagctaagctagaggaagttaataaaactagttcatgtgtagagcatgtttttatttgtaatagatgtaaggattttgatgttgatgcatgtgatgaacatcttgcttctattgccaaattaaacgatgaggtggcaagtcttaatgctcaatttatgacttgcaaagttgaatttgataaattaaaatttgctagggatgcctacactgttggtagacacccctcgattaaggatggacttagttttcgaaaggaaaccaagaacttaacaagccaaagggctcccgttctcaacaaggagaaagggaaggcccctatggctagtagttcccaaaagaatcatgcctatatttatgataggaaatatcctaggaatgcttataatgataaatgttataatcatgctgcttataatgattcacatgctatgtttgcatctagctccacctttgctcatggtagaagtaggcctaggagaaattatgctacttctcatgcttctagaaaagtttgcaatggacctactactgtttatcatgcttgcgatacttcctttgtgctgtcatgcaaaaatacaaaagtagttgctagaaagttgggatccaaatgcaagggagacaaaacatgcatttgggttccaaaagctattgtgactaaccttgtaggacccaacacgagttgggtttatgcatccaggggctcaagctggattatcgatagcggatgcacgaaccacatgacgggggagaagaagatgttcacctcctacgtcaagaacaaggattcccaggatacgttcatctttggagatgggaaccaaggcaaggtgaaaggcttgggcaggatagccatcactaacgagcactcaatatcaaatgtatttttagtagagtcgctcagaagaagtgatggttcattagcatttaagggtgtattagacatcaagctctatttagttgacttttcgagagagaatgccggtctagatgcatgcttaatagctaagactaatatgggctggttgtggcatcgccgtctagcacatgttgggatgaagaaccttcataagcttctaaagggagatcatgtgttaggactaaccgatgtctgttttgagaaagacagaccctgtgtagcatgtcaggaaggaaaacaggacaaatcagaaacccaagggaccctaaagcgctttctaagaagggctcaaaacgaatttgagctaaagacaccacagcaaaatggcatggtagagaggaagaataggacactaatcgacatggcgagaacgatgcttagagagttcaagacgcccgagcggttttggtcggaagctgtgaacacagcctgccgcgccataaaccggctctatctgcatcgtctcctcaagaagacctcctacaaactccttaccggtaacaaacccaatctctcttactttcatgtatttgggagcaaatgctacattatggtgaagaaaggtagacactctaaatttgctcccaagacagtagaagggtttttattagggtatgactcaaatacaaaggcgtatagagtcttcaacaaatcatcaagattagttgaagtctctagcgatgttgtatttgatgagactaatggctctccaagagagcaagttgatcttgatgatatagatgaagatgaagttccgacagccacaatgcgaacaatggcgattggagatgtgcgaccacaggaactgcaggaacaagatcaaccttcttcctcgacactggtgtatcccccaactcaagacgatgtacaggtacctcaagaagaagggcagaatcaagggggagcacaaaaagaacaggttatggaggaagaagcaccacgagtccctccaactcaagtccaagcaacgatccaaagacatcaccccgtcgactag

SEQ ID NO: 5018 - DNA, 1995 bp, Zea mays
  Clone ID: TF_ZM4679.C2.o8.fg
atgaccattgagcagatgttcatgatgcaaactcaggcagttcaggcaatcagtcagaccttagcagtgatgcaacaagtgcagcaacagccaccaccaccacagcctccagtgcaggtccagatgccacaagtgcccagagacaagcgggcagagctcatgaggggccatccccctgttttgcccattctgctgaccccatggacgctgaagattggctacctgaggggagcagcccagtcttggtgggagtcttacctcgccacccatgctaaccctgaagccattaattgggaggaattcagggacaacttccatcgctaccatgtgcccgaaggactgatgatagtgaggaaggaggtgtttctcgccccgaagcaaggtcccctgtccgtcagtgagtacagggataagtttttgcagctgtcacgttatgccccagaagacatcaacacatatgcaaagaggcagtaccgctttctgagaggattgcatttgatagacagagcaatcatgactgaaaggaagcgtcgagagatggaggataggaagcacaagattggtggacctcaggccgggagtagcagtcatccccgctactcaggcaactcaccccagcaattcaagcaagttcaccagcatccgcgtcagcaccagccccagtaccagaggcagtttcctcagcaacaacaacagcagtaccgtcagaacactcagccgggaggaaatcagtaccaacgtcagaacaaccaggcagctcgtcttcctgccccagcaaccaaccagagtagccaagcagccccagctcaagtaggaggtcgtgcatgcttctactgtggagaacaaaatcactgggcgaagaactgtcccaagaaagcagcccagcaaccaccaacagtcaatgccccagcaagacaaggagcgccacatcaagcaccaggagtccgtggtcaggcctacaaccgtgaaaaggtgaaccacctggaggtcaaagcaatccaggatgctcaggacgtggcagtaggtatgtttccagtcaaatccgacccaacaaaagtactatttgatactggtgccacacattcttttgtttctgcatcttgggtagaatcacataacatccccatagaaccaatgatcccacctttaagagttaattcagttgggggaaaagttcagtctgataggatttgtccaaatctaaggattgaaataagggggatagacttccccgctagcctagtagtcatgggaactcaagggtttgatgtcatcctagggatgaattggctacacagaaatcaagccattgtcagttgcgacaagagaacagttaagttggtgtccccatctggaaaggaagtagtaaccaagctgtacttacctgaactagaagaaggagcctgtcaccatttatcagtagatgacaacgagtccaatccaattgaggcaattaggattgtgtcagaattccctgatgtatttcctgaggagttaccaggcatgccacctaaaaggaaagttgaatttgccatagagcttatctcaggcaccgcccctatttccaagaaagattatcgtgtgtctggaccagagttggtggaactcaagaagcaaattgatgagttgttagagaaaggctacatcagaccaagtacttcaccttgggcagccccagtattatttgtggagaagaaggatggcacgaagaggatgtgtattgattatagagccttgaatgaagtcactgtcaaaaataagtaccccctgcccagaattgaagatttatttgatcagttgagaggagccagtgtgttctcaaagatagatctgaggtcaggttaccatcaactcaaaatccgacctgcagatatatcgaagacagccttcatcaccaagtatggactatatgagttcatggttatgtcattcggattgatgaatgtgaaagggaaatgtgcccttgggccatttctaaagtattttggtgattaa

SEQ ID NO: 5019 - DNA, 1349 bp, Zea mays
  Clone ID: TF_ZmC119_1217
ttcggagcctcacgggtagaacaagagatgttctgtgttattgatgcaagggctatggacacgtgcagcgtgattgtcctaatcagcgtgttttggtggtaaaagacgatggtgggtattcctctgctagtgatttggatgaagctacacttgctttgcttgcggctgatgatgcaggcactaaggaaccacccgaagaacagattggtgcagatgatgcagagcattatgagagcctcattgtacagcgtgtgcttagtgcacaaatggagaaggcagagcagaatcagcgacatacgttgcttcaaacaaagtgtgtcattaaggagcgttcatgtcgtttgatcatcgatggaggtagctgcaacaacttggctagcagcgacatggtggagaagcttgcacttacgaccaaaccgcacccgcatccatatcacattcaatggcttaacaatagtggtaaggtcaaggtaaccaagctggtacgaattaattttgctattggttcatatcgtgatgttggtgactgtgatgttgtgcctatggatgcttgtaatattctgctaggtagaccatggcaatttgattcagattgtatgaatcatggtagatcaaatcaatattctctcatacaccatgataagaaaattattttgcttcccatgtcccctgaggctattgtgcgtgatgatgttgctaaagctaccaaaactaaaactgagaacaacaagaatattaaagttgttggtaataacaaagatgggataaaattgaaaggacattgcttgcttgcgacaaaaactgatgttaatgaattatttgcttccacttctgttgcctacgccttggtatgcaaggatgctttgatttcaattcaagatatgcagcattctttgtctcctgttgttactaacattttgcaggagtattctgatgtatttccatgtgagatactagaggggctgccacctatacgagggattgagcaccaaattgatcttattcctggtgcatctttgccaaatcgtgcttcatataggacaaatccggaggaaacaaaagaaatccagcgacaagttcaagaactactcgacaaaggttacgtgcgtgagtctcttagtccgtgtgttgttccggttattttagtgcctaaaaaagatggaacatggcgtatgtgtgttgattgtagggctattaataatatcacgatacggtattgacaccctattccacgtttagatgatatgcttgatgaattgagtggtgccatcgtcttttctaaagttgatttgcgtagtgggtaccaccagattcgtatgaaattgggagatgaatggaaaactgctttc

SEQ ID NO: 5020 - DNA, 2988 bp, Zea mays
  Clone ID: TF_ZM4945.C1.o3.fg
atggcgcaaccgaagaggatgcaggagtgggaggctgagcggctgatttgtggggaccccgtgtcggcgctgaggcccgcgctagagtgggccgtgcaggtgaaatattttgggtgttacacggagcgacctccggccacggtgacctatcaggagttcctaagcacgcagccgcccttgctcatcaaggcagaggatccgttggacaccgacgtgtggttacacgtcgtggagtccaagtttcccctcctcacgggagactaccctgatgacaccaagactcgcttcgccgcgcagcagcttcgcagacctgctcggacatggtgggaccatttatgcgccatgctacctgctggtcatgaagtttcttgggaggaattcaagactgccttcaaaggacaccacattccagctaggattcttgaccacaagttgaatgatttcctagcactaaatcaaggaacccatactgtgttgcagtatgcccaggccttcaacgacctgtgccagtacacgggttatcatgttgactctgatgaaaagaagaaagaccgcttctgcaggggtctcaacaccaagctgcgtgagcgtctcaacaatgtccgggctgatagctttaatgagttggtcaacctggccatctcacaggaggactgtattatagctcaccgggcagagaagaagaggaaggcaccaatgaataaccaacctcagcagcatcaacaattccgccagggaaatgggaacaagtgcttcacttgtggcagtgtgggccattatgccaagaattgcctaaagaaccagcagaggcagatgccagcaccaaatcaagacagaggaagaaagcaaaaggtgcaagttaggcaagggaagctcaacttaactactctggaggagttacctgaaggagcacatatcatgactagtatatttttagtttttaatcaacctgcattaattctgtttgattctggtgcatctcatagtttcattagccagaagttcggtgctaaatgtcaactgcatttctatcatacaaaagcgtcattcatgatagcaacacttgggggtaaaattgcaacgaaccaattaaaccgtaatgtgactatctcactgggaagcaagatcatcaaaaccacactcctgattttgggattagagggtatggacatcattctcgaagctgactggatgactcaacaccgagtggtgttggatgtagctgccagaactctagaaatccgttctcctacctttggagaccttgcattatatctacccagccaagactctactcgatcatatgcctttgctatgatagagttacccttgaagaagattctagtggtctgtgagtatgcagatgtttttcctgataacttgccaggaatgccaccagaccgggaaattgaattcatcatcgagttgcaaccgggaacgacatctatttccaagaggccttaccggatgccacccgctgaattggcagaattgaagaaacaattgcaagaattgttagacaagggtttcatccgcccaagtacttcgccttggggatgtccagccttgttggtgaagaagaaggatgaaatcttgaggctatgtacagattaccacccacttaatgcggtgactatcaagaacaagtatcatttgcctcgtattgatgttcttttcgatcagttggtcggagccaaaatgttttccaagataaaccttcgctccggctatcatcagatcaagatacgagcaagtgatattctgaagactgtcttctcaaccagatatgggctatatgagtatttggtgatgtcatttgggctgactaatatgccagcatacttcatgtatctgatgaattctatcttcatgcccgaactggacaagtttgtggtggttttcatcgatgatatcttagtgtacacaaagaatgaagaagagcacactggtcatttacatatagtgcttcagcgtctgcgagagcaccgtctttatgccaagctgttgaaaaatcataagagcctcaaatatatctttacccaggctgatcttaacatgagacagagaagatggctagagctaatcaaggactatgacctggaggtgcactaccacccagtgaaagccaatgtggtagctgatgccttgagtcggaagtcgaaatgcaactatgttatgatggattctcgcatcaacaccctgtgtgatgagttgagcaaaatgaagattgaagtgattccttctggtgctttgtctcacatttccgttgagccaacattgcaagaccggataatcatggcccaactcagtgacaagggagtgcaaattattaaggagaacctccatcagaagccagagaagtataagtgtttccgccaagatgggaagggtatattgtggtttggaagacgattagtggttcgtaaaaataaggatctcaagaagaaaatcttggatgaggctcatctctccaaattctccatgcatctaggaagcactaaaatgtaccatgatctgaagcccttatattggtggaccggaatgaagagggagatagcccgttatgtatcagaatgtgacacatgtcagaggataaaggcaagccacttgaaattagctggtgccttgcaacccctatcaataccttcctggaaatgggatgacatcagcatggatttcattgtgggtctgcccaacacatctcggcatcatgattcgatttgggtcattgtggaccgattgacaaaagtggcaaattttcttccagtgcacaccaccgataaggctcagaagtacacagagctgtatattgatcaaatcgtgtgtttgcatggattaccccagaccattgtttctgaccgaggaacccaattcgttgctagattttttgatcaattgcaagagtctttgggaaccaagctaatgagaagttcagcttaccacccacaggctgattgtggcggaacctcccgaattattctagcttaa

SEQ ID NO: 5021 - DNA, 1504 bp, Zea mays
  Clone ID: TF_ZmC1373_22
ggtttatgaaggttttgtacctgaaaaaaaccacatatcatcaacaaaataggaaaggaccctatattgttgatgatatgtggtttatgaaggttttgtgttgcttgaagtcattctgaggtttttgtggatggggtcatacaagtcttttttcttggtgtatgctctgttacatcactaagcacttcatagatgtttgacctccgggcctgtttgacttgaatgatcttgttgaaggttttcggttttttacccaaccatggaggtctgtggtggaagggtgcccttggtggaattggtggccattgttccgatatttgtggaggactttggtgaagggcgcccttggtgtaatcttattgactgttgtagatgaagttgcaagttgatgcatttgagtacttgactcatgtcagcagcttactgtttgtggaaactatttgcgcagaatacgtgaagtggagttgaagcgtgactggaagaacaaatgctaccgctgtggtgaatcgggccatatagagagaaattgccagaacagtccaaggaatctcaggcgtgataaaagctattcacggtctccatccccacgtggtggacgtggccgcagccggagctacagcagaagccggagctatagccgatccagatccccatctggatctcccaggggtggacgccgtgaacgtgacgagaggagatctaggagtcttagctacagcaggagcgcaagccccaggcgttctgtctcacctgcaaaggaaaaggagcgcagtcgcacacccaatggcagtaggagcccaaggagccccagcccaagggctgaggtgagcccaccactgaaggataatggtgcacgcaatggctcagaccatgaaggcaaccctggtggtggagagaacagcaagaggagtcggagcccatctgatggctaccgtagccctgtggccaatgggcgcagcccgagcccgagggacgatcggagcccaagccccaagggcaacaacgaagatgacgagcgccgtggttcacctagaggaagtcagtcccccctgaactgagaaattctgatcaaatttgggccgcacgattcggttgtaactgttatattttagtttgagacaacaaactgtatttgctcatttctcatacagtcaggtttatgctttttgagctagaaaacatgtgtaagaatttgttaccttcaagctattcctggtttgtgatatggtaatacttgaactatttagcttgccaaatctgaatacttttaactatcaaaaaaaaaaaaaaaaaactcgagtttgtaggcttcgttttccttcatctaattgtcgtcgtagtcgtcgtcgtcgcgcaattaattaatggagtaagtaggaggatttgatgtgctgtgttcggttcagttcagctcccggtgctgtcttgttcgtatgtgctggatggatctgtctgttgtaagctaaactagggaggcttagttctgtgttggtccgttcctttt

SEQ ID NO: 5022 - DNA, 1891 bp, Zea mays
  unsure (1)..(1891): unsure at all n locations
  Clone ID: TF_ZM3612.C3.o1.fg
atggatcctaagggcaaggggattgtgatcaatgataaggagaaggagtccttcgtcaacgagactaaagatgacaagcctaccgactcgggctcgggccacaaacaaaaagatggaaagaagaagacgaggcacatcaaggagatcgtctactacgacgacagcgacgagtcctcttcttcccaaaaggacgacgacaacgactacgagaaaaagaagacggttaactcaaacttctctttcgattattctcgtattccgcatagctcaaatgcacatttgctttccattcctcttggcaaacctcctcactttgatggagaggactacggattttggagtcacaaaatgtgtagtcacttgttctctctccatcctagtatatgggatatagtggagagtggaatgaaatttgatagctcagatagtcctttatttatcaatgaacagattcataaaaatgcacaagctactactgtgttgttagcctcattgtgcagggacgagtaccataaggtgagcggcttggacaatgccaagcagatctgggacaccctcaagatctcacatgaggggaacgatgtcaccatgctcaccaagatggagttggtggaaggcaaactcgggagattcgcgatgataagaggggaggagccaacacagacgtacaacaggctcaagaccctcgtcaacaagataagaagctatggaagcacacgatggacggatcacgacgtcgtccgcctaatgctaaggtcctttactgtacttgatccacatctggtaaacaatattcgtgaaaatcctaggtacaccaagatgtcgcccgaagaaattcttgggaaatttgtaagcagacggatgatgatcaaggaggcgagatatgtggatgatgcattgaatggcccaatccacgagcctcaaaccgttgctctcaaagcgacaaggagcaaggaggcactacctagcaaggtggcgcaagttgaggcagccgggcttaatgaggaagaaatggcccttatcatcaagcggttcaagacggcgctaaagggtcgcaaggagcaccccaacaagaacaagacgaaggggaagtgctcctgcttcaaatgtggtaagattggtcattttatcgctaattgtcccgataatgatagtgaccgggaaaagaagagtggaaagtgggaagagaagaagaattacaagaaggcgaagggcgaggcacatcttggaaaggagtgggattcggattgctcctcgtccgactccgacaacgaaggactcgccgccactgccttcaacaagtcatctctcttccccaacgagcatcacacatgcctcatggcaaaggagaagaaggaccttttatatgaagagcatgataaatttgttagtgcacaaaactctcttgctctagaagttaaaaggaatgaaatgctttcttgcgaactatctatttgtcatgaaaccatttctactttaaaaggtgttaatgatgatttaaatgctaaactagaagtagcaaataaatctaactcttgtgtagaacatgttatgatttgcaataggtgcaaagattttaatgttgatgcttgtagtgaacacctagtttgcattgctaaattaaatgatgaagtggctagtcttaatgcccaacttaagactagcaagagtgaacttgacaagctaaaatttgcaagggatgcctacacgattggtagacacccctcaattaaggatggtcttggcttcaagagggaagtccagaacttaacaagccataaggcttccatctacgccaaggagaaagggaaggctcctatggctagtagtgctcaaaagaactatgccttcatgtatcatgataggagacatnctagaaatggttatagag

SEQ ID NO: 5023 - DNA, 4518 bp, Zea mays
  Clone ID: TF_ZM4913.C5.o4.fg
atggatcctaagggcaaggggatgatggtcaatgataaggagaaggagtccttcgtcattgatccaaaggatgacaagcctactgactcgggcacgagtcacaaaagaaaagacgggaagaagaagaaaacgaggcgcatcaaggagatcgtctactacgacgacagcgacgaatcctcttcttcccaaaagaacgacgacaacgactacgagaaaaagaagatggttaactcaaatttttcctttgattattctcgtattccgcaaagttccaatactcatttgttttccattcccctcgtatatgggagagtagaaaatggaatgcattttgatagtacggatagtcccatgttcatcaatgaacaaatccataaaaatgcacaagctactactgtccttttagcatctttatgcagggaagaatacaataaggtgagcggcttggacaatgccaagcagatctgggacaccctcaagatatcacatgagggaaatgacgtcaccatgctcaccaagatggagttggtggagggcgaacatgggagatttgccatgatcaggggagaggagccaacccaaacgtacaaccggctcaagaccctcatcaacaaaataaggagctatggaagcacacgatggacggaccacgacgtcgtccgcctactgctaaggtcttttactgtccttgatccacatcttgtaaacaatatttgtgagaatcctaggtacaccaagatgtcgcccgaagaagtacttgggaagttggtaagcgggcggatgatgatcaaggaggcaagatacgtcgacgatgcattgaatggcccaatccacgagcctcaaaccatggctctcaaagcaacaaggagcaaggaggcgctacctagcaaggtggcgcaagttgaggcggttgggcttaatgaggaagaaatgtccctcatcatcaagcggttcaaaacggcgctaaagggtcgcaaggagcaccccaacaagaacaagacaaaggggaagtgctcctgcttcaaatgtggtaagattggtcattttatcgctaattgtcccgataataatagtgaccaggaacaagataagaagagggaaaagaagaaagcttacaagaaggctaagggcgaggcacaccttggcaaggagtgggactcggattgctcgtcgtccgactccgacaacgaaggactcgctgcatcggccttcaacaaatcatccctcttccccaacgagcgtcacacatgccttatggcgaaggagaagaaggtatgtactcgaaacaatactatttatgcttcttcaagtgatgatgagtctagtgatgatgatgaaatagactattctagtttattcaaaggcttagatagaaataaaattgataagatcaatgaattgattgatgctttgaatgataagaatagattgttagaaaagcaagaggatattttgtatgaagaacatgataaatttgtagaggcacaaaaatctcttgctttagaagttaaaaggaatgaaatgctttcttgtgaactatatacatgccatgagtctatttctaacttaaagagtattaatgatgacttgaatgctaagttagaagtagcaaatagatctaactcttgtgtagaacatgttgtgatttgcaataggtgtaaagattttaatgttgatgcgtgtagtgaacatctagtgtccattacaaaactaaatggtgaagtggctagtcttaatgcccaacttaagactagcaaggatgaatttgacaaactaaaatttgcaagggatgcctacactattggtagacactcctcaattaaagatgggcttggcttcaagagggaagccaagaacttaactagtcataaggctcctattcccgccaaggagaaagggaaggcccctatgactaatagttgtcaaaagaaccatgctttcatgtaccatgataggaaattttctaaaaatgttcattatgataggagttgtaatgcttacaattcaaatgcaatgattgcctcaagttcttctattatgcataatagaaatttgactagaaaaaatgttatgcctagaagaaatgttgttcatgttcctaggaaagtaaacaatgaaccttctacaatttatcatgcttgcaatgctgcctttgcaatttgtagaaaggatagaaagttgattgctaggaaattaggggcaaaatgcaagggagataaaacttgcatttgggtccctaaggatattgtcactaaccttgtaggacccaacaagagttgggtttatgcatccgggggatcaagctggattatcgacagcggatgcacaaaccacatgacgggggagaagaagatgttcacctcctacgtcaaaaacaaagattcccaagactcaatcatattcgatgtgtctgtctttagaaggagtgatggttcattagcttttaagggtgtattagacggtaaactctatttagttgattttgcaaaagaggaggtagaccttgtgcagcttgtcaagcaggataagtctgaaacccaagggaccctcaagcgcttcctaaggagagctcaaaatgagtttgagctcaagcaaaacggtgtggtagagaggaagaacaggacgctcattgacatggcaaggacgatgcttggagagttcaagacccccgagcggttttggtcggaagccgtgaacacggcttgccatgccatcaaccgggtctaccttcatcgcctcctcaagaagacttcgtatgagcttctaaccggtaacaaacccaatgtgtcttactttcgtgtatttgggagcaaatgttatattcttgtgaagaaaggcagaaattctaagtttgctcccaaagctgtagaagggtttttgctaggttatgactcaaatacaaaggcgtatagagtcttcaacaaatcatcgggtttggttgaagtctctagcgacgttgtatttgatgagactaatggctctccaagagagcaagttgttgatcttgatgatgtagaagaagaagaggttccaacggccataatacgcaccatggcgattggagaagtgaggccacgggaacaaaaggagcaagatcaaccttcttcctcaacaatggtgcatcctccaactcaagacgatgaacagcctttcagggtagaagaggccttgctagatccagactgggtgttggccatgcaggaagagctcaataacttcaagagaaatgaagtttggacactggtgcctcgtcctaagcaaaacgttgtgggaaccaagtgggtgttctgcaacaaacaagacgagcacggagtggtgacaaggaacaaggctcgacttgtggcaaaaggttatgcccaagtcgcaggtttggactttgaggagacttttgctcctgtggctaggctagagtccattcgtattttgctagcatatgtcactcaccattctttcaggctgttccaaatggatgtgaagagcgctttcctcaacgggccaatcaaggaggaggtgtacgtggagcaaccccctggctttgaggatgaacggtaccccgaccacgttgggaaagccgatccaactttattcactaagacttgtgacggtgacttatttgtgtgccaaatttatgtcgatgacataatatttggttctactaaccaaaagtcttgtgaagagtttagcaggggtaatgactcaaaaattcgagatgtcaatgatgggcgagttgaactacttccttgggttccaagtgaagcaactcaaggagacaccttcatctcccaaacgaagtacacacaagacttgctaaagtggtttggaatgaaggacgccaagcccgcgaagacaccaatgggaaccgacggacatgtcaacctcaacaaaaggagtagaccggatattatgcttagcgtatgcatgtgtgctagatttcaatccgacccaagggagtgtcaccttgtggccgttaagcgaatccttagatatttagtcgctacgcgttgcttcgggatctggtatccaaaggagtctacctttgacttaattggatattcagacttcgactatgctggatgtaaggtcgataggaagagtacatcggggacgtgccaattcttaggaaggtccctggtgtcgtggagttcgaagaaacaaacttctgttgccctatccaccgctgaggctgagtatgttgccgcaggacagtgttgcgcgcaactactttggatgaggcaaaccctgcgggactttggctacaatctgagcaaagtcccactcctatgtgataatgagagtgctatccgcatggcggataatcctgttgaacacagccgcacaaagcacatagacatccggcatcactttttaagagaccacaagcaaaagggggatattgaagtgttttatgtgagcaccgagaaccagctagccgatatctttaccaagcctctagatgagtcgaccttttgcaggctgcgtagtgagctaaatgtcttagattcgcggaacttggattga

SEQ ID NO: 5024 - DNA, 2650 bp, Zea mays
  Clone ID: TF_ZmC31816_8
ccccttaaacgctattgaatcatcacttcttctaaagacagtaaaacctatatcttgattcccatccctgaatgtgatagctcgttggggatcttggtttttctcgtaggaggagaacatcttcttctcccctgtcatgtggtttgtgcacccgctgtcgatgatccaacttgagcccccggatgcataaaccttgccggatttattagtcaaaacataagatgcatcaaaagttttaaatgaaatgttagaatcgtttgatgcaataggagttttcttctttggcaatttagcacgggttgattgcctagagctagatgtctcacccttatacataaaagcatgattagggccagagtgagacttcctagagtgaattctcctaatcttgtgctcgggataaccgacagggtacaaaatgtaaccctcgttatcctgaggcatgggagccttgaccttaacaaagtttgacaatcttttaggaggggcattaagtttgacattgtctcccttttggaagccaatgccatccttgatgccagggtgtctcccattatagagcatgcttctagcaaatttaaatttctcattttctaagtcatgctcattaattttagcattaagttgagctatgtgatcattttgtttcttaattaaagctaggtgaacatgaatagcatcaacattaatgtctctacatctagtgcaaatggaaacatgctcaacagtagatgtagagggtttgcaagattttagttcaacaatcttagcatgtaaaatgtcattttcacttctaagattggaaatggtaacattgcaaacatctaagtcattagccttagcaattaatttttcattctcatttttaaggctagcaagagaaacattcaattcttcaatcttagcaagtaaactaacattatcgtctctaagattggaatttgaatcatctttaacattagaatcaaccttagcaattaatttagcattttcatttctaaggttggcaataatatcatgacaagtgcttagctcactagataatttttcacatttttctacttctagagcataagcattcttaaccttaacatgcttcttgttttctttaattaggaagtcctcttgagaatccaagagttcatccttctcatgaatagcactaattaattcatttaatttttctttttgttgcatgtttaggttggcaaaaagggtgcgcaaattatcctcctcatcactagaattatcttcatcactagaggatgcatatttagtggaggattttgattttaccttcttccttttgccgtcctttgccatgaggcacttgtggccgacgttggggaagaggaggcccttggtgacggcgatgttggcggcgtcctcgtcggaggaggagtcgatggagctctcatcggagtcccactcgcggcacacatgggcatcgccgcccttcttcttgtagtatctcttcttttctctcctctttcccttcttgtcgtcgcccctgtcactatcactagataatggacatttagcaatgaaatgaccgagcttaccacacttgtagcacaccttcttggaacggggcttgtaatctttccccttcctttgtttgaggatttgacggaagctcttgatgatgagcgccatctcctcattgtcgagcttggaggcgtcgatggggattctacttggagtagaatcttctttcttctcctccgttgctttgaatgcaacggtttgtgcttcgggcgtggaggagtcgccttgctcgatgatctttttggagcctttgatcattagctcaaagctcacaaatttacctatgacctcctcgggagacattagcgtgtatctaggatcacctcgaattaattgaacttgcgtagggttaaggaaaacgagggatcttagaataaccttgaccatctcatggtcatcccatttggcgctcccgaggttgcgcacttgattcaccaaggtcttcaagcgattgtacatggcttgtgggtcctcgctaaacttcttgcgctcatggcgcttagaagttacggacggcgtgtcagagccagaggtggatggcgacgaagagtcggtctcgtagtagaccaccttcttcatcttcttcttcttgtcaccgctccgacgcgacttgttgtgtgaaggggatcccttcaccttgttggcggactccccggatggagccttcccatggcttgtggcgggcttctcgccggtcccgatctccctcttggcggatgctcccgacataaatgaggtttgatccattcacaggtgaaccttacaagtttgatcccttcacaggggagcccatcaggccagatccgaaccagcgccgctcaggaagcctgtactgatcagattagttggagcgatatgccagatgagaccctgaaacaaagctagatctggataactcttcttcttgtctgccaagtgtctctgtgattttgcttgtgggctacagatcatgtaccccgagcaccatgtgtgatccagtcggactaatcatttcggcattgaaaagtcggactaactttttttgtgcccataacgctacgtattgtttggtaaaacgttcaggagtacccttttggtagattaattaaaaattcatccggtg

SEQ ID NO: 5025 - DNA, 3516 bp, Zea mays
  Clone ID: TF_ZM4892.C1.o13.fg
atgactcccgagaaagtaattgggaattttgtgagctttgaattgatgatcaaaggctcaaagaagatcaacgagcttgacggcccctccatgtccgaagcacaaccgatcgtattcaaggcgacggaagaaaagaaggaggaatctactccaagtcgaacacccatcgacgcctccaagctcgacaacgaggagatggcgctcatcatcaagagcttccgccaaatcctcaagcaaaggaggggaaaagattacaagccccgctccaagaaagtttgctacaaatgtggtaagctcggtcatttcattgctaaatgtccattatctagtgatagtgacaggggcgacgacaagaaggggagaagaaaggagaagaagaggtactacaagaagaagggcggtgatgcccatgtgtgccgcgagtgggactccgacgagagctccaccgactcctccgacgaggacgccgctaatatcgccgtcaccaagggacttctcttccccaacgtcggccacaagtgcctcatggcaaaggacggcaaaaagaaaaaggtaaaatcaagatcctccactaaatatgaaacctctagtgatgaggatgatgctagcaatgaggaggataacttacgcattctttttgccaacctaaacatgcaacaaaaggaaaaattaaatgaattgattagtgctattcatgagaaggatgatctcttggacacccaagaggactttctaattaaggaaaataataagcatgttaaggttaaaaatgcttacgctctagaagtagaaaaatgtgaaaaattatctagtgagctaagcacttgccatgatactattgccaaccttagaaatgaaaatgctcaattaatttctaaggctaaagattttgatggttgcaatgttactatttttaaccttagaagtgaaaatgatatattacatgctaaggtgatagaattaaaatcttgcaaaccctctacatctaccgttgaacatgtttctatttgcactagatgtagagatgttgatattgatgctattcatgatcatatggtcttaattaagcaacaaaatgatcatatagcaaaattagatgctaaaattgccgagcatgaacttgaaaatgaaaaatttaaatttgctcgtagtatgctttatagtgggagacgccctggcataaaggatggcattggcttccaaaagggggacaatgtcaaacttaatgcccctcctaagaaattgtccaactttgttaagggcaagtctcccatgcctcaggataacgagggttacattttataccctaccggttatcccgagagcaagattaggagagttcactctaggaagtctcactctggccctaatcatgcttttatgtataagggtgagacgtctagctctaggcaatcaacccatgctaagttgcctaagaagaaaactcctaatgcatcaaatgaccatagcatttcattcaaaacttttgatgcatcatatgttttaactaacaaatccggcaaggtttatgcatccgggggctcaagttggatcatcgatagcgggtgcacaaaccacatgacaggggagaagaagatgttctcctcctacaagaaaaaccaagatccccaaagagcgatcacattcggggatggaaaccaaggtttggtcaaaggtgtcactgtctttagaagaagtgatgattcaatagcatttaagggagtgttagagggtcagctatacttggtagattttgataaagctgaactcgacacttgcttaattgctaagactaacatgggttggctctggcaccgccgactagctcatgttgggataaagaatcttcataagcttctaaagggagagcacattttaggcttaacaaatgttcattttgagaaagacaggatttgtagcgcatgtcaggccaggaagcaagttggtgttcatcatccacacaagaacatcatgacgactgacaggtcactggagctcctacacatggacctatttggcccgatcgcttacataagcatcggcgggagtaagtactgtctagttattgtggatgattattctcgcttcacttgggtgttctttttgcaggaaaaatctcatacccaagaaaccttaaagggattcttgagatgggctcaaaacgagtttggcttaaggatcaagaaaattagaagcgacaacgggacggagttcaagaactcacaaatcgaaggcttccttgaggaggagggcatcaagcatgagttatcttctccctacaccccacaacaaaatggtgtagtggagaggaagaataaaactctattggacatggcaagaaccatgcttgatgagtacaagacttcggatcggttttgggtcgaggcggtcaacaccgcctgctacgccatcaaccggttgtatctacaccgaatcctcaagaagacatcatatgaactccttaccggtaaaaagcccaatatttcatattttagagtctttggtagcaaatactttattcttgttaaaagaggtagaaaaactaaatttgctcctaagactgtagaaggctttttactaggatatgattcaaacacaagggcatatagagtctttaacaagtcctttggacaagttgaagtttcttgtgacgttgtgtttgatgagactaacggctctcaagtagagcaagttgatcttgatgagataggtgatgaagaggctccgtgcatcgcactaaggaacatgtccattggagatgtgtgtccaaaggaatccggagagcctccaagtgcacaagatcaaccatcctcctccacgcaaccatctccaccaactcaaaatgaggatgaggctcaagttgatgaagaagaagatcaaagagatgagccacctcaagatgatggcaatgatcaagggggagatgcaaatgatcaagacaaggaggatgaagaaccaagaccgccacacccaagagtccaccaagcaatccaacgagatcaccccgtcgacaccatccttggagacatttataagggggtaaccactagatctcgtgttgctcatttttgtgaacattactcttttgtttcctctattgagccacacaaggaatgtcaaaatgttgtaggaaccaagtgggtcttccgcaacaagcaagacgagcatggtgtggtgacaaggaacaaagcccgacttgtggccaagggatactcccaagtcgaaggtttggatttcggtgaaacctatgcaccagtagctaggcttgagtcaattcgtatattattagcctatgctacttaccatggcttcaagctttaccaaatggacatgaagagtgccttcctcaatggaccgatcaaggaagaggtctatgttgagcaacctcccggctttgaagacagtgagtatcctaaccatgtctataggctctctaaggctctttatgggctcaagcaagccccaagagcatggtatgaatgcctaagagatttccttattgctaatggcttctga

SEQ ID NO: 5026 - DNA, 2805 bp, Zea mays
  Clone ID: TF_ZM5039.C1.o1.fg
atgtcgggagatcacgccaagaaggagatggagaacggcgaaaagcccactacaagccacgggagcacttcatcggaagagtcccgcaccaagaggaaggagaagaaagactcctccaaagggaaggagaagaagaaggactcctccaaggggaaggagaagaaatcttcttcacacaaagaaaagaaggagaagtcttcctcccacaagccgcaacggagtggggacaagaaaaagagaatgaggaaagtggtctactacgagaccgattcttcagcgacatccacctccggctccgacgcggcgtccgtcacttctaaacgccaagagcgtaagaagtatagtaagattcccctacgctaccctcgcatttctaaacatacacctttactttccgtcccattaggcaaaccaccaacttttgatggtgaagattatgctaggtggagtgatttaatgcgatttcatctaacctcactccacaaaagtatatgggatgttgttgagtttggtgcacaggtaccatccataggggatgaagactatgatgaggatgaggtggcccaaatcgagcacttcaactctcaagcaacaacaatactcctcgcctctctaagtagagaagagtataacaaagtgcaagtattgaagagcgccaaggaagtttgggatgtgctcaaaaccgcacacgaaggagatgagcttacaaagatcaccaagtgggagacgatcgagggggagctcggtcggttccggcttcgcaaaggggaagagccacaaaacatgtacaaccggctcaagaccttggtgaatcaagtgcgcaacctcgggagcaaaaagtgggatgaccatgaggtagttaaggttattctaagatctcttattttccttaaccctactcaagttcaattaatccgtggcaacccaagatatacactattgacccccgaggaagtaatcgggaattttgtgagttttgagtgcatgatcgaaggctcgaggaagatcaacgagcttgatgatccctccacatccgaagctcaacccgtcgcattcaaggcgacggaggaaaagaaggaggagtctacaccaagtagacaaccaatcgacgcctccaagctcgacaatgaggaaatggcgctcgtcatcaagagcttccgccaaatcctcaaacaaaggagggggaaagactacaagtcccgctccaagaaggtttgctacaagtgtggtaagctcggtcactttattgccaaatgtccattatcaagtgacagtgacagggataacgacaagaagggcaagaggagagaaaagaggaggtaccacaagaagaggggcggtgatgcccacgtgtgccgcgagtgggactccgacgagagctccaccgactcctccgacgatgaggacgccgccaacatcgccgtcaccaagggactcctcttccccaacgtcggccacaaatgcctcatggcaaaggacggcaaaaagaagaaggttaaatcaaaatcctccactaaatatgaatcttctagtgatgataatgctagtgatgaggaagataatttgcgtactctttttgccaaccttaacatggaacaaaaagaaaaattaaatgaactaattagtgccatccatgagaaggatgatctcttagactcccaagaggacttcctaatcaaggaaaataaaaaacatgttaaggttaaaaatgcttatgctctagaagtagaaaaatgtgaaaatttgtctagtgatctaagcacttgccatgagacaatagacaaccttagaaatgaaaatgctaacttgttagctaaggttgattctcatgtttgtaatgtttcaattaccaattctagaaataatgatgatgatttacttgctagaattgaagaattgaacatttctcttgctagccttagaattgaaaatgaaaaattgcttgctaaggctaaaaattttgatgtttgcaatgctactatttccgaccttagaactaagaatgacatgttacatgctaaggttgtagaattaaaatcttgcaaaccctctacatctattgttgagcatgtatctatttgtactagatgtagagatgttgatatcaatgctattcatgatcacatggctttaattaaacaacaaaatgatcatatagctaaattagatgctaaaattgtcgagcataacttagaaaatgaaaagtttaaatttgctagaagtatgctctataatgggagacgccctggcatcaaggatggcattggcttccaaaggggagacaatgtcaaacttaatgcccctcctaaaagattgtctaatttcgtaaagggcaaggctcccatgcctcaggataacgagggttacattttataccctgccggttatcccgggagcaagattagaagaattcactctaggaagtctcactctggccctaaccatgcttttatatataagggtgagacatctagctctaggcaaccaactcgtgctaagttgcctaagaagaaaactcctagtgcatcaaatgatcatgacatttcattcaaaacttttgatgcatcatatgtcttaactaacaaattcgggaaggtttatgcatccgggggctcaagttggatactcgacagcgggtgcacaaaccatatgacaggggagaaaaggatgttctcctcctacgagaaaaaccaagatccccaacgagctatcacattcggggatggaaatcaaggtgtcactgtctttagaagaagtgatgattcaatagcatttaagggagtgttagagggtcagctatacttg

SEQ ID NO: 5027 - DNA, 4040 bp, Zea mays
  Clone ID: TF_ZmC13633_1
ttggtaaaggcctagttgttgaggaggagcagcaatgacaggaccaaagaatcaaatggacaaggacaaggggcctaaacttaacgacgatgagtgtgtctcgtctatagtaaaattgacgcccaagatgcatacggactccgattgcgacggacttgatatggttggaacgacatcctgtgagcagctcgatcgacgatttgctgaacttattacacacatggaggtactggaggctcttgaaccaccaccaacgttagccttatgtctttgtcctgcgacaccgactgatgggccctttggccgtgtatcgcgtcggcgacgattaggaggtaatcgacggggtatgggagccctaatacactatttattcagcagccgccgccacattaggtttgggttttgcttagatcaattcagtcatcgaacagtaaaaagaattgcagggtcgtcaacaacagaggagcagcactttcgctccacgccagccaccggcgccagccaaggcgtcatcatcttcgggggtacggacgtccacatcttccactgtaccttcgggtgttgcagcaaaacctgctacaaccacctcttccacaggccgctcctccgacatcaagtgccaccgctgccagggacttggtcatattcaacgagattgccccagcaaacgggcatacattgctactggtgatggtgggtatgttagtgcttctgatgttgaagatgaagatactgttggagctaacattgcagagacttatgatggtgatgaagaggttcttggtacaacagcgaccgagacctataaggccttgattatgcaacgagctttgagtaccacggctagtgacgacgacaacagacagctccgcaaccttttcaacatgttcctcatcgtcaaggactgccgtgtacataccatcattgacggtggtagctgcaacaacttggtgaacgttgagggaaagaaaattgtgttgcttcctatgactcccactgagattgtccactttgaacatgagaaaaagactaatgctaagcaaaaaggtgttttgaactctgaaaatcagcaacctattaagttaaaaactcctactttgctagccactaaatctgatcttgatgagttacatgcctctcttggactttgctatgccttagtgtgcaaaaatgctttctattccattgatgatacatctattgtcttgccacctgctattgctaaccttttgcaagagtatatggatgtgtttccctccgagataccccctggattgccacctgtgcgaggcattgagcacaagattgatttaattccaggggcgagcttgcccaaccgtgctgcctacaggaccaaccccgaggagactaaggagattcagcgccaggtccaagaccttctcgaccgcgggtatattcgtgagagccttagtccttgttctgttcctattcttttggttcctaagaaagatggcacttggcgcatgtgtgttgattgtagagccattaataacatcacaattcggtacagatatcctattcctagattggatgacatgcttgatgaattaagtggttctattgttttctctataattgacttgcgtagtggataccaccagattcgtatgtctttaggtgatgaatggaaaactgcatttaaaactaagttcagtctttatgagtggttagtcatgtcttttgggttaactaatgcgcctagcacttccatgagattgatgaacgaggttttacgtgctttcatcggtaaatttgtggtgggcattgagatggatgaggcaaaaattgttgccatcacgagctggccacttccaaccacggtcacgcaggttcaaagttttcttggtcttgcaggattctacaggcgatttgtgcgggatttcagcaccattgcagcacctctccacgagttgactaagaatggagtgtcgtttcgttggggaccatcacaacagcaagcctttgatgccctcaagtcgaagctcacacaagcaccactgctgcaacttcctgattttgacaagacattcgagctcggagaagcacatggagatggcttgatgggacattttggtgttaagaagaccgaggatgtgttgtttactcatttctattggcctcggatgcggcgtgatgttgagcgctacgtctctcgttgcaccacgtgcaacaaagctaagtcccgacttaacccccatggtctttatttgcctcttcctgttcctcgtgcaccttgggaggatatttctatggattttgttttgggattgcctagaacaaagagggggagtgatagtgtttttgtcattgtcgatcgtttttcaaagatgacacattttataccctgtcagaaaactgataatgcttcacatattgctgatttgttcttcactgagattgtgcgtttgcatggtgtgccaaatactattgtttctgatagggatgctaaatttttaagtcatttttggagaactttgtggtttaaattgggaacaaagttgttgttttctactacttgtcatccccaaactgacgggcaaacagaggttgttaatcacactttatctaccatgttgcgggctattttgaaggataatttgaggttgtgggaggaatgtttgccacatattgagtttgcttataacagatcgattcattccacaaccaagcttagtccatttatggtagtatatggttttaatcctcgtgccctaattgatttgctacctttaccaccttctgaaatagtgaacttggatgctacacaacgttctgaatttattcttgagttacatgaaacaactaagttgcaaattgaaaagatgaatgaaaagtattgtattgctgctaataaaggtaggaaggaaatgaaattggaacctggtgacttggtgtgggttcatttgagaaaggataggtttcctgatttgagaaagtctaaacttatgccacgagctgcaggtccttataaagttcttgcaaaaattaatgataatgcatatacacttgagttgccgccagattttggggttagttccacctttaacatttcagatttgaagccatatatgggtgacgaggatgaggccgagtcgaggaagactccaattcaagaggaggaggatgatgaggacatcacttctatatatacaatgaatggaccgataacacgatctcctgcacgacagctaaatctccaggtaccttggagaggaccaacaaggacatgggaaagggataagccttcgtggcgaggtcattcgtgtgtcacgggtgataaccaacggagccgtggtgtagtgattgcgaggaaccgttcgctcggagccttggatcatcaacgtcgagatctccactcaatcaaattatcgtatctcacggaagatcgggccgcgtctactatcagtgtcccccgctggggcgccagcgtcgtcgactcgctcgacagccaacgaggtgccacctcctgcttggccatggttgccccgcctccttctcctgcggcgaggaaggcgacgggacaaacccagatgttgttcttccgccatggggggaaaacgtcgtcgattccgccaccgtcgggcgggctgatggccaccattatcgctgtcgcgcggtggaggaaggagtaccatgtcgtagttgccgtcaagggacatgaacttgagactcccgaaacggagcagcgtcccgggttgaagaggttgctggagactacccatctggagcttgatgggaagctgttcgtcaacacgcagcagtcccctacctggcgcgccaactatcggcgtttcgaccccggggggtccctggaccgacgacgtggtcggtccgagcccaaggtcgggcgaggcggagactcctccgaggtcgagattgaggccgagccctgggctcaggcgaggcggagaccgtcttccgaggtcgaggttgaggccgagccctggggtcgagtgaggcggagaccgtcttccgaggtcgaggcgggggccgagccctggggtcgggcgaggcggtga

SEQ ID NO: 5028 - DNA, 5252 bp, Zea mays
  Clone ID: TF_ZmC13633_2
gcgttcgtgcgcccacgcgtccgcttttcgctcggtgctccgtttgagctcaaatttttacagcagattcctgactccatggatgttttgatgattaggtaccttggagaggaccagcaaggacttgggaaaggccaaggtgttgaggaggagcagcaagggcgtccacaacagaacaggtactcttttgcaatcacacccacgctcgttggacagtcacactggtcaccgtttgccacctgcagtgctggaccaaagaatcaaatggacaaggacaaggggcctaaacttaacgacgatgagtgtgtctctcaaatggaattgaaggagatgatgcgcgcgatgactgaaggttttaaaaaataccaggactctgcctcgacatcctatgagcagcttgatcgacgagttgctgaacttgttacacgcatggacgtactggaggctcgtcccccaccaccaactccagccccagctcactctcctgtggacgacgacgacgatgacgacgatgtttatgcaccgctgcgacaacgcctcgcacgtaatcgacaaggtatgggaggtaatggtagacgtcgtcatcataatcctgaaccagaccatgatccatttgctaagattaagttttctattccaccgttcatgggttcttatgatgctgaagcttacttagactgggagatgacggtagaacaaaaatttaattcccatcttgttcctgagcagcataggggagacatgtcggtacaggaatactaccaagaacttcagaaagaaaaagaattgcagggtcgtcaacaacggaggagcagcactttcgctccacgccagccaccggcgccagccaaggcgtcatcatcttcgggcgtacggacgtccacatcttccactgtaccttcgggtgttgcagcaaaacctgctacaaccacctcttccacaggccgctcctccgacatcaagtgccaccgctgccagggacttggtcatattcagcgagattgccccagcaaacgggcatacattgctactggtgatggtgggtatgttagtgcttatgatgttgaagatgaagatactgttggagctaacattgcagagacttatgatggtgatgaagaggttcttggtacaacagcgaccgagacctataaggccttgattgtgcaacgagctttgagtaccacagctagtgacgacgacaacagacagcgccacaaccttttcaacatgttcctcatcgtcaaggactgccgtgtacataccatcattgacggtggtagttgcaacaacttggtgaacgttgaggtggtcaagaagcttggcttgaccacacgagagcatccccaccattatcacattcaatggtttaacaacaacggtaagttcaaggtaacaaaaacaacaagggtgcatttttctattggctcttaccatgactttgctgattttgatgtggtgactatggatgcttgctctcttttactgggacgtccttgggagtttgatactgatgctattcaccatggtagatctaataaatatacttttatgcacaagggaaagaaaattgtgttgcttcctatgactcccactgagattgtccactttgaacatgagaaaaagactaatcctaagcaaaaaggtgttttgaactctgaaaatcagcaacctattaagttaaaaactcctactttgctagccactaaatctgatcttgatgagttacatgcctctcttggactttgctatgccttagtgtgcaaaaatgctttctattccattgatgatacatctattgtcttgccacctgctattgctaaccttttgcaagagtatatggatgtgtttccctccgagataccccctggattgccacctgtgcgaggcattgagcacaagattgatttaattccaggggcgagcttgcccaaccgtgctgcctacaggaccaaccccgaggagactaaggagattcagcgccaggtccaagaccttctggaccgcgggtacattcgtgagagccttagtccttgttctgttcctgttcttttggttcctaagaaagatggcacttggcgcatgtgtgttgattgtagagccattaataacatcacaattcggtacagatatcctattcctagattggatgacatgcttgatgaattaagtggttctattgttttctctaaaattgacttgcatagtggataccaccagattcgtatgtctttaggtgatgaatggaaaactgcatttaaaactaagttcggtctttatgagtggttagtcatgccttttgggttaactaatgcgcctagcactttcatgagattgatgaacgaggttttacgtgctttcatcggtaaatttgtggtggtatattttgatgatattcttatctatagtaagtctcatgatgatcatattgaacatttacgtgctgtttttgatgttttgcgtgatgcacgtttatttggtaaccttgagaagtgcaccttcagcaccgatcgtgtgtcttttcttggatatgttgtgacatcgcagggcattgagatggatgaggcaaaaattgttgccatcacgagctggccacttccaaccacggtcacgcaggttcaaagttttcttggtcttgcaggattctacatgcgatttgtgcgggatttcagcaccattgcagcacctctccacgagttgactaagaatggagtgtcgtttcattggggaccatcacaacagcaagcctttgatgccctcaagtcgaagctcacacaagcaccactgctgcaacttcctgattttgacaagacattcgagctcgagtgtgatgcgagcggcattgggattggaggagtgctcattcaaggaggtaaacctgttgctttctttagtgaaaaattgaatggtccaactctgaattattctacatatgacaaagaattatatgctttagtacgagttttacaaacttggcaacattatctatggtctaaagaatttgtcatacattcggatcatgaatctttgaagtatcttaagggacaatctaatctaaacaaacgacatgctaaatggattgaattcatagaatcatttccttacattattaagcataaaaaaggaaaggataatgtaattgctgatgctttatctagacgttatactatgctgtcccaacttaatcataaaatatttggtttggagactataaaggaattatatgctgctgatttggacttcaaagatgcttttgaaaattgcagagagggaagaacgtggcaaaaatttatgctgcgtgaaggccttctctaccgtgctaacaagttgtgtgttccagctagctccgttcgtcttctactcttgcaggaagcacatggaggtggcttgatgggacattttggtgttaagaagaccgaggatgtgttatttactcatttctattggcctcggatgcggcgtgatgttgagcgctacgtctctcgttgcaccacgtgcaacaaagctaagtcccgacttaacccccatggtctttatttgcctcttcctgttcctcgtgcaccttgggaggatatttctatggattttgttttgagattgcctagaacaaagagggggagtgatagtgtttttgtcattgtcgatcgtttttcaaagatggcacattttataccctgtcacaaaactgataatgcttcacatattgctgatttgttcttcactgagattgtgcgtttgcatggtgtgccaaatactattgtttctgatagggatgctaaatttttaagtcatttttggagaactttgtggtgtaaattgggaacaaagttgttgttttctactacttgccatccccaaactgacgggaaaacagaggttgttaatcacactttatctaccatgttgcgggctattttgaaggataatttgaggttgtgggaggaatgtttgccacatattgagtttgcttataacagatcgattcattccacaaccaagcttagtccatttatggtagtatatggttttaatcctcgtgccccaattgatttgctacctttaccaccttctgaaatagtgaacttggatgctacacaacgttctgaatttattcttaagttacatgaaacaactaagttgcaaattgaaaagatgaatgaaaagtatcgtattgcttctaataaaggtaggaaggaaatgaaattggaacctggtgacttggtgtgggttcatttgagaaaggataggtttcctgatttgagaaagtctaaacttatgccacgagctacaggtccttataaagttcttgcaaaaattaatgataatgcatatacacttgagttgccgccagatattggggttagtcccacctttaacatttcagatttgaagccatatatgggtgatgaagatgagaccgagtcgaggacgactccaattcaagaggaggaggaggatgaggacatcacttctatacatacaatgaatggaccgataacacgatcacgtgcatgacagctcaatctctaggtacgttctaccctagtcaattgtgtttcagagcttacgcttggggccatggatgttttgatgattaggaaccttggagagaaccagcaaggacttgggaaaggccaaggtgttgaggaggagcagcaagggcacccacaacaggaaggagatcaagtccgactcggctgcgactccatctcgggttccaggaccagtctgcactaaaatggacgcccaagatgcatccggactccgattgcgacggacttgatatggttggaaagataaggagattatctaaccaacccaactggttccaccctaaaattcatccggagtcaacgggaatcgtcgaaacaagtcagcgttcagattctgttttggtgctgcgacaccgtctgttgggccgttgggccgtgtatcgcgtcggagcccattaggggcgagtccaggggtcacgcacgccctaatactctatttattcagccgccgccgccacatttaggtttgggttttgcttagattaattctgtcatcgaacagtgtcgccgtcatcggtttgtgagaccccatctcgtaatcaatacaattttggttgcgtttctttcatccccaaaaaactctttaagtggagtggtcctcgactcaagctcaaaaaaaaaaaaaaaaaaaaaaaaggaaaaaaaaaaaaaaaaaaaaaaaaaaaaaaaaaaaaaaaaaaaaagagaataatccgaggg

SEQ ID NO: 5029 - DNA, 498 bp, Zea mays
  Clone ID: TF_ZM4628.C6.o10.fg
atgaccaactcttccacaggccgctcctccaacatcaagtgccaccgctgccagggacttggccatattcagcgagattgccccagcaaacgggcatacattgctactggtgatggtgggtatgttagtgcttcttatgttgaagatgaagatactgttggagctaacattgcagagacttatgatggtgatgaagaggttcttggtacaacagcgaccgagacctataaggccttgattgtgcaacgagctttgagtgccacggctagtgacgacgacaacagacagtgccacaacctcttcaacatgttcctcatcgtcaaggactgccgtgtacataccatcattgacggtggtagttgcaacaacttggtgaacattgaggtggtcaagaagcttggcttgaccacacgacagcatccccacccttatcacattcaatggtttaacaacaatggaaccttggagaggaccatcaaggacttgggaaaggcctag

SEQ ID NO: 5030 - DNA, 292 bp, Zea mays
  Clone ID: TF_LIB3079-025-Q1-K1-D3
gttgatttttctgacagcgcgtctcttgctgctgctttgaagctcgaccagaaggtggtcaaggaacgcccagtcagaatcagatgtgctgttccaaaaaaggatgaccaaaaagtcaatgacaatgggaactcagatcatctgaaaagtgaaactaggacatgctatgaatgcggaacccctgggcactcttcttcttcttgccctaataagaaggattctgaagcaaggaagagctatgaatgtggcaccccggtgcacctctcttgtgcttgcccaaataataacgatt

SEQ ID NO: 5031 - DNA, 1830 bp, Zea mays
  Clone ID: TF_ZmC29741_64
gggtaccctcgggcccggccgggctagcgcacgctcgcccagccgccgcccctagcgcgcgctgcccagccgccgctccctgcacgctcgccactgctgttcgtgccgattcgcagcaccgccggccgacgttgcgagcatgaggaagtgaacatcttcttctcccccgtcatatggtttgtgcatccgctgtcgataatccagcttgaacccccggatgcataaacctgcaaggcaaatttaggcttgggacttaggtacccaactcatgttgggtcctacaagattgcgatccgtttccgagcttcgaggaatcaaagatcaagcgtgggcgaccaagtgatccagttctttgagttccacgagattgaagacctgagcatcagtttggtgaagggtgcctttctaggaatccttgttcttgacgtaggaggtgaacatcttcttctcccccgtcatgtggtttgtgcatccgctgtcgataatccagcttgagcccccagatgcataaacaaaagaagaacttgaagcaatcatagcatgtgaatcataagcataactcctatgagcatttctagaaaattttctataactatagatgaaagcatgattcctttgagcactattagccataggggccttccctttatccttgacgggaatgggatccctttggcttgttaagttcttggcttcctttcgaaagccaagcccatccttaattgaggggtgtctaccaaccgtgtaggcatccctagcaaattttaatttatcaaagtcacttttgcaagtcttaagttgagcattaagacttgctacttcatcatttaatttagaaatggaaactaaatgttcatcacatgcatcaacattaaaatccttgtataaaatgtcttcttgcttctccaaaagtctatccttctcatttaaggcatcaattaattcattaattttatctacctttgctctatctaagcctttaaataaatcggtatgatatacttcatcatcgctagagtcatcatcacttgaagtagtatacttaggagtttctcgaatgcttacctttttctcctttgccattaggcaggtgtggcgttcgttggggaagagagaggacttgttgaaggctgaggcagtgagtccttcgtcatcggaatcggaagacgagcagtccgagtcccattcctttccgatgtgtgcctcgccctttgccttcttatagctctttttcttctctttcttcccgccctttccttgttcctggtcactagagttatcgggacaatttgctataaaatgaccagtcttaccgcacttgaagcaggagtgctttccctttgcattgttcttgttagggtactccttgcgtcctttcaatgtggtcttgaagtgctttatgattagggacatctcatcctcgtttagcccggccaccacaacttgtgccaccttgctaggtagcgcctccctgctgcttgttgctttgagagcaacaggttgaggctcgtagacgggtagagggccattgagagcatcatcaacgtatcgcgcttccttcaccatcatccgcccgctcacaaatttcccaagaatctcctcgggagtcatctttgtgtacctgggattttcatggatgaggttcacaagatgaggatcaataacagtgaaggacctgagcataagtcggacgacgtcgtggtccgtccatctcgtgcttccatagctcctgatcttgttgaccagggtcttgagcctgttgtacgtttgtgttggctcttctcccctgatcattgcgaaccttcctagctcgccttccaccaactccat

SEQ ID NO: 5032 - DNA, 4179 bp, Zea mays
  Clone ID: TF_ZM4707.C6.o5.fg
atgtcgggagatcacgccaagaaggagatggagaccggcgacaaacccgctacaagccacgggaaggcttcatcgaaagagtcccgcaacaaggaaaagaggaaggacaagaagaaggaaaagattacttcttctcacaagtcgcatcggagtggcgacaaaataaagaagatgaggaaggtggtctactacgaaaccgacacttcatcaccttctacctccggctccgacaccccctccataacttctaagcgccatgagcgcaagaagtttagtaagatccctctacgctaccctcgcattactaaacatactccattagtttccgttcctttaggcaaaccgccaacctttgacggtgaagattatgctaggtggagtgatttaatgaaatttcatctaacctcactccacaaaagtatatggaatgttgttgagtttggagcacaggtaccatccgtaggggatgaggactatgatgaggacgaggtggcccaaatcgagcacttcaactcccaagcaacaaccatactcctcgcctctctaagcagggaggagtacaacaaggtgcaaggattgaagagcgccaaggaagtttgggacgtgctcaaaaccgcgcacgagggtgatgaactcaccaagatcaccaagcgggaaatgatcgagggggagctcggtcgcttccgtcttcgccaaggggaggagccacaagacatgtacaaccggctcaaaaccttggtgaatcaagtgcgcaacctcgggagcaagaaatgggatgaccacgaggtggttaaggttattttaagatcactcattttccttaacccaactcaagtacaattaattcgtggtaatccaagatatacactaatgactcccgaggaagtaatcgggaattttgtgagctttgaatttatgatcaagggttcacggaagatcaacgagcttgacggtccctccacgtccgaagctcaaccggttgcatttaaggcgacggaggagaagaaggaggagtctacaccaagtagacaaccaatcgatgcctccaagctcgacaatgaggaaatgacgctcgtcatcaagagcttccgccaaatcctcaaacaaaggagggggaaagactacaagccccgctccaagaaggtttgctacaaatgtggtaagcttggtcactttatagctaaatgtcctatttctagtgacagtgataggggtgacgacaagaaggggagaagaaaggagaagaagagatattacaagaagaagggtggcgatgcccatgtttgtcgagagtgggactccgacgaaagctctagcgactcctccgacgacgaggacgccgccaacatcgccgtcaccaagggacttctcttccccaacgtcggccacaagtgcctcatggcaaaggacggcaaaaagaagaaggttaaatctaaatcctccactagatatgaatcctctagtgatgaaaatgctagtgatgaggaagataacttgggcactctttttgccaacttaaacatgcaacaaaaagagaaattaaatgaattaattagtaccatccatgagaaggatgacctcttggactcccaagaggacttcctaatcaaggaaaacaaaaagcatgttaaagttaaaaatgcttattctctagaagttgaaaaatgtgaaaaattatctagtgaactaagcacttgccatgagaatatagacaaccttagaaatgagaatgctaatttgttagctaaggttgattctattgcttcaaaattagatgctaaaattgccgagcatgaacttgaaaatgaaaaatttaaatttgctcgtagtatgctttataatgggagacgccctagcattaaggatggcattggcttccaaaagggggacaatgtcaaacttaatgcccctcctaagaaattgtctaattttgttaagggaaaggctcccatgcctcaggataacgagggttacattttgggtgagacatctagctctaggcaaccaacccgtgctaagttgcctaagaagaaaactcctagtgcatcaaatgaacataacttttcatttaaaacctttgatgcatcatatgttttgactaacaaatccggcaaggtttatgcatctgggggctcaagttggatcatcgacagcgggtgcacaaaccacatgacaggggagaagaagatgttctcctcctacgagaaaaaccaagatccccaacgagctatcacattcggggatggaaatcaaggtgtcactgtctttagaagaagtgatgattcaatagcatttaagggagtgttagagggtcagctatacttggtagattttgatagagctgaactcgacacttgcttaattgctaagactaacatgggctggctctggcatcgccgactagcacatgttgggatgaagaatcttcacaaacttctaaagggagagcacattttaggattaacaaatgttcattttgagaaagacaggatctgtagcgcatgccaagcagggaagcaaattggtgcccatcatccacacaagaacatcatgacgactaacaggccactagagctcctacacatggacctattcggcccgattgcttacataagcatcggcgggagtaagtactgtctagttattgtggatgattattctcgcttcacttgggtattctttttgcaggaaaaatctcatacccaagagaccttaaagggattcttgatacgggctcaaaatgagttcggattaaggatcaagaaaattagaagcgataacgggacgaagttcaagaactctcaaattgaaggcttccttgaggaggagggcatcaagcatgagttctcttctccctacacgccacaacaaaatggtgtggtggagaggaagaatcgaactctattggacatggcaagaaccatgcttgatgagtacaagacttcggatcggttttgggccgaggcggtcaacaccgcttgctacgccatcaaccggttgtatctacaccgaatcctcaagaagacatcatacgaactcctaaccggtaaaaagcccaatatttcatattttagagtatttggtagcaaatgctttatacttgttaaaagaggtagaaaatctaaatttgctcctaagactgtagaaggctttttactaggatatgactcaaacacaagggcatatagagtctttaacaagtcctctggacaagttgaagtttcttgtgacgttgtgtttgatgagactaacggctctcaagtagagcaagttgatcttgatgagatagcatctccaccaactcaaaatgaggataaggctcaagttgatgaaggagaaaatcaagcaaatgagccacctcaaaatgacggcaataatcaagggggagatgcaaatgatcaagataaggaagatgaagaaccaaggccgccacacccaagagtccaccaagcaatccaacgagatcaccccgtcgacaccatcctcggcgacattcataagggggtaaccactagatctcgtgttgcacatttttgtgagcattactcttttgtttgctctattgagccacacagggtagaggaagcacttcaagattcagattgggtggtagcgatgcaagaggagctcaacaacttcactagaaatgaggtatggcatttagttccacgtcctaaccaaaatgttgtaggaaccaaatgggtgttccgcaacaagcaagacgagcatggtgtggtgacaaggaacaaagctcgacttgtggccaaaggatactcccaagtcgaaggtttggattttggtgaaacctatgcacccgtagctaggcttgagtcaattcgtatattattggcctatgctacttaccatggctttaagctttatcaaatggacgtgaaaagtgccttcctcaatggaccaatcaaggaagaggtctatgttgagcaacctcccggctttgaagacagtgagtatcctaaccatgtctataagctctctaaggcgctttatgggctcaagcaagccccgagagcatggtatgaatgccttagagatttccttatttcaaatggtttcaaagtcggaaaggccgatcctacactctttaccaaaacacttgaaaatgatttgttcatatgccaaatttatgttgatgatattatatttgggtctactaactga

SEQ ID NO: 5033 - DNA, 2106 bp, Zea mays
  Clone ID: TF_ZM4715.C1.o9.fg
atgtcgggagcacccgccaagagggagatcgggaccggcggcgacaagtccgcaagctcggggagaactcactcgagggagtccggccacaagcacaaggaggaatcctcttcctgcatcaagacacaacggagatgtgataagaagaagaagatgaagaaggtggtctactacgagaccgactctttgtcaccctccacctccggctccgaatcggcatccgccacttctaagcatcatgagcgcaagaagtatagtaagatgcccctctgctatcctcgcatttccaaacgcactccattactttctgtcccattaggcaaaccaccggtaccgaaggaaggggacaaagactatgattcagaggaggttgaacaaatccggcacttcaactcccaagccactactatactcctcgcctctctaagtcgagaggagtataataaggtgcaagggttgaaaagtgccaaagagatttgggacgtgctcaagaccgcgcacggaggagatgaggtgaccaagatcaccaagcgggaaacgatcaagggggagcttggtcgattcatgctcaaccaaggagaggagccacaagccatgtataaccggctcaagaccttggtgaatcaagtgcgcaacctcgagagcacaaaatgggatgaccatgaaatggtcaaggttattctaggatcactcgtttttcttaaccctactcaagttcaattgattcgtggtgatcctagatataagctaatgtctcccgaggaggttataggaaagtttgtgcaacccatcgccttcaaagcgacggaggagaagaaagaagagtctacgtcaagtaggctccccatcgacacctccaagctcgacaacgaggagatggcgctcatcatcaagagctttcgccaaatcctcaagcaaaggaaggggagagactacaaaccccgttccaagaaggtttgctacaagtgtggtaagctcggtcactttatagcaaaatgtcctatttctagtgacagtgataggggcgatgacaagaggggaaagaagaaggagaagaagagatactacaagaagaagggcggcgatgcccatgtgtgtcgggaatgggactccgatgagagctccaccgactcatcctccgacgaggacgccacaaacatcgccgtcaacaagggtctcctcttccccaacgtcggccacaagtgcctcatggcaaaggacggcaagaagaagccaagaggacttattaaggaaaacaagaagcatgttaaggttaaagatgcttatgctcaggaagtagaaaaatgtgaaaaattaactagtgagcttagcacttgccatgacactatctccaaccttaggaatgagaatgctaaattaattgctaaggttgagaaattaaatgtttgtgatgattctcttgtcaaacttaaaaatgataatgctagtttgattgctaagattgataagttgaatgaatctctttctagccttaagattgagaatgataaattaatttctaaggctaaggatttaaatgtttgcaatgtttctatttccaatcttagaaatgagaatgacatgttacatgctaagattgatgaattaaatgcttgcaaacccactacatccaccgttgagcatgtttctatttgtatgagatgtagagatattaatgttgatgctatccatgatcacctagctttaattaaacaagaaaatgatcacatagctcaacttagtgctaaaattaatgagcatgacttagaaaatgaaaaatttaaatttgctagaagtatgctctatagtgggagacgccctgacattaaggatgtcattggcttccaacagggagacaatgtcaagcttaattcccttaagaaattgtctaactttgttaagggaaaagctcccatggttcaggataacgagggctatattttatatcctattggttatcccgaacataagattaggagaattcattctaggaagtctcactctggctctcatcatgcttttatgtataagagtgaggcatctagttctaggcaatccactcatgttaaattgcctaaaaagaaatctcctattgcatcaatgtaa

SEQ ID NO: 5034 - DNA, 2247 bp, Zea mays
  Clone ID: TF_ZM4516.C1.o15.fg
atgccaaaatttgatggtagatctgaccctgaagattatttcacatgggaattgaaggtggagaaaatcttccgcctacataattatttagaggagaagaaacttgcaatggcatctcttgagtttgaaggatatgctctgatttggtgggagcaacttcttagtgatcgtgaagaagatggagatgaccctattattacttggcaagagatgaggcgagaaatgagaattcgttttgtgacgaagcattatcggcgtgatctttttgataaattgcagaatttgagtcagggaagtttctctgttgaggagaattataaggagatggagaaggccatgattagagccaatgtgtatgaagatgaagagcaaaccattgcatccaccaaagctgaacgtcagctgcaacaagatgctaagagcaccaagcccttgtcatatggtgcacgaaccatgactggaggaagcaaatcaatctcaaggtttactgctgcatcctcagcgacaaaaggttcaattggaggcttgcaatccaatattcaaggcaattctagtgcaaagaacggtgttgctccaaacacgagttataaaccagcagcatccacttcaacatcagtaggttcaatagccaagagtagtggtattcagtgcttcaagtgtggaggtcatggtcatgtcataaaggagtgtccaaataatcgtgtgatccttgtgaatgatgatggggaatatacatcagctagtgaagaggaagctgaagcaggaaatcattgtggaagaacaaatcaatacacactagatctgaaagggagaaagtttgtactcaagcctatgacccctcaacaaatcatggctgaacctttacaaaagaaaactgaaattagtgcagcaagtagaggaggagaagagcaaaataaattgagtgccatccacaattcggtgagcgagtgctacaagccaaattcaagagataaaaggaaggaagagggagaacatctagttatgctagccacaaaatctgagctgagagaagtgaggaacaacccatatcaagtgctctttgtacttgtgaacaaagatgctttgatttctcctaacgacataacatctcttcctagtgttgtggctgatcttttgcaagactttgaagacgtgtttccacaagaaacaccggctgtactacctccaattcgagggattgagcatcaaatcgatcttattccaggggctgcacttcctaaccgtccaccatatcgaaccaatcctaaagaaactaaggaaatacaaaggcaagtacaagaacttcttgataaaggttttattcgtgaaagtttaagccattgtgccgttcctgtgattttagtacctaagaaagatggatcttggaggatgtgtgttgattatagagctataaataatattactgttcgctatcaccatcctattccacggctagatgatatgcttgatgaattaagtggttccacaatttttactaaaattgatttgagaagtggataccatcaaataagaatgaaaactggagatgaatggaagactgcatttaaaacaaaatttgggttgtatgaatggttagtgatgccctttgggttgactaatgctcctagtatttttatgagattaatgaaccatgtcttaagaactttcattggaaaatttgttgttgtctacttcgatgatattctaatttacagcaagtcttttgatgaacatgtgaaacacattcgacaagttttagatgagcttagaaaggagaaattatttgctaatattgagaagtgcaatttttgcacagaccatgttgtgtttcttggctttgttgtttcagcaaaaggaatagaggtggatgaatccaaggtgaaagccgtcaaggattggccagccccaacgaatgtaagtcaagtaagaagttttcagggtcttgctggtttttatagaagatttgtgcgagatttcagtaccatcgcttcccctttaaatgaattgacaaagaaaggtgttgaatttaaatggggaaactcacaagaagatgcttttcaagaattgaagaaacgtttgactgaagcacatgtacttattcttcctgatttcactaaaacttttgaagtagaatgtgatgctagtgggattgggataggaggagttttaatgcaacaaggaaaacctatagcatattttagtgaaaaattgggaggtgctcaatgtaacacctcaggtgttacttag

SEQ ID NO: 5035 - DNA, 3672 bp, Zea mays
  Clone ID: TF_ZM5005.C1.o1.fg
atggatcctaagggaaaggggatggtggtcaacgacaaggaggagtccctcttcaacgagccaagggacgacaagcccattgactcaggtttgagtcacaggacgagggacgggaagaagaagaggtgcatcaagaaaatcatctactgcgacagtgatgcctcctcttcttcaccaagagacgacgacgacgactcttcgtcgaaaaagaaaacggttaatcaaaactactcttttgactattctcgcattccgtacaattcaaatgctcatttgctatcaattccacttgggaaacccccacactttgatggagaagactattctttctggattcatcaaatgtgtagtcatttattttccctccatcctagtatctgggagattgttgaaaacggaatgcattttgatagtactgacaatcctgtttttataaatgagcaaatccataagaatgcccaagctactactgtgttgctagcatctctttgcagggatgagtacaataaggtgagtggcttggacaacgccaaacagatctgggacaccctcaagatatcacatgagggaaatgatgccaccatgatcaccaagatggaactggtggagggtgagctatggaggttcgcgatgatcaggggagaggagccaacacaaacctacaacaggctcaagaccctggtcaacaagatacgaagctatggaagcacaagatggacggatcatgatgtcgtccgactcatgctaaggtcttttactataattgacccccatcttgtcaatcttattcgtgaaaatcccaggtacaccaaaatgatgtccgaggagatcctcggaaaattcgtgagcgggcgcatgatggtgaaggaggctcgatacgtggacgatgctctaaatggtccactactcatctacgagccacagctcgttgctctcaagggaactagcagcaaggagacgctaccaagcaaggtagcacaagtggaggctgctgggctgaatgaagatgagatggcgcttatcatcaagcgcttcaagaccgcactcaaaggacgcaaggagtaccccaacaagaataaaacaaggggaaaacgctcctgcttcaaatgcgataagactggtcactttattgctcaatgtcccgataataaaaatgacctggcacaagaaagacatgggaagaaggagaagaagaagaattacaggaaggcaaagggcgaggcgcatctaggaaaggaatgggattctgactgctcttcatcagactccgacgacgaaggacttgctgcctcggccttcgacaaatcctcactcttccccaacgaacgccatacatgccttatggccaaggaaaagaaggtacacattcaagatacccccaagtacacttcttctagcgatgaggaatcttctgacgatgaggtagattactcagatttatttatggggttagatcaagctaaagtagagaaaattaatgaattgatcgatgctctcaatgaaaaagatagattagtagaaaagcaagaggatattttacatgaggaacatgacaaatttgttagtgtgcaaaaatctcttgctttagaaattaagagaaatgaaatgctatcttctgagttatctgttcaccatgaatctgtctctagtttaaagaagttaaatgataaattaacagctaatctagaggaagttaataaaactagttcatgtgtagagcacgttattatttgtaatagatgtaaggattttgatgttaatgcttgtgatgaacatcttgcttctattactaagttgaacaatgaggtggcaagtcttaatgctcaacttaagacttgcaaagttgattttgacaaagtgaaatttgctagggatgcctacatagttggtagacacccctcaattaaggatggacttggctttcaaaagaaaaccaagaacttaacaagccaaaggactcccattctcaacaaggagaaagggaagacccctatggctagtagtcctcaaaggaatcatgcctttatttatgataggaaaattgctagtcattctcataggagttatgatcatgttgcttattatgattcaaatgctatgttagcttctagctccactcatgattatggtagaaataggcctaggacaatgtgcaataaaccttctactatttatcatacttgcaatacttcttttgtactcacatgcaaaaatacaaaagtagtggctagaaaattgggatccaaatgcaagggagacaagacttgtatttgggttccaaaagttatttttactaaccttgtaggacccaacaagagttgggtttatgcaaccgggggctcaagctggattatcgacagcggatgcacaaaccatatgacaggggagaagaagatgttcacctcctacgtcaagaacaaggattcccaggatacaatcatatttggagatgagaatcaaggcaaggtcaaaggtttgggaaagatagccatcacaagcgagcactccatttcaaatgtatttttagtagagtcgctaggatacaaccttctgtctgacaaattagaaacccaagggaccctaaagcgctttctaaggagggctcaaaatgaatttgagctaaaggtgaaaaagataaggagcgacaacgggtccgagttcaagaatctgcaagttgaggagtatcttgaggaggaaggcattaagcacgagttctccgctccatatacaccacaacaaaacgctgtgaacacagcttgccacgccataaaccggctctacctgcatcacctcctaaagaagacctcccacgaactccttaccggtaacaaacccaatgtctcttactttcgtgtatttgggagcaaatgctacattctggtgaagaaaggtagacactctaaatttgttcccaaggcagtagaaaggtttttactagggtatgactcaaatacaaaggcgtatagggtcttcaacaaatcatcgggattggttgaagtctctagcaacgttgtatttgatgagactaatggctctccaagagagcaagttgatcttgatgatgtagatgaagaagaaattccgacggccgcaatgcgcacgatggcaataggtgatgtgcgaccacaggaattacaggaacaagatcaaccatcctcctcgatggtggtgcatcccccaactcaagacgatgaacaggtacctcaagaagaagggcatgatcaagtgggagcacaagaagatcaagtgatggaggaagaagcaccacgggtccctccaactcaagtcctagcgacgatccaaagacatcaccccgttgaccatattctagttgacatcagcaagggagtaactactcgctcacgattagctaatttttgtgagcattactcgtttgtctcttctattgagcctttcagggtggaagaggccttgcaggatccagactgggtgttggccatgcaggaagagctcaacaacttcaagagaaatgaagtttggagcctggtgccatgtccaaagcaaaacgttgtgggaaccaagtgggtgttccgcaacaagcaagacgagcacggggtggtgacaagaaacaaggctcgacttgtggcaaaaggttatgccaagtcgcaagtttggattacgaggagacttttgcttctgtggctaggctag

SEQ ID NO: 5036 - DNA, 1536 bp, Zea mays
  Clone ID: TF_ZM4989.C10.o3.fg
atggaggacttgagcaacatgaccccgaccatcgtgattgggaaaatcgcggcttttgagatgtcgcgaaaaatgagtcggggagaggagccaacttcctcaagaccatatgcttttgcatgtgatgaaaggaagggcaaaaagaaggctcccactccaagttcctcaagcgaagaagaggaagaagaagaaagtgatgatgatgaagataatcaaccatgcacatcatcctctgaggacgaagaaacaatccgacgcgtcggaaaggtcgaggatcttctctttaacattgacaggaaaaagcaaaggaagagaggatgcttcgcatgtggggagaagggccacttcagggacaactgtcaaaatatggccaaacccaaaaaggagaggagcaaaggcaaggcgctaacaagtgttagaacttgggatgattcttcaagtgaagatgaacctccaaggacgcgcagccaccggtcctcgtcacgatcatcacagtcatcacacaaatgccttatggcaagaggtaacaaaagcattccatcctctagtgatgaaagtagtagtgatgatgaaggtgagggaaagccctctctagatgagcttgcggaagccgtagaatttttccaggatgtttgcactaagcaaaaagctcaacttaaaactttgaaaaataagttggttagctctcaaaatgattacaaaggtttgctagaaaaatttgaaacttttgcaaacttaaatagtgagctatcaactaaaattgagctattagaatctagtgctccatccactgctaccgatgacaaccttattaaaaagaatgaaaaacttaaggctaagttagctagctcccaagaagctattgaaaatttgctagagaaaatggaaattcttagcatacacaataatgagctaactactaagctagaaaacattggtagcaccccaacaacatctttagttgaaatacctgaaataattaagaaagatgcttctacttcctgctttgatttaattgatgattctaacccctgcaaccaagtcgttgttgagaatattgttgtagagacatgttcggatgaggttgcaaaggaaaatgaacaattaaagcaagaagtggctcgccttggcaaggctttgtatgacaagaaaggcaaagccaaacaaatccgacctacacaggataacaccactgcgggagtgaacaagcctgtagagggagaaactgtgatttgtaggctatgccacatggaaggccacaagtctttccaatgcaaggcgatgaccggggataaacaaaggcaaaagctcaagcaaaagccatcaagcaaaatctccaacacctacatcaaaagggtgaacaaaaaggatgctacaccatatttgatcaagaagaaaaagaatggaaaggtgatagcaatcaaggccaacaagcaagccaacaaaggaaaaggggccaaacgcatctgggtgccaaaggagataatttcaaccatgaaaagcaccaagaaggtttggatcccgaaagggaagtga

SEQ ID NO: 5037 - DNA, 4863 bp, Zea mays
  Clone ID: TF_ZmC951_430
ctaagggtttgcctcatccaaagcaattgcgcgcaacaatggcctgcggcaatatactcggctttggcggtagagagagctacggaattttgcttctttgaagcccaagacaccagagaccttcccaagaactggcaagtccctgatgtgctctttcttttgatcgacggatttacctcccgtgtcgaggtcgagatgcccattggttcccatgtgtgtcttgatgggtttggcatccttcatcccaaatttgtttagaatatcttgaatatacttcgtttggctaatgaaggtgccctcttggagttgctttacttgaaatcccaagaagtacttcaactcccccatcatcgacatctcgaatttcggtgtcatgatactactaaattcctcacatgtagattcgttagtagacccaaatataatatcatcaacataaatttggcatacaaacaaatcattgtcaagagttttagtaaataaagtaggatcgacctttctgactttgaagccattagtgatgagaaaatctcttaggaattcataccatgctcttggagcttgcttgagcccataaagcgccttagagagtttgtaaacatagttagggtactcactatcttcaaagccgggaggttgctcaacatagacctcttccttgattggtccattgaggaaggcacttttcacgtccatttgataaagctcattcctagtgaagttgttgagctcctcttgcatcgccaccacccaatccgaatcttgtagtgcttcctctaccctgtgtggctcaatagaggaaacaaaagagtaatgttcacaaaaatgagcaacacgagattgagttgttacccccttttgaatatcgccaaggatggtgttcacggggtgctcttgttggattgcttggtggactcttgggtgtggcagtcttggttctttatcctccttgtcttgatcatttgcatctcccccttgatcattgccgtcatcttgaggtggctcatcttcttgatcttctccttcatcatcttgagcctcatcctcattttgagttggtggagatgcttgcgtggaggaggatggttgatcttgtgcatttggaggctctttggattccttaggacacacatccccaatggacatgttccttagcgtgacgcacggagcctcttcatcacctatctcatcaagatcaacttgctctacttgagagccgttagtctcatcaaacacaatgtcacaagaaacttcaactagcccagaggacttgttaaagactctatatgcccttgtgtttgaatcatatcctagtaaaaagccttctacagccttaggagcaaatttggattttctacctcttttaacaagaatgaagcatttgctaccaaagactctaaaatatgaaacattgggctttttaccggttaggagttcgtatgatgtcttcttgaggattcggtgtagatacaaccggttgatggcgtagcaggcggtgttgaccgcctcgacccaaaaccgatccgaagtcttgtactcatcaagcatggttcttgccatgtccaatagagttcgattcttcctctccactacaccattttgttgtggcgtgtagggagaagagaactcatgcttgatgccctcctcctcaaggaagccttcaatttgagaattcttgaattccgtcccgttgtcgcttcttattttcttgatccttaagccgaactcgttttgagcccgtctcaagaatccctttaaggtctcttgggtatgagatttttcctgcaaaaataacacccaagtgaagcgagaatagtcatccacaataactagacagtacttactcccgccgatgcttatgtatgctatctggccgaataggtccatatgtaggagctcgagtggcctgtcagtcgtcatgatgttcttgtgtggatgatgaataccaacttgcttccctgcctgacatgcgctacaaatcctgtctttctcaaaatgaacatttgttagtcccaaaatgtgttccccctttagaagtttgtgaagattcttcattccaacatgtgctagtcggcaatgccagagccagcccatgttagtcttagcaattaggcaagtgtcgagttcagctctatcaaagtctactaagtatagctgaccctctaacactcccttaaatgttattgaatcatcacttcttctaaagacagtaacaccttgatttccatccccgaatgtgatagctcgttggggatcttggtttttctcgtaggaggagaacattttcttctcccctgtcatgtgatttgtgcacccgctgtcgatgatccaacttgagcccccggatgcataaacccaaacggttttgggtcctttggcattagatgcaagaactttgggtacccaaacacaagtcttggtgcccttgtgtttgtccccaacatacttggcaactattttgccggatttgttagttaaaacataagatgcatcaaaagttttaaatgaaaagttatgatcatttgatgtagtaggagttttccttttaggcaatctagcatgggttgattgcctagaactagatgtctcacccttatacataaaagcatgattagggccagagtgagacttcctagaatgaattctcctaattttgctctcgggataaccggtaggatacaaaatgtaaccctcgttatcctgagtcatgggagccttgcctttgacaaagttagacaatcttttaggaggggcattaagtttgacattgtcccccttttggaagccaatgccatccttgatgtcagggcgtctcccattatagagcatgcttctagcaaatttaaaattatcattttctaagtcatgctcggcaattttagcatctaattttgctatatgatcattttgttgtttaattaaagccatatgatcatgaatagcatcaatgttaatatctctacatctagtacaaatagtaacatgatctaattctttagccttaacaattaatttttcgttttcaatcttaaggctagcaagagaaacatttaattcttcaatcttagcaagtaatttaacattatcatctctaagattgggaattgaagcatcacaaacatttgaatcaaccttagcaattaaactagcattctcatttctaaggttggtaataacatcatggcaagagcttagctcaatagataatttttcacatttttctacttctagagcataagcattcttaaccttaacatgctttttattttccttaattaggaaatcctcttgggagtccaagagttcatccttctcatgaatagcactaattaattcatttaatttttccttttgttgcatgtttaggttggcaaaaagtgtgcgcaaattatcctcctcatcacaagagttatcctcatcactagaggtttcatatttagtggaggattttgattttaccttcttctttttgccgtcctttgccatgaggcacttgtggccaacattggggaagaggagtcccttgatgaaggcgatgttggcggcgtcctcgtcggaggaggagtcgctggagctctcgtcggagtcccattcgcggcacacatgggcatcgccgcctctcttcttgtggtacctcttcttctcctttcttctccccttcttgtcgtcgcctcggtcactgtcactagacataggacatttagcaataaaatgatcgggcttaccacatttgtagcaaaccttcttggagtgggacttgtagtctttccccctcctttgtttgaggatttggcggaagctcttgatgacgagcgccatctcctcattgtcaagcttggaggcgtctattggttgtcgacttggtgtagactcctccttcttttcttccgtcgccttgaatgcgaccggttgtgcttcgggcgtggaggggccatctagctcgatgattttctttgagcctttgatcatcaactcaaagctcacaaagtttcctattacttcctcgggagacattagtgtatatctaggattaccacaaattaattgaacttgtttgggattaagaaaaacgagggatcttagaataaccttgaccatctcatggtcatcccatttggtgctcccgaggttgcgcacttggttcaccaaggtcttcaagcagttgtacatgtcttgtggctcctccccttggcgaagccggaagcgatcgagctccccctcgatcgtctcccgcttggtgattttggtcacctcatctccttcgtgcgcggttttgagcacgtcccaaatctccttagcgctttttaacccttgcaccttgttatactcctctcgacttagagaggcgaggagtatggtggtggcttgggagttgaagtgccggatttgggcgacctcgtccgagtcatagtcttcatcccccggtgatggtacctgtactccaatctcaacaacatcccaaatgctagtgtggagtgaggttagatgatgcctcattttatcactccacatattataatcttcaccatcaaacatgggtggtttgcctaatgggacgaaaagtaatggagtacgttttggaatgcgagggtagtgtaggggaatcttactaaacttcttgcgctcatggcgcttagaagttacggacggcgtgtcagagccggaggtggatggcgacgaagagtcggtctcgtagtagaccaccttcctcatcttctttttcttgtcgccgctccaatgcgacttggcatgtgaaggggttcccttcatcttgttgtcggactcccctgatggatccttcccgtggcttctagacttgtcaccgtcggtcacgatctctttcttggtgtgttctcctgacat

SEQ ID NO: 5038 - DNA, 3574 bp, Zea mays
  Clone ID: TF_ZmC13103_1
atggatcctaagggcaaggggattgtgatcaatgacaaggagaaggagtcattcgtcaacgagcccaaggatgacaagcctaccgactcgggctcgggtcacaaacgcaaagatgggaagaagaagaagacaagacgcatcaaggagatcgtctactacgacgacaacgatgagtccacttcttcccaaaaggacaacgacgacaacgactacgagagaaggaaaccggttaattcgaacttttcttttgactactctcgtattccgcaaagtacaaatgctcatttgctctccattccacttggcaaacctcctcactttgatggagaggactacggattttggagccacaaaatgcgtagtcacctattctctctccatccgaccatatgggagattgtggaaagtggaatgaaatttgatagctcggatagtcctatgtttatcaatgaacagactcatagaaatgcacaagctactactatgttgttagcctccttgtgcagggacgagtatcataaggtgagcggcttggacaatgccaagcagatctgggacaccctcaggatctcacatgaggggaacgacgtcaccttactcaccaaaatggagttggtggagggcgagcttggaagattcgcaatgatcaggggagaggagccaacccaaaattgcaacttccccaagtttttaacgaatttgaccctgaggcaggtgaagataacctcccttcaggtggtccaagcataccttgctggtcttacatttgcattgccagaatcaccttgcagcacaactgttcttgctaacccttctgggatatgtcgccacttcaagagacccaattattggaggaagtttattgttgacatacacaacgggctatgttgcgcctcttcttattgcagcttcatttgctggagcactgcacagtttgttgtcattcagaagatattcggcatggataaacccaatcagtggtgcatttttactcggtggaggtgtttatacccatactggacagggtgtttccagcaacatcaatggtcatgtaggtcgcaaggggcagccaagcaagaccaagataaaggggaagcactcatgcttcaaatgtggtaaggttggtcattttattgctaactgtcccgacaatgatagtgaccaagaagaagggaataagagggagaagaagaagaattataagaaggcaaaaggtgaggcacatcttggcaaggagtgggactcggattgttcgtcgtccgactccgacaacgaaggactcgccgccactgccttcaacaagtcatccctcttccccaacgagcatcacacttgcctcatggcaagggaaaagaagggtctagatagaaccaaggtggataaaataaatgaattgattgatgctttgaatgataagaatagattgctagaaaagcaagaggatctcttatatgatgaacatgacaagtttgtagaagctcaaaaatcccttgctttagaaataaagaggaatgaaatgctttcttgtgaattgtctacatgccatgactctatttctagtttaaaaagcataaaagatgacttgactgctaagtgtaaagattttaatattgatgcttgtagtgaacacctagtttcaatttctaaattgaatgatgaagtagctagtcttaatgcccaacttaagactagcaaaagcgaatttgataagttaaaatttgcaagggatgcctacacgattggtagacacccctcaattaaggatggacttggtttcaagagggaagccaagaacttaacaagccataaggctcccatccctgccaaggagaaagggaaggcccctatggctagtagtgctaaaaagaaccatgcttttatgtatcatgataggagacatgctagaaatgcaaatagaagtcatgatgcttttgattcacatgtttatgattcatatgatatgtttgcttctagttcttcctatatgcatggtagaaatgtagctaggagaaatgctattaatcacatgcctaggagaaatggtgttagtgttcctaggaaagttaatgaaccgtctacaatatatcatgcttgcaatgcttcatttgccatttgtagaaaggataggaaggtttatgcatccgggggttcaagctggattatcgacaacggatgcacaaaccatatgacgggggagaagaagatgttcacctcctacgtcaaaaacaaggattcccaagattcaataatattcggtgatgggaatcaaggcaaggataaatctgaaacccaagggaccctcaagcgcttcctaaggagagctcaaaacgagtttgagctcaaggtgaaaaagataaggagcgacaatgggtccgagttcaagaaccttcaagtggaggagtaccttgaggaggaagggatcaagcacgagatctctgctccctacacaccacagcaaaatggtgtggtagagaggaagaacaggacgcttatagacatggtgaggacgatgcttggagagttcaagaccctcgagcgcttttggtcggaagctgtgaacacggcttgccacgccatcaaccgggtctaccttcaccgcctcctcaagaagacgtcgtatgagctactaaccggtaacaaacccaatgtttcgtattttcgagtttttgggagtaaatgctacattctagtgaagaagggtaggaactctaaatttgctcccaaagctgtagaagggtttttattaggttatgactcaaatacaaaggcgtatagagtcttcaacaaatcatcgggtttggttgaagtctctagcgacgttgtatttgatgagactaatggctctccacgagagcaagttgttgattttgataatgtagatgaagaagaagttccaataaccgcaatacgcaccatggcgattggagatgtgcggccacaggaacaagatgagcaagatcaaccttcttcctcaacaatggtgcaacccccaactcaagatgatgaacaggaggcgtgtgatcaagggggagcacaagatgatcatgtaatggaggaagaagcacaaccggcacctccaacccaagttcgagcaatgattcaaagggatcatcccgtcgatcaaattttggctgatattagcaagggagtaactactcgatctcgattagttaatttttgtgagcattactcctttgtctcttctattgagccttttagggtagaagaggccttgctagatctggactgggtgttggccatgcaagaagagctcaacaacttcaagaggaatgaagtttggatactggtgcctcgtcctaagcaaaatgttgtgggaaccaagtgggtgttccgcaacaaacaagacgagcacggagtggtgacgaggaacaaggctcgacttgtggcaaaaggctatgcccaagttgcaggtttggactttgatgagacttttgctcctgtggctaggctagagtccattcgtattttgctagcatatgccgctcaccattctttcaggttgttccaaatggatgtgaagagcgctttcctcaacgggccaattaaggaggag

SEQ ID NO: 5039 - DNA, 4935 bp, Zea mays
  Clone ID: TF_ZM4958.C2.o1.fg
atggatcctaagggcaaggggattgtgatcaatgacaaggagaaggagtcattcatcaacgagcccaaggatgacaagcctaccgactcgggccacaaaagcaaagatgggaagaagaagaagacaagacacatcaaggagatcgtctactacgacgacagcgatgagtccacttcttcccaaaaggacaacgacgacaatgactacgagagaaggaaaccggttaattcgaacttttcttttgactactctcgtattccacaaagtacaaatgctcatttgctctccattcctcttggcaaacctcctcactttgatggagaggactacgaattttggagccacaaaatgcgtagtcacctgttctctctccatccgagcatatgggagattgtggaaagtggaatgaaatttgatagctcggatagtcctatgtttatcaatgaacagattcatagaaatgcacaagctactactgtgttgttagcctccttgtgcagggacgagtatcataaggaggcaagatatgtcaacgacgcgttgaacggtccaatccatgagcctcaacccattgctctcaaggcaacgaggagcaaggaggcgctacctagcaaggtggcacaagttgaggcggccgggctcaatgatgaagagatggccctcatcatcaagcgcttcaagacggcgctaaagggtcgcaaggggcagccaagcaagaccaagacaaaggggaagcactcatgcttcaaatgtggtaaggttggtcattttattgctaactgtcccgacaatgatagtgaccaggaagaagggaacaagagggagaaaaagaagaattataagaaggcaaaaggcgaggcacatcttggcaaggagtgggactcggattgttcgtcgtccgactccgacaacgaaggactcgccgccactgccttcaacaagtcatccctcttccccaacaagcatcacacttgcctcatggcaagggaaaagaagggtctagatagaaccaaggtggataaaataaatgaattgattgatgctttgaatgataagaatagattgctagaaaagcaagaggatctcttatatgatgaacatgataagtttgtagaggctcaaaaatccctcgctttagaaataaagaggaatgaaatgctttcttgtgaattgtctacatgccatgactctatttctagtttaaaaagcataaacgatgacttgaatgctaagttggaaatagctaataaatcaacatcttgtgtagaatatgttgtggtttgcactaggtgtaaagattttaatgttgatgcttgtagtgaacacctagtttcaatttctaaattgaatgatgaagtggctagtcttaatgcccaacttaagactagcaaaagcgaatttgataagttaaaatttgcaagggatgcctacacgattggtagacacccctcaattaaggatggacttggtttcaagagagaagccaagaacttaacaagccataaggctcctatccccgccaaggagaaagggaaggcccctatggctagtagtgctaaaaagaaccatgcttttatgtatcatgataggagacatgctagaaacgcaaatagaagttatgatgcttttgattcacatgtttatgattcatatgctatgtttgcttctagttcttcctatatgcatggtagaaatgtagctaggagaaatactattaatcacatgcctaggagaaatggtgttaatgttcctaggaaaattaatgaaccttctacaatatatcatgcttgcaatgcttcatttgccatttgtagaaaggataggaaggtttatgcatccgggggttcaagctggattatcgacagcggatgcacaaaccatatgacgggggagaagaagatgttcacctcctacgtcaaaaacaaggattcccaagattcaataatatttggtgatgggaatcaaggcaaggtaaaagggttaggtaaaattgctattccatccgagcactctatatctaatgtgtttttagttgagtctcttggatataacttgttatctgttagtcaattatgcaaaatgggatataattgtctattcacaaatgtagatgtgtctgcctttagaagaagtgatggttcattagcttttaagggtatattagacggcaaactttatttagttgattttgcaaaagaggaggccggtctagatgcatgcttaattgctaagactagcatgggctggctgtggcatcgccgcttagcacatgtggggatgaagaaccttcacaagcttctaaagggagaacacgtgataggtttaactaatgtgcaattcgaaaaagatagaccttgtgcagcttatcaagcaggtaaacaagtgggaggagcgcatcacaccaaaaatgtgatgaccacatcaagacctttggagatgcttcacatggacctcttcggacccgtcgcctatctaagtataggaggaagtaagtatggtcttgttatagttgatgacttttcccgcttcacttgggtattctttttgcaggataaatctgaaacccaagggaccctcaagcgcttcctaaggagagctcaaaacgagtttgagctcaaagtgaagaagataaggagcgacaatgggtccgaattcaagaaccttcaagtggaggagttccttgaggaggaggggatgaagcacgagttctccgctccctacacaccacaacaaaatggtgtggtagagaggaagaacaggacgctcatcgatatggcgaggacgatgcttggagagttcaagacccccgagtgcttttggtcggaagccgtgaacacggcttgccacgccatcaatagggtctaccttcatcgcctcctcaagaagacatcgtatgagctactaaccggtaacaaacccaatgtttcgtattttcgagtttttgggagtaaatgctacattctagtgaagaagggtaggaattccaaatttgctcccaaagccgtagaagggtttttattaggttatgactcaaatacaaaggcatatagagttttcaacaaatcatcaggtttggttgaaatctctagcgacgttgtatttgatgagactaatggctctccaagagagcaagttgttgattttgatgatgtagatgaagaagaagttccaacggccgcaatacgcaccatggcgattggagatgtgcggccacaagaacaagatgaacgagatcaaccttcttcctcaacaatggtgcatcccccaactcaagatgatgagcaggaggcgtatgatcaagggggagcacaagatgatcatgtaatggaggaagaagcgcaaccgacacctccaacccaagttcgagcgatgattcaaagggataatcccgtcgaccaaattttgggtgatattaacaagggagtaactactcgatctcgattagttaatttctgtgagcattactcttttgtctcctctattgagcctttcagggtagaggaggccttgctagatccggactgggtgttggccatgcaagaggagctcaataacttcaagaggaatgaagtttggacactggtgcctcgtcccaagcaaaatgttgtgggaaccaagtgggtgttccgcaacaaacaagacgagcacggggtggtgacgaggaacaaggctcgacttatggcaaaaggttatgcccaagtcgcaggtttggactttgaggagacttttgctcctagcgctttcctcaacgggccaatcaaggaggaggtgtacgtggagcaaccccctggcttcgaggatgaacggtaccccgaccacgtgtgtaagctctctaaggtgctctatggacttaagcaagccccaagagcatggtatgaatgccttagagactttttaattgctaatgctttcaaggttgggaaagccgatccaactctttttactaagacttgtgatggtgatctttttgtgtgccaaatttatgtcgatgacataatctttggttctactaaccaaaagtcttgtgaagagtttagcagggtaatgactcagaaattcgagatgtcgatgatgggcgagctaagctacttccttgggttccaagtgaggcaactcaaggatggaaccttcatctcccaaacgaagtacacacaagatttgatcaagaggtttgggatgaaggacgccaagcctgcaaagactccgatgggaaccgacggacacaccgacctcaacaaaggaggtaagtccgttgatcaaaaagcataccggcctatgatagggtctttactttatttatgtgctagtagaccgaatatcatgcttagtgtatgcatgtgtgctagatttcaatctgatccaagggagtgtcacttagtggctatgaagcgaattcttagatatttagtcgctacgccttgcttcgggatctggtatccaaaggggtctacctttgacttgattggatattcagactctgactatgctggatgtaaggtcgataggaagagtacatcggggacgtgccaattcttaggaaggtccctggtgtcatggagttctaagaaacaaacttctgttgccctatccaccgctgaggccgagtacgttgccgcaggacagtgttgcgcgcaactactttggatgaggcaaaccttcagggactttggctacaatttgagcaaagtcccactcctatgtgataatgagagtgctatccgcatggtggataatcctgttgaacacagccgcacaaagcacatagacatccggcatcactttttgagagaccaccagcaaaagggagatatcgaagtgtttcatgttagctccgagaaccagctagtcgatatctttaccaagcctttagatgagcagaccttttgcaagttgcgtagtgagctcaatgtcttagattcgcggaatttggattga

SEQ ID NO: 5040 - DNA, 1518 bp, Zea mays
  Clone ID: TF_ZmC24260_17
atgtcggggggaaaaagaaacgaaagtgcttctaagcttgaaaaagttgaggttgcctcgactttatcttttggtgcagatgttgatcctagggcaatagatcttgccatgagaatcgccgaaaggatgttcctcaaaatgaaggaagatgaggcgaagaacattattgaagaagaagaaaatgatcgatggagaccaaacgatgaatccacctcttcacaaggttcgtctttcaaatccacttctcatatgtgctttattgctaatgggagtgacagtgaaagcgaaagtgaggataaggaggagcaagaaagtgatagtgaagatgaggatgatcttcaacaattcttcgctcagctaagcaagaaacatcggatgagcttgcttaaactcatgaaaagagcggaagaacaaaaagaaatgcttcataagcaagaagacttcctcatcagaaaaattgaagacttagagaagttgaccaaagagcatgagaagctaaagtgctctcatgatgatttggtccaaaggtatgaagacatttcaattgagcaaattaaagttgttaatcattcatcatatattgctcaattagaaaataaaaatgctatgttcaagaacacgatagaaaggctaaatattgaaaatctagctttccaagaaaaacatgatatgcttgtgtgctctcataataaatttatggattcacatatcatgttagaaatggctcatgaggttgtgttaactaatttgaaatcataccaacctcacatgtgcacatgtgttgaaattgaaactatattaccatgtgctaacaaatgttgctctcaagaaagccaatcttccattgagctagacatttcaagaattagtgatatttctatcacacaagaaaataaagagctcaaggaagaagttggaatgctaagaaggagcttaactcgtttgaagggaaagtgtcatgctcaacctcctcaagataaccatgataatgtggtgaaaaagcttgagaaggggacaaccgtagcatgcacaaaaccccttcaaaagaataccaagctttccaagaagggcatgagcaaaatccatggtgagaaaattaatgctcatatgatttgctctaacaatgtacctatgtgcttcaacaaagaaagatcaaagagaagcgataggagatgctatggatgcaaggagaagggccatgaaattgattcatgcccccacatgaagaatcaagaccttgcacgatcaagaaagatgaccatcaaaaaggatgaaagcaaaaggcaaaagcattgcaaggacaagcatcgcatttgctacaattgccgtgaaaaaggtcatctattcaaggtttgtccaaagggtaaaactcctaagcctaacttgtcaatacacttaaatatgctttggagacccaaatttgactcttgtgctagaaaggtgatgagttcaccacattctaggaccaaggctatttgggtgcctaagtccttattggctaaccttgacctatcatga

SEQ ID NO: 5041 - DNA, 2037 bp, Zea mays
  Clone ID: TF_ZmC951_348
ctattggaagccaatgccatccttaatgacagggcgtctcccattataaaacatactacgagcaaatttaaatttttcattctctaattcatgctcggcaattttagcatctaattttgctatatgatcattttgttgtttaatcatagcaatgtgatcatggatagcatcaacattaacatctttacatctagtgcaaatagagacataactaatagtagatgtagagggtttgcaagcatttaatttatcaatcttagcatgtaaaatagcattctcatctctaagattggaaatagaaatattgcaaacatttaaatctttagccttagcaattaatttttcattctcaattttaaggctagagagtgatgtattcaacttgtcaatattagtaaccaaactagcattatcatttctaagactaacaattgaatcatcacagacatctaacttctcaaccttagctattaactttacattttcatttctaaggtttgagataatatcatggcaagtgcttagctcactagtcaatttttcacatttctctacttcctgagcataagcatttttaaccttaacatgcttcttgttctccttaataaggaagttctcttggctatccaagagttcatccttctcatgaatagctcctatcaattcatttaatttttctttttgttgcatgttgaggttggcaaaaagggcaagcaaattatcttcatcatcactagagttatcctcatcactagatgttgcatatttagtggaggctctagattttaccttctttttgccaccctttgtcatgaggcacttgtggccgaagttggggaagaggaggcccttgttgacggtgatgttggcggcgtcctcgtcggaggaggagtcggtgtagctctcatcggagtcccattcccgacatatgtgggcatcgccgcccttcttcttgtaatacctcttcttttccttcctctttcccttcttatcgtcgcccctgtcactatcacttgatgatggacattttgcaatgaaatgactgggcttaccacacttgtagcaaactttcttggagcggggtttgtaatccttctcccttctttgcttgaggatttggcggaagctcttgatgatgagcgccatctcctcgttgtcgagcttggaggcgtcgatggggagcctacttgatgtagactcttctttcttctccttcgtcgctttgaatgcgacgggttgcacctcaggtgtggaggtggcgccttgctcgatgatttgtttggagcctttgatcatcaattcaaagctcacaaactttcctataacctcctcgagagacattagcttatatctaggatcaccacgaattaattgaacttgtgtagggttaagaaaaacaagtgatcttagaataaccttgaccatttcatggtcatcccattttgtgctcccgaggttgcgcacttggttgaccaagatcttgagccggttgtacatagcttgtggctcctctccttggttgagcatgaaccgaccgagctccccctcgatcatttccctcttggtgatcttggtcacttcgtctccttcgtgcgcggtttttagtacgtcccaaatctctttggcactcttcaacccttgcaccttattatactcctcttgacttagagaggtgaggagtatagtagttgcttgggaattgaagtgctggatttgggcgactttgtccgcatcataatcttcatcccctatggatggtactataattttcaccataaaaaccggtggtttgcgctcatggcgcttagaagtgacggacggcgtgtcggagccggaggtggaaggcgacgaagaatcggtctcgtagtagaccactttcttcattttcttcttcttgttgccactccggtgcgacttgacgcggggaggtgattcctccctcttcttgttgccggactcccctgatggagctttcccgtggcttgtggcgggcttctcgccggtcaccatctccttcttggcgtgatctcccgacat

SEQ ID NO: 5042 - DNA, 1950 bp, Zea mays
  Clone ID: TF_ZM4952.C1.o18.fg
atggcctcagggcggacgccgctgcaacaatgccctcgcccacatctacgctcgaggggcgaggacaagtacaaagagccggaggtccggagcgcggatggtggcggtgatcccgccagggacccaacagtgccagccaggcgcatcggtcacgggccagtcagcctcgggagaaggcgcgatggtcgatgcggccaaaaatgggccggcagtaatggcggtggcaggcgggcggaagcagcggtcacgtcgtcagccaagctcacgtccccacatgggacggatgtgactcaagaatggcttgatagggtgaagatagcaaggaaagggcttcgaggaactaagcgaaggttcaaccggttttttgcactgttcacctttttgaaaatactggttcagccggacactcaaccggacactcaaccggtttttgtctggtggaaacagctttggtactacatcgagttctttgtggattcattactcttggagcttctagctcctagacgactaggtgtcgcttatgttgatcctagggcaatagatcttgccatgagaatcgccgaaaggatgttcctcaaaatgaaggaagatgaggcgaagaacaagattgaagaagaaaatgatcgatggagaccaaacgacgaatccaccttttcacaaggttcgtatttcaaatccacttctcatatgtgctttattgctaatgggagtgacagtgaaagcgaaagtgaggatgaggaggaacaagaaagtgatagtgaagatgaggatgatcttcaacaattcttcgctcagctaagcaagaaacatcggatgagcttgctcaaactcatgaaaagagcggaagaacaaaaagaaatgcttcataagcaagaagacttcctcatcagaaaaatcgaagacttagagaagttgaccaaagagcatgagaagctaaagtgctctcatgatgatttggtccaaaggtatgaagacatttcaattgagcaaattaaagttgttaatcattcatcatatattgctcaattagaaaataaaaatgctatgttcaagaacacgatagaaaggctaaatattgaaaatctagctttgcaagaaaaacatgatatgcttatgtgctctcataataaatttatggattcacatatcatgttagaaatggctcatgaggttgtgttaactaatttgaaatcataccaacctcacatatgcacatgtactcaagtagaaactatattatcatgtgctaacaaatgttgctctcaagaaagccaatcttccattgagctagaaatttcaggaattaatgatatttctatgacacaagaaaataaagagctcaaggaagaagttggaaggctaagaaggatcttaactcttttgaagggaaagtgtcatgctcaaccttctcaagataaccgtgataatatggtgaaaaagcttgagaaggggacaaccgtagcatgcacaaaaccctttcaaaagaataccaagctttccaagaagggcatgagcaaaattcatggtaagaaaataaatgctcatactatttgctctaacaatgtacctatgtgcttcaacaaagaaagatcaaagagaagcgatagaaggtgctatggatgcaaggagaagggtcatgaaattgattcatgcccccacatgaagaaccaagatcttacacaatcaagaaagatgaccatcaaaaaggatgaaaacaaaaggcaaatgcattgcaaggataagcatcgcatttgctacaattgccgtgaaaaaggtcatctattcaaggtttgtccaaagggtaaaactcttaagcctaccatgtcaattcattcatattcacttaggagacccaaaaatgacacttgtgctagaaagccacataggaaaaatgaagcacttgagaatgaacttaaaagattctaccttgctttggaaaggatctaa

SEQ ID NO: 5043 - DNA, 8157 bp, Zea mays
  Clone ID: TF_ZmC3792_1
atgccgacctcctcttcttccgttgccgctacgccgccggccgatccctcgctgccggccgccgcctcgtctgaggggacgctgagtagttcgatggcggaggagttgcgcgccggcgattctgttgattttggcgtgtcgcggatgtcgtcggtccgcgtgcaagatatgcagcggttgggttacttcggcggcggagttgctcgtgtcccggggacggaggaagtccccgagccggagcgcgattaggctgtattcaaggcattgttcgccgccggtctccacttccctgaccgccgattggttggcacacggaacaggcgggtcaaccttcgtctacattggccaacaccgatcctcgggtggcctctgtccaaggatgtggcggcctcgactccgcgtggtgtccagatgacgctcgaatccggcaagcacacggtacagtgggttgacttggttccttgcgcccgaagcaactggggaaaaggttaggaaatttggttttacgttgctgagagtaccgtcaaggggcatgagggactccccgtgtccgagatgtgttctcatttttactcagcgtacccgccctttgaagtggcagaggaggatgtggacgaaggggcccttcggtgcaccgccagcccgaggagtgggcgccagatgcttgaggagtttatggcgtccgtggtgtcgacctgggcgcatgactcggcgctggagcaagtgtgccctcgccagatgcctttgcacggtgcaagggtggtgccaaggcccacctgcgcactaaacctacaaagccgcgacccggccgcccctgagcgtgatgccgagaatggggctgtgcggcgcgttggccgtgacgtgccgaggacagaggacccgcgcagctttgatatccgcgcgtcgaaggaccgtttgaacaggcttgttgaattacatcaatcgccgtaggacggttatcctggtcaagaggatgtggaccgccctgggaagaagcaggtggtggagactggagatgaccctgcgccggcggccgccccgtcctctaaaaagagcaaactaggtattcttgtgggaagacttggggtttctgctagagagttgatgaggacgagcgcgcccctggggggaaggatggcttcgcccgatctccggaaggatgcggctcggatgctgagggttatcgggggttgctggcctaggaatgttcctatcccccgcgcggctggcgaggacctttttacatctcgcatggttcgtgagtggagagtttttccttacgggcggaatattgctgctgttgtgtcggcagtgatggataaggatcgccagggagcggcacaaaagcgtcaggcggttgtcaggctcgttgaagctaggccgaagaggcagcggggatctgcgaaagctgcggccgccggtggaggcaagccgccgctggcggcgaagttgggcgtccctgcgtctagcaaagcgccggaggcgacgacaggcgccgggggctccaaaccgacgaaggcagtgccgccggccagcagagtgccggaggccgctaaggcggcgaagttgctgccggcaggcaagcgtatcgccgacttcgccaccgatattagtgtggaggactatcttggtgggtcggacgagggccaacttgctatagttgcgcctgccgcggcgacaacgacggctgccgcagcgccgaaggcgaagggcggggctattggcgccagaggtgaggtggcggccctcgcggctgtcagggatgaggcgggcgctgcgtcccgccagctgaaggaggtggcagagtcgctaagtcaggtggctgacttcgccaaccgcacgacgtcgggggccctcacggcagttgtgtctgccgaagtcgagagacttcggacacaacatactgacgccgtccgagagaaatcggccgccgacagcaagtgccgcaagctggtggacaaggtggccgcgctggagggagagaaggctgacctccggcgccaattggcgggggagaggagggagaccaacgaggccctcgtcaacgcgcaggctgcgcaggcggaggccaatctggcacgggcggagggcaatcttgccagggagcgcgccgagcagctgcaggagcggctcatcgccctggagagccgcgtggaacgggccgaggccgcgacgcgagcggaggccgaacggacgcgcacgcagcttatggacacatatcgtgagctgggtgcgcggaccggtgacttcgaagtgccggaccgagagcccggacttcactatctggaatgggtgcaggaggagctgcaggcactccccactgtcgtggaggggttcatgtcgtacgcctccctggtcacctgcgagggggcgatgaacgcgctctcccgcgaagggtgccggcacttcgaggtcttcgaccaggccgatgatgattttgagcgagatatctacaaggttgaagaccccgtagtgaaggaatccgccggggccatctacgaccggatgtggggtccgcatggtcgcgaggtggtcagggagcgggccacgacggcgagggctcaggcggcgcgtggcgagcgggtggacgacttcggagcgttgaacaacgcgctggctgacccagagccgaccccggctgtgacaatgagattgatggttctgattacgattatggtattgatggctcgacttagacacactgcacgaaagtccgtcatccccttcttaccctcccgccttgctaagcgtccgcttcgccgtcccgtggccggacagtccagccacttggagagactacaccaccgcctgcgtgaggagcaggaacgtcgacgacaggagcagcagagctcttctttctcgctccaccaggagatagagtctgtgaggagctgctctcctgtgcttcctctggaggcgccccctgcaccaccactgggcgccccagcttctggagtagctgctggaggagacccagacgacggagatggcgacgacagctcgagccacgacaccgacttctctgctaaccctgagccggaaggatgggttgctcgacccatcactcgcgacgctgctcgcgggtgtcacttccatgatgcgctcgacaccctgctacgtcgggcatttgaccggcatacttggtccgttgagtatcgctgtgtggtctaccagcatagtcgcggggtctacccggaccgctgggaggcgacttgcttggtgcgctgcccggaggacagtctccagggtgcagaggcctgctcagagcactattctatctctgaacgggactcagctgaggcagccatgcaagatgctgcacggcgtgcgctttcgcactactgctcggttttcggtggggcagctgacggtcttgacctgaagtattacccccgccgtccatctggcagcacaggaggcgtgattgtctcacctgtcggtgagggcaatcctaggttgagcagcacagtcaacctagccgccgtgctaaacacggagctggaccatgcattagacgagctgagtagggctcgtgctgagatcgccctgctgcgggctgagcgcgggaacgtcgtcatctggatgatgtcagagaacaggcgtagaggaggaaggcgtgctcagcaggagcgagccgctcaacaggaggaggtgccccagcagcagctgccacccccgcccccgatgtcgatcgagcagatgtttctgatgcagactcagtcagttcaggccatcggtcagactctggccgccattcagcagcagcagcagcagcaacagcagcaagcaccaccccagcctcagatgcctcagatgcccagagacaagcgtgctgaattcatgagaggtcatcccccaacgttcgctcactcttctgaccccatggatgctgaagattggctgcgcaatgtggagcgggagttgcataccgctcagtgtgatgacagggagaaagtcttgtatggtccccgtctgttgagaggagcagcccaatcatggtgggagtcttacctcgccacccatgccaaccccgacaccatcacctgggaagaattcagaggtagctttcgtcagtaccacgtgcctgcaggtctgatgacagtgaagaaggaggagttcctggcccttaagcaagggtcatcatctgtcagtgagtatcgagacaggtttctgcaattgtctcgctatgctcctgaggatgtcaacactgacgccaagcgacaataccgttttctgagaggcttggtcgaccccctgcagtatcaactgatgaatcacaccttcccgacattccagcacctgattgatagagcgatcatgacagaaaggaagcgtaaggagatggaagatcgtaagcgcaagatcagtggaccccagcctggaagcagcagccgccctcgtttttcaggcaatcaacctcagcagttcaggcagaaccagcgtccacctcagcagcgtcagcagcatcagcagttccaaaggcagtatcctcagcatcagtaccagaaccgtcagagcaatcagtcaggaggtcagtttcaaaggcagaatcagcaagcaccccgtcttcctgccccagcaaaccagcagaacagtcaggcagcaccagctcaggttggaaacagggcatgtttccactgtggagagcagggccattgggtgatgcaatgtccgaagaaggcagcccagcagcagtcaggccccaatgccccagcaaagcagaatgtgtctcagcctggagcaggcaaccgccctcaacagcgctataatcatggaagattgaatcacttggaggctgaagcagttcaggagacccccggcatgatagtaggtatgttcccagtcgactcccatattgcagaagtgttatttgatactggagcaacgcattctttcattactgcatcatgggtagaagcacataatcttccaactactaccatgtcaacccccattcaaattgactcagctggtggtagaattcgagctgatagcatttgtttaaatataagtgtggaaataagggggatagcgtttcccgccaaccttatagtaatgggtactcagggaatagatgtcatcctagggatgaattggttagataagtatcaggcagttatcagttgtgataaaaggacaatcaagttggtgtccccactaggaaaggaagtggtgaccgagttagtcccacctgagccgaagaaaggaagttgttatcagatggctgtcgatagcagtgaagcagatccaattgagagtatcaaggttgtgtctgaattcccagatgtgtttccaaaggatttaccgggtatgccaccagagcggaaagttgagtttgccatagagcttcttcctggaaccgcccccatctttaagagagcttacagaatatctggaccagagttggttgagcttaagaagcagattgatgagctgtcagagaaaggttacattcggccaagcacctcgccttgggccgcccctgtcttatttgtggaaaagaaagatggcaccaagaggatgtgcatcgattatcgagctttgaatgaggtcacgatcaagaacaagtatcccttgcccagaatagaagatctgttcgaccagttgagaggagccagtgtgttctccaagattgatctgaggtcaggttatcatcagctcaggatccgaccttcggacattccgaagacggcattcattaccaagtatggtttgtatgagttcacagtgatgtcttttggtttgaccaatgcaccagcgttcttcatgaatctgatgaacagtgtattcatggattaccttgataagtttgtggtggtattcattgatgacattctgatttattcccaaagcgaagaagagcacgcagatcatttgaggatggtattgcagagattgcgagagcaccagttgtacgcaaagttgagcaagtgtgagttctggatcaacgaagtcctgttcttgggtcacataatcaacaaggaaggattggctgtggatccgaagaaagtggcagacattctgaactggaaagcgccaacggatgctcgaggaatcaagagcttcattggaatggccggatactatcggcgattcattgaagggttttcgaagattgcgaagccaatgacagcgttgctaggcaacaaggttgagttcaaatggacccagaaatgtcaagaggcctttgaagcgctgaaagagaagttgactacatcgcctgtcctaatcttgcctgatgtgcacaagcccttctcggtgtattgtgatgcttgttacacaggtttgggatgtgtgttgatgcaagagggaagagttgtggcttacacgtctcgacagttgaaggttcatgagaagaactacccaatccatgatctagagttggcagcagtggttcacgcactgaagacatggaggcactatctgtatggacagaaatgcgatgtttacacagaccacaagagtctgaaatacatattcactcagtcagagttgaacatgaggcagcgaagatggttagagttgatcaaagactatgagttggagattcattaccatccaggcaaagcaaacgtagtggcagatgctttgagcagaaagagtcaagtcaatctgatggtcgctcgtccgatgccttatgagttggccaaagagtttgacaggttgagtctcggatttctgaacaattcgcgaggagttacagttgagttggaacctaccttggagcgcgaaatcaaagaagcgcagaagaatgatgagaaaatcagtgagatccggcgactgattctagatggcagaggcaaagattttcgagaagatgctgaaggcgtgatatggttcaaagaccgcttatgtgttcccaatgtccagtctattcgagagttgatcctcaaggaagctcatgagacagcctattcgattcaccctggtagtgagaagatgtatcaggatctgaagaagaaattctggtggtacggaatgaagagggaaatcgcagagcatgtggctaagtgcgatagttgtcgaagaattaaggcagagcaccagagaccagctggattgttgcaaccgttgcagatccctcagtggaaatgggatgaaattggtatggatttcatagtcggattgcctcgcactcgagccggctacgattctatttgggtagtggtggaccgtttgaccaagtcagcccacttcatacctgtcaagaccagctacaacagtgcagtattggcagagttgtatatgtctcggatcgtttgtcttcatggtgtgccaaagaagatagtgtcagacagaggaacgcagttcacctctcatttctggcagcagttgcatgaagccttgggcacacatctgaatttcagttcagcttatcacccgcagacagatggccagactgaaaggaccaatcaaattctcgaagatatgttgagagcctgtgcgttgcaagatcagtccggatgggacaagcggttgccttatgcagagttttcctataacaacagttaccaggccagtttgaagatgtcaccgtttcaggcgctttatggaaggagttgtagaactccgttgcaatgggatcagcctggagagaagcaagtgtttgggccagacattctgcttgaagccgaagagaacatcaagatggtccgagagaatctgaagatagcgcaatcgaggcagcgaagctatgcagacacaagaagaagagagctgagttttgaagtcggagattttgtctatctgaaagtgtcaccgatcagaggagtcagaagatttggagtgaaaggcaagctagcaccccgctacattggtccgtaccagatcctctcaaagcgtggagaagtggcttatcagctcagcctgccagagaatttgtctgctgtgcatgatgtctttcatgtgtctcagttgaagaagtgcttgcgtgtgccagaagagcagttgccagtggaaggtcttgaggtccaggaggacttgacctatgttgagaagccagctcagatccttgagattgcagacagagtcacccgaaggaagaccatcagaatgtgcaaagtcagatggaatcaccactctgaggaagaagcaacctgggagcgtgaagatgatctagtggccaagtacccagagctctttgctagccagccctga

SEQ ID NO: 5044 - DNA, 5400 bp, Zea mays
  Clone ID: TF_ZmC3792_12
atgagggttgtccacattgcaaccactgctcaggagaaggcgaagtcgtggaaggagacttccaggagttccaagactacgacgaattttagatggctcgtcttagacacactgcacctggaggcgccccctgcaccaccgcgggacgtcccggctgttggaggagctactggaggagatcccgacgacaacgactcagaccacagtacggagtcctctgagccgcaggaggcggaaggatgggtcgcccgacccatcacccgtgacgccgctcgcggttgtcacttccacgacgcactcgacaccttgctgcgccaggctttcgaccagcacacctggtcgatcgagtatcgttgtgtagtctaccagcacagtcgcgggaggtacccggaccgctgggaggctacctgcctagttcgccgtccggaggatgacctccggggtgcggaggccgtctcggagcactactccatctccgagagggacactgcggaggcggctatgcaggatgcagcacggcgtgcactctcccagtactgttctctgttcggtggcgtggccgatggtcttaaccttcggtactacccccgccgccctactggcagcacagagagtgtggttgtctcacccgttggtgaggctaaccctaggttgagcagcacagtcaacctagtcgcagtgcttaacactgagctggaccactctctggacgagctaagcagggctcgaacggagattgcggggttgcgtgctgagctggcagagcgccatcaccaggagggtggttctcccgctcctgttgggactcagcacccataccgctcgccgccacgtggatcaatgctgatgtatgaatgtcttccacagatgtctgacaacaggcgccgatgcaacaggcgtgctcagcaagagcagcatgaccagcaggaggaacaacagaggcaacctcccccaccacccccgatgtcagtggagcagatgttcttgatgcagactcaggcagtgcaggccattgggcagactctggcagccatgcagcaggctcaacagcaaccccaaccccaattgcaagtgcagatgccccagatgccacgggataagcgtggtgagttcatgagagggcaccctcctaccttcgcccattctgctgaccccatggatgcagaagactggctgcgcgcagtggaaagggaactgcgcaccgcccaatgtgacgacagggagaaggttctgtatggtccccgtcagctaaggggagcagcccagtcctggtgggagtcctacctcgccacccatgctaacctcgaagccatcacgtgggaagaattcagcgagagcttccgcaggtaccatgtgccggagggactgatgatcgtgaagaaggaggagtttctggctctgaagcagggacccctgtctgttagtgagtacagagacaagtttctgcagctgtctcgttatgcacctgaagacgtcaacactgatgctaaaaggcagtacaggttcatgagaggtttggtggatcccctgcattaccagctgatgaatcacaccttccccaccttccagcacctgatcgacagggcagttatgaccgagaagaagcgtaaggacatggaagatcggaagcgcaagatgagtggacaccagtccggaggcatcagccgtccacatttctcgggcagttcgtctcagcaaggcaggcctggtcacccacagggataccagaatcagaatcagcgtccgcatcagcagcagtttcagaggcagtacccgcagcagcagcagcagtatcgtcagcacagccagcagggaggtaatcagtatcagaagcagaacaaccaggcacctcgccttcctgccccaacagcgaatcagagcaaccaagcagccccagcacaaggaggaggcagaggatgtttccactgtggagaacaaggccactgggcgatgcagtgcccaaagaagttggcgcagcagcagaccaaccccaatgctccaacaaggcaaggtgtactgcagccggcagcaggcaatcgtaaccaagcgtacaaccgtggaaaggtgaaccacttggaggccgaagcaatccaggatgcaccagatgtggcagtaggtatgttttcagtcgaatctcatcccgcgaaagtgttatttgatactggtgcaactcattcatttgtcactgcaacatgggtagaattgcataacatctcagtagaggcaatgatgccgcccatgaggattaattcggtcggtggcaaggtgcaaacagataaaatatgctcaaatataatggtggaaataagggggataggattccccagtgacttaatggtaatagacacccctgggatagacattattttagggatgaattggttaatgaagtatgaggcgaatgttagttgtgacaagaggaccgtaacattgaagtccccgtcaggagaagaggtagtggccgagctatggatgcctaaatcagaagagggagtttgtcaccagatttcagttagtagtaaggagcctaacccgctcgaggctatcaaggttgtgtcagactttccggatgtgtttcccgaggagctaacgggcatgccacccgagagaaaggttgaatttgccatagagcttatccctggtaccgcccccatttcaaaaagggcctatcgagtgtctggaccagaactggtagaactcaagaagcagatagatgagatgttagagaagggttacatcaggccaagcacctcgccttgggccgctccagtgttgtttgtagagaagaaagatggtaccaaaaggatgtgcatagattacagagccctgaacgaagtcactattaagaacaagtaccctttgccaagaatagaagatctgtttgaccaactcagaggtgccagtgtattctcgaagatagatctgagatcaggttaccatcaactcagaatccgaccctcggacataccgaagacagcattcatcaccaagtacgggttatatgagttcacagttatgtcctttggtttgacaaatgcaccagccttctttatgtatctgatgaacagtgtgttcatggattatctagacaagtttgtggtagtgttcatcgatgacattctcatatactctcaaagtgaggaagatcatgcagagcatttgaagatggtactgcaaaggcttcgagagcatcaattgtatgccaagttgggcaaatgcgagttctggattcatgaagtcttgtttctgggtcacatcataaatcaagatgggttagcagtggatccaaagaaagtagcagatatcctgaactggaaagcaccgaaggatgttcgcgggatcaagagcttcattggaatggctggatattacaggcgtttcatcgaaggcttttcaaagattgctagaccaatgacagcgttactggcgaagaaagttgagtttaagtggacccaaaagtgtcaggaagcatttgaagaactgaagagtagattgactacagctcctgtgttagtcctgcctgatgttcacaagccattttcagtgtattgcgatgcttcttacaccggattgggatgtgtgctaatgcaagaaggaagagttgtagcatactcatctcgacagttgaagatccatgagaaaaattatcccacacatgacctggagttggcagcagtgaaatgcgacatctacacagatcataaaagtctgaagtacatattcacccagtcagagttaaacatgaggcagcgaagatggttggaattgatcaaagactatgagttggagatacattaccatccaggcaaagccaatgttgttgcagatgctctgagcaggaagagtcaagttaatatgttggcatcgtacccgatgccgtatgagttagccaaagagttcgacagactgagccttggtttcctaaacagtacgcaaggagtaacggtggagttagagcccaccctagagtgggagatcaaagaagggcagaaggatgatgaaaacatcaacaagattcggcagctgatcttagaaggaagaggcaaagactttcgagaggatgaagagggagtaatatggttcaaggaccgattgtgtgttcccgacctcaaacctattcgggagctgatcctaaaggaagctcatgagacagcctactccatacacccgggaagcgaaaagatgtaccaggatttaaaaaggaggttttggtggtatggcatgaaaagagagatcgcagaatatgtcgccatctgtgatagttgtcagagaaccaaagcagagcatcagaggcctgccggattgttgcagccattgcggattcctcagtggaagtgggatgagatcgggatggattttatagttggcctacctcgtacccgggccggttatgattccatctgggtggttgtggaccgcttaacaaaggtggcccatttcatacctgtgaagacaacatacaccggagcaacgttagctgagttatacatgtcgcggatagtctgccttcatggtgtgccgaagaagatagtgtcagatcgaggaacgcagttcacatctcatttttggcagcagctacaagaagctttgggcacccatttgaacttcagctcagcttatcacccgcatacagacggtcagactgaaagaactaatcagatcctagaagatatgttgagagcctgtgcgttgcaagacaagtcaggatgggacaaaagattaccttatgcagaattctcctacaacaatagttaccaggccagcttgaagatgtcaccgtttcaggcactctatggacggagttgtaggactccgctgcattgggaccagcctggagagagacaggtgtttggccccgacattttgcttgaagccgaagagaatatcaaaatggttcgggagaacctgaagatagcacagtcaagacaacgaagctatgcggaccgcaggagaagagaactgagttttgaagtgggagactacgtctatctgaaggtgtcacctatcaggggagtcagaaggttcggagtcaaaggcaagttagcaccccggtacgttggaccatatcagattcaagcaaagcgtggagaagtggcctaccagctcaacctaccagagagcttgtcagcagtgcacaatgtgttccacgtgtcgcaattgaagaaatgtctgcgagtaccagaagagcagttgccagtggagggtttggaagttcaggaagatctgacctacatagagaagccaacgcagattttggagtttgcagacagggtcacccggagaaacaccatcagaatgtgcaaagtcaggtggggtcaccactctgaggaagaagcaacctgggaacgagaagatgatctgaaagccaaataccccgaactctttgctgaccaaccctga

SEQ ID NO: 5045 - DNA, 6056 bp, Zea mays
  Clone ID: TF_ZmC3792_3
caagaccacattaggcatcgctggagttcgatgtcgcccgccaggcggagtcgattcaggatttggagacgttggtggttgggattccccttcctttgttatgagtggagatagatacccagatggtcgctaccttcgagcgctaggaggccgtggaggccacggcggcaacgcgcgtcagcgcgctcgaagcctcgaatcgaccattgcggccttcgagtcatggtgttcgcacgtcgaggcgacgaaggaagacgtcaaggcttccgtcgaccgcctacgtggggttctcgcccgattctccacgctcagtattcatgtggctcctcctcccttcgaccgcgatgcgggcatcctcggtccttttccaccggccacggagtgccctcctgctaccgtctttccggttgatggacctgatgggaaccgcatggacttcaaatgtcgagagtatggctttgggcatgtttttgctcaaacccatctcacgcctaacgatggctcgtcttagacacactgcacgtaagtcggtgattcctttcctgccgtctcgacttgcggagcgtcctctgcaccgcaccgtgtccggacagtcgagtcacctggagaggctgcaccaccgcctgcgtgaggagcaggaacgccggcgccagcacggagagcagcagggctcttcctcctcaccccagcaggaggtggagaccgtgaggccccgttcctctgttgcccagctggaggcgccccttgttccaccgcgggacgtcccggctgttggaggagctactgaaggagccactggaggagatcccgacgacgacgactcagaccacagcacggagtcctctgagccgcaggaggcggaaggatgggtcgcccgacccatcacccgtgacgccgctcgcggttgtcacttccacgacgcactcgacaccttgctgcgccaggctttcgaccggcacacctggtcgatcgagtatcgttgtgtagtctaccagcacagtcgcgggaggtacccggaccgctgggaggctacctgcctagttcgccgtccggaggatgacctccggggtgcggaggccgtttcggagcactattccatctccgagagggacactgcagaggcggctatgcaggatgcagcacgacgtgcactctctcagtactgttctttgttcgatggcgtggccgacggtcttaaccttcggtactacccccgccgccctactggcagcacagagagtgtggttgtttcacctgttggtgaggctaaccctaggttgagcagcacagtcaacctagtcgcagtgcttaacactgagctggatcactctctggacgagctaagcagggctcgaacggagattgcggagttgcgtgctgagttggcagagcgccatcaccaggagggtggttctcccgctcctgttgggactcagcacccataccgctccccgccacgtggtcaccacacttatggttcccctatgtctgacaacaggcgccgatgcaacaggcgtgctcagctagagcagcatgaccagcaggaggaaaatcagaggcagcctcccccgccacccccgatgtcagtggagcagatgttcttgatgcagacccaggcagtgcaggccattgggcagactctggcagccatgcagcaggctcaacagcaaccccaaccccaattgcaagtgcagatgccccagatgccacgagataggcgtggtgagttcatgagagggcatcctcctaccttcgcccattctgctgaccccatggatgcagaagactggttgcgcgcagtggagagggaactgcgcaccgcccaatgtgatgacagggagaaggttctgtatggtccccgccagctgaggggagcagcccagtcctggtgggagtcctacctcgccacccatgctaaccccgaagccatcacctgggaggaattcagcgagagtttccgtcggtaccatgtgccagagggactgatgatcgtaaagaaggaggagtttctggccctgaagcagggacccctgtctgttagtgagtacagagacaagtttctgcagctgtctcgttacgcacccgaggatgtcaacactgatgccaagaggcagtacaggttcatgagaggtttggtggatcccctgcattaccagctgatgaaccacaccttccccaccttccagcacttgatcgatagggcagttatgactgagaagaagcgtaaggatatggaagatcggaagcgcaagatgagtggaccccagtccggaggcatcagccgtccgcgtttctcaggcagttcatctcagcaaggcagacctggtcacccgcagggatatcagaatcagaatcagcgtccgcatcagcagcagtttcagaggcagtatccacagcagcagcagtatcgtcagcacagccagcagggaggtaatcagtatcagaagcagaacaaccaggcacctcgccttcctgccccagcagcgaatcagagcaaccaagcagccccagcacaaggaggaggcagaggatgtttccactgtggagaacaaggccactgggcgatgcagtgcccaaagaagatggctcagcagcagaccaaccccaatgctccaacaaggcaaggtgtactgcagccggcagcaggcaatcgtaaccaagcatacaaccgcggaaaggtgaaccacttggaggccgaagcaatccaggatgcatcagatgtggcagtaggtatgttttcaatcgaatctcatcccgcgaaagtgttatttgatactggtgcaactcattcttttgtcactgcaacatgggtagaattgcatagcatctcagtagaggcaatgatgccacccatgaggattaattcggttggtggcaaggtgcaaacagataaaatatgctcaaatataatggtggaaataagggggataggattccccagtgacttaatagtaataggcacccctgggatagacattattttagggatgaattggttaatgaagtatgaggcaaatgttagttgtgacaagaggaccataacattgaaatccccgtcaggagaagaggtagtggccgagctaaggatgcctaagtcagaagagggagcctgtcatcagatttcagttgatagtaaggagcctaacccgctcgaggctatcaaggtcgtgtcagactttccggatgtgtttcccgaggagctaacgggcatgccacccgagagaaaggttgaatttgccatagagcttatccctggtaccgcccccatttcaaaaagagcctatcgagtgtctggaccagaattggtggaactcaagaagcagatagatgagatgttagagaagggttacatcaggccaagcacctcgccttgggccgctccagtgttgtttgtagagaagaaagatggtaccaaaaggatgtgcatagactacagagccttgaatgaagtcactgtcaagaacaagtaccccctgccaaggatagaagatttgttcgaccagctcagaggtgccagcgaattctcgaagatagatctgagatcaggttaccatcaactcagaatccgaccctcggatataccgaagacggcattcatcaccaagtacgggttatatgagttcacggttatgtcctttggtttgacaaatgcgccagccttctttatgtacctgatgaacagcgtgttcatggattatctggacaagtttgtggtagtgttcatcgatgacattctcatatactctcaaagtgaggaagatcatgtggagcatttgaagatggtattgcaaaggcttcgagagcatcagttgtacgccaagctgggcaaatgcgagttctggattcatgaagtcttgtttctgggtcacatcataaaccaagagggattggcagtggatccaaagaaagtagcagatatcctgaactggaaagcaccgaaggatgttcgtgggatcaagagcttcattggaatggctggatattataggcgtttcattgaaggtttctcgaagattgctagaccaatgacagcgttgctagcgaagaaagttgagtttaagtggacccaaaagtgtcaggaagcatttgaagaactgaagaatagattgactacagctcctgtgctagtcctgcctgatgttcacaagtcattctcagtgtattgcgacgcttcgtacaccggattgggatgtgtactgatgcaagaagggagagttgtagcatactcatctcgacagctgaagatccatgagaagaattaccccacacatgacctggaactggcagcagtggttcatgctttgaagacctggagacattacctgtatgggcagaagtgcgacatctacacagatcataagagtctgaagtacatattcacccagtcagaactaaacatgaggcagcgaagatggttggaactgatcaaagactatgagttggagatacattaccatccgggcaaagccaatgttgttgcagatgctttgagcaggaaaagtcaagtcaatatgttggcctcgcacccaatgccgtatgagttagccaaggagtttgacagactgagcctcggtttcctgaacagtacgcaaggagtgacggtggaattagagcccaccctagagcgggagatcaaagaaggacagaaggatgatgaaaacatcaacaagatccggcagctgatcctagaaggaagaggcaaagactttcgagaggatgaagaaagagtaatctggttcaaggaccgattgtgtgttcccgacctcaaacctattcgggaattaatccttaaggaagctcatgagacagcctactccatacacccagggagtgagaagatgtaccaggatttaaaaaggaggttttggtggtatggtatgaaaagggagatcgcagaatatgtcgccatctgtgatagctgtcagagaaccaaagcagagcatcagaggcctgccggactgttgcagcctttgcggattcctcagtggaagtgggatgaaatcgggatggatttcatagttggcctacctcgtacccgggccggctacgattccatctgggtggttgtggaccgcttaacaaaggtggcccacttcatacctgtgaagacaacatacaccggagcaacgttagctgagttatacatgtcacgaatagtctgccttcatggtgtgccgaagaagatagtgtcagatcgaggaacgcagttcacatctcatttttggcagcagctacaagaagctttgggcacccatttgaacttcagctcagcttatcacccgcagacagacggccagactgaaagaactaaccagatcctagaagatatgttgagagcctgtgcgttgcaagacaagtcaggatgggataaaaggttaccttatgcagaattctcctacaacaatagttaccaggccagcttgaagatgtcaccgtttcaggcactctatgggcggagttgtaggacttcgctgcactgggaccagcctggagagagacaggtgtttggccccgacatcttgcttgaagccgaagagaatatcagaatggttcgggagaacctgaagacagcccagtcaaggcagcgaagctatgcggacagaaggagaagggaactgagttttgaagtgggagactacgtctatctgaaggtgtcacctatcaggggagtcagaaggttcggagtcaaaggcaagctagcaccccggtacgtcggaccatatcagattcaagccaagcgtggagaagtggcctaccagctcgacctaccagagagtttgtcagcagtgcacaatgtgtttcatgtgtcacaattgaaaaagtgtctgcgagtaccagaagaacagttaccagtggaaggtttggaagtccaggaagatctgacatacatagagaagccaacgcagattctggagtgtgcagacagagtcacccggaggaataccatcagaatgtgcaaagtcagatggggtcaccactctgaggaagaagcaacctgggaacgagaagatgatctaaaagccaaataccctgaactctttgctgaccaaccttga

SEQ ID NO: 5046 - DNA, 4287 bp, Zea mays
  Clone ID: TF_ZM3670.C6.o1.fg
atgaccgtggagcagatgttcttgatgcagactcaggcagtgcaggctattgggcagactctggcagccatgcagcaggctcaacagcaacctcaaccccagatgcaggtgcagatgccccagatgccacgagataagcatggcgagttcatgagagggcaccctcctaccttcgcccattctgctgaccccatggatgcagaagactggctgcgcgcagtggaaagggaactgcgcaccgcccaatgtgacgacagggagaaggttctgtatggtccccgccagctaaggggagcagcacagtcctggtgggagtcctacctcgccacacatgctgaccccgaagccatcacctgggaagagttcagcgagagtttccgtaggtaccatgtgccagagggactgatgatcgtgaagaaggaggagtttctggctctgaagcagggacccctgtctctgatgaatcacaccttccccaccttccagcacctgatcgatagggcagttatgactgagaagaagcgtaaggatatggaagatcggaagcgcaagatgagtggaccccagtccggaagcatcagccgtccccgcttctcaggcagttcatctcagcaaggcaggcctggtcacccacagggatatcagcatcagattcagcgtccgcatcagcagcagtttcagaggcagtacccacaacagcagcagtatcgtcagaacagccagcagggaggtaatcagtatcagaagcagaacaaccaggcaccttgccttcctgcccccgcagcaaatcagaacaaccaagcagccccagcacaaggaggaggcaggggatgtttccactgtggagaacaaggccactgggcgatgcagtgcccaaagaagatgacgcagcaacagaccaaccccaatgctccaacaaggcaaggtgtactgcagcaggcagcaggcaatcgtggccaagcgtacaaccgtggaaaggtgaaccacttggaggccgaagcaatccaggatgcaccagatgtggcagtaggtatgttctcagtcgaatctcattccgcaaaagtgctatttgatactggtgcaacccattcatttgtcactgcaacatgggtagaaatgcataacatctcagtagaggcaatgatgccgcccatgaggattaattcggttggtggcaaggtgcaaacagataaaatatgctcaaatataagggtggaaataagggggatagggttccccagtgacctaatagtaatagacacccctgggatagatgtcatcctagggatgaattggttaatgaaatatgaagcgaatgttagctgtgacaagaggaccgtaacattgaagtccccgtccggagaggaggtagtggctgagctaaagatgcctaaatcagcggagggagtttgtcaccagatttcagttgatagtaaggagaccaacccgctcgaggctatcaaggttgtgtcggactttccggatgtgtttcccgaggagctaacgggcatgccacccgagagaaaagtcgaatttgccatagagcttatccctggtaccgcccccatttccaaaagagcctatcgggtgtctggaccagaattggtggaactcaagaagcagatatatgagatgttagagaagggttacatcagaccaagcacctcgccttgggccgctccagtattgtttgtagagaagaaagatggtaccaaaaggatgtgcatagattacagagccctgaacgaagtcactgttaagaacaagtaccccctgccaagaatagaagatctgtttgaccagctcagaggtgccagcgtattctcgaagatagatctgagatcaggttaccatcaactcagaatccgaccctcggacataccgaagacaacattcatcaccaagtatgtgttatatgagttcacagttatgtcctttggtttgacaaatgcgccagccttctttatgtatctgatgaacagcgtgttcatggactatctagacaagtttgtggtagtgttcatcgatgatattctcatatactctcaaagtgaggaagatcatgtggagcatttgaagatggtattgcaaaggcttcgagagcatctgttgtatgccaagctgagcaaatgcgagttctggattcatgaagtcttgtttctgggtcacatcataaaccaagatgggttagcagtggatccaaagaaggtagcagatatcctgaactggaaagcaccgaaggatgttcgtgggatcaagagcttcattggaatggccggatactataggcgcttcattgaaggcttttcaaagattgctagaccaatgacagcgttactagcgaagaaagttgagtttaagtggacccaaaagtgtcaagaagcatttgaagaactgaaaaatagattgactacatcacctgtgttagttctgcctgatgttcacaagccattctcggtgtactgcgatgcttcttacaccggattgggatgtgtgctaatgcaagaaggaagagttgtagcatactcatctcgacagctgaagatccatgagaaaaattaccccacacacgacctggagttggcagcagtggttcatgcgttaaagacatggagacattacctgtatgggcagaagtgcgacatctacacagatcataaaagtctgaagtacatattcacccagtcagagttaaacatgaggcagcgaagatggttggaatttatcaaagactatgagttggaaatacattaccatccaggcaaagccaatgtggttgcagatgctctaagcaggaagagtcaagttaatatgatggccacacacccaatgtcatatgagttagccaaggagttcgacagactgagcctcggttttctgaatagtacgcaaggagtaacagtggaattagagcccaccctagagcgggagatcaaagaagggcagaaggatgatgaaaacatcaacaagatccggcagctgatcttagaaggaagaggcaaagactttcgagaggatgaagagggagtgatatggttcaaggaccgattgtgtgttcccgacctcaaacctattcgggagctgatcctcaaggaagctcatgagatagcctattccatacaccctggaagtgagaagatgtatcaggatttaaaaaggaggttttggtggtatggcatgaaaagagagatcgcagaatatgtcgccatctgtgatagctgtcaaagaaccaaagcagagcatcagaggcccgccggattgttgcagccattgcggattcctcagtggaagtgggatgagatcaggatggattttatagttggcctacctcgtacccgggccggctatgattccatctgggtggtcgtggaccgcttaacaaaggtggcccatttcatacccgtgaagacaacatacaccggagcaacgttagctgagttatacatgtctcggatagtctgccttcatggtgtgccgaagaagatagtgtcagatcgaggaacacagttcacctctcatttttggcagcagctacaagaagctttgggcacacatttgaacttcagctcggcttatcacccacagacggacggtcagactgagagaaccaatcagatcctagaagatatgctgagagcctgtgcgttgcaagacaagtcaggatgggacaaaaggttaccttatgcagaattctcctacaataatagttaccagaccagcttgaagatgtcgccgtttcaggcactctacggacggagttccgaagagaatatcaaaatggttcgggagaatctgaagatagcacaatcaagacagcgaagctatgctgaccgaaggagaagagaactgagttttgaagtgggagattacgtctatctgaaggtgtcacctatcaggggagtcagaaggttcggagttaaaggcaagttagcaccccggtacgttggaccatatcagattcaagcaaagcgtggagaagtggcctatcaactcaacctaccagaaagtttgtcagcagtgcacaatgtgttccacgtgtcgcaattgaagaagtgtctgcgagtaccagaagaacagttgcccgtggaggacttggaagtccaagaggatctgacctacgtagagaagccaacgcagattttggagtttgcagacagagtcacccgaagaaacaccatcagaatgtgcaaagtcagatggggccaccactctgaggaagaagcaacctgggaacgagaagatgatctgaaggccaaataccctgaactctttgctgaccaaccttga

SEQ ID NO: 5047 - DNA, 5505 bp, Zea mays
  Clone ID: TF_ZM4694.C3.o5.fg
atggctcgtcttagacacactgcacgtaagtcggtgattcctttcctgccgtctcgacttgcggagcgtcctctgcaccgcaccgtgtccggtcagtcgagtcacctggagaggctgcaccaccgcctgcgtgaggagcaggaacaccggcgccagcacagagagcagcagggctcttcctccccaccccagcgagaggtggagtctgtgaggccccgttcctctgtggcccagctggaggcgccccctgctccaccgcgggacgccccggctgttggaggagctactggaggagaccccgacgacgacgactcagaccacagcacggagtcctctgagccacaggaggcggaaggatgggtcgcccgacccatcacccgtgacgccgctcgcggttgtcacttccacgacgcactcgacaccttgctgcgccaggctttcgaccggcacacctggtcgatcgagtatcgttgtgtagtctaccagcacagtcgcgggaggtacccggaccgctgggaggctaccttcctagttcgccgtccggaggatgacctccggggtgcggaggtcgtttcggagcactattccatctccgagagggacactgcagaggcggctatgcaggatgcagcacggcgtgcactctcccagtactgttctttgttcggtggcgtggccgacggtcttaaccttcggtactacccccgccgccctactggcagcaccgagagtgtggttgtctcacctgttggtgagggtaaccctaggttgagcagcacagtcaacctagtcgcagtgcttaacactgagctggaccactctctggacgagctaagcagggctcgaacggagattgcggagttgcgtgctgagttggcagagcgccatcaccaggagggtggttctcccgctcctgttgggactcagcacccataccgctcaccgccacgtggtcatcacacttatggttcccctgtctgcgccgatgcaacaggcgtgctcagcaagagcagcatgaccagcaggaggaacaacagaggcagcctcccccaccaccccccgatgtcagtggagcagatgttcttgatgcagacccaggcagtgcaggccattgggcagactctggcagccatgcagcaggctcaacagcaaccccaaccccaattgcaagtgcagatgccccagatgccacgagataagcgtggtgagttcatgagagggcaccctcctaccttcgcccattctgccgaccccatggatgcagaagactggctgcgcgcagtggaaagggagctgcgcaccgcccaatgtgacgacagggagaaggttctgtatggcccccgtcagctgaggggagcagcccagtcctggtgggagtcctacctcgccacccatgctgaccctgaagccatcacgtgggaggaattcagcgagagtttccgcagataccatgtgccagagggactgatgatcgtgaagaaggaggagtttctggctctgaagcagggacccctatctgttagtgagtacagagacaagtttctgcagctgtctcgttacgcacctgaggatgtcaacactgatgccaagaggcagtataggttcatgagaggtttggtggatcccctgcattaccagctgatgaatcacaccttccccaccttccagcacctgattgatagggcagttatgactgagaagaagcgtaaggatatggaagatcggaagcgcaagatgagtggaccccagtccggaggcaccagccgtccacgtttctcaggcagttcgcctcagcaaggcaggcctggtcacccacagggatatcagaatcagaatcagcgtccgcatcagcagcagtttcagaggcagtacccacagcagcagcagcagtatcgtcagcacagccagcagggaggtaatcagtatcagaagcaaaacaaccaggcacatcgccttcctgccccagcagcaaatcagagcaaccaagcaaccccagcacaaggaggaggcagaggatgtttccactgtggagaacaaggccactgggcgatgcagtgcccaaagaagatggcgcagcagcagaccaaccccaatgctccaacaaggcaaggtgtactgcagccggcagcaggcaatcgtaaccaagcgtacaaccgtggaaaggtgaaccacttggaggccgaagcaatccaggatgcaccagatgtggcagtaggtatgttctcagtcgaatctcatcccgcaaaagtgctatttgatactggtgcaactcattcatttgtcactgcaacctgggtagaattgcataatatttcagtagaggcaatgatgccgcccatgaggattaattcggttggtggcaaggtgcaaacagataaaatatgttcaaatataatggtggaaataagggggataggattccccagtgacttaatagtaatagacacccctgggatagatgttattctagggatgaactggttaatgaagtatgaagcaaatgttagttgtgacaagaggaccgtaacattgaagtccccgtcaggagaaggggtagtggccgagctaaggatgcctaagtcagaagagggagtctgtcaccagatttcagttgatagtaaagagcccaacccgctcaaggctatcaaggttgtgtcggactttccggatgtgtttcccgaggagctaacgggcatgccacccgagagaaaggttgaatttgccatagagcttatccctggtaccgcccccatttccaaaagagcctatcgagtgtctggacccgaattggtggaactcaagaagcagatagatgagatgttagagaagggttacatcaggccaagtacctcgccttgggccgctccagtgttgtttgtagagaagaaagatggtaccaaaaggatgtgcatagactacagagccttgaatgaagtcactgtcaagaacaagtaccccctgtcaaggatagaagatttgttcgaccagctcagaggtgccagcgtattctcgaagatagatctgagatcaggttaccatcagctcagaatccgaccctcagatataccgaagacggcattcatcaccaagtatgggttatatgagttcacagttttgtcctttggtttgacaaatgcaccagccttatttatgtacctgatgaacagtgtgttcatggactatctagacaagtttgtggtagtgttcatcgatgacattctcatatactctcaaagtgaggaagatcatgtagagcatttgaagatggtattgcaaaggcttcgagagcatcaattgtatgccaagctgggcaaatgcgagttctggattcatgaagtcttatttctgggtcacatcataaatcaagatgggttagcagtggatccaaagaaagtagcagatatcctgaactggaaagcaccgaaggatgttcgtgggatcaagagcttcattggaatggctggatactataggcgtttcattgaaggcttctcaaagattgctagaccaatgacagcgttgctagcgaagaaagttgagtttaagtggactcaaaagtgtcaggaagcatttgaagaactgaagaatagattgactacaactcctgtgttagtcctgcctgacgttcacaagtcattctcagtgtattgcgacgcttcgtacaccggattgggatgtgtgctaatgcaagaaggaagagttgtagcatactcatctcgacagctaaagatccatgagaaaaattatcccacccatgacctggagttggcagcagtggttcatgccttaaagacctggagacattacctgtatgggcagaagtgtgatatctacatagatcataaaagtctgaagtacatattcacccaatcagagttaaacatgaggcagcgaagatggttggaattgatcaaagactatgagttggagatacattaccatccaggcaaagccaatgtcgttgcagatgctctgagcaggaagagtcaattagccaaagagttcgacagactgagcctcggtttcctgaacagtacgcaaggagtaacagtggaattagagcccaccctagagcgggagatcaaagaagggcagaaggatgatgaaaacatcaacaagatccggcagctgatcttagaaggaagaggcaaagactttcgagaggacgaagagggagtaatatggttcaaggaccgattgtgtgttcccgacattaaacctattcgggagctgatcctcaaggaagctcatgagacagcctactccatacaccctggaagtgagaagatgtatcaggatttaaaaaggaggttttggtggtatggcatgaaaagagaaatcgcagaatatgtcgccatctgtgatagctgtcagagaaccaaagcagagcatcaaaggcccgccggattgttgcagcctttgcggattcctcagtggaagtgggatgagatcgggatggattttatagttggcctacctcgtacccgggccggttatgattccatctgggtggttgtggaccgtttaacaaaggtggcccattttatacctgtgaagacaacatacaccggagcaacgttagctgagttatacatgtcacggatagtctgctttcatggtgtgccgaagaagatagtgtcagatcgaggaacgcagttcacctctcatttttggcagcagctacaagaagctttgggcacgcatctgaacttcagctcagcttatcacccgcagacagacggtcagactgaaagaactaatcagatcctagaagacatgttgagagcctgtgcgttgcaagacaagtcaggatgggacaaaaggttaccgtatgcagaattctcctacaacaacagttaccaggccagcttgaagatgtcaccgtttcaggcactctatggacggagttgtaggactccgctgcattgggaccagcctggagagagacaggtgtttggccccgacattttgcttgaagccgaagagaatatcaaaatggttcgggagaacctgaagacagcccagtcaagacagcgaagctatgcggaccgaaggagaagagaactgagttttgaagtgggagactacgtctatctgaaggtatcacctatcaggggagtcagaaggttcggagttaaaggcaagttagcaccccggtacgttggaccatatcagatccaagccaagcgtggagaagtggcctaccagctcaacctaccagagagcttgtcagcagtgcacaacgtgttccacgtgtcgcaattgaagaagtgtctgcgagtaccagaagaacaattgccagtggagggtttggaggtccaggaggatctgacctacaaagagaagccaacgcagattctggagtttgcagacagagtcacccggaggaacaccatcaggatgtgcaaagtcagatggggccaccactctgaggaagaagcaacctgggaacgagaggatgatctgaaggccaaataccctggactctttgctgaccaaccttga

SEQ ID NO: 5048 - DNA, 1047 bp, Zea mays
  Clone ID: TF_ZM4711.C2.o1.fg
atgcagcaggctcaacagcagccccaaccccagttgcaagtgcaaatgccccagatgccacgagataagcgtggtgagttcatgagagggcaccctcctaccttcgcccattctgctgagcccatggatgcagaagactggttgcgtgcagtggagagggaactgcgcaccgcccaatgcgacgacagggagaaggttctgtatggaccccgccagctgaggggagcagcacagtcctggtgggagtcctacctcgccacccatgctgaccccgaagccatcacctgggaggaattcagcgagagtttccgtcggtaccatgtgccagagggactgatgatcgtgaagaaggaggagtttctggctctgaagcagggacccctgtctgttagtgagtacagagacaagtttctgcagctgtctcgttatgcacctgaggatgtcaacactgatgccaaaaggcagtacaggttcatgagaggtttggtggatcccctgcattaccagctgatgaatcacaccttccccaccttccagcacctgatcgatagggcagttatgactgagaagaagcgtaaagatatggaagatcggaagcgcaagatgagtggaccccagtccggaggcatcagccgtccacgtttctcaggcagttcatctcagcaaggcagacctggtcacccacagggatatcagaatcagaatcagcgtccgcatcagcagcagtttcagaggcagtacccgcagcagcagcaacagtatcgtcagcacagccagcagggaggtaatcagtatcagaagcagaacaaccaggcacctcgccttcctgccccagcagcgaatcagagcaaccaagcagccccagcacaaggaggaggcagaggatgtttccactgtggagaacaaggccactgggcgatgcagtgcccgaagaaattggcgcagcagcaggccaaccccaatgctccagcaaggcaaggtgtactgcagccggcagcaggcaatcgtaaccaagcgtacaaccgcggaaagggtgcaaacagataa

SEQ ID NO: 5049 - DNA, 4314 bp, Zea mays
  Clone ID: TF_ZM4783.C6.o2.fg
atgccccagatgccacgggataagcctggtgagttcatgagagggcaccctcctaccttcgcccattctgctgaccccatggatgcagaagactggctacgcgcagtggaaagggaactgcgcaccgcccaatgtgacgacagggagaaggttctgtatggtccccgtcagttaaggggagcagcccagtcctggtgggagtcctacctcgccacacatgctgaccccgaagccatcacctgggaagaattcagcgagagtttccgcaggtaccatgtgccggagggactgatgatcgtgaagaaggaggagtttctggctctgaagcagggacccctgtctgttagtgaatacagagacaagtttctgcagctatctcgttatgcacctgaggatgtcaacactgatgctaaaaggcagtacaggttcatgaggggtttggtggatcccctgcattaccagctgatgaaccacaccttccccaccttccagcacctgatcgatagggcagttatgactgagaagaagcgtaaggatatggaagatcggaagcgcaagatgagtggaccccagaccggaggcatcagccgtccacgtttcataggcagttcatctcagcaaggcaggcctggtcatccacagggatatcagaatcagaatcagcgtccgcatcagcagcagtttcagaggcagtacccacagcagcagcagcagtatcgtcagcacagccagcagggaagcaatcagtatcagaagcagaacaaccaggcacctcgccttcctgccccagcagcaaatcagagcaaccaagcagccccagcacaaggaggaggcagaggatgtttccactgtggagaacaaggccactgggcgatgcagtgcccaaagaagatggcgcagcagcagaccaaccccaatgctccaacaaggcaaggtgtactgcagccggcagcaatcaatcgtagccaagcgtacaaccgtggaaaggtgaaccacttggaggccgaagcaatccaggatgcaccagatgtggcagtaggtatgttctcaatcgaatctcatcccgcaaaagtgctatttgatactggtgcaactcattcatttgtcactgcaacatgggtagaattgcataacatctcagtagaggcaatgatgccgcccatgaggattaattcggttggtggcaaggtgcaaacagataaaatatgttcaaatataatgggggaaataagggggataggattccccagtgacttaatagtaatagacacccctgggatagatgttattctagggatgaattggttaatgaagtatgaagcaaatgttagttgtgacaagaggaccgtaacattgaagtccccgtcaggagaagaggtagtggccgagctaaggatgcctaaatcagcggagggagtctgtcaccagatttcagttgatagtaaggagcccaacccgctcgaggctatcaaggttgtgtcggactttccggatgtgtttcccgaggagctaacgggcatgccacccgagagaaaagtcgaatttgccatagagcttatccctggtaccgcccccatttccaaaagagcctatcgagtgtctggaccagaattggtggaactcaagaagcagatagatgagatgttagagaagggttacatcaggccaagcacctcgccttgggccgctccagtgttgtttgtagagaagaaagatggtaccaaaaggatgtgcatagactacagagccttgaatgaagtcactgtcaagagcaagtaccccctgccaaggatagaagatttgttcgaccagctcagaggtgccagcgtattctcgaagatagatctgaggtcaggctaccatcaactcagaatccgaccctcggatataccgaagacagcattcatcaccaagtacgggttatatgagttcacagttatgtcctttggtttgacaaatgcgccagccttctttatgtacctgatgaacagtgtgttcatggattatctggacaagtttgtggtagtgttcatcgatgacattctcatatactctcaaagtgaggaagatcatgtagagcatttgaagatggtattgcaaagacttcgagagcatcagttgtatgccaagctgggcaaatgcgagttctggattcatgaagtcttatttctgggtcacatcataaatcaagatgggttggcagtggatccaaagaagagcttcattggaatggccggatactataggcgtttcattgaaggcttctcaaagattgctagaccaatgacagcgttgctagcgaagaaagttgagtttaagtggacccaaaagtgtcaggaagcatttgaagaactgaagaatagattgactacagctcatgtgttagtcctgcctgatgttcacaagtcattctcagtgtattgcgacgcttcgtacaccggattgggatgtgtgctaatgcaagaaggaagagtggtagcatactcatctcgacagctgaaggtccatgagaaaaattatcccacacatgacctggagttggcagcagtggttcatgctttaaagacctggaggcattacctgtatgggcagaagtgcgacatctacacagatcataaaagtctgaagtacatattcacccagtcagagttaaacatgaggcagcgaaggtggttggagctgatcaaagactacgagctggagatacattaccatccaggcaaagccaatgttgttgcagatgctctgagcaggaagagtcaagtcaatatgttggcctcgtacccgatgccgtatgagttagccaaggagttcgacagactgagcctcggtttcctgaacagtacgcaaggagtaacagtggaattagagcccaccctagagcgggagatcaaagaagggcagaaggacgatgaaagcatcaacaagatccggcaactgatcttagaaggaagaggcaaagactttcgagaggatgaagagggagtaatatggttcaaggaccgattgtgtgtccccgacctcaaacctattcgggagctaatcctcaaggaagctcatgagacagcctactccatacaccctggaagtgaaaagatgtatcaggatttaaaaaggagattttggtggtatggcatgaaaagagaaatcgtagaatatgtcgccatctgtgatagctgtcagagaaccaaagcagagcatcagaggcctgccggattgttgcagccattgcggattcctcagtggaagtgggatgagatcgggatggattttatagttggcctacctcgtacccgggccggctatgattccatctgggtggttgtggaccgcttaacaaaggtggcccatttcatacccgtgaagacaacatacaccggagcaacgttagctgagttatacatgtcacggatagtctgccttcatggtgtgccgaagaagatagtgtcagatcgaggaacgcagttcacctctcatttttggcagcagctacaagaagctttgggcacccatttgaacttcagctcggcttatcacccgcagacagacggacagactgaaagaactaatcagatcctagaagatatgttgagagcctgtgcgttgcaagacaagttaggatgggacaaaaggttaccttatgcagaattctcctacaacaatagttatcaggccagcttgaagatgtcgtcgtttcaggcactctatggacggagttgtaggactccgctgcattgggaccagcctggagagagacaggtgtttggccccgacatcttgcttgaagccgaagagaatatcaaaatggttcgggagaatctgaagatagcccagtcaagacagcgaagctatgcggaccgaaggagaagagaactgagttttgaagtgggagactacgtctatctgaaggtgtcacctatcaggggagtcagaaggttcggagttaaaggcaagttagcaccccggtatgttggaccatatcagattcaagcaaagcgtggagaagtggcctaccagctcaacctaccagaaagtttgtcggcagtgcacaatgtgttccatgtgtcccaactgaagaaatgtctgcgagtaccagaagaacagttgccagtggagggtttggaagtccaggaggatctgacatacatagagaagccaacgcagattctggagtttgcagacagagtcacccggaggaacaccatcagaatgtgcaaagtcagatggggtcaccactcggaggaagaagcaacctgggaacgagaagatgatctgaaggccaaataccctgaactctttgctgaccaaccttga

SEQ ID NO: 5050 - DNA, 4524 bp, Zea mays
  Clone ID: TF_ZM4932.C1.o2.fg
atgtctgacaacaggcgccgatgcaacaggcgtgctcagcaagagcagcatgaccagcaggaggaacaacagaggcagcctcccccaccacccccgatgtcagtggagcagatgttcttgatgcagactcaggcagtgcaggccattgggcagactctggcagccatgcagcaggctcaacagcaaccccaaccccaattgcaagtgcagatgccccagatgccacgagataagcgtggtgagttcatgagagggcaccctcctaccttcgcccattctgctgaccccatggatgcagaagactggctgcgcgcagtggaaagggagctgcgcaccgcccaatgtgacgacagggagaaggttctgtatggcccccgtcagctgaggggagtagcccagtcctggtgggagtcctacctcgccacacatgctgaccccgaagccatcacctgggaagaattcagtgagagtttctgcaggtaccacgtgccagagggactgatgatcgtgaagaaggaggagtttctggctctgaagcagggacccctgtctgttagtgagtacagagacaagtttctgcagctgtctcgctatgcacctgaagacgtcaacactgatgctaaaaggcagtacaggttcatgagaggtttggtggatcccctgcattaccagctgatgaatcacaccttccccaccttccagcacctgatcgatagggcagttatgactgagaagaagcgtaaggatatggaagatcggaagcgcaagatgagtggaccccagtccggaggcatcagccgtccacgtttctcaggcagttcatctcagcaaggcaggcctggtcacccacagggatatcagaatcagaatcagcgtccgcatcagcagcagtttcagaggcagtacccgcagcagcagcagcagtatcgtcagcacagccagcagggaggtaatcagtatcagaagcagaacaaccaggcacctcgccttcctgccccagcagcaaatcagagcaaccaagcagccccagcacaaggaggaggcagagggtgttttcactgtggagaacaaggccactgggcgatgcagtgcccaaagaagatggcgcagcagcagaccaaccccaatgctccaacaaggcaaggtgtactgcagccggcagcaggcaatcgtagccaagcgtacaaccgtggaaaggtgaaccacttggaggccgaagcaatccaggatgcaccagatgtggcagtaggtatgttctcagtcgaatctcatcccgcgaaagtgctatttgatactggtgcaactcattcatttgtcactgcaacatgggtagaattgcataacatctcagtagaggcaatgatgccgcccatgaggattaattcggttggtggcaaggtgcaaacagataaaatatgttcaaacataatggtggaaataagggagataggattccccagtgacttaatagtaatagacacccccgggatagatgttattctagggatgaattggttaatgaagtatgaagcaaatgttagttgtgacaagaggactgtaacattgaagtccccgtcaggagaagaggtagtggccgagctaaggatgcctaaatcagaagagggagtctgccatcagatttcagttgatagtaaggagcccaacccgctcgaggccatcaaggttgtgtccgactttccggatgtgtttcccgaggagctaacgggcatgccacccgagagaaaggttgaatttgccatagagcttatccctggtaccgcccccatttccaaaagagcctatcgagtgtctggaccagaattggtggaactcaagaagcagatagatgagatgttggagaagggttacatcaggccaagtacctcgccttgggccgctccagtgttgtttgtagagaagaaagatggtaccaaaaggatgtgcatagactacagggccttgaatgaagtcactgtcaaaaacaagtaccccctgccaaggatagaagatttgttcgaccagctcagaggtgccagcgtattctcgaaaatagatctgagatcaggttaccatcaactcagaatccgaccctcggacataccgaagacagcattcatcaccaagtacgggttatatgagttcacagttatgtcctttggtttgacaaatgcgccagccttctttatgtacctgatgaacagtgtgttcatggactatctagacaaatttgtggtagtgttcatcgatgacattctcatatactctcaaagtgaggaagatcatgtggagcatttgaagatggtattgcaaagacttcgagagcatcagttgtatgccaagctgggcaaatatgggttagcagtggatccaaagaaagtggcagatatcctgaactggaaagcaccgaaggatgttcgtgggatcaagagcttcattggaatggccggatactataggcgtttcattgaaggcttctcaaagattgctagaccaatgacagcgttgctagcgaagaaagttgagtttaaatggactcaaaagtgtcaggaagcatttgaagaactgaagaatagattgactacagctcctgtgttagtcctgcctgatgttcacaagtcattctcagtgtattgcgacgcttcgtacactggattgggatgtgtgctaatgcaagaaggaagagtggtagcatactcatctcgacagctgaagatccatgagaaaaattatcccacacatgacctggagttggcagcagtggttcatgctttaaagacctggagacattacctgtatgggcagaagtgcgacatctacacagatcataaaagtctgaagtacatattcacccagtcagagttaaacatgaggcagcgaagatggttggaattgatcaaggactatgagttggagatacattaccatccaggcaaagccaatgttgttgcagatgctctgagcaggaagagtcaagtcaatatgttggcctcgtacccgatgtcgtatgagttagccaaagagttcgacagactgagcctcggtttcctgaacagtacgcaaggagtaacagtggaattagagcccaccctagagcgggagatcaaagaagggcagaaggacgatgaaagcatcaacaagatccggcagctgatcttagaaggaagaggcaaagactttcgagatgatgaagagggggtaatatggttcaaggaccgattgtgtgttcccgacctcaaacctattcgggaactgatcctcaaggaagctcatgagacagcctactccatacaccctggaagtgagaagatgtatcagaatttaaaaaggaggttttggtggtatggaatgaaaagagagatcacagaatatgtcgccatctgtgatagctgtcagagaaccaaagcggagcatcagaggcctgccggattgttgcagccattgcggattcctcagtggaagtgggatgagatcgggatggattttatagttggcctacctcgtacccgggccggttatgattccatctgggtagttgtggaccgcttaacaaaggtggcccatttcatacctgtgaagacaacatacaccggagcaacgttagctgagttatatatgtcacggatagtctgccttcatggtgtgccgaagaagatagtgtcagatcgaggaacgcagttcacctctcatttttggcagcagctacaagaagctttgggcacacatttgaacttcagctcagcttatcacccgcagacagacggtcagactgaaagaactaaccagatcctagaagatatgttgagagcctgtgcgttgcaagacaagtcaggatgggacaaaaggttaccttatgcagaattctcctacaacaatagttaccaggccagcttgaagatgtcgccgtttcaggcactctatgggcggagatgtaggactccgctgcattgggaccagcctggggagagacaggtgtttagccccgacatcttgcttgaagccgaagagaatatcaaaatggttcgggagaacctgaagatagcccagtcaagacagcgaagctatgcggaccaaaggagaagagaactgagtttcgaagtgggggattacgtctatctgaaggtgtcacctatcaggggagtcagaaggttcggagttaaaggcaagttagcacctcggtacgttggaccatatcagattcaagcaaagcgtggagaagtggcctaccagctcaacctaccagagagcttgtcagcagtgcacaatgtgttccacgtatcgcaattgaagaagtgtctgcgagtaccagaagaacagttgccagtggagggtttggaggtccatgaggatctgacatacatagagaagccaacgcagattctggagtttgcagacagagtcacccggaggaacaccgtcagaatgtgcaaagtcagatggggtcaccactctgaggaagaagcaacctgggaacgagaagatgatctgaaagccaaataccctgaactctttgctgaccaaccttga

SEQ ID NO: 5051 - DNA, 4786 bp, Zea mays
  Clone ID: TF_ZM4940.C2.o21.fg
atgcttgctctgccgaggctgagtgccgaggttctttcgttttgctctttgttagtcactctcctgcggggagggatggctcgtcttagacacactgcacgtaagtcggtgattcctttcctgccgtctcgacttgcggagcgtcctctgcaccgcaccgtgtccggtcagtcgagtcacctggagaggctgcaccaccgtctgcgtgaggagcaggaacgccggcgccagcacggagagcagcagggctcttcctcctcaccccagcaggaggtggagaccgtgaggccccgttcctctgttgcccagctggaggcgccccttgttccaccgcgggacgtcccggctgttggaggagctactggaggagccactggaggagatcccgacgacgacgactcagaccacagtacggagtcctctgagccgcaggaggcggaaggatgggtcgcccgacccatcactcgtgacgccgctcgcggttgtcacttccacgacgcactcgacaccttgctgcgccaggctttcgaccggcacacctggtcgatcgagtatcgttgcgtagtctaccagcacagtcgcgggaggtacccggaccgctgggaggctacctgcctagttcgccgtccggaggatgacctccggggtgcagaggccgtttcggagcactattccatctccgagagggacactgcagaggcggctatgcaggatgcagcacggcgtgcactctcccagtactattctctgttcggtggcgtggccgatggtcttaaccttcggtactactcccgccgccctactggcagcacagagagtgtggttgtctcacctgttggtgagggtaaccctaggttgagcagcacagtcaacctagtcgcagtgcttaacacggagctggatcactctctggacgagctaagcagggctcgaacggagattgcggagttgcgtgctgagctggcagagcgccatcaccaggagggtggttcccccgctcctgttgggactcagcacccataccgctcaccgccacgtggtcaccacacttatggttcccctattgtgagatcaatgctgatgtgtgaatgtcttccacagatgtctgacaacaggcgccgatgcaacaggcgtgctcagctagagcagcatgaccagcaggaggaaaatcagaggcagcctcccccaccacccccgatgtcagtggagcagatgttcttgatgcagacccaggcaatgcaggccattgggcagactctggcagccatgcagcaggctcaacagcaacctcaaccccaattgcaagtgcagatgccccagatgccacgggataggcgtggtgagttcatgagagggcaccctcctaccttcgcccattctgctgaccccatggatgcagaagactggctgcgcgcagtggaaagggagctgtgcaccgcccaatgcgacgacagggagaaggttctgtatggtccccgccagctgaggggagcagcccagtcctggtgggagtcctacctcgccacccatgctaaccccgaagctatcacttgggaggaattcagcgagagtttccgtcggtaccatgtgccggagggactgatgatcgtgaagaaggaggaatttctggccctgaagcagggacccctgtctgttagtgagtacagagataagtttctgcagctgtctcgttatgcacctgaagacgtcaacactgatgctaaaaggcagtacaggttcatgagaggtttggtggatcccctgcattaccagttgatgaatcacaccttccccaccttccagcacctgattgatagggcagtcatgactgagaagaagcgtaaggatatggaagatcggaagcgcaagatgagtggaccccagtccggaggcaccagccgtccacgtttctcaggcagttcatctcaacaaggcagacctggtcacccacagggatatcagaatcagaatcagcgtccgcatcagcagcagtttcagaggcagtatccacagcagcagcagtatcgtcagcacaaccagcagggaggtaatcagtatcagaagcagaacaaccaggcacctcgccttcctgccccagcagtgaatcagagcaaccaagcagccccagcacaaggaggaggcagaggatgtttccactgtggagaacaaggccactgggcgatgcagtgcccaaagaagatggctcagcagcagaccaaccccaatgctccaacaaggcaaggtgtactgcagccggcagcaggcaatcgtaaccaagcatacaaccgcggaaaggtgaaccacttggaggccgaagcaatccaggatgcaccagatgtggcagtaggtatgttttcagtcgaatctcatcccgcgaaagtgttatttgatactggtgcaactcattcttttgtcactgcaacatgggtagaattgcatagcatctcagtagaggcaatgatgccacccatgaggattaattcggttggtggcaaggtgcaaacagataaaatatgttcaaacataatggtggaaataagggggataggattccccagtgacttaatagtaataggcacccctgggatagatgtcatactagggatgaactggttgatgaagtatgaagcaaatgttagttgtgacaagaggaccataacattgaaatccccgtcaggagaagaggtagtggccgagctaaggatgcctaagtcagaagagggagtctgtcatcagatttcagttgatagtagggagcccaacccgctcgagactatcaaggttgtgtcggactttccggatgtgtttcccgaggagctaacgggcatgccacccgaaaggaaagtcgaatttgccatagagcttatccctggtaccgcccccatttcaaagagagcctatcgagtgtctggaccagaattggtggaactcaagaagcagatagatgagatgctagagaagggttacatcaggccaagcacctcgccttgggccgctccagtgttgtttgtagagaagaaagatggtaccaaaaggatgtgcatagactacagagccttgaatgaagtcactgtcaagaacaagtaccccctgccaaggatagaagatctgtttgaccagctcagaggtgccagcgtattctcgaagatagatctgagatcaggttaccatcaactcagaatccgaccctcggacataccgaagacagcattcatcaccaagtatgggttatatgagttcacagttatgtcctttggtttgacaaatgcgccagccttctttatgtacctgatgaacagtgtgttcatggactatctagacaaatttgtggtagtgttcatcgatgacattctcatatactctcaaagtgaggaagatcatgtggagcatttgaagatggtattgcaaagacttcgagagcatcagttgtatgccaagctgggcaaatgcgagttctggattcatgaagtcttatttctgggtcacatcataaatcaagatgggttagcagtggatccaaagaaagtagcagatattctgaactggaaagcaccgaaggacgttcgtgggatcaagagcttcattggaatggctggatactataggcgtttcattgaaggcttctcaaagattgctagaccaatgacagcgttgctagcgaagaaagttgagtttaagtggactcaaaagtgtcaggaagcatttgaagaactgaagaatagattgactacagcccctgtgttagtcctgcctgatgttcacaagtcattctcagtgtattgcgacgcttcgtacaccggattgggatgtgtgctgatgcaagaagggagagttgtagcgtactcgtctcgacagctgaagatccatgagaagaattaccccacacatgacctggagttggcagcagtggttcatgccttaaagacctggagacattacctgtatgggcagaagtgcgacatctacacagatcataaaagtctgaagtacatattcacccagtcagagttaaacatgaggcagcgaagatggttggaattgatcaaagactatgagttggagatacattaccatccaggcaaagccaatgttgttgcagatgctctgagcaggaaaagtcaagttaatatgttggcctcacacccaatgccatatgagttagccaaggagttcgacaaactgagcctcggtttcctgaatagtacgcaaggagtgacagtggaattagagcccaccctagagcgggagatcaaagaagggcagaaggatgatgaaaacatcaacaagatccggcagctgatcctagaaggaagaggcaaagactttcgagaggatgaagaaggagtaatctggttcaaggaccgattgtgtgttcccgacctcaaacctattcgggaactgatcctcaaggaagctcatgagacagcctactccatacacccagggagtgagaagatgtaccaggacttaaaaaggaggttttggtggtatggtatgaaaagggagatcgcagaatatgtcgccatctgtgatagctgtcagagaaccaaagcggagcatcagaggcctgccggattgttgcagcctttgcggattcctcagtggaagtgggatgagatcgggatggattttatagttggcctacctcgtacccgggccggttatgattccatctgggtggttgtggaccgcttaacaaaggtggcccacttcatacctgtgaagacaacatacaccggagcaacgttagctgagttatacatgtcacggatagtctgccttcatg

SEQ ID NO: 5052 - DNA, 1059 bp, Zea mays
  Clone ID: TF_ZM4516.C1.o1.fg
atggaggtcttgagtacaatgaccccgatcattgtgattgggaaaattgcggcatttgagatgtcgggaaaaatgggtcgacaagaggagccaacctcttcaagaccatatgcttttgcatgtgatgaaagaaaagacaaaaagaaggctcccactccaagttcctcaagtgaagaagagtcgaggatcttcactttaacattgacaagaaaaagcaaagaaagagaggatgcttcacatgtggggagaagggccactttagggacaattgtccaaatatggccgaacccacaaaggggaggagcaaaggcaaggagcttacaagtgtcaaaacttgggatgactcttcaagcgaagatgaacctccaaggacgcgcaaccaccgatcctcatcacggtcatcgcacaagtgctttatggcaagagctatcaactaaaattgagcaattagagtctagtgctccatccacagctactgatgatggccttattaaaaagaatgaaaaacttaaggctaagttagctagctcccaagaagccattgaaaatttgctagagaaaatggaaattcttagcatacacaatgatgagctaactactaagctagaaaacattggtagcaccccagaagtatctttggttgaaatacctgaaattattaagaaagatgcttctacttcttgtcttgatgtaattgataattctaatcactgcaatcaagttcttgttaagaatgttgttatagaaacatattcggatgagattgcaatggagaatgagcaattaaagcaagaagtgtatcaccttggcaatgctttgtatgacaagaaaggcaaagccaaacaaatccaacctcctcaggataacaccactgcgggagtgaacaagcccatggagggcgaaactgtgatttgtaggctatgtcacaaagaaaaccacaagtctttccaatgcaaggcgaagaccgggataagcaaaagctcaaacaaaatccgacaagcaaaatctccaacacctacatcaacaaggtggacaaaaaggctgctacaccatacttaa

SEQ ID NO: 5053 - DNA, 1605 bp, Zea mays
  Clone ID: TF_ZmC4916_400
atggatcctaagggaaaggggatggtggtcaacgacaaggaaaagaagtccttcctcaacgagcctagagacgacaagccaaccgactctagctcgagtcacaagaagaaggacgggaagaagaagaggcgcatcaagaagatcgtctactacgacagcgatgcatcttcctcttcaccaagagacgacgatgatgacgattcttcgttaaagaaaaagacggacaccctcaagatatctcatgagggaaatgacgccaccatgatcaccaaaatggagttggtggaaggcgagctggggagatttgcgatgattaggggagaggagccaactcaaacctacaacaggctcaagaccctggtcaacaagattagaagctatggaagcacaagatggacggaccatgacgtcgtccgactcatgctcaggtcatttactgtaattgacccccatcttgtcaatcttattcgtgaaaaccctaggtacacaaagatgacgcccgaggagatccttggaaagtttgtgagcgggcgcatgatggtgaaggaagcgcgacacatggatgacgccttgaacgatccactacccatctacgagtcacaacccgttgctctcaaagcaacaagcagcaaggaggcgctaccaagcaaggtagctcaagtagaggctgccgacctcaacaaagatgagatggcgcttatcatcaagcgcttcaagaccgcacttagaggacgcatggagtaccccaacaagaataaaacaaagggaaaacgctcctgcttcaaatgcggtaagactggtcattttattgctcaatgtctcgataatgaaaatgaccagggacaagaaagacatgggaagaaggagaagaagaaaagctataggaaggcgaaaggcgaggctcatcttggaaaagaatgggattccgactgctcctcatccgactccgacgatgaaggactcgctgcctcggccttcgacaagtcttcgctcttccccaatgaacgccacacttgcctcatggccaaagagaagaaggtaaatgttcgagaaacccctaagtacactacttctagcgatgatgattcttccgatgatgaagtagattactctagcttatttaaaggtttagatagagtcaaagtagagaaaattaatgaattaattgatgctctaaatgaaaaagatagatttctagagaagcaggaagacattttatatgaggaacttgacaaatttgttagtgtacaaaagtctcttgctttagaaactaagagaaatgaaatgctatcttctgagttatctgcttgtcatgaatctatctctagtttaaagattttaaatgatgatttaaatgctaagatagaggaagttaacaaatctagttcatgtgtagagcatgttgttatttgcaatagatgtaaagactttgatgttgatacttgtaatgaacatcttattgctattactaaattaaatgatgaggtgtcaagtcttaatgctcaacttaagacttgcaaaagtgattttgaaaaattaaagtttgctagggatgcctacactattggtagacacccctcaattaaggatgggtttggtttttga

SEQ ID NO: 5054 - DNA, 5349 bp, Zea mays
  Clone ID: TF_ZmC4916_381
atggatcctaagggaaaggggatggtggtcaacaacaagacaaaggagtccatcgtcaatgagtcaagagatgataagccctcagactctggcttgagtcataacaaggacgggaagaagaagaggcacatcaagaagatcgtctactacgacagcgacaagtcttcttccccaagagacaacgaatacgaagagaaaaagaaaatgttcaattccaatgctcatttactttcaattccactcgggaaacctccgcactttgatggagaagactacccattttggagtcacaaaatgcgtagtcacctattctctctccatccaagcatttgggagattgttaaaaacggaatgctttttgatagtactgacaaccccgttttcattaatgagcaaatccataaaaatgcacaagctaccactgttttgttagcatccttgtgcagagacgagtacaataagatggagttggtggaaggcgaacttgggaggttcgcaatgatcaggggagaggagccaacgcaaacgtacaaccggctcaagaccctggtcaacaaaatcaggagctatggaagcacgagatggaccaatcacgacgtcgtccggcttatgctcaggtccttcactgttcttgatcctcatcttgtgaattcaatccgtgagaatcctaggtacacaaggatgacgcccgaggaaatactcggaaagtttgtaagcgggcgtatgatgatcaaggaggcaagatatgttgatgaggcattgaatggcccaatgcctatctacgagcctcaaaccgttgctctcaaagcaacaagcagcagagaggcgctatctagcaaggtggcacaagttgaggctgctaggctaaacgaggatgaaatggccctcatcatcaagcgcttcaagacggcactaaaaggacgcaaggagcatcccaacaaaagcaagacaaagggaaagcgctcctgcttcaagtgtggtaagactgggcactttattgctaactgtctcgataatgatagtgaccagggacaagaaaagagcgagaagagggagaaaaagaagtcctacaagaaggcgaaaggcgaggcgcaccttggcaaggagtgggatttggattgctcttcgtccgactccgacgacgaaggactcgccgcctcgtccttcaacaagtcgtctctcttccccaacgagcgccatacttgcctaatggcaaaagagaaaaaggtaaacgctcgagatacccctatgtatgcttcttcaagtgataatgaatctagtgatgatgaagtagactacacaggtttattcaaaggtttagatagaactaaaattgataagaccaataaattgattgatgccttgaatgagaagcatagattgttagagaagcaagaagatattttatatgaagagcatgacaaattcattagtgtacaaaaatctcttgctttagaagtaaaaaggaatgagatgctttccttcgaattatctacttgccatgaaactgtgtctagcttaagaagtattaatgatgatttaaatgctaagctagaagttgttaataaatctagttcttgtgtagagcatgttgttatctgtaatagatgtaaggattttgatgttgatgcatgtgttgagcaccttacctctattacaaaattaaatggtgaagtggctagtcttaatgcccaacttaagactagcaaaaatgactttgataaactaaaatttgcaagggatgcctacactgttggtaaacacccctctattaaggatgggcttggctttcgaaaggaagccaagaacttaacaagtcaaagggctcccatttccgcccaggagaaagggaaggcccctatggcaaatagtgctcaaagaaatcatgctttcatctatagtgatagaaagttttctagaaatgctcataggagttatgcttatgattcacatgctatgattgcatcaagttcttcttttgtgcatggtagaaatatgcctaggaaaaatgttgcccatgtgcctaggaaagtttgtaatgaaccttctacaatttaccatgcttgcaatacttcttttgcaatttgtcgtaagaataagaaagtgattgctaggaagttgggggccaagtgcaagggagacaagacttgcatttgggtcccaaagtctattataactaaccttgcaggacccaacaagagttgggtttatgcatccgggggctcaagctggattatcgacagcgaatgcacaaactacatgacgggggagaagaagatgttcacctcctacgtcaagaacaaggattcccaagatacaatcatatttggagatggggatcaaggcaaagtcaaaggcttaggcaagatagccatcactaatgagcactctatctctaatgtatttctagtagagtcgctaggctataatctgctgtttgttagtcaattgtgccacatgggttataattgtctatttacaaatgtagatgtgtctgtctttagaaggagtgatggttcactagcttttaagggtgtactagatggcaaactctatttagcggatttttcgaaagaggacgccgatctagatacatgcttaattgctaagactagcatgggatggctgtggcatcgccgtctagcacatgttgggatgaagaaccttcacaaacttctaaagggagaacatgtgttaggtctaacaaatgtgtttttcgaaaaagatagaccttgtgcagcttgtcaagcaggcaaacaggtgggaagcactcatcatagcaagaatgtgatgaccacatcaagacctttggagctacttcacatggacctcttcggacccgtcgcctacctcagcatagcgggaagtaagtatggtcttgttgttgttgatgatttttcccgcttcacttgggtattctttttgcaggataaatcaggaacccaagggaccctcaagcgctttctaaggcgagctcaaaacgaatttgagctcaaggtgaaaaagattagaagcgacaacgggtccgagttcaagaaccttcaagtggaggagttccttgaggaggaaggaatcaagcacgagttctccgctccctacacaccacaacaaaacggtgtggtagagaggaagaacatgacgcttatagacatggcaaggacgatgcttggagaattcaagacgcccgagcggttttggtcgaaagctgtgaacacagcttgccacgccacaaaccgggtctaccttcatctcctcctcaagaagacgtcgtatgaacttctaaccggtaacaaacccaacgtatcttattttcgtgtatttgggagtaaatgttacattctagtgaagaaaggtaggaattccaaatttgctcccaaagctgtagaagggtttttgttaggttatgactcaaatacaaaggcgtatagagtcttcaacaaatcatcgggtttggttgaagtatctagcgacgttgtatttgatgaaactaatggctctccaagagagcaagttgatcttgatgatgttccaacggacgcgattcgcaccatggcgattggagatgtgcgaccacaggaacaccagcagcaagatcaaccttcttcctcaacgatggtgcatcccccaactcaagatgatgaacaggtccctcaagaagaggcgtgtgatcaagggggagcacaaaatgtccaagatgtggaagaagaagcaccacaggcccctccaactcaagttcgggtgacgattcaaaggaatcatgccatcgaccatattttgggtgatataagcaagggagtaactactcgctcacgtctagctaatttttgtgatcattactcgtttgtctcttctattgagcctttcagggtagaagaagccttgctagatccggactgggtgttggccatgcaggaagagctcaacaacttcaagcgaaatgaagtttggacactggtgccacgtcccaagcaaaacgttgtgggaaccaagtgggtgttccgcaacaaacaggatgagcacggggtggtgacaaggaacaaggctcgacttgtgacaaaaggttatgcccaagtcgcaggtttggactttgaggagacttttgctcctgtggctaggctagagtcgattagcattttgttagcctatgtcgctcaccattcttttaggttgttccaaatggacgtgaagagtgctttcctcaacgggccaatcaaggaggagatatacgtggagcaaccccctggctttgaggatgaacggtaccccgaccatgtgtgtaagctctctaaggcgctctatggacttaagcaagccccgagagcatggtatgaatgccttagagattttctaattgctaatgctttcaaggttgggaaagctgatccaactcttttcactaagacttgtgatggtgacctatttgtgtgccaaatttatgtcgatgacataatatttggttctactaaccaaaagtcttgtgaagagtttagcaggttgaactacttccttgggttccaagtgaagcaactcaaggacggcaccttcatctcccaaacgaagtacacgcaagacttgctcaagcggttcgggatgaaggacgccaagcccgcaaagactccaatgggaaccgacggacatgtagacctcaacaaaggaggtaagtccgttgatcaaaaggcataccggtctatgatagggtctttactttatttatgtgctagtagaccggatattatgcttagtgtatgcatgtgtgctagatttcaatccgacccaagggagtgtcaccttgtggccgttaagcgaattcttagatatttagttgctacgccttgctttgggatctggtatccaaaggggtctacctttgacttaattggatattcagactccgattatgctggatgcaaggttgataggaagagtacatcagggacgtgccaattcctaggaaagtccctggtgtctttgagttctaagaaacaaacctctgttatcctatccaccgctgaggccgagtatgttgcagcaggacagtgttgcgcgcaactactttggatgaggcaaaccctcagggactttggctacaatctgagcaaagtcccactcctaggtgacaatgagagtgcaatccgcatggcggacaatcctgttgaacacagccgcacaaagcacataggcatccagcatcactttttgagagaccaccagcaaaagggagatattgaagtgttttatgttagcaccgagaaccaactagccgttatctttaccaagcctttagatgagaagaccttttgcaggctgcgtagtgagctaaatgtcatagattcgcgtaacttggattga

SEQ ID NO: 5055 - DNA, 4962 bp, Zea mays
  Clone ID: TF_ZmC6526_1
acgatccgatgcccgggagatgctactcttcctgtacgagtctaagtattttttatgagctctatacagacctggcagcgccacttcgtaaaggtagtcaaaccagaattgctttgctaatacacattcgaacaccagataaattatgttttcaccctcttgacttcacatggggcaccgttctggccgctctagccagccttggccgaacgtggcagcggcgctgcacctcctttgttcaacaatccataaaaagaacgtgcacttcccaggagcccaagatttccacacacgctctgctggttcgaactgaactgaaccaaggaagagagcattataaacataaaaggatgtataagcgcctggagcgctgattaatcatgatggtcgcgcaattatcctctgcaggagtactactgcaaatagcagttcacaaagttccagcaattcagctgccactcctatcgagattagggcatgcgaatccaaaatagaagcaaaatgggggagagcatcttaaaacaaccatatgttggctagacaccatgtcatcaaatcaaagattgcggcaactatctccttcagacaccaccactataagcattggaccttcccgataagtctattttctacatgaccgatcttagaaagaagggctgcagcaaacagattattcactccctaacaaacatgactgggtaagtccgcccaaggcttactcgggggtgttctcggttcccacgccctggatggactcaattcccaacagaggttatttaactatttaatcccaagatcatccaactacttggcactgctaaccttaggccccctctagaggctatgaacagtaaaaaactattccctataactcaagaagaagaacttccttaacatttcgattgctttaaaggcgaaatcaggaaggacaagtggcaatgcaacatacatcaccttagctgtcatgacatactctgcataaagagaactaccagtcctggtcactgctgcagctgactcccatgccaagcggatagaagccttatcaataatctcctgcgtttcgtccattgtggacgtcactgcttaacaaaaagcgattggaatcaatctgttctgttcgccaagcatttttagtaatgaatctcttccagatttttgttgaatagccataaccatagtgataaccctgtcggtaggatatagaaataccactgcgtcacccgcgtacagcgatatacggtcctgcatattcctagaaggaagaggctgaagaaacccttcctcagaggctcgcgagtcaaaagcctttgaaatgtcaagcttgagaaggatacgagcctgcttctgacaatgtaagaatctggtcgtctgctggactagcatgaagttgtcaagaataaaccgttttttaataaaagcggtttgattgggggaaaccatattttgcagccggtctgctaacctgttagccaacaatttagttaccactttcgcgaaactatgaaccagacttattgggcgaaagtctctcacactagtggccccctccaccttgggcagaagagtgatgaatgctgaattcagcgaacccaagtttctgaaatttctggcccaaatgcagtgaatggccgccataaaatcagccatgattaccgaccaacaactcttgtaaaatctaccagtgaacccgtcaggacccggggatttgtccgaagggagagccttaattgtatcccagacctcctcctccgagacaggcgcatccagggcaacgaggtcaaaagatggcatccctagagcatccagatcaactgtaacatcccttacttctgcagttccaagtaacccttgataaaaattaaagaaggctgctgcatttccttcatgggcagtccagatttgcccatcctctgagtgtattgctgcaatgaaattctttttcttcctgaaccttgtttgtgcatgaaagagagaggtattggcatccccttcattgagccacccaatccgcgatttcaaccttgccacagtacgagagatagaagacagggcaagggagtgcttcttgagcatgttccggagccacaattcagcatgagataatgagcgattgtcctgcgcaacctctaattgatgaaggagctccctagccatctcaagcttctgcttaatcttcccagcttttttgtcattccagctctgcagactcctagccgttgcctttaacttcttggccaaagtgatcggtgggcacggcccattcgaccatgtatatttccggccaatcaacggaatttcattaagggccaaatcatttgcccatctcctgaacctgcccatcatggcacggtctaagttattattattcttctcttcctcccttaaaatcggattaaaatcccccagcacaagccatggcccattacaaagagctctaatttctctaagagattgcaaaaactgaatcttctcttggttcccttgcggaccatacacacatgtaagccaccaaggggggctggtgcttgaatgaaagttcacagagacgctatgatcattcaccctactgccagcacaaataccaatgctatttttccaagccaccaagatgccaccactagcaccaacagaaggtaggaatacaaaattgtcaaaagctggacctagcatccgcaatacaaggaaccgagaaacatccaccattttagtctgcacctcggaaagccctttgctgaaaactctggcatactcatcaaggtcttttggcctaatagttacagtctcttcagcattcacaataccaagttccttcaaaatatgtttcttgccctgcgtggccggtggaggagtagccagtctctccactcctgcaccagcgacccttctattgtgtcggggtaccacctcagtggctgtagccttgccctgtcgcggccttctgactggcgccctcagaatcccacctgctggtctggtcagcttatcgatgaactcttttgcacccgaagggggggacggggacgcgccaagcagcagactgggttgactatccttcttcctcctctgccgaaagtaagtaatgatggggcttctccgtgataggcgactcgacgttcgcgcatccaccaaggctgacttctgccctcccatgtcgaatgtggcccgagatggagatcccgggggtagcacctgaattgcctgctccttctcgcatccacccatagagcaacaaactgccggagctctcaagggtgaagagggggaagatggtactggcaggggggagtgagatgggcaaccaccggacagccccgacgccccagcctccaccatgcaggcctgctcatgtctcctgccgttactctccacattatcttctgacgcctcaatcatagccccaatatttaattccttgacagcagggatatgctcctctaaattagaagaaccatttaaagatgcctccttggaaacctcctgttccaacacttcctgtgaaatagccacgtggcggggacagattggcagcggtcctagtctctcatgcacggggcgccgaacggccaacgcttcgacagggcctccctgccttgccggagaagcttgttgcaggcgacgtcgacgagacctagtgtcccgatcatcattagacgccggcggcgacgggggaggggaaacatcgcccgccgacggagagatcagagacaccgaggccatcacctgataagctagaagatgcttcacagtggtctccacttcaaaactctgaaccggcttcagaatcaaaagatcaacagcaaccggaatgagctctggatgccggctccaaccaagaaccctgaaggaggagaagttcagacgagcaacagtgtcgggatgaagctccaatgccgtgcagtgcgctcgcagcaaacttctagcagtttccacactccatgcgtgcaacgggactccctcgaagctcacagacacaaaggaaggcagggaaaccgcttcagcgtgtgcaagccttgaccacttgatgaacttgaaagacccagaaggtgagttgagaacagctccgttgttgaagacacgtaacaccgcttgctcattttgcatgataataacgaaatcttcaggcaccgaacggtggactgaaaaacttgcaggatcaagctcatactccgctgcaatttctgccgccaaaagctcagctgtcaccggcggccgcgaaccaatgaccacgacgaacagagcacaatgccgaagattgttctccaccagagttaaatcccttgcacgctcaaggacgcaaaccggccgtgccgccgaacctgcattcttcaccacggccgactgatgtgagggtagccgagcggagctgtcatcatccactggtggcaagctagcagcgctcctagatcggggccttctccccctggtacgatgtcgacccttcttggtgtgattcatcgactgtccaggcccgtcctcagcagcagcatgtcgaccatgatccatgggaggggagaccctccgccaaaccagcctccgcttagagaacggaactgaaacctccactggttgactgcctaagcgctcccacacaggacggccgccggacgaggcactggccacgttcagcctacgagcgacgagtggatgcaggtcaggaccgccggacaaaaccttggtcacgtcgtgccctctatcggcgccagggcattcagcagcacggtggcccggccggcggcagcgcaagcagcaggacggatgtcggcacgcagccgcacgatgggacgtcgccaagcagttgaaacacctcccccggagatcctgcgggaccggtcgacggggaaggggagggcgggggcgctcagccaaacgacgacgacgacagggaccacctagtctccactgtaatccagccctctgcgtctgatggcggcgaggccccgtgcaggcgacggctaccat

SEQ ID NO: 5056 - DNA, 3847 bp, Zea mays
  Clone ID: TF_ZM3738.C20.o2.fg
ggatgagtaccacaaggtgagcggcttggataacgccaagcaaatttgggacaccctcaagatttctcatgaggggaacgacgccaccatgatcaccaagatggagttggtggaaggcgaactgggaaggtttgcaatgatcaggggagaggagccaacacaaacatacaacaggctcaagacccttgtcaacaaaatcaggagctatggaagcacgagatggatggaccacaacgtcgtccgacttatgctcaggtccttcactgttcttgatcctcatcttgtgaactcaattcgtgagaatcctaggtacacaaagatgacgcccgaagaaatactcggaaagtttgtaagcgggtgtatgatgatcaaggaagcaagatatgttgatgaggcattgaatggcccaatgcccatctacgagcctcaaaccgttgctctcaaagcaacaagcagcagggaggtgctacctagcaaggtggcacaagttgaggcggccggactaaacgaggatgagatggccctaatcataaagcgcttcaagaccgcattgaagggacgcaaggagtactcaaacaagaacaaggcaaagggaaagcgctcctgcttcaagtgcggtaagactggtcattttatagcaaattgtctcgataactctagtgaccaggaacaaggaaagggtgggaagaaagagaagcaaaagagctataggaaggcaaagggcgaggcacacatcggaaaggaatgggactcggactgctcatcttctgattctgacgacgaaggactcgctgctcggccttcaacaagtcctttctcttccccaacgaacgccacacctgcctcatggcaaaggagaaaaagtgatgatgaagtagactatactgaattatttaagggcttagatagatcaaaagtagataaaattaatgaattgattgatgccttaaatgagaaagatagacttctagagaggcaagaagacattctgtatgaggaacatgacaagtttgttagtgttcaaaagtctcttgccttagaactaaagagaaatgaattactatcttctgagttatctacttgtaatgaaactgtggctagcttgaagagtattaatgatgatttaaatgccaagctagaagtagttaacaaatctagttcttgtgtagaaaagattgtaatttgcaatagatgcaaggattttaatgttgatgcttgtgatgaacatttaatttccatttctaaattaaatgatgaagtggcaagtcttaatgctcaacttaagacgtgcaaaagtgattttgataaattaaaatttgctagggatggctacactgttggtagacacctcttaattaaggatgggcttggctttaagaaggaagccaagaacttaacaagccaaagggctcccattttcaacaaggaaaaagggaaggcccctatggctagttgtattcaaaagaatcatgcgttcatttatcatagaaaagtttctaggaatactcattataataggagttatggtgcttatgattcacatgctatgattgcttcaagttctacttttgtgcatggtagaagtaggcctaggaagggaaatgttattcatcatgtgcctaataaaatgcctaatgaatctgctactgtttttcatgcctgcaacactgattttgtactttcatgtaaaaataagaaagtggttgctaggaagttgggagccaaatgcaagggagataagacttgcatttgggtcccaaaggatattgtaactaaccttgtaggacccaacaagagttgggtttatgcatccgggggctcaagctggattatcgacagtggatgcacaaaccacatgacgggggagaagaagatgttctcctcctacgtaaagagcaaagattcccaagattcgatcatctttggagatgggaaccaaggcaaggttaaaggtataggaaagatagctatttcatccgagcattccatatctaatgtgttcttagttgaatcactaggatacaacttattgtctgttagtcaactatgtaatatgggatataattgtctgtttaccaatatagatgtgtctgcctttagaaggagtgatggttcactagcttttaagggtgtactagacgacaaactctatttagttaatttttcgaaggaagaggccgatctagatgcatgcttgattgctaagactagcatgggctggttgtggcatcaccgtttagcacatgttgggatgaagaaccttcaaaaacttctaaagggagaacacgtgttaggtctaacaaatgtatctttcgaaaaagatagaccttgtggagcttgtcaagcaggtaaacaggtgggaagtactcatcacaacaagaacgtgatgaccacggcaagacctctagagctacttcatatggacctcttcggacccgtcgcctaccttagcatcgggggaagtaagtatggtcttgttattgttgatgatttttcccgcttcacttgggtattccttttgcaggataaaacagaaacccaagggaccctaaagcgctttttaaggagagctcaaaatgaatttgagctcaaggtaaaaaagataaggagcgacaacgggtccgagttcaagaatcttcaagtggaggagtaccttgaggaggaaggaatcaagcatgagttctccgctccctacacaccacagcaaaacagtgtgaaaggtaggaattccaaattcactcccaaagttgtagaagggtttttgttaggttatgactcaaatacaaaggcgtatagagtcttcaacaaatcatcgggtttggttgaagtctctagcgacgttgtatttgatgaaactaatggttctccaagagagcaagttgatcttgatgatgtagatgaagatgatgttcccacggacgcaattcgcaccatggcgattggaaatcctttcaggatagaagaggccttgctagattcggactgggtgttggccatgcaggaagaactcaacaacttcaagcgaaatgaagtttggaccctggtgccatgtccaaagcaaaacgttgtgggaaccaagtgggtgttccgcaacaagcaagacgagcacggagtggtgacaaggaacaaggctcgacttgtggcaaaaggttatgcccaactcgcaggtttggatttcgaggagacttttgctcctgtggctaggctagagtcaattcgcattctattagcctatgccactcaccattccttcagatttcaatccgacctaagggaatgtcaccttgtggccgttaagcgaattcttagatatttagttgctatgccttgcttcgggatctggtatccaaaggggtctacctttgacttaattggatactcagactccgattatgctggatgcaaggttgataggaagagtacatcagggacgtgtcaattcctaggaaggtccctggtgtcttggagttcaaagaaacaaacttccgttgccatatccaccgctgaggccgagtatgttgccgaaggacagtgttgcgcgcaactactttggatgaggcaaaccctccgggactttggctacaatctgagcaaagtcccactcctatgtgataatgagagtgcaatccgcatgggcggacaatcctggttgaacacaacccgcacaaagcacatagacatccggcatcactttttgagagaccaccagcaaaagggagatatcgaagtgttttatgttagcaccgagaaccagctagccgatatctttaccaagcctttagatgagaagaccttttgcaggttgcgtagtgagctaaatgtcttagattcatgtaacttggattga

SEQ ID NO: 5057 - DNA, 1506 bp, Zea mays
  Clone ID: TF_ZM4936.C1.o6.fg
atggagttggtggagggcgagctgggaaggttcgcgatgatcaggggagaagagccaacacaaacgtacaacaggctcaagaccctggtcaacaagattaggagctatggaagcataagatggacggaccacgacgtcgtccgacttatgctaaggtcattcacggtaattgacccccatcttgtcaaccttattcgtgagaatcccaggtacaccaagatgatgcccgaggagattcttgggaagttcgtgagcgagcgcatgatgcaaccagtagcagggagacgctgccaagtgccaagcaaggtggcacaagtggaggccgctagcctcaacgaagatgagatggcgctaatcatcaagcgcttcaagaccgctcttaaaggacgcaaggagtaccccaacaagagcaaaacaaggggaaatcgctcctgcttcaaatgcagtaagactggtcactttatagcaaattgtcccgataatgttaatgaccaggaacaagaaaagagcgggaagaaggagaagaaaaagagctataggaaggcaaagggcgaggcgcaccttaggaaagaatgggactcagactgctcttcatccgactccgacgatgaaggactggcagcctcggccttcaacaagtcttcactcttccccaacgaacgccatacgtgtctcatggctaaggagaagaaggtaattgttcgagaaacccctaaatatactacttcaagcgatgatgattctagtgatgatgaagtagattatactgatttatttaagggtttagatagagctaaagtagataaaattaatgagttaattgattctttaaatgaaaaggatagacttttagagaagcaagaggacattctatatgaagaacatgacaaatttgttagtgtacaaaagtctcttgctttagaaactaaaagaaatgaaatgttatcctctgaattgtctgtgtgccatgaatcaatctctagtttaaagattttgaataatgatttaaatgctaagctagaggtagccaataaatctagttcatgtgtagaacatgttgtagtttgcaatagatgcaaggattttgatattgatgcttgtgataaacatcttgcgtctattaccaaattgaatgatgaagtggcaagtcttaatgctcaacttaagacttgcaagattgattttgataagttaaaatttgctagggatgcctacaccgttggtagacacccctcaattaaggatggacttggctttcgaaaggaagccaagaacttaacaagccaaagggctcccattcccaacaaggagaaaggaaaggcccctatggctagtagcattcaaaggaatcatgcttttatttatgatagaaagtgttctaggaatgtgcattataataggagttatgttgattataatgattcacatgctacgtttgcctctagctctacttttgtgcatggtaggcctaggaaaagtaatggtgtgcatcatgtgcctaggaga

SEQ ID NO: 5058 - DNA, 3510 bp, Zea mays
  unsure (1)..(3510): unsure at all n locations
  Clone ID: TF_ZmC119_1513
ttagggaccccccggtctcgaaacgccgacactctttaagctagaaatagagtcatgacatgtagacaattcacaagagagcatttcatttcttttaatttctaacgcaagggagttttgtgcctctacaaacttatcatgctcatcatataagagatcctcttgcttttctaacaatcgattcttatcattcaaagcatcaatcaattcatttatttgatcaatcttagttctatctaggcccttgaataaactagcataatctatttcatcatcatcactagactcatcctcactagaagaagcataagtggattttcgagaatttaccttcttctcctttgccatgaggcaggtgtgatgctcattggagaagagggacgctttgttgaaggcggtggcggcgagtccttcgttgtcggagtcggacgacgaacaatccgagtcccactcctttccaaggtgtgcctcgcccttagctttcttgtaagccttcttcttttccctcttgtttccttgttcctggtcactatcattatcgggacaattagcgataaaatgaccaatcttaccacatttgaagcatgagtgcttcccctttgtcttggtcttgtttggatgctccttgcgaccccttagcgccgtcttgaagcgcttgatgatgagggccatctcttcctcattgagtcctgctgcctcaacttgtgccaccttgctaggtagcgcctccttgctcctcgttgctttgagagcaacggtttgaggctcgtggattggcccattcaaagcatcatcaacgtatctagcctccttgatcatcatccgcccgcttacgaactttccaagtatctcctcgggcgtcatcttggtgtacctaggattttcacgaatattgttcacaagatgcggatcaaggacagtaaaagaccttagcattaggcggacgacgtcgtggtccgtccatcgcgtgcttccatagctccttattttgttgacgagggtcttgagccggttgtatgtttgggttggctccttgcccttgatcattgcgaatctcccaagttcgccctccaccaactccatcttggtgagcatggtgacgtcgttcccctcatgtgagatcttgagggtgtcccaaatcttcttggcgttatccaagccgctcgccttatggtattcatccttgcacaatgatgctagaagaacagtagtagcttgtgcatttttgtgaatttgctcattgataaacatgggactatcactactatcaaattgcattccactctctactatctcccatatgcttggatggagagagaacaagtgactacgcattttgtgactccaaaatccgtagtcctctccatcaaagtgaggaggtttaccaagtggaatggagagtaaatgagcatttgtattttgtggaatacgagaataatcaaaagaaaagtttgaattgaccgttttctttttctcgtagttgtcgtcgtccttttgggaagaagaggactcgtcgctgtcgtcgtagtaaacgatctccttgatgcgccttgttttcttcttcttcccgtcttttctcttgtggcttgagcccgagtcagtaggcttgtcatcttttggatcattgacgaaggactccttctccttatcattgaccaccatccccttgcccttaggatccatctctttcgggcgattagtcccttttcttgaagaagaacggctctgataccaattgagagncacctagatggggggggggtgaataaggtgatcctgtaaaaacatgaaacttaatccacaaaacttgattaggagttagcacaattaagccaagtggctagagaggagagcttgcacaacacgataaccacaaagagatcaacacagagatggncacagtggtttatccccgtggttcggccaagtccaacacttgcctactccatgttgtggcgtcccaatggacgagggttgcaatcaacccctttcaagcggtccaaagacccacttgaataccacgggtgtttttgctttcactttactatatcccgcttgcgaggaatctccacaacttggagcctctcgcccttacactttgatgttcacaaagaagcacggagtaagggagggatgagcaacacacacaagacacgaaatcagagtaccaacacgcacacaagtcgcaacaagagctcacaacacaacttagcgagttcacaactcaaatggagctctaattgctatcgcaaagaatcaaatgcgcagaatcgaagtcttggtgcttaggaatgcttagagaatgcttggtgttctcctccatgctcctaggggtcccttttatagccctaaggcaactaggagccgttgagtgcattccaggaaggcaattcttgccttctgtcgcctggcgcaccagacagtccggtgcaccaccggacactgtccggtgcggatctctttccttatttggcgaagccgaccattgcagtcttggagccgttggcgcaccggacactgtccggtgcacaccggacagtccggtgccccatccgaccgttggcacttgccacgcgtcgcgcgcggattccgtggccgaccgttgacccggccgactgttggctcaccggacagtccggtgcaccaccggacagtccggtgaattttagccgtatgccgccgtcgaagtcccgagagcagccagttcgccagagctagcctggcgcaccggacactgtccggtgcaccaccggacagtccggtgcacccagactgcgcagagtcttggctgctcagccaagtcttttccaaattggtcttttcctgtttctagcacttagacacaatacattagtctccaaaacaatgtactaagtcttagaaacatacctttactcttgatttgcacttcttaagtctttggcacaaatattactcaaagcatttgtgtggagcacttaatcaccaaaatcttatagaaatgtcctaagggtacatttccctttcagggctaagtatttttttgtaaatcatattttgatacttcaccagaagtatccataaaaggaatggatttcaaggtagccaatgcatcaaagggtttccaagcaactcctataaacctaatgcacatttcactagacttaaagtgtgtaaaaatcatttaaaacacaaggaaggggttgcatgcaccggggcttgcttttgttagtaggtgagtcaggctcggactcgcagatgtcgaagtagagccaagtctctgcctgagattccaaaggtggtgatgtcttttcttcagtcacttcaccctcttctccgttttctaaatataaccatataggtatatatataagaatgaatgccatgtaatgcaaactatcacaaagagagatggagaacagaaacactacaactaaagcgcatgacaagaatatacctatttcttatcgctcgattaaagtgaccaatttgaattcacttaggtaaaccagggaattaatccaacttata

SEQ ID NO: 5059 - DNA, 4719 bp, Zea mays
  Clone ID: TF_ZmC119_745
tcaatccaagttccgcgaatctaagacatttagctcactacgcagcctgcaaaaggtcgactcatctagaggcttggtaaagatatcggctagttggttctcggtgctaacataaaacacttcgatatttcccttttgctggtggtctctcaaaaagtgatgccggatgtctatgtgcttggtgcggctatgttcaacaggattatccgccatgcggatagcactctcattatcacataggagtgggactttgctcagattgtagccaaagtccctgagggtttgcctcatccaaagtagttgcgcgcaacactgtcctgcggcaacatacttggcctcagcggtggatagggcaactgaagtttgtttcttagaactccacgacaccagggaccttcctaagaattggcacgtccccgatgtactcttcctatcgaccttacatccagcatattcggagtctgaatatccaattaagtcaaaggtagacccctttggataccagatcccgaagcaaggcgtagcgactcctttgttgaggtcggtgtgtccgtcggttcccattgcagtctttgcgggcttggcgtccttcatcccaaatcgcttgatcaagtcttgcgtgtacttcgtttgggagatgaaggtcccatccttgagttgcttcacttggaacccaaggaaatagcttaactcgcccatcattgacatctcaaacttttgagtcatcaccctgctaaactcttcacaagacttttggttagtagaaccaaatattatgtcatcgacataaatttggcacacaaataagtcaccatcacaagtcttagtaaaaagagttggatcggctttcccaaccttgaaagcattagcaattaaaaagtctctaaggcattcataccatgctcttggggcttgtttaagtccatagagcgccttagagagcttacacacgtggtcggggtaccgttcatcctcgaagccagggggttgctccatgtacacctcctccttgattggcccgttgaggaaagcgctcttcacatccatttggaacaacttgaaagaatggtgagtagcataggctaacaatatgcgaattgactctagcctagccacaggagcaaaggtctcctcaaagtccaaacctgcgacttgggcataaccttttgccacaagtcgtgccttgttccttgtcaccaccccgtgctcgtcttgtttgttgcggaacacccacttggttcccacaacattttgcttgggacaaggcaccaatgtccaaacttcatttctcttgaagttgttgagctcttcctgcatggccaacacccagtccggatctagcaaggcttcttctaccctgaaaggatctccaatcgccatggtgcgcattgcggccgttggaacgtcttcttcatttacatcatcaagatcaacaacttgctctcttggagagccattagtctcatcaaatacaacatcgctagagacttcaaccaaacccgatgatttgttgaagaccctatatgcctttgtatttgagtcataacctaacaaaaacccttctacagctttgggagcaaacttagaattcctacctttcttcactagaatgtaacatttgctcccaaatacacgaaagtaagacacattgggtttgttaccagttagaagctcatatgaagtcttcttgaggaggcgatgaaggtagacccggtttatggcatggcaagccgtgcttacggcttccgtccaaaaccgttcgggcgtcttgaattcaccaagcatcgtcctcgccatgtctagtagcgtcctgttcttcctctctaccacaccattttgctgtggtgtgtagggagcagagaactcatgcttgattccttcctcctcaagatactcctccacttgaaggttcttgaactcggacccattgtcgctccttatcttcttcactttgagctcaaactcgttttgggctctccttaggaagcgcttgagggttccttgggtttcagatttatcttgcaaaaagaatacccaagtgaagcgggaaaaatcatcaactgcttgacaagctgcacaaggtctatctttttcgaaagttacattagttagacctatcacgtgttctccctttagaagcttgtgaaggttcttcatccccacatgtgctaaacggcgatgccacagccagcccatgctagtcttagcaattaagcaagcatctagaccgacctcctcttttgcaaaatcaactaaataaagtttgccgtctagtacacccttaaaagctaatgaaccatcacttcttctaaagacagatacatctacatttgtgaataaacagttatatcccatattacaaagttgactcacagacaacaagttatatccaagcgattcaactaagaacacattagaaataaagtgctcggatgaaatagcaatttttcctaaccctttcaccttgccttggttcccatcaccgaatatgattgaatcttggggatccttgttcttgacgtaggaagagaacatcctcttctcctccgtcatgtggtttgtgcatccgctgtcgataatccagcttgatcccccggatgcataaaccttcttatcctttctacaaatagcaaaggaagcattgcaagcataataaattgtagaaggttcattcattattttcctaggaacatgaacaatatttcttctaggcgtatgatgaacaacatttttcttagccaaatttctatcatgcataatagaagaactagaagcaatcatggcatgagcatcataacttctataaacattcctagaatgtctcctatcatgatacatgaaagcatggttcttttgagcactactagccataggggccttccctttctccttggcggagatggaagccatatggcttgttaagttcttgacttccctcttgaagccaagaccatccttgattgaggggtgtctaccaattgtgtaggcatcccttgcaaattttagtttgtcaaattcactcttgctagtcttaagttgggcattaagactagccacttcatcattcaaattagaaattgaaactaggtgttcactacaagcatcaacattaaaatctttacacctattgcaaattgcaacatgttctacacaagatgttgatctattagctatttctaacttagcattcaaatcatcatttatgctctttaagctagaaatagagtcatggcatgtagacaattcatcagaaagcatttcattccttttaatttctaaagcaagggatttttgtgcctctacaaacttatcatgttcttcatacaaaagatcctcttgcttttttaataacctatttttatcattcaaggcatcaattaattcattaatcttatcaaccttagttctatttaggcccctgaataaacatgaatagtctatttcatcatcgctagattcttcatcacttgaggacgcgtaagtactagtatcacgagtgcttaccttcttttcccttgccatgaggcaggtgtgatgctcgttggggaagagggccgacttgttgaaggcggtggcggcgagtccttcgttgtcggagtcggacgaagaacaatccgagtcccactcctttccaaggtgtgcctcgcccttagcctttttgtaagccttcttcttttccctcttgttcccttgttcctggtcactatcattatcgggacaattagctataaaatgaccaatcttaccacatttgaagcatgagtgcttccccttcgtcttggtcttgttgggatgctccttgcgaccccttagcgccgtcttgaaatgcttaatgatgagggccatctcttcctcattgagtcccgccgcctcaacttgtgccactttgctaggtagcacttccttgctcctcgttgctttgagagcgacggtttgaggctcgtggattgggccattcaaggcatcgtcaacgtatcttgcctccttgataatcatccgcccgcttacaaactttccaagtatctcctcggacgtcatcttggtgtacctaggattctcatgaatattgttcacaagatgtggatcaaggacagtaaaagaccttagcattaggcggacgacgtcatggtccgtccatcgcgtgcttccatagctccttattttgttgacgagggtcttgagtcggttgtatgtttgggttggctcctcgcccctgatcattgcgaatctcccaagctcgccctccaccaactccatcttggtgagcatggtgacgtcgttcccctcatgtgagattttgagggtgtcccaaatctgcttggcgttatccaagccgctcacttggatggagagagaacaagtggctacgcattttgtgactccaaaatccatagtcctctccatcaaagtggggggtttaccgaggggaatagaaagcaaatgagcattggaactttgcggaatacgagaataatcaaaggaaaagtttgagttaaccgtcttctttttctcgtagtcgttgtcattgtccttttgggaagaggaagatttgtcgctgtcgtagtagactatctccttgatgcgccttgttttcttcttcctcccgttttttcttttgtggcccgagcctgagtcagtaggcttgtcatcctttggatcattgacgaaggactccttctccttatcattgaccaccatccccttgcccttaggatccat

SEQ ID NO: 5060 - DNA, 2555 bp, Zea mays
  Clone ID: TF_ZmC33526_1
cgcggcctctctccttctgccttcccacttcccacagtgagacgtcctcctcaccccattcgcagtcgcccactgactgtccgtgccggctaacaacatgaagtggaacctcgaattccgggccgccggcggatctcgccgtgctttgcgcgaccctcctcctgctggacggcgaagaatccccgagcctacacggctcgccacccacacttcgactgccatgcggcccagctcttccagctgcggtatacgtctttaccctctgatgtgcctagtggagaattcctagcgcagcgggatcggtttgaagcctggcaacctcgctcaccgtgctcttcgcttgctactcggctcgaagtcgacgtctgcgagttcgtcgtgtgcgccgaattgtacacgacgtctaacgcgatcgtggagcccaggaatgccgctgctggtcgtgctaagaagaagatgtgtaatgggggttgtatgaattccaacctcagcacgcgacctgtgtaagctgtagatggaaaccttcctgtgctgcaagaggacgatgcgatatactagggtgttagtgcccacttagatttggtttcctagcaatctcgccgttttatacgtttgatgtcagcgtttttttctcttattaatactattttgacgtattgtatgtatgattttcacgtattatgttaactgctgtgtacgtgaaatacctgatcttgtcacgtacatggttcgctttcggtttgccttctaaaaaccgggtgtgagaaagactctcacggctccctcccgctggccgcttctcccgccttctggttccgcctagcgccgacgcatttgggctggagtacgagacgacgattgactcgtcgatacaaggaccccccggttgtctaaataccgagacgatcctttctacaaattgcaaaggaagcattgccagtgtgataatttatagaaggttcattaatcttcctaggaacatgagtaacatttctcttaggcatatgatgaatgacatttttcctagtcaaatttctatcatgcataatagaagaactagaagcagtcatggcatgagaattaaaagcatcataacttctataattattcctagaatgtctcctatcatggtacatgaaagcatggttcttttgaacactactagacataggggccttccctttctccttggcggagatggaaaccttatggcttgttaagttcttgacttccctcttgaagccaagaccatccttaattgaggggtgtctaccaatcgtgtaggaatcccttgcaaattttattttatcaaattcactcttgctagtcttaagttgggcattaagactagccacttcatcattcaatttagaaattgaaactaggtgttcactacaagcatcaacattaaaatctttacacctattgcaaattgcaacatgttctacacaagatgttgatttatttgctatttctaacttagcattcaaatcatcatttatgctctttaagctagaaatagagtcatggcatgtagacaattcacaagaaagcatttcatttcttttaatttctaaagcaagggatttttgtgcctctacaaacttatcatgttcttcatacaaaagatcctcttgcttttctaataatctattcttatcattcaaggcatcaatcaactcattaatcttatcaaccttagttctatctaagcccttgaataaacatgaatagtctatttcatcatcgctagattcttcatcacttgaggaagcgtaagtactagtattacgagtgcttaccttcttttcccttgccacgaggcaagtgtgatgctcgttggggaagagggatgacttgttgaaggcggtggcggcgagtccttcattgtcggagtcgaacaacaaacaatccgagtcccactccttgccaaggtgtgcctcgcccttagccttcttgtacgcctttttcttttccctcttgttcccttgttcctggtcactatcattatcgggacaattagcgataaaatgaccaatcttaccacatttgaagcatgagtgcttccccttcgtcttgttcttgttaggctgccccttgcgaccctttagcgccgccttgaagcgcttgatgatgagggccatctcttcatcattaagcacggctgcctcaacttgcgccaccttgctaggtagcgtctccttgctcctcgttgccttgagagcaatagtttgaggctcttggattgggccatttaatgcatcgtcgacgtatcttgcctccttgatcatcatccgcccgcttacaaactttctaagtatctcctcaggcatcatcttggtgtacctaggattctcacgaatattgttcacaagatgtggatcaaggacggtaaaagaccttagcattaggcggacgacgtcgtggtccgtccatcgcgtgcttccatagctccttattttgttgatgagggtcttgagccggttgtacgtttgggttggctcctcgcccctgatcattgcgaatctcccaagttcgccctccaccaactccat

SEQ ID NO: 5061 - DNA, 3548 bp, Zea mays
  Clone ID: TF_ZmC4916_452
atggatcctaaggggaagggaattgtgatcaatgataagaagaaggagtcctttgtcaacgagccgaaggatgacaagcctaccgactcaggcttgggccacaaacgcaaagatgggaagaagaagaagacaagacgcatcaaggagatcatctactacgatgacaacgatgagtccacttcttcccataaggacaacgacgacaacgactacgacaaaagaaagacggttaattcaaacttttctttcgattactctcgtattccgcatagctcaaatgcacatttgctttccatccctcttggcaaacctccacactttgatggggaggactacggattttggagtcacaaaatggacgagtaccataaggtgagcggcttggacaatgccaagcagatctgggacaccctcaagatctctcatgaggggaacgacgtcaccttgctcaccaagatggagttggtagagggcgagctcgggagatttgcaatgataaggggcgaggagccaacccaaacatacaaccggctcaagaccctcatcaacaaaataaggagctacggaagcacacgatggatggaccacgacgtcgttcgcctaatgctaaggtcctttactgtacttgatccacatctggtgaacaatattcgtgaaaatcctaggtacaccaagatgtcgcctgaagaagttcttgggaagttcgtgagcgggcgaatgatgatcaaggaggcgagatacgtggacgacgcattgaatggtccaatcaatgagcctcaaccctttgctcttaaagcaacaagaagcaaggaggcgctacctagcaaggtggcacaagttgaggcggcagggctaagtgatgaagagatggctctcatcatcaagcgcttcaagacagcgctaaagggtcacaagggacagccaagcaagaccaagacaaaggggaagcactcatgcttcaagtgtggtaagattggtcattttatcgctaactgtcccgataatgatagtgaccaggaacaggggaacaagagggagaagaagaagacatacaaaaaggctaaaggcgaggcacaccttggcaaggagtgggactcggattgttcgtcatccgactccgacaatgaaggactcgccgccaccgccttcaacaagtcatccctttttcccaacgagcgtcacacatgcctcatggcgaaggagaagaaggtttatgcatccgggggttcaagctggattatcgacagcggatgcacaaaccatatgacgggggagaagaagatgttcacctcctatgtcaaaaacaaggattcccaagattcaataatattcggtgatgggaaccaaggcaaggataagtctgaaacccaagggaccctcaagcgcttcctaaggagagctcaaaacgagtttgagctcaaagtgaagaagataaggagcgacaatgggtccgagttcaagaacttcaagtggaggagttccttgaggagaaggggatcaagcacgagttctccgctccctacacaccacagcaaaatggtgtggtagagaggaagaacaggacgctcattgatatggcgaggactatgcttggagagttcaagacccccgagtgtttttggtcggaagccgtgaacacggcttgccacgccatcaacagagtctatcttcaccgcctcctcaagaagacctcatacgaactgctaactggtaacaaacccaatgtatcgtactttcgtgtatttgggagtaaatgctacattctagtgaagaagggtaggatttccaaatttactcccaaagttgtagaagggtttttattaggttataattcaaatacaaaggcgtatagggtcttcaacaaatcatcgggtttggttgaagtctctagcgacgttgtatttgatgagactaatggctctccaagagagcaagttgttgatcttgatgatgtagatgacgaagacgttccaacggccgcgatacgcaccatgacgattggagatgtacggcctcgggagcaattggagcaagatcaaccatcttcctcaactatggtgcatcccccaactcaagacgatgaacaggttcatcaaaaggaggcgtgtgatcaatggggagcacaagatgatcacgtgatggaggaagaagcgcaaccgacacctccaactcaagtccgagcggtgattcaaagggatcatcccgtcgaccaaattttgggtgacattagcaagggagtaactactcgatctcgattagttaatttctgtgagcattactcttttgtctcttctattgagcctttcagggtagaggaggccttgctagatccggactgggtattggccatgcaggaggaactcaacaacttcaagcgcaatgaagtttggacactggtgcctcgtcctaagcaaaatgttgtgggaaccaagtgggtgttccgcaacaaacaagacgagcacggagtggtgacaaggaacaaggctcgacttgtggcaaaaggttatgcccaagtcgcaggtttggactttgaggagacttttgctcctgtggctaggctagagtctattcgtatcttgctagcatatgctgctcaccattctttcaggttgtaccaaatggatgtgaagagtgctttcctcaatgggccgatcaaggaggaggtgtacgtggagcaaccccctggcttcgaggatgaacggtaccccgaccacgtgtgtaagctctctaaggcgctctatggacttaagcaagccccaagagcatggtatgaatgccttagagaatttttaattgctaatgctttcaaggttgggaaagccgatccaactctttttacaaagacatgtgatggtgatttgtttgtgtgccaaatttatgtcgatgacataatatttggttatactaaccaaaagtcttgtaaagagtttagcagggtgatgacgcagaaattcgagatgtcgatgttgggcgagttgaactacttccttgggttccaagtgaagcaactcaaggacggcaccttcatctcccaaacgaaatacacgcaagacttgctaaagcggtttgggatgaaggacgccaagcccgcaaaaactccaatgggaaccaacggacacaccgacctcaacaaaggaagtaagtccgttgatcaaaaagcataccggtccatgataggttctttgctttatttatgtgctagtagaccggatattatgcttagcgtatgcatgtgtgctagatttcaatccgatcctaaggagtgtcacttagtggcggtgaagcgaatactgagatatttagtcgctacgccttgcttcgggatctggtatcctaaggggtctaactttgacttaattggatactcagattccgactatgctggatgtaaggtcgataggaagagtacatcggggacgtgccaattcttaggaaggtccctggtgtcgtggaactctaagaaacaaacttccgttgccctatccaccgctgaggccgagtacgttgccgcaggacagtgttgcgcgcaactactttggatgaggtaa

SEQ ID NO: 5062 - DNA, 1539 bp, Zea mays
  Clone ID: TF_ZM4334.C2.o14.fg
atggatgctcaatatgatgtgactcaagaatggcttgatagggtgaagatagcaaggaaagggcttcgaggaactaagcgaagtctgcggtcagtctgcgcgtcagtctggcagtcagactggcagacaggctgccagctttggtactacatcgagttctttgtggattcattactcttggagcttgtagctcctagacgactaggtgtctcttatattgatcctagggcaatagatcttgccatgaaaatcgccgaaaggatgttcctcaaaatgaaagaagatgaggcgaagaacaagattgaagaagaagaaaatgatcgatggagaccaaacgacgaatccacctcttcacaagctaatgggagtgacagtgaaagcgaaagtgagaatgaggaggagcatgaaagtgatagtgaagatgaggatgatcttcaaaaattcttcgctcaactaagtaagaagaaccggatgagcttgctcaaactcatgaaaagagcggaagaacaaaaggaaatgcttcataagcaagaagatgtcctcatcgaaaaaatcaaagacttggagaagttgaccaaagagcatgagaagctaaagtgctctcatgatgatttggtccaaaggtatgaagacatttcaattgagcaaattaaagctattaaacattcatcatatattgctcaattagaaaataaaaatgctatgctcaagaacacggtagaaaggctaaatattgaaaatctagctttgcaagaaaaacatgatatgcttgtgtgctctcataataaatttatggattcacatatcatgttagaaatggctcatgaggttgtgttaactaatttgaaatcatgccaacctcacatatgcacatgtactcaaatagaaactatattaccatgtgctaacaattgttgttatcaagcaagccaatcttccattgagctagaaatttcaggaattagtgatatttctatcacacaagaaaataaagagctcaaggaagaaaatgagaggctaaaaaggagcttaactattttgaagggaaagtgtcatgctcaaccttctcaagataaccgtgataatatggtgaaaaagcttgagaaggggacaactgtagcatgcacaaaaccccttcaaaagaataccaagctttccaagaagggcatgagcaaaattcatggtaagaaaattaatgctcatactatttgctctaacaatgtacctatgtgcttcaacaaagaaagatcaaagagaagcgataggagatgctatggatgcaaggagaagggccatgaaattgattcatgcccccacatgaagaatcaagaccttgcaggatcaagaaatatgaccatcaaaaaggatgaaagcaaaaggcaaatgctttgcaaggacaagcatcacatttgctacaattgccgtgaaaaaggtcatctattcaaggattgtcccatgagtaagtatcctaagcctaccatgtcaattctttcatattcgcttaggagacccaaaatgacatttgtgctagaaaggtaa

SEQ ID NO: 5063 - DNA, 4890 bp, Zea mays
  Clone ID: TF_ZM4354.C13.o2.fg
atggatcctaagggcaaggggatggtggtcaatgataaggagaaggagtccttcgtcaatgatccaaaagatgacaagcctactgactcgggctcgagccacaaaagaaaagacgggaagaagaagaaaacaaggcgcatcaaggagatcgtctactacgacgacagcgacgagtcctcttcttcccaaaaggacgacgacaactacgagaaaaagaaaacgttcaattcaaacttttcttttgattattctcgtattccgcaaagtacaaatgctcatttactctccattccacttggtaaacctcctcactttgatggagaggactacggattttggagtcacaaaatgcgtagtcacttgttctctctccatccaagcatatgggagataatagagagtggaatgcaatttgatagtattgatagtcccatatttatcaatgagcaaattcacaaaaatgcacaagctactactgttcttctagcatcattgtgcagggatgaataccataaggtgagcggcttggataacgctaagcagatctgggacaccctcaagatctcgcatgaggggaacgacgtcaccatgctcaccaagatggagttggtggagggcgaacttgggagatttgcaatgatcaggggcgaggagccaacccaaacgtacaaccggctcaagaccctcgtcaacaaaataaggagctatggaagcacacgatggacagaccacgacgtcgtccgcctaatgctaaggtccttcactgtccttgatccacatcttgtaaacaatattcgtgaaaatcctaggtacaccaagatgtcgcccgaggaaatacttggaaagttcgtaagcgggctgatgatgatcaaggaggcaagatacgtcgatgatgcgttgaatggcccaatccatgagcctcaaaccgttgctctcaaagcaacgaggagcaaggaagtgctacctagcaaggtggcacaagttgaggcggcggggctcaatgaggaagagatggccctcatcatcaagcgtttcaagacggcgttaaggagtcgcaaggagcatcctaacaagaacaagacgaaggggaagcactcatgcttcaaatgtggtaagattggtcattttatcgctaattgtcccgataatgatagtgaccaggaacaagagaagaagagggaaaagaagaaggcttacaagaaggcaaagggcgaggcacaccttggcaaggagtgggactcggattgttcgtcgtccaactccgacaacgaaggactcgccgcctcggccttcaacaagtcatccctcttccccaacgagcatcacacatgcctaatggcaaaggagaagaaggtaaacactcgaaagtctacttatgcttctagtgatgatgaatctagcgatgatgaaatagactatgctagtttgttcaagggcttagatagaactaagattgataagatcaatgagttgattgatgccttgaatgataagaatagattattagaaaagcaagaggatcttttgtatgaagaacatgataagtttgtagaagcacaaaaatctcttgctttagaagttaaaagaaatgaaatgctttcatgtgaattgtctacatgccatgaatctatctctagcctaaaaagtgttaatgatgatttgaatgctaagttagaaatagctagtaaattaacctctcgtgaagaacatgttacgatttgcaataggtgtaaagattttaatgttgatgcttgtagtgaacacctagtttgcatttctaaactaaatgatgaagtggctagtcttaatgctcaacttaagactagcaaaaatgattttgataaactaaaatttgcaagggatgcctacacggttggtagacacccctcaattaaggatgggcttggcttcaagagggaagccaagaacttgacaagtcataaggctcccatctccgccaaggagaaagggaaggctcctatgactcataatagtcaaaagaatcatgctttcatttacggtgataagagatattctagaaatgttcataggagttgtaatgattcaaatgccatgtttgcttcaagttcttcctatgtgcatggtagagatatgcctaggagaaatgtcattcatcatgtgcctaggagaaatgttcatgttcctaggaaaattaatgaaccttctactatttatcatgcttgcaatgcttcctttgctatttgtagaaaggataagaaggtgattgctaggaaattaggggcaaaatgcaagggagataaaacttgcatttgggtccctaaggatattgtcactaaccttgtagaacccaacaagagttgggtttatgcatccgggggatcaagctggattatcgacagcggatgcacaaaccacatgacgggggagaagaagatgttcacctcctacgtcaagaacaaagattcccaagactcaatcatattcggtgacgggaatcaaggcaaggttaaaggactagggaagattgccatttcatccgagcactctatctctaatgtgtttttagttgagtcgcttggatataacttattgtctgtgagtcagctttgtaatatgggatataattgcttatccacaattgtagatgtgtctgtctttagaaggagtgatggttcattagcttttaagggtgtattagatggcaaactctacttagttgattttgcaaaagaggaggccggtctagatgcatgcttaattgctaagactagcatgggctggctgtggcatcgccgcttagcacatgtggggatgaagaaccttcacaaacttctaaagggagaacacgtgataggtctaacaaacgtaaccttcgaaaaagatagaccttgtgcagcttgtcaagcaggtaaacatgtgggaagctctcatcataccaaaaatgtgatgaccacatcaagaccgttggagttgcttcatatggacctcttcggacccatcgcctatctaagcatagaaggaagtaagtatggtcttgttatagttgatgatttttcccgcttcacttgggtattctttttgcaggataaatctgaaacccaagggaccctcaagcgcttcctaaggagagctcaaaatgagtttgagctcaaggtgaaaaagataaggagcgacaacgggtccgagttcaagaaccttcaagtggaggagtaccttgaggaggaaggaatcaagcatgagttctccgctccctacacaccacagcaaaatggtgtggtagagaggaagaacaggacgctcattgacatggcaaggacgatgcttggagagttcaagacgcccgagaggttttggttggaagccgtgaacacggcttgccacgccataaaccaggtgtatcttcatcgcctcctcaagaagacttcgtatgagcttctaaccggtaacaaatccaatgtgtcttactttcgtgtatttgggagcaaatgttatattctagtgaagaaaggtagaaattctaagtttgctcccaaagctgtagaagggtttttgttaggttttgactcaaatacaaaggcgtatagggtcttcaacaagtcatcgggtttggttgaagtctctagcgacgttgtatttgatgagactaatggctctccaagagagcaagttgttgatcttgatgatatagatgaagaagatattccaacggtcgcaatacgcaccatggcgattggagaagtgcggccacaggaacaaaaggagcaagatcaaccttcttcctcaacaatggtgcatcccccaactcaagacgatgaacagcctttcagggtagaagaggccttgctagatccagactgggtgttggccatgcaggaggagctcaacaatttcaagagaaatgaagtttggacactggtgcctcatcccaagcaaaacattgtgggaaccaagtgggtgttccgcagcaaacaagacgagcacggggtggtgacaaggaacaaggcacgacttgtggcaaaaggttatgcccaagtcgcaggtttggactttgaggagacttttgctcctgtggctagactagagttgttccaaatgtatgtgaagagcgctttcctcaatggaccaatcaaggaggaggtgtacgtggagcaaccccctggcttcgaggatgaacggtaccctgaccacgtgtgtaagctctctaaggcgctctatggacttaagcaagccccaagagcatggtatgaatgccttagagactttttaattgctaatgctttcaaggttgggaaagccgatccaactttattcactaagacatgtgatggcgatttatttatgtgccaaatttatgtcgatgacataatatttggctctactaaccaaaagtcttgtgaagagtttagcagggtgatgactcagaagtttgaaatgtcgatgatgggcgagttgaactacttccttgggttccaagtgaagcaactcaaggacggcaccttcatctcccaaacgaagtacacacaggacttgctcaagaggtttgggatgaaggacgccaagcccgcaaagacaccaatgggaaccgacggacatgtcgacctcaacaaaggaggacagtgttgcgcgcaactactttggatgaggcaaaccctcagggactttggctacaatatgagcaaagtcccactcctatgtgataatgagagtgctatccgcatggcggacaatcctgttgaacacagccgcacaaagcacatagacatccggcatcactttttgagagaccaccaacaaaagattttggtaaggcaatggggttctagggccaagattgatcccgttctggtgcttgatgccaaagggggagaaaataaggccaaagcaacaaatggatcagctaccacttga

SEQ ID NO: 5064 - DNA, 2913 bp, Zea mays
  Clone ID: TF_ZM4499.C1.o3.fg
atggagtgggtatttcttaggaagaaaatacttggagatatatcagtggaatatttgggtagtatttctgaaaagaacttgaaggggattactcgagaaatatctgggcgagcaagtttgagaaaatttcaagatttgaatttttgggatgctacatggacggatcacgacgtcgtccgcctaatgctaaggtccttcgctgtccttgatccacatcttataaacaatattcgtgaaaatcctaggtacaccaagatgtcggccgaagaaatacttggaaagttccgattcaagacagcactaaagggtcgcaaggagcatcccaacaagaacaagacgaaggggaagcactcatgcttcaaatgtggtaagattggtcattttatcgctaattgtcccgataatgatagtgaccaggaacaagagaagaagagggaaaataagaagtcttacaagaaggctaagggcgaggcacaccttggcaaggagtgggactcggattgttcgtcgtccgactccgacaacgaaggactcgccgcctcggccttcaacaagtcgtccctcttccccaacgagcatcacacatgcctaatggcaaaagagaagaaggtaaacactcgaaagtctacttatgcttctagtgacgatgaatctagcgatgatgaaatagactacgctagtttgttcaagggcttagatagaactaagattgataagatcaatgagttgattgatgccttgaatgataagaatagattattagaaaatcaagaggatcttttgtatgaagaacatgataagtttgtagaagcacaaaattctcttgctttagaagttaaaagaaatgaaatgctttcatgtgaattgtctacatgccatgaatctatctctagcctaaaaggtgttaatgatgatttgaatgctaagttagaaatagctagtaaatcaacctctcgtgaagaacttgttacgatttgcaataggtgtaaagattttaatgttgatgcttgtagtgaacacctagtttgcatttctaaactaaatgatgaagtggctagtattaatgctcaacttaagactagcaaaaatgattttgataaactaaaatttgcaagggatgcctacacggttggtagacacccctcaattagggatgggcttggcttcaagagggaagccaagaacttgacaagtcataaggctcccattaccgccaaggagaaagggaaggcccctatggctaatagttctcaaaagaatcatgcatttatttatgataagaaattttctagaaatgttcatcatgataggagttgtaatgcttatgattcaaatgcaatgtttgcttcaagttcttcctatgtgcatggtagagatatgcctaggagaaatgtttatgcatccgggggctcaagctggattatcgacagcggatgcacaaaccacatgactggggagaagaagatgttctcttcctacgtcaagaacaaagactcccaagactcaatcatattcggtgacgggaatcaaggcaaggacaagcacggggtggtgacaaggaacaaggcgagacttgtggcaaaaggttatgcccaagtcgcaggtttggactttgaggagatttttgctcctgtggctaggctagagtctattcgtattttgttagcctatgtcgctcaccattccttcaggttgttccaaatggatgtgaagagcgctttcctcaacgggccaatcaaggaggaggtgtacgtggagcaaccccctggcttcgaggatgaacgataccccgaccacgtgtgtaagctctctaaggcgctctatggacttaagcaagccccaagagcatggtatgaatgccttagagactttttactttctaatgctttcaaggttgggaaagtcgatccaactttattcactaagacttgtgatggtgatctttttgtgtgccaaatttatgtcgatgacataatatttggttctactaaccaaaagtcttgtgaagagtttagcaaggtgatgactcagaaattcgagatgtcaatgatgggcgagttgaactacttccttgggttccaagtgaagcaactcaaagatggcaccttcatctcacaaacaaagtatacacaagacttgctcaagaggtttgggatgaaggacgccaagcccgcaaagactccaatgggaactaacggacacaccaacctcaacaaaggaggtaagtccgttgatcaaaaggcataccagtctatgatagggtctttactttatttatgtgctagtagaccgaatattatgcttggtgtatgcatgtgtgctagatttcaatccgatccaaaggagtgtcacttagtggctgtgaagcgaattcttagatatttagtcgctacgccttgcttcgggatctggtatccaaagaggtctacctttgacttgattggatattcagactccgactatgctggatgtaaggtcgataggaagagtacatcggggacgtgccaattcttaggaaggtccctggtgtcgtggagttctaagaaacaaacttccattgccctatccaccgatgaggccgagtatgttgccgcaggacagtgttgtgtgcaactactttggatgaggcaaaccctcagggactttggctacaatctgagcaaagtcccactcctatgtgataatgagagtgccatccgcatgacggataatcctgttgaacacagccgcactaagcacatagacatctggcatcactttttgagagatcaccagcaaaagggagatatcgaagtgtttcatgttagcaccgagaaccagctagccgatatctttaccaagcctctagatgagaagaccttttgcaggctgcgtagtgagctaaatgtcttagattcgcggaacttggattga

SEQ ID NO: 5065 - DNA, 1369 bp, Zea mays
  Clone ID: TF_ZM4893.C2.o8.fg
atggagtgggtatttcttaggaagaaaatacttggagatatatcagtggaatatttgggtagtatttctgaaaagaacttgaaggggattactcgagaaatatctgggcgagcaagtttgagaaaatttcaagatttgaatttttgggatgctacatggacggatcacgacgtcgtccgcctaatgctaaggtccttcgctgtccttgatccacatcttataaacaatattcgtgaaaatcctaggtacaccaagatgtcggccgaagaaatacttggaaagttccgattcaagacagcactaaagggtcgcaaggagcatcccaacaagaacaagacgaaggggaagcactcatgcttcaaatgtggtaagattggtcattttatcgctaattgtcccgataatgatagtgaccaggaacaagagaagaagagggaaaataagaagtcttacaagaaggctaagggcgaggcacaccttggcaaggagtgggactcggattgttcgtcgtccgactccgacaacgaaggactcgccgcctcggccttcaacaagtcgtccctcttccccaacgagcatcacacatgcctaatggcaaaagagaagaaggtaaacactcgaaagtctacttatgcttctagtgacgatgaatctagcgatgatgaaatagactacgctagtttgttcaagggcttagatagaactaagattgataagatcaatgagttgattgatgccttgaatgataagaatagattattagaaaatcaagaggatcttttgtatgaagaacatgataagtttgtagaagcacaaaattctcttgctttagaagttaaaagaaatgaaatgctttcatgtgaattgtctacatgccatgaatctatctctagcctaaaaggtgttaatgatgatttgaatgctaagttagaaatagctagtaaatcaacctctcgtgaagaacttgttacgatttgcaataggtgtaaagattttaatgttgatgcttgtagtgaacacctagtttgcatttctaaactaaatgatgaagtggctagtattaatgctcaacttaagactagcaaaaatgattttgataaactaaaatttgcaagggatgcctacacggttggtagacacccctcaattagggatgggcttggcttcaagagggaagccaagaacttgacaagtcataaggctcccattaccgccaaggagaaagggaaggcccctatggctaatagttctcaaaagaatcatgcatttatttatgataagaaattttctagaaatgttcatcatgataggagttgtaatgcttatgattcaaatgcaatgtttgcttcaagttcttcctatgtgcatg

SEQ ID NO: 5066 - DNA, 498 bp, Zea mays
  unsure (1)..(498): unsure at all n locations
  Clone ID: TF_LIB3632-013-Q1-K6-E6
cggggggggggggttcaactgcggccagcctggccacgtggccagagactgctccagcggcggcggcggctacagcggtggcagcggcggtggtggtggcggatgatacaactgtttttttgccgtccacttttccagggactgcccatggggtgggggggggggcnnacgnaggctcggcggcnnccgttttgggggggggggaggatcctcccctggggagaggaaagaaacattgcccgcgactgtcccacgtcaggtgtttccgcgtccggccagtcagcctgatcggatcggatcggtccaccacctgctggtctgacggcgccgtccccttctagatctcccttgaaaaagctccccccctcgctgggtgtcggaactccttttttttggtggacgatccgggcactagtgtcctgtgcctcttttttcttctgcggttcgaggatcccggccctgcggccacaagagggacgccccgggngggacgaagaa

SEQ ID NO: 5067 - DNA, 5025 bp, Zea mays
  Clone ID: TF_ZM4587.C3.o1.fg
atgtcgggagatcacgccaagaaggagatggtgaccggcgagaagcccgttacaagccacgggaaggctccatcgggagagtcccgcaacaaggggaaggagaaggaatccccttcacacaagtcacatcggagtggcgaaaagaaaaagaagatgaggaaggtggtctactacgagatcgactctttgtcgccatccacctccggctccgacgcgccgtccgtaacttctaagcgccatgagcgcaagaagtttagtaagattcccctacactaccctcgcatttccaaacgtactccattactttccgttccattaggcaaaccaccaatttttgacggtgaagattataacatgtggagtgataaaatgagacatcacctaacctcactctacactagtatttggaacgttgttgagtttggtgtacaggagtataacaaggtgcaaggattgaagagcgccaaggagatttgggacgtcctcaaaacggcgcacgaaggagacgaggtgacaaagatcaccaagagggaaacgatcgagggggagctcggtcacttcatgctcaaccaaggagaagacccacaagccatgtacaaccggctaaaaaccttggtggaccaaatcacggggcaaggggcgagtccgagcttggccgacctggtcccgaggtccgtgcccgtcggcttgaatctcgcggcattcggttgggggatcgccaggattccgcgcaatacctggcgacaaatgcaacgtgcaggagaaggaggagctgacgacgtggccccaccacgcggtgtgaggaaggcagtagctgacgcacgggcccatttgtcagcgccagaagggcagtgccaagcgcgcggccacgcccaggcgatgcagggggaaaatgggccgcaggatgacacttttggcccaccaggctccaaaaagatcatcgagcaaggcgcatcctcctccgtacccgaagcacaacccgttgcattcaaggcaacggagaataagaaagaagactctacaccgagtagggtccccatcgacgcctccaagctcgacaatgaggagatggcgctcatcatcaagagctttcgccaaatcctcaaacaaaggaaggggaaagattacaagccccgttccaagaaggtttgctacaagtgtggtaagcccggtcatttcattgctaaatgttcattatctagtgatagtgacaggggcgacgacaagaagggaaagagaagagaaaagaagaggtactacaagaagaagggcggcgatgcccatgtttgccgggagtgggactccgacgagagctccaccgactcctcctccgacgaggacgccgccagcatcgccgtcaacaaagggctcctcttccccaacgtcggccacaaatgcctcatggcaaaggacggcaaaaagaagaaggtaaaatccaaatcctccactaagtatgcaacatctagtgatgaagctaattctagtgatgatgaggatgatttatttactctctttgccaacttaaacatgcaacaaaaggaaaaattaaatgaattaattagagctattcatgataaggatgaactcttggatagccaagaggatttcctaattaaagaaaacaaaaggcatgttaaagttaaaaatgcttatgctcaggaggtagagaaaaatgaaaaattaactagtgagctaagcacttgccatgacattgtttccaaccttagaaatgagaatgctaaattaattgctaaggttgagaatttaaatgtttgtgatgattctcttattaatcttagaaatgataacgccaacttaattgctaagattgataagttaaatgcctctcttactagccttagaaatgagaatgaaaaattgattgctaaggctaaagaactagatgtttgcaatatttctatttccaatcttagaaatgagaataacattttacatgctaagattgttgaattaaaagattgcaaaccctctacatctacagttgaacatgtttctatttgcactagatgtagagatgttaatgtagatgctattcatgatcaccttgctttaatcaaacaacaaaacgatcacatagctacattaactgctaaaatcaatgagcatgacttggaaaatgagaaatttaaatttgctagaagtatgctctatagtgggagacgccctggcattaaggatggcattggcttccaaaagggagacaatgtcaagcttaatgccccgcctaaaagattgtctaattttgttaagggcaaggctctcatggttcaggataacgagggttacattttataccctgccggttatcccgaacacaaaattaggagaattcactctaggaagtctcactctggccctaatcatgcttttatgtataagagtgagacatctagttctaggcaatcaacccatgctaaattgcctaagaagaaaactcctgctgcatcaaatgatcacaatgtttcattcaaaacttttgatgcctcttatgtgctaactaacaaatcaggcaagttagttgccaagtatgttgggggcaaacacaagggatcaaaaacttgtgtttgggtacccaaagttcttgtatctaatgtcaaaggacccaaaactatttgggtttatgcatctgggggctcaagttggatcatcgacagcgggtgcacaaaccacatgactagggagaaaagaatgttctcctcctatgagaaaaaccaagatccccaacgagctatcacattcggggatggaatcaaggataaatatcaaacccaagagactttgaaaggattcttgagacgggctcaaaatgagttcagcttgaggattaagaagataagaagcgacaacgggacggagttcaagaactcacaaatagaaggctttcttgaggaggaaggcatcaagcatgagttctcttctccctacacgccacaacaaaatggtatagtggagaggaagaatagaactctattggacatggcaaggaccatgcttgatgaatacaagactttggatcggttttgggccgaggcggtcaacaccgcttgctatgccatcaaccggttgtatctacaccgaatcctcaagaagacatcttatgaactcctcaccggtaaaaagcctaatgtttcatattttagagtctttggtagcaaatgctttattcttgttaaaagaggtagaaaatctaaatttgctcctaaggctgtagaaggctttttactaggatatgattcaaacacaagggcatatagagtctttaacaagtccactggactagttgaagtttcttgtgacattgtgtttgatgagactaacggctcccaagtggagcaagttgatcttgatgaattagatgatgaagaggctccgtgcatcgcgctaaggaacatgtccattggggatgtgtgccctaaggaatccgaagagcctccacaagcacaagatcaaccatcctcctccatgcaagcatctccaccaactcaagacgaggatgaggctcaagatgatgaaggagaagatcaagaagatgagccacctcaagaagacagcaatgatcaagggggagatgcaaatgatcaagacaaggaggatgaacaagatgcaaaaccgccacacccaagagtccaccaagcaattcaacgagatcaccccgtgaacaccatcttaggagatattcataagggggtaaccactcgatctcgtgttgctcatttttgtgaacattactcttttgtctcctctattgagccatacagggtagaggatgcactaagagattcggattgggtgctggcgatgcaagaggagctcaacaacttcacgaggaatgaggtatggcatttagttccacgtcctaaccaaaatgttgtaggtaccaagtgggtattccgcaataagcaagatgagcatggtgtggtcataaggaacaaagcacgacttgtggccaaagggtattcacaagtcgaaggtttggattttggagaaacttatgcacccgtagctaggcttgagtcaattcgtatattacttgcctatgctactcaccatggctttaagctttaccaaatggacgtgaagagtgccttcctcaatggaccaatcaaggaagaggtatatgttgagcaacctcccggctttgaagatagtgagtatcctaactatgtttataagctctctaaggcgctttatgggctcaaacaagccccaagagcatggtatgaatgcctaagagatttccttatcactaatggcttcaaagtcggaaaggtcgatcctactttattcactaaaaccattgaaaatgatttgtttgtttgccaaatttatgttaatgatatcatatttgggtctactaacaaatctatttgtgaagagtttagtaggatcatgattaaaaaaatcgagatgtctatgatgggggagttgaagtattttctaggatttcaagtgaagcaactccaagatggcaccttcatcagccaaacaaagtacattcaagatattctcaccaagtttggaatgaaggatgtcaagcccatcaagacacccatgggaaccaatgggcatctcgacctcgacacgggaggtaaatccatagatcaaaaggtatatcggtcgatgataggatctctactttatctatgtgcatctcgaccggacattatgctttctgtatgcatgtgtgcaaggttccaagccgaccctaaggaagttcaccttagggtcgtgaagcaaatcatgagatatttagtttacacacctaagtttggtctttggtaccccaaggggtcctcatttgatttattaggatattcagatgccgattgggcagggtgtaagcttgatagaaagagcacatcggggacttgccagttcttgggaagatccctggtgtcttgggcttctaaaaaacaaaattttgtagctctttctaccgccgaagccgagtatattgccgcaggccagttgcgcgcaattgctttggatgaggcaaacccttag

SEQ ID NO: 5068 - DNA, 4263 bp, Zea mays
  Clone ID: TF_ZM4677.C5.o3.fg
atgggccgcaggatgacacttttggcccaccaggttattcttagatcactcgtatttcttaaccccactcaagttcaattaattcgtggtgatccaagatataaactaatgtctcccgaggaagtgataggtaaatttgtgagctttgaactaatgatcaaaggctccaaaaagatcatcgagcaaggcgcatcctcctccgtacccgaagcacaacccgttgcattcaaggcaacggagaataagaaagaagactctacaccgagtagggtccccatcgacgcctccaagctcgacaatgaggagatggcgctcatcatcaagagctttcgccaaatcctcaaacaaaggaaggggaaagattacaagccccgttccaagaaggtttgctacaagtgtggtaagcccggtcatttcattgctaaatgttcattatctagtgatagtgacaggggcgacgacaagaagggaaagagaagagaaaagaagaggtactacaagaagaagggcggcgatgcccatgtttgccgggagtgggactccgacgagagctccaccgactcctcctccgacgaggacgccgccagcatcgccgtcaacaaagggctcctcttccccaacgtcggccacaaatgcctcatggcaaaggacggcaaaaagaagaaggtaaaatccaaatcctccactaagtatgcaacatctagtgatgaagctaattctagtgatgatgaggatgatttatttactctctttgccaacttaaacatgcaacaaaaggaaaaattaaatgaattaattagagctattcatgataaggatgaactcttggatagccaagaggatttcctaattaaagaaaacaaaaggcatgttaaagttaaaaatgcttatgctcaggaggtagagaaaaatgaaaaattaactagtgagctaagcacttgccatgacattgtttccaaccttagaaatgagaatgctaaattaattgctaaggttgagaatttaaatgtttgtgatgattctcttattaatcttagaaatgataacgccaacttaattgctaagattgataagttaaatgcctctcttactagccttagaaatgagaatgaaaaattgattgctaaggctaaagaactagatgtttgcaatatttctatttccaatcttagaaatgagaataacattttacatgctaagattgttgaattaaaagattgcaaaccctctacatctacagttgaacatgtttctatttgcactagatgtagagatgttaatgtagatgctattcatgatcaccttgctttaatcaaacaacaaaacgatcacatagctacattaactgctaaaatcaatgagcatgacttggaaaatgagaaatttaaatttgctagaagtatgctctatagtgggagacgccctggcattaaggatggcattggcttccaaaagggagacaatgtcaagcttaatgccccgcctaaaagattgtctaattttgttaagggcaaggctctcatggttcaggataacgagggttacattttataccctgccggttatcccgaacacaaaattaggagaattcactctaggaagtctcactctggccctaatcatgcttttatgtataagagtgagacatctagttctaggcaatcaacccatgctaaattgcctaagaagaaaactcctgctgcatcaaatgatcacaatgtttcattcaaaacttttgatgcctcttatgtgctaactaacaaatcaggcaagttagttgccaagtatgttgggggcaaacacaagggatcaaaaacttgtgtttgggtacccaaagttcttgtatctaatgtcaaaggacccaaaactatttgggtttatgcatctgggggctcaagttggatcatcgacagcgggtgcacaaaccacatgactagggagaaaagaatgttctcctcctatgagaaaaaccaagatccccaacgagctatcacattcggggatggaatcaaggataaatatcaaacccaagagactttgaaaggattcttgagacgggctcaaaatgagttcagcttgaggattaagaagataagaagcgacaacgggacggagttcaagaactcacaaatagaaggctttcttgaggaggaaggcatcaagcatgagttctcttctccctacacgccacaacaaaatggtatagtggagaggaagaatagaactctattggacatggcaaggaccatgcttgatgaatacaagactttggatcggttttgggccgaggcggtcaacaccgcttgctatgccatcaaccggttgtatctacaccgaatcctcaagaagacatcttatgaactcctcaccggtaaaaagcctaatgtttcatattttagagtctttggtagcaaatgctttattcttgttaaaagaggtagaaaatctaaatttgctcctaaggctgtagaaggctttttactaggatatgattcaaacacaagggcatatagagtctttaacaagtccactggactagttgaagtttcttgtgacattgtgtttgatgagactaacggctcccaagtggagcaagttgatcttgatgaattagatgatgaagaggctccgtgcatcgcgctaaggaacatgtccattggggatgtgtgccctaaggaatccgaagagcctccacaagcacaagatcaaccatcctcctccatgcaagcatctccaccaactcaagacgaggatgaggctcaagatgatgaaggagaagatcaagaagatgagccacctcaagaagacagcaatgatcaagggggagatgcaaatgatcaagacaaggaggatgaacaagatgcaaaaccgccacacccaagagtccaccaagcaattcaacgagatcaccccgtgaacaccatcttaggagatattcataagggggtaaccactcgatctcgtgttgctcatttttgtgaacattactcttttgtctcctctattgagccatacagggtagaggatgcactaagagattcggattgggtgctggcgatgcaagaggagctcaacaacttcacgaggaatgaggtatggcatttagttccacgtcctaaccaaaatgttgtaggtaccaagtgggtattccgcaataagcaagatgagcatggtgtggtcataaggaacaaagcacgacttgtggccaaagggtattcacaagtcgaaggtttggattttggagaaacttatgcacccgtagctaggcttgagtcaattcgtatattacttgcctatgctactcaccatggctttaagctttaccaaatggacgtgaagagtgccttcctcaatggaccaatcaaggaagaggtatatgttgagcaacctcccggctttgaagatagtgagtatcctaactatgtttataagctctctaaggcgctttatgggctcaaacaagccccaagagcatggtatgaatgcctaagagatttccttatcactaatggcttcaaagtcggaaaggtcgatcctactttattcactaaaaccattgaaaatgatttgtttgtttgccaaatttatgttaatgatatcatatttgggtctactaacaaatctatttgtgaagagtttagtaggatcatgattaaaaaaatcgagatgtctatgatgggggagttgaagtattttctaggatttcaagtgaagcaactccaagatggcaccttcatcagccaaacaaagtacattcaagatattctcaccaagtttggaatgaaggatgtcaagcccatcaagacacccatgggaaccaatgggcatctcgacctcgacacgggaggtaaatccatagatcaaaaggtatatcggtcgatgataggatctctactttatctatgtgcatctcgaccggacattatgctttctgtatgcatgtgtgcaaggttccaagccgaccctaaggaagttcaccttagggtcgtgaagcaaatcatgagatatttagtttacacacctaagtttggtctttggtaccccaaggggtcctcatttgatttattaggatattcagatgccgattgggcagggtgtaagcttgatagaaagagcacatcggggacttgccagttcttgggaagatccctggtgtcttgggcttctaaaaaacaaaattttgtagctctttctaccgccgaagccgagtatattgccgcaggccagttgcgcgcaattgctttggatgaggcaaacccttag

SEQ ID NO: 5069 - DNA, 2820 bp, Zea mays
  Clone ID: TF_ZmC951_443
ttatggtgtgtagggagaagagaactcatgcttgattccctcatcctcaagaaagccttctatttgtgagttcttgaactctgtcccgttatcgcttctaatctttttgatccttaagccgaactcattttgagcccgtctcaagaatccctttaaggtctcttgggtttgtgatttttccttgatttccatccccaaatgtgatagctctttggggatcatggttttctcgtaggagaacattctcttctccccagtgatgtggtttgtgcacccgctgtcaatgatccaacttgagcccccggatgcataaaccttgggtacccaaacacaagtctttgagcccttgtgtttggctccaacatatttggcaactactttgcctgatctgttagttaaaacatatgatgcatcaaaagtcttaaacaaaatgttaggttcatttgatgcaatgggagttttatttttaggcaatttagcatgggttgattgcctagaactagatggctcactcttatacataaaagcatgatgagagccagagtgagacttcctagagtgaattctcctaattttgtgcttgggataaccgacagggtataaaatgtaacccttgttatcctgagtcatgggagctttgcccttaacaaagttggacaatttcttgggggcatggagcttgaaattgtctcccttttggaagccaatgccatccttaatgcctgggcgtctcccactataaagcatactacgagcaaatttaaatttttcaatttctaattcatgctcggcaattttagcatctaattttgctatatgatcattttgttgtttaatcatagcaatgtgatcatgaatagcatcaatattaacatctctacatctagtgcaattagagacatgactaacagtagatgtagagggtttgcaaacatttaattcatcaatcttagcatgtaacatgacattttcatttctaagattggaaacaatatcattgcaaacatttaaatttttagccttaataatcaatttttcattttctatcttaaggctagcaattgattcattcaacttgtcaatcttagcaattaaattagcattatcatttttaagtttgacaagagaatcatcacaatcatctaatttctcaaccttagcaatcaatttagcattctcatttctaaggttggaaatgatatcatggcaagtgcttagctcactagttaaattttcacacttctctacttcctgagcataagcatttttaactttaacatgcttcttattttccttaataaggaagtcctcttgggtgtccaagagttcatccttctcatgaatatcactaattaattcatttaacttttccttttgttgcatgttaaggttggcaaaaagggcaagtaaattatcctcattatcactagagttttcctcatcactagatattgcatatttagtggaggctctagattttaccttcttcttcttgtcgtcctttgccatgaggcacttgtggccgacgttggggaagaggagtcccttgttgatggcgatgttggcggcgtcctcgtcggaggaggagtcggtggagctctcgtcggagtcccattcccgacaaacatgggcatcgccgcccttcttcttgtaatacttcttcttctccttcattcttcccttcttgtcgttatccctgtcactatcactatacaaaggacatttagcgataaaatgatcgggcttaccacatttgtagcaaaccttcttggagcggggtttgtaatccttccccctcctttgcttgaggatttggcggaagctcttgatgatgagcgccatttcctcgttgtcgagcttggaggcgtcgatggggagcctacttgatggagactattctttcttttcttctgtcgctttgaaggtgacgggttgcacctcggatgtagaggtggcgccttgctctaagttgatgatttgtttggagcctttgatcatcaattcaaagctcacaaactttcctataacctcctcgggagacattagcttgtatctaggatcaccacgaattaattgaacttgcgtaggattgcaaaaaatgagtgatcttagaataactttggccatttcatggtcatcccatttggtgctcccgaggttgcgcacttcgttcaccaaggtctagagccggttgtacatcgcttgtggatcttccccttgatgaagcatgaagcgaccgagctccccctcgatcgtttccctcttggtgatcttggtcacctcatctccttcgtgcgcggttttgagcacgtcccaaatctctttggcactcttcaatccttgcaccttattatactcctctcgacttagagaggcgaggagtatagtagtggcttgggagttgaagtgctcggatttgagctacctcgtccgagtcatagccttcatcccccatggatggtacatgcgctccaaactcaacaatgtcccatatgagtaatcttcaccgtcaaaaaccggtggtttgcctagtgggatggaaagtaaaggagtgcgtttagaaatgtgagggtagcgtagggggatcttactaaacttcttgcgctcatggcgcttagaagtgacggacggcgcgtcagagccgggggtggatggccatgaagaatcagtctcatagtagaccaccttcttcattttattcttcttgtcgccactccggtgcgacttgacgtggggaggtgattcctccctcttcttgttgccggactcccccgatggagccttcccgtggcttgtggcgggcttctcgccggtcaccat

SEQ ID NO: 5070 - DNA, 1587 bp, Zea mays
  Clone ID: TF_ZM4885.C3.o4.fg
atggatcctaaggggaagggtatcgtgatcaacgataaagagaaggaatcctttgtcaacgagccaaaggacgacaagcctaccgactccggctcgggccatagacggaaggaagggaagaagaagaagacgaggcgcatcaaggagatcgtctactacgacgacagcgatgagtctacttcttcccaaaaggacgacgaccacaacgactatgagagaaggaaaccggttaattcgaacttttctttcgactactctcgtattccgcaaagttcaaattcacatttgctctccattcctctcgacaagcctccacactttgatggggaggactacggattttggagccacaaaatgcgtagtcacctattctctctccatcctagtatatgggagattgtagagagtggaatgcactttgatagttcggataatcccatgttcattaatgaacaaattcataagaatgcacaagctactactgttcttctagcttcattgtgcagggatgaataccacaaagtgagtggcttggataacgccaagcagatctgggacaccctcaagatttctcatgaggggaacgacgtcaccttgctcaccaagatggagttggtggagggcgagcttggacggttcgcgatgataaggggcgaggagccaactcaaacatacaaccggctcaagacccttatcaacaaaataaggagctacggaagcacgcgatggacggaccacgacgtcgtccgactgatgctaaggtcctttaccgttcttgatcctcatttggtgaataatattcgtgagaatcccaggtacaccaaaatgtcgcccgaagaagtccttggaaaattcgttagcgggcgaatgatgatcaaggaggcgaggtacgtggacgacgccttgaatggtccgatcaacgagccgcaaacccttgctctcaaggcaacaagaagcaaggaggcgctacctagtaaggtggcacaaattgaggcagccggacttaatgatgaagagatggccctcatcatcaaaagattcaagacgacgcttaaaggtcgcaatggacagccaagcaagaccaaagccaaggggaagcgctcatgcttcaaatgcggtaagcttggtcattttattgctaactgttccgacaatgatagtgatcaggaccaagggaacaagagggagaagaagaagaattataagaaggcaaagggcgaggctcatcttgacaaggaatgggattcggactgctcctcgtccgactccgacaatgaaggactcgccgccaccgccttcaacaagtcacccctcttccccaacgagtgtcacacatgccttatggcaagggagaagaaggtatgtactcgagactctacttatgcttcttcaagtgaggacgaatctagtgatgaggatgaaatagattattcatgtctatttaaaggcctagatagaaataaaattgataaaatcaatgaattgattgatgccttgaatgaaaaggataggcttttagaaaagcaagaggatttgttgtatgatgaacatgataaatttgtagaggcacaaaaatctatgccttag

SEQ ID NO: 5071 - DNA, 2673 bp, Zea mays
  Clone ID: TF_ZM4913.C6.o1.fg
atggagaccggcgacaagcccactacaagccaagggagcacttcatcggaagagtcccgcaccaagaggaaggagaagaagaagagctcctccaacaaagggaaggagaagaaaccttcttctcatcacaaagagaagaaagagaaatcttcctctcacaaatcgcatcggagtggggaccagcacaagaggatgaggaaagtggtctactatgagaccgacacttcatcaacatcgacctccggctccgatgcgccctccgtaacttctaaacgccaagagcgtaagaagtttagtaagatccccttacactatcctcgtacatctagacatactccattactttccgttccattaggcaaactgccaacctttgacggtgaagattatgctaggtggagtgatttaatgaaatttcatctaacctcactccacaaaagtatatggaatgttgttgagtttggagcacaggtaccatccgtaggggatgaggattatgatgaggacgaagtggcccaaatcgagcacttcaactctcaagctacaaccatactcctcgcctctctaagcaaggaggagtacaacaaggtgcaagggttgaagaatgcaaaagaaatttgggacctactcaagaccgcgcacgaaggtgatgaactcaccaagattaccaagcgggaaacgatcgagggggagctcggtcgcttccgtcttcgccaaggggaggagccacaagacatgtacaaccggctcaagactttggtgaaccaagtgcgcaacctcgggagcaagaagtgggatgatcacgaggtggttaaggttattcttagatcgctcatttttcttaaccccacacaagttcaattaattcatggtaatcctagatatactcaaatgacccccgaggaagttatcgggaattttgtgagctttgaatgcatgatcaaaggctccaagaagatcaacgagcttgatgaaccctccacgtccgaagcacaaccggtggcatttaaggcgacggaggagaagaaggaggagtctacaccgagtagacaaccaattgacgcctccaagctcgacaatgaggagatggctttaatcatcaaaagctttcgccaaatcctcaagcaacggaaggggaaggattacaaatcccgttccaggaaggtttgctacaagtgtggtaagcccgatcactttatcgctaaatgtccattatcaagtgacagtgacagggataacgacaagaagggaaagaggaaagaaaagaagaggtaccacaagaggaggggcggcgatgcccatgtatgccgcgagtggaactccgacgagagctccaccgactcctcctccgacaaggacgccgccaacatcgctgtcaccaagggactcctcttccccaacgtcggtcacaagtgcctcatggcaaaggacagcaaaaggaagaaggtaaaatcaagatcctccactaaatatgaaacctctagtgatgaggatgatgctagcaatgaggaggataacttgcatgttctttttgccaaccttaacatggaacaaaaggaaaaactaaatgagctaattagtgccatccatgaaaaggatgacctcttggactcccaagaggacttcctaatcaaggaaaataaaaagcatgttaaggttaaaaatgcttatgctctagaggtagaaaattgtgagaaattatctagtgagctaagtacttgccatgacactattaccaaccttagaaatgaaaatgctagtttaaatactaaggttgattcacatgtttgtaatgtttcaattcccaatcttagaaatgataatgatgatttgcttgctaagattgaagaattgaacatttctcttgctagccttagagtagaaaatgaaaatttaattgctaaggctaaagaactagatgtttgcaatgttacaatttccgatcttagagataataatgatatcttgcgtgctaagatcgttgaacttaattcatgcaaaccctctacatctagtgttgagcatgtttccgtttgtactagatgtagagatgttgatattgatgctattcatgatcacatgaccttaattaaacaacaaaatgatcatatagcaatattagatgcaaaaattgccgaacataacttagaaaatgaaaaattcaaatttgctagaagtatgctctataatgggagacgccctggcatcaaggatggcattggcttccaaaggggagacactgtcaaacttaatgcccctcctaaaagattgtctaactttgttaagggcaagactcccatgcctcaggataacgagggttacattttataccctgccggttatcccgaggacaaaattaggagaattcattctaggaagtctcactctggccctaaccatgcttttatgtataagggtgagacatctagctctaggcaaccaacccgtgctaagttgcctaagaagaaaacccctagtgcatcaaatgaacatagtctttcatttaaaacttttgatgcatcttatgtgttgactaacaaatccggcaaagtagttgccaaatatgttgggggcaaacacaaggggtcaaagacttgtgtttgggtacccaaagttcttgtgtctaatgccaaaggacccaaaaccatttgggtacctaaagtcaagaactaa

SEQ ID NO: 5072 - DNA, 4380 bp, Zea mays
  Clone ID: TF_ZM5008.C2.o5.fg
atgaatcctcctaatcctccaccaggcggagttgacccactggttgctgctcagatggcggtgatgcagcaaatggcagacaccatggctgatatgcgtgcccagatgcagcaagaacgccaggaaatgcgtcaggaaagagaagatatacgccaggagttgcgccaggagagagatgagatacgccaagaaaggagggcgcaacaacagcagctgcaacaacaacttcaacaacagcaacaacagcaacaagtgccattgcctccaccaccaccaccagttccacctcatgataagcaccgggagtttatgagtcataagccaccgaccttcgccagttcgccagatccacttgatgcagacgattggttgaagtcaattgagaagatgctgaatattgcacaatgcactgaccgggagaaggttttatatgcttctggacgtctgactggtcctgctgctgactggtgggattcttatactgctgcccatgatgctgcggatactattacttgggcagagttcagtacgcaatttaggaactaccatattccagctggtatgataaagatcaagaagaaggagtttctgtcattaaagcaaggcaacatgtcggtcagcgagtacagggacaaatttattcagttgtcgaggtatgctccggaggaagttgctgaggatgaaagaaagcaggagcactttattgaaggacttaatggacccttgcagtatgcactggtggcacacacctttccatcatttcagaggctactggataaggctcttgctattgaacacaagcgtgttcaactgagtgatttgaagaggaaggctatctcgcagggacagggtagcagcagtgttcgtccccgctacgttccaccacagggtacaccgactcgaccaggaggaccacgcccagttcagcaatcaccactgaggattccacctcctcgacaggctacccccactggcaccccgacgaggcctacaggacagaagaccggccctacatgcttcaagtgcagtcaggttgggcactatgctaatgcttgtcctatgggaaattctggtacaccagctaagaacaagcaacagacccgtggcaagggatattctatagccagggtgaatcaagtcagcgttgatgatactcctgatggtggggacctcgtaattggtatgttttatgttaatgcaattcctgcaacaatattatttgattctggtgctacacattcattcatgtctgctagatatgccaacacaaatgaaataccactgctaaatatgagaaaacccatgatagtaattacacctaaagggcctgttgaggcgaatcaaatgacacgtagattgaccttgaccattatgggtagagaatttggagctactgctataatattagagtcaagcagtatagatctgatccttggtatgtcatggctaagaaaggcaaaggccgttatagcatgtggtaggggtaccgtagaactcactaccactaaaggagaaagatttcaagttaatattgcagtaacctcctcatccatgcgtgcaatgttctttatgcctgaggagtttgttggtgacaacatccgggtggttagagattttccggatgtctttccagaggagttaccagggatgccccctgatagggaagttgagtttgttattgatctcttacctggaaccgcccctatttctaaacggccatataaaatgtccgtagaggagttgaaggaactgaagaagcagttgattaatgatgttacggtgaagaacaagtatctgttgccccgtattgaggatttatttgatcagatgagaggtgctagagtattctcgaagattgatctccgatccggttaccatcagatgaggattagaccatcggatattcctaagacaacattctcgaatcgatatggattatatgagtttactgttatgtcatttggattaaccaatgcaccggcttatttcatgaatttgatgaacaaagtgtttatggagtatttggacagattcgtcgtggtatttatcgacgatattcttatctattctaagaatgaaagtgatcatgaacaacatctaaggttggtgctacagaagttgcgagataatcaactctacgctaagttcagcaagtgcgagttttggattgacaaggtgccattccttggtcatattatttctaatggaggaatagcagtggatccttctaaagtgaaggagattatggagtggagagtgcccactacagttactgagattcggagtttcttgggactcgcaggatattatcggagatttattgaagggctctctaagattgccaagcctatgacctcgcttttggagaaaggaagagaattcaagtgggatgagaaatgccaagagagctttgatcaattgaaggagagattaatgtctccgccagtattggttatgccagatctgcagaagggatttgacatttactgtgatgcatgtggccaaggacttggatgtgtgcttatgcaagatggtcatgtgattgcctatgcatctcgtcagttgaggaggcatgaattgaactaccccactcatgatttagagctggcagcagttgtgcatgcacttaagatttggagacactacattatgggaactaagtgccaagtatacacggatcataagagtttgaagtatatattcactcagaaggatctcaatcttaggcaacgtcgttggttggagctcattaaggattatgatttggagattcactatcacccaggcaaggcaaatttggttgcagatgccttgagtcgaaaggagcatgttcactccgctttcgttgtccagctacctgatgaattagcaaaagattttgagagactcaacctgggaattgttacacatacggaaggagtgactattgaattggaacctaccttggagcaagaaattcgtaaaggtcagattggtgatgccaaaatccaggagatcaaggatctgataacagagggtagaggcccggaattcacagaggatgagcaaggcacgatatggttcaagaatcggatctgtgttcccgaaattgatagtcttcgggaaactatattgaaggaagcacatgactcagtttattctatccaccctggaagtactaagatgtatcagggtttgaagcaaaaatattggtggtatggattgaagagagatgtggccgcacatgtggctatgtgcgatgtgtgccaaagagttaaagctgaacaccagaggccagccggactattgcacccactgaagatacctgagtggaaatgggaagagattggcatggacttcattgttggattaccccgcacatctgctggatatgattctatatgggtgattggggacaggctaactaaagtagcccactttattccagtgaagaccacgtattcaggagccaagttggcagagttgtacatggcacggattgtatgcctgcatggtgtaccaaagaagattgtgtcagaccggggatcacagtttacctctcgatattggaagaagttgcacgagtccttggatacaagattaaattttagttcggcttaccatccacagactgatgggcagactgagaggactaaccaagtgttagaagatatgttaagagcttgtgctcttaagcatggtggtagttgggataagagtctaccatatgctgagttctcatataataatagctaccaggccagtttgaagatgtcaccgtttgaggctttgtatggcagaaagtgcagggctccactgtattgggatcaaactgatgaaaggcagttgtttgggcctgagattatacaagaagcagaggatcaagtccagcaaataagggagaatttgagaactgcacagtccaggcagaagagctatgctgatacccggagaagattgcttgagtttaaggagggagattatgtctatttgaaggtgtcaccactccggggtatgagaagattcaaagtcaaaggaaagttgtcccctcgctttattggacccttcttaatcttaaagcgagtgggtgaggttgcatatcaattggagttaccggatcatcttgcggatgttcatgatgtatttcatgtatcccagctgaagaaatgtctcagggtgcctgaagaacaattaccaatggaagaccttagtgttcaagatgacctgacttatgctgaataccccatcaagattttggatactttgactcgagttacgaggaataaggttataaagatgtgcaaagtgcaatggagtcaccatggcgaagatgaagcaacatgggaaagagaagaagagcttcgcgtagattttccccaccttttccctagatcttcctaa

SEQ ID NO: 5073 - DNA, 3994 bp, Zea mays
  Clone ID: TF_ZmC16207_1
cctggccggctaaagtaggcacatttcatcctatccaaaatcaaatcaagatagcagcagcagctgttgattttacaacataattagagggcaaaatggtgatgaaggttggcttgaccaccaaccagatcatatatctccaagccagtatgttgaagtcccagagggagacaacaactatcccaatgatatggactcaagtgatggaagcaacctgagagatcagattgctctccaaatgtgggctgcctacaatagttaatttaggatctcttatatatattatatagtaataaagacttatgttttattatgtagtagtaaagtcttttgttttattatgtagtagtaaagccttttgtttactatgttttgttgaaaaatatagctatggcaaagaatgtttttagggcagcttggaacactgtgtatgagaaaggtctggttgatgtgctccttgaacataaggacaaccgaaaggtgaaaagtcaaaatgggagccttggactctggaacatccaaactattttagttttcagactgttttagttttcagactgtatacacagaaaaggttagctgttaaatctaaaacctttactaaactttactaaactatcatatgttttagttttcagattgttcaaatataacagctaacctttactaaacttcagccggcagactgtgcacaaatagaaagtgaacaagggtcggcagactgtgctctataatcctgagaagggaagatttgttcaaatagaaagtgaacaattgtttaatatagatcccgacaactttatccacaaattgcattgctaaatctaaaactgtaacctttactaaactgtaacctttgctgaactaaactgtaacctttgctgaatttataatcttgagtagccttggacatatgacatataaattcaaccagtacaagggtcgttaatacgcttcagccgggaaggcgtttgttattatctttgcgattgttattatctttacgatattttccattgcttatcatgccttttgctatgattatgtgttgcttacatgtttctcaatttctctagatatgggttcttgggaagagctagctaggcagtttttgttggaggaagaagaagacgatgagtttttctttattcttctccttgctatacttccattcctctctgaagagaaaaggctgttcggtgtgcaccggacagtgtgcggtgcacagggtgcttcagcatgaaactcactgctcgcaggaatccgccagggcactgtgcctaaaaactctcggactgcccttccttgtgtgcgtttctttccctcccttactcttgtggctttctttgtgatcaacgttggaaggggattgagtgcaatccttgaccgaaggaggtcaccacaacgtggagtaggcattggctcgagtaacaagaagagggatggaaagaagaagaggcgcataaagaagatcatctactacgacagcgacgcctcctcttcttcaacaagggatgacgacatcgtccgacgcatgctaaggtcattcaccgttattgatcctcatcttgtaaatcttatttgtgagaaccccaagtacaccaagatgacgcccgaagaaattcttggaaaattcgtgagcgggcgcatgatggtgaaggaaacgaggtatgtggacgatgccttaaacagaccgcttcttctacacgagtcgcaacccgttgctctcaaagcaaccggcagcaaggaggcactacctagcaaggtagcacaagtggaggctgtcgggctcaacgaggacgaaatgacgctcatcatcaagtgtttcaagactgccttgaagggacgcaaggagtaccctaacaagaacaaatcaaggagaaagtgctcctgcttcaaatgcggtaagtatggtcatttcatagcacaatgtcccgataataacaatgaccaggcacgagaaaagtatgggaagaaggaaaggaagaagaactacaggaaagcgaagggcgaggcgcacattggaaaagagtgggactccgactgttcttcatccgactccgatgatgaaggactagctgcctcggccttcaacaagtcttctctcttccccaacgaacgacacacatgcctcatggctaaggagaataagatagatctaaggtgtaaagattttaatattgatgcttgtaatgaacatgtctctactattctcaaattgaacaatgatgttgcaagtcttaatgctaaacttaagacttgcaaggatgactatgagaaactaaaatttacaagggatgcctacaccattggtagacacccctcaattaaggatggacttggtttccaaaaggagaccaagaactttacaagccataggacttccaatctcaacaaggagaaagggaaggctcctatggctaatagttctcaaaaaaatcatgcctatctgtataagaaaattcctaatgttactcatcatgataaatgtcataatcattctgttttcttgtgcgtcatgatgatgtatttagttctcatgccatgtttgcaaccagctcctcgtatgctcatggtttatgcattcgggggctcaagctggatcattgatagcggatgcacaaaccacatgatgggggagaagaaaatgttcacctcctacgtcaaaaatagggattcccaagacactaacatctttggagatgggaatcaaggcaaggttaaaggcttaggcaaaattgccatcacaaccgagcactcgatctcaaatgtgtttttcgtagaatcactcgggtacaatttattgtctgataaaactgaaactcaaggaaccctaaagcgcttcttaaggagagctcaaaatgaatttgagctaaaggtggaaaagataaggagcgataatggatctgaattcaagaaccttcaagtcaaagattatcttgaggatgaaggcatcaagcacgagttctccgctccctacacaccacaacaaaatggtgtagtagagaggaagaacaggacgctaattgacatggcgaggactatgcttggagaatacaagacgcctgagcggttttggtcggaagctgtgaatacagcctgccatgacataaaccggctctatctgcattgcctcctcgagaagacatcttacgaactcctaaccggtaacaaacccaaagtttcctattttcgtgtatttgggagcaaatgctacgtcttgataaagaaaggtaggcattcgaagtttgctcccaaagctgtagaagggtttttattagggtatgactcaaatacaaaagcgtatagagtcttcagcaaatcatcagaattagttgaagtctctagcgacgttgtatttgatgaaactaatggctctccaagagagcaagttgatcttgatgatgtagatgaagatgaggttccgacggccgcaatgcgaacaatggcgataggtgaggaagagctcaacaacttcaaaagaaatgaagtgtggagcctggtgccacgtccaaagcaaaatgttgtgggaaccaagtgggtgttccgcaataagcaagatgaacacggtgtggtgacaagaaacaaagctcgacttgtggcaaaaggttatgcccaagtcacaggtttggattttgaggagacttttgctcctgtagctaggctagaatcaattcgaattttattggcatgtgctgctcaccactcttttaagatttttcaaatggatgtgaagagcgccttcctcaatggaccaatcaaggagaaggtatacgtggaacaaccccctagctttgaggatgacaggtatcctgaccacgtctacaagctctctaaggcgctctatgggcttaagcaagccccaagagcatggtatgaatgtcttagagatttctttattactaatgctttcaaggttgggaaagctgatcctactctcttcactaagacttgcaatggtgatctttttgtatgccaaattgtaacgccctga

SEQ ID NO: 5074 - DNA, 4383 bp, Zea mays
  Clone ID: TF_ZmC951_456
tcacaagaaatacttcaactcccccatcatagacatctcgaatttctgtgtcatgatcctactaaactcttcacatgtagattcgttagtagacccaaatatgatatcatcaacataaacttggcatacaaacaaatcattttcaagagttttggtaaagagtgtaggatcggcttttccgactttgaatccattagtgataagaaaatctctaaggcattcataccatgctcttggggcttgcttgagcccataaagcgcctttaaaagtttatagacatggttagggtactcactatcttcaaagccgggaggttgctcaacatagacatcttccttgattggtccgttgaggaaggcactcttcacgtccatttggtaaagcttgaagccatggtaagtaccataggctaataatatacgaattgactcaagcctagctacgggtgcatagatttcaccgaaatccaaacctttgacttgggagtatcccttggccacaagtcgggctttgttccttgtcaccacaccatgctcgtcttgctcgttcctagtgaagttgttgagctcctcttgcatcgccaccacccaatctgaatcttggagtgcttcctctaccctgtgtggctcaatagaggaaacaaaagagtaatgttcacaaaaatgtgcaacacgagatctagtggttacccccttatgaatgtcgccgaggatggtgtcgacagggtgatctcgttggattgcttggtggactcttgggtgtggcggccttcgttcctcatcctccttgtcttgatcatttgcatctcccccttgatcattgtcgtcatcttgaggtagctcacttgcttgatcttctccttcatcaacttgagcctcatcctcattttgagttcgtggagatgcttgcgtggaggaggatggttgatcttgtgcatttggaggctcttcagattccttaggacacacatccccaatggacatgttccttagcgcgatgcatggagcctcttcatcacatatctcatcaagatcaacttgctctacttgagagccgttagtctcatcaaacacaacgtcacaagaaacttcaacttgtccggaggacttgttaaagactctatatgcccttgtgtttgaatcatatcctagtaaaaagccttctacagtcttaggagcaaatttagattttctacctcgatccgatgtcttgtactcatcaagcatggttcttgccatgtccaatagagttcgattcttcctctccactacaccattttgttgtggggtgtagggagaagagaactcatgcttgatgccctcctcctcaagcaatccttctatttgtgagttcttgtactctgtcccgttgtcgcttcttattttcttgatccttaagccgaactcattttgagcccgtctcaagaatccctttaaggtttcttgggtatgagatttttcctgcaaaaagaacacccaagtgaagcaagaataatcatccacaataactagacaatacttactcccgccgatgcttatgtaagcgatcgggccgaatagatccatgtgtaggagctccagtggcctgtcggtcgtcatgatgttcttgtgtggatggtgagcaccaacttgcttccccgcttggcatgcgctacaaatcctgtctttctcaaaatgaacattggttaatcctaagatgtgctctccctttagaagcttgtgaagattcttcatcccaacatgggctagtcggcggtgccatagccaacccatgttagtcttagcaattaagcaagtgtcgagttcagctctatcaaaatctaccaagtatagctgaccctctaacactcccttaaatgttattgaatcatcacttcttctaaagacagtgacaccttgatttccatccccgaatgtgatagctcgttggggatcttggtttttctcataggaggagaacatcttcttctcccctgtcatgtggtttgtgcacccactgtcgatgatccaacttgagcccccggatgcataaaccttgccggatttgttagttaaaacataggatgcatcaaaagttttaaatgaaatgttatgatcatttgatgcactaggagttttctttttaggcaacttagcacgggttggttgcctagaactagatgtctcacccttatacataaaagcatgattagggccagagtgagacttcctagagtgaattctcctaattttgctctcgggataaccggcaggatacaaaatgtaaccctcgttatcctgaggcatgggagccttccccttaacaaaattagataatttcttaggaggggcattaagtttgacattgcctccctgttggaagccaatgccatccttaatgccaggacgtctcccactataaagcatactacgagcaaatttaaatttttcattttcaatttcatgctcggcaatttttgcatctagtttagctatatgatcattttgttgtttaattaaagccatatgatcatgtatagcattaatatcaacatctctacatctagtgcaaatagtagtgtgctcaacggtagatgtagatggtttgcaagattttaattctacaaccttagcatgcaatatatcatttttacttctaaggttggaaatggtagcattgcaaacatcaaaatctttagccttagcaagcaatttttcatcttcatctctaaggctagcaagagatatgttcaattcttcaatcctagcaagcaaatcatcattatcatttctaagattgggaattgaaacattacaagcaatagaatcaaccttagctaacaaattagcattctcatttctaaggttgtctatagtctcatggcaagtacttagctcactagatattttttcacatttttcaacctctagagcataagcatttttaactttaacatgctttttgttttccttgattaggaagtcctcttgggagtccaagagatcatccttctcatggatggcactaattaattcatttaatttctctttttgttgcatgtttaagttggcaaaaagagtacgcaaattatcttcctcatcactagcattatcatcgctagaagactcatatctagtggaggatttggatttaacattcttctttttgccatcctttgccatgaggcacttgtggccgacgttggggaagagaagtcccttggtgacggcgatgttggcgacgtcctcgtcgtcggaggagtcgctagagctttcgtcggagtcccactcgcgacaaacatgggcatcaccgcccttcttcttgtagtacctcttcttctcctttcttctccccttcttgtcgtcacccctgtcactgtcactagaaatagaacatttagctataaagtgaccgggcttaccacatttgtagcaaaccttcttgaagcggggcttgtaatcttttcccctcctttgtttgaggatttggcggaagctcttgatgacgagcgtcatttcctcgttgtcgagcttggaggcgtcgatgggtgttctactcgatgtagactcttccttcttctcctccgtcgccttaaatgtgaccggttgtgcttcggacgtggaggggccgtcaagctcgttgatcttccgtgagcccttgatcataaattcaaagctcacaaaactcccgattacttcctcgggagtcattagtgtatatcttgggttaccacgaattaattgtacttgagtagggttaagaaaaataagtgatcttagaataaccttaaccaccttgtggtcatcccatttcttgctcccgaggttgcgcacttgattcaccaaggttttgagtcggttgtacatgtcttgaggctcctcctcttggcgaagacggaagcgaccgagctccccctcgattgtttcccgcttggtgatcttggttagttcatcaccctcgtgcgcgtcttgagcacgtcccaaactttcttggcgctctttaatccttgcaccttgttgtactcctccctgtgctccaaactcaacaacattccatatacttttgtggagtgaggttagatgaaatttcattaaatcactacacctagcataatcttcaccgtcaaaggttggtggtttgctaaacttcttgcgctcatggcgcttagaagttatggagggcgcgtcggagccggatgtagatggtgatgaggtgtcggtttcgtagtagaccactttcctcatcatcttcttcttgtccccactccgatgcgacttgtgggaagagggtttcttctccttccctttccctttgttgcgggactctcccgatgaagctttcccgtggcttgtagcgggcttgtcgccggtctccatctccttcttggcgtgttctcccgacat

SEQ ID NO: 5075 - DNA, 2355 bp, Zea mays
  Clone ID: TF_ZM4589.C1.o4.fg
atgaagaaagtggtctactacgagaccgactcttcctcgccctctacatccggatccgacgctgcgtccgtcacttctaagcgccaagagcgcaagaagtatagtaagattcccctacgctatcctcgcattcctaagcatactccattactttccgtactattaggcaaaccaccgacgtttgacggtgaagattattctaggtggagtgatatgatgagatatcacctaacctcactccacaaaaatatatgggatattgttgagtttggtgtacaggtaccatccgtaggggatgaagattatgatgaggacgaggtggcccaaatcgtgcacttcaactcccaagccaccactatactcctcacctctctaagtcgagaggagtataacaaggtgcaaggattgaagagcgccaaggagatttgggacgttctcaagaccacggacgaaggagacgaggtgaccaagatcaccaagcgggagacgatcgagggggagctcggtcgcttccggcttcgcaagaggaggagccacaagaaatgctcaaagaaaatcatcgagcaagatggcccctccacgcccgaagcacaatcggtcgcattcaaggcgacggaggagaagaaggaagagtctacatcaagtagacttcctatcgacgcctccaagctcgacaacgaggaaatgacgctcatcatcaagagcttccgccaaatcctcaagcaaaggagagggaaggactacaagtcccgctccaagaaagtgtgctacaagtgtggtaagcccggtcactttattgcaaaatgttcaatatcaagtgacagtgacaggggcgacgacaagaagggaaagaggagagaaaagaagagatactacaagaagaagggcggcgatgcccatgtgtgccgcgagcggaactccgacgagagctcctccgactcctcctccgacgaggacgccgccaacatcgccgtcaccaaaggactcctcttccccaacatcggccacaaatgcctcatggcaaaggacggcaaaaggaagaaggtaaaatcaagatcctccactaaatatgcatcctctagtgatgaagataattctagtgatgaggaggataatttgcgcaccctttttgccaacctaaacatgcaacaaaaggaaaaattaaatgaattaattagtgatattcatgagaaggatgaactcttggactctcaagaggacttcctaattaaagaaaataagaagcatgttaaggttaaaaatgcttacgctctagaagtagaaaaatgtgaaaaattatctagtgagctaagcacatgccatgatattattgccaaccttagaaatgagaatgctaaaatgattactaaggttgattcaaatttatgtgatgattcaatttccaatcatagagatgataatgttaatttacttgctaagattgaagaattgaatgtctctcttgctagccttagaaacgagaatgaaagattaattgctaaggctaaggacttagatgtttgcaatgttaccatttccaatcttagaagtgaaaatgacattttacatgctaagattgttgcattaaattcttgcaaaccctctacatctaccattgagcatgttactatttgcactagatgtagagacattaatgttgatgctattcatgatcacctagctttaattaagaaacaaaatgatcacatagctcaacttaatgctaagattaatgagcatgacttagaaaatgaaaaatttaaatttgctagaagcatgctctataatgggagacgccctggcatcaaggatggcattggcttccaaaagggagacaatgtcaaacttaatgcccctcctaaaagattgtctaattttgttaagggcaaggctcccatgcctcaggataacgagggttacattttgtaccctgtcggttaccccgagcacaaaattaggagaattcactctaggaagtctcactctggccctaatcatgcttttatgtataagggtgagacatctagttctaggcaatcaacccgtgcaaaattgcctaagaagaaaactcctattgcatcaaatgattctaacatttcatttaaaactgttgatgcatcttatgttttgactaacaaatccggcaaggtttatgcttccgggggctcaagttggatcatcgacagcgggtgcccaaaccacatgacaggggagaagaagatgttctcctcctacaagaaaaaccaagatccccaacgagctatcacattcggggatgggaatcaaggtgttactgtctttagaagaagtgatgattcagtagcatttaagggagtgttagagggtcagctataa

SEQ ID NO: 5076 - DNA, 4944 bp, Zea mays
  Clone ID: TF_ZmC951_328
ttaggtggtggtgcggtccttttgctttgggctcatactttctccccctttggcatgaatcgccaaaaacggaatcattagagcccttacattactttcttcccctcccgtgtcgaggtcgagatgcccattggttcccatgggtgtcttgatgggcttggcatccttcatcccaaacttgtttagaatgtcttgagtgtacttcgtttggctaatgaaggtgccctcttggagttgcttcacttgaaatcctaggaaatacttcaactcccccatcatagacatctcgaacttttgtgtcatgatcctactaaattcttcacatgttgactcgttagtagacccaaatataatatcatcaacgtaaatttggcatacaaacaagtcattttcaagagttttagtgaataaagtaggatcggcctttccgactttgaagccattagtgataaggaaatctctaaggcattcataccatgctcttggggcttgcttgagcccataaagcgccttagagagtttgtaaacatggttagggtactcactgtcttcaaagccgggaggttgctcaacatagacctcttccttgattggtccattgaggaaggcacttttcacgtccatttgataaagcttaaagccatggtaagtagcataggctaataatatttgaattgactcaagcctagctacgggtgcataggtttcaccgaaatccaaaccttcgacttgggagtatcccttggccacaagtcgagctttgttccttgtcaccacaccatgctcatcttgcttgttgcggaagacccatttggttcctacaacattttggttaggacgtggaactaaatgccatacctcattcctagtgaagttgttgagctcctcttgcatcgccaccacccaatccgaatcttggagtgcttcctctaccctgtgtggctcaatagaggaaacaaaggagtaatgctcacaaaaatgtgcaacacgagatctagtggttacccccttatgaatgtcaccgaggatggtgtcgacggggtgatctcgttggattgcttggtggactcttgggtgtggcggcctttgttcttcatcctccttatcttgatcatttgcatctcccccttgatcattgccatcatattgaggtggctcatttgcttgatcttctccttcatcaatttgagcctcatcctcattttgagtcggtggagatgcttgcgtggaggaggatggttgatcttgtgcatttggaggttcttcggatttcttaggacacacatccccaatggacatgttccttagcgcgatgcacggagcctcttcatcacctatctcatcaagatcaacttgctctacttgagagccgttagtctcatcaaacacaacgtcacaagaaacttcaacttgtccagaggacttgttaaagactctatatgcccttgtgtttgaatcatatcctagtaaaaagccttctacagtcttaggagcaaatttagattttctacctcttttaacaagaataaagcatttgctaccaaagactcggttgatggcgtagcaagcggtgttgaccgcctcggcccaaaaccgatccgaagtcttgtactcatcaagcatggttcttgccatgtctaatagagttctattcttcctctccactacaccattttgttgtggcatgtagggagaagagaactcatgcttgatgccctcctcctcaaggaagccttcaatttgagagttcttgaactccgtcccgttgtcgcttctaattttcttgatccttagggtgaactcgttttgagcccgtctcaagaatccttttaaggtctcttgggtttgatatttttcaagacaatacttactcccgccgatgcttatgtaagcaatcgggccgaatagatccatgtgaagtagctccagtggcctgtcggtcgtcataatgttcttgtgtggatgatgggcaccaacttgctttcctgcttggcatgcgctacaaatcctgtctttctcaaagtgaacatttgttagtcctaaaatgtgttctccctttagaagcttgtgaagattcttcatcccaacatgggctagtcggcggtgccagagccaacccatgttagtcttagcaattaagcaagtgtcgagttcagctctatcaaaatctaccaagtatagctgaccctctaacactcccttaaatgctattgaatcatcacttcttctaaagacagtgacaccttggtttccatccccgaatgtgatagctcgttggggatcctggtttttctcgtaggaggagaacattttcttctccccagtcatgtggtttgtgcacccgctgtcgatgatccaacttgagcccccggatgcataaaccttgctggatttgttagttaaaacatatgatgcatcaaaagttttgaatgaaatgtcatgatcatttgatgcactaggagttttcttcttaggcaacttagcacgggttggttgcctagagctagaagtctcactcttatacataaaagcatggttagaaccagagtgagacttcctagaatgagttctcctaattttgtcctcgggataaccggcagggtataaaatgtaaccctcattatccggaggcatgggagccttgccctttacaaaattggacaatcttttaggaggggcattaagtttgacattgtctcccctttggaagccaatgccatccttgatgccagggcgtctcctactatagagcatacttctagcaaatttaaatttttcattttctaagttatgctcggcaattttagcatctaattttgctatatgatcattttgttgtttaattaaagtcatgtgatcatgaatagcattaacatcaatatctctacatctagtgcaaatagaagtgtgctcaacggtagatgtagagggtttgcaagattttaattctacaaccttagcatgcaatatatcattcttagttctaaggtcggaaatggtagcattgcaaacatcaaaatctttagccttagcaattaatttttcattttcattcttaaggctaacaagagataagttcaattcttcaatcttagcaagcaaatcatcattatcatttctaagattgggaattgaaacattacaagcaatagaatcaaccttagctaataaattagaattctcatttctaaggttgtctatagtctcatggcaagtgcttagctcattagacaatttttcacatttttcaacttctagagcataagcatttttaaccttaacatgcttcttattttctttaataaggaagtcctcttgggtgtccaagagatcatccttttcatgaatggcactaatcaattcattaagtttctctttttgttgcatgttgaggttggcaaaaagagtgcgcaagttatcttcctcatcactaacattttcatcactagaggattcatatctagtggaggatttagatttaaccttcttctttttgccgtcctttgccatgaggcacttgtggccgacgttggggaagagaagtcccttggtgacggcgatgttggcggcgtcctcgtcgtcggaggagtcgctagagctttcgtcggagtcccactcccgacaaacatgggcatcgccgcccctcttcttgtagtattttttcttctcctttcttctccccttcttgtcatcgccccggtcactgtcactagatataggacattttgcaataaaatgatcgggcttaccacatttgtagcaaaccttcttggagcggagcttgtagtctttccccctcctttgtttgaggatttggcggaaactcttgatgacgagcgccatttcctcattgtcgagcttggaggcgtcgattggttgtctacttggtgtagactccttcttctcctctgttgccttgaatgcaaccggttgagcttcggacgtggagggatcatcaagctcgttgatcttcctcgagccttcgatcatgcactcaaaacttacaaaattcccgattacttcctcgggagtcattagtgtatatctagggttgccacaaattaattgaacttgagtagggttaagaaaaataagtgatcttaaaataaccttaaccatttcgtggtcatcccatttcttgctcccgaggttgcgcacttgattcaccaaggtcttgagccggttgtacatgttttgtggctcctcccctttgcgaagccggaaccgaccgagctccccctcgatcgtctcccgcttggtgatctttgtgagctcatctccttcgtgtgcggttttgagcacatcccaaacctccttggcgctcttcaacccttgcactttgttatactcctctctacttagagaagcgaggagtattgttgttgcttgagagttgaagtgctcgatttgagcaacctcgtcctcatcataatcttcatcccctacggatggtacctgtgcaccaaactcaacaacatcccatatacttttgtggagtgaggttagatgaaatcgcattaaatcactccacctagcgtaatcttcaccatcaaatgttggtggtttacctaatgggacgaaaagtaaaggtgtatgtttagaaatgtgagggtagcgtagggggatcttactatacttcttgcgctcttggcgcttagaagtgacggacgccgcgtcggagccggaggtggatgttgatgaagaatcggtctcgtagtagaccactttcctcatcttctttttcttgtccccactccgatgcggcttgtgagaagaggatttttccttcttctctttgtgtgaagaagatttcttctccttccctttggaggagtctttcttctccttcctcttgttgcgggactcttccgatgaagtcttcccgtggcttgtagtgggcttttcgccggtctccatctccttcttggtgtgatctcccgacat

SEQ ID NO: 5077 - DNA, 3612 bp, Zea mays
  Clone ID: TF_ZmC951_331
ctatttcgatatccccctttgttggtgatccctcaaaaagtgatactgaatgtctatgtgcttagtgcgactgtgttcaacgagattatcctccatgcggattgcactctcattatcacataggagagggactttgctcaatttgtagccatagtccctgagggtttgcctcatccaaagtaattgcacacaacaatggcctgcggcaatatactcggcttcagcggtggaaagagctactgaattttgtttctttgaagcccaagacaccagggatcttcctagaaactgacaagtccctgatgtgctcttcctatcaattttacaccctctcgtgtcgaggtcgagatgcccattagttcccatgggtgtcttgatgggcttggcatccttcattccaaacttggtaagtatgttttgaatgtacttcgtttggctgatgaaggtgccctcctggagttgcttgacttgaaatcctaggaaatacttcaactcccccatcatagacatctcgaatttttgtatcatgatcctactaaactcttcacaagtagatttgttagtagacccaaatatgatatcatcaacataaatttggcatacaaacaaatcttttgcaatggttttagtaaagagtgtaggatcggcttttccgactttgaatccattagtgataaggaaatctcttaggcatttataccatgctcttggggcttgcttgagcccataaagcgcctttgagagtttatacacatggttagggtactcactaacttcaaagccgggaggttgctcaacatagacctcttctttgattggtccattaaggaaggaacttttcatgtccatttgataaagctttgacttgtgaatatccattggccacaagtcgggctttgttccttgtctccacaccatgctcatcttgcttgttgtggaatacccacttggtacctcattcctcgtgaagtttttgagttcctcttgcattgccaacacccaatctaaatctcttaatgcttcttccaccctgtatggctcaatagaagacacaaaagagtaatattcacaaaaatgtgcgactcgagatcgagttgttacccccttatgaatatcgccgaggatggagttcacggggtgatctctttgaatcgcttggtggactcttgggtgtggcggtctttgaccctgtaactcttgatcatcttccttgtcttgatcaacttcatatcccccttgatcattgtcctcctcttgaggtggctcatcctcttgatctccatcttcattgtcttgagcctgatcctcatcttgagttggtgggatgcttgcatgaaagtgacggttgatcttgtgcttgtgtgggctcttcggattccttaggacacacatccccaatggacatgttccggtgaggaattcatatgatgtctttttaaggattcggtgaaggtagagccggttgatggagtagcaagcagtgttgattgcttccacccaaaaccagtcaggagtcttgtactcatcaagcatggtccttgccatgtccaatagagttctattcttcctctccactacaccattttgttgaggtgtgtagggagaagagaactcatgcttgatgccctcatcctcaagaaagccttcaatttgagagttcttgaactccgtcccgttgtcgcttcttatcttttttattctcaatccaaactcattttgagcccgtctcaagaatccttttaaggtctcttgggtttgagatttttcccgtcgatgcttatgtaagctatcgagccgaatagatccatgcgaagcagttccagtggtctgtccgttgtcattatgttcctctaatactcccttaaatgctattgaatcatcacttcttctaaatacagtaacacctaaatcttgatttccatccccgaatgtgataactctttggggatcatcatttttctcgtaggaggagaacatccttttctcccatgtcatatggtttgtgcatctgctatcaataatccaacttgagctccaggatgcataaaccttaggtacccaaacacgagtcttggagcccttgtgtttgcccccaacatatttggcaactattttgcctgatttgttagtaagcgcataagaagcatcaaaagtcttaaatgaaacattaggttcatttgatgcagtaggagttatctttttagacattttaacataggtagaatgcctagagctagatgcctcattcttgtacataaaagcatgatgggaaacagaatgagacttcctagcatgacttctcctaatcttatgctcaggataaccagcaggatataaaatgtaaccctcgttatcctgagccttgggagccttacccctcatcactagatgtagtatacttggggtggttctagcttgtaccctctttttcttgccgtcctttgccatgtagcatttgtggccgacgtttgggaagagaagtcccttgttgacgatgatgtttgcggcgtcctcgtcggaggaggagtcccattcccaacacacgtgggcatcgtcgcccttcttcttgtagtatttattcttttccttcttcatccccttcttgtcgttatccctgtcactatcactagacatagggcatttagcgataaaatgtctgggcttaccacacttgtagcacaccctcttagagcgaggtttgtagtccttccccctcctttgcttgaggatttggcggaagctcctaatgatgagcgtcatttcctcattgtcgagcttggaggcgtcaatggggagcctacttgatgtagactcttctttcttatcctccgtcgctttgaatgcgatgggttgcacctcgggtgtggaggtgtcgccttgctccaagttgactatttgtttggagcctttgatcatcaattcaaagctcacaaactttcctataacttcctcgggagacattagcttatatctaggatcacctcgaattaattgaacttgcgtaggattacgaaaaatgagtgatcttagaataatttggttgaccaaggtcttgagccgattgtacattgcttgtggctcctctccttggttgaggacaaatcgaccgagctccccctcgatcgtctcccgcttggtggtcttggtcacctcatccccttcatgcgcagtctttagtacatcccaaatctttttggcactttttagccattgcaccttattatactcctctcgacacaaggaggcgaggagtatagtagttgcttgggagtcaaagtgccagatttgggcgatttcgttcgaatcataatcttcatcccctatgggtggtacctgcgctccaaactcaacaatgtcccatatgctagcgtggagtgaggttaggtgatgcctcaatttatcactccacatacaataatcttcaccataaaaaataggtggtttgcctaatgagatggaaagtaaaggagtgcgtttagaaatgcggggatagcgtaaggggatcttactaaacttcttgcgctcatggcgcttagaagtgacggacggagcgtcggagccgaaggtggagggcgacgaagaatcgatctcgtagtagaccactttcttcat

SEQ ID NO: 5078 - DNA, 4752 bp, Zea mays
  Clone ID: TF_ZmC951_376
tcatccaaacttctttagaatgtcttgaatatactttgtttggctaatgaaggtgccctcttggagttgcttcacttgaaatcccaagaagtacttcaactcccccatcatagacatctcgaatttctgtgtcatgatcctactaaattcctcacatgtagactcgttagtagacccaaatatgatatcatcaacataaatttgacatacaaacaaatcattgtcaagagttttagtaaataaagtaggatcggcctttccgactttgaagccattagctataaggaaatctcttaggcattcataccatgctcttggggcttgcttgagcccataaagcgccttagagagttcgtggttagggtactcactatcttcaaagccgggaggttgctcaacatagacctcttccttgattggtccattgaggaaggcactcttcacatccatttgataaagcttgaagccatggtaagtagcataggctaataatatacgaattgactcaagcctagctacgggtgcataggtttcaccgaaattcaaaccttcgacttgggagtatcccttggccacaagtcgggctttgttccttgtcaccacaccatgctcatcttgcttgttgcggaaaacccacttggttcctacaacattttgattaggacgtggaaccaaatgccatacctcgttcctagtgaagttgttgagctcctcttgcatcgccaccacccaatccgaatcttgtagtgcttcctctaccctgtgtggctcaatagaggaaacaaaagagtaatgctcacaaaaatgtgcaacatgagatctagtggttacccccttatggatgtcgccgaggatggtgtcgacggggtgatctcgttggattgcttggtggactcttgggtgtggcggccttggttcttcatcctccttgtcttgatcatttacatctcccccttgatcattgccgtcatcttgaggtggctcaactctttgatcttctccttcatcaacttgagcctcatcctcattttgagttggtggagatgcttgcgtggaggaggatggttgatcttgtgcatttggaggctcttcggattccttaggacacacatccccaatggacatgttccttagcgcgatgcatggagcctcttcattacctatctcatcaagatcaacttgctctacttgagagccgttagtctcatcaaacacaacgtcacaagaaacttcaacttgtccagagaacttgttaaagactctatatgcccttgtgtttgaatcatatcctagtaaaaagccttctacaatcttaggagcaaatttagactttctacctcttttaacaagaataaagcatttgctaccaaagactctaaaatatgaaatatttggctttttaccggttaggagttcgtatgatgtcttcttgaggattcggtgtagatacaaccggttgatggtgtaacaggcggtgttgaccgcctcggcccaaaaccgatccgaagtcttgtactcatcaagcatggtccttgccatgtccaatagagttctattcttcctctccactacaccattttgttgtggcgtgtagggagaagagaactcatgcttgatgccttcctcctcaaggaagccttcaacttgagagttcttgaactctgtcccgttgtcgcttctaattttcttgatccttaagccgaactcattttgagcccgtctcaagaatccctttaaggtttcttgggtatgagatttttcctgcaaaaagaatacccaagtgaagcgagaatagtcatccacaataactagacagtacttactcccgccgatgcttctgtaagctatcgggccgaataggtccatgtgtaggagttccagtggcctgtcagtcgtcatgatgttcttgtgtggatgatgagcaccaacttgcttccctgcttggcatgcgctacaaatcctgtctttctcaaaatgaacatttgttaatcctaaaatgtgttctccctttagaagcttatgaagattcttcatcccaacatgggctagtcggcggtgccatagccaacccatgttagtcttagcaattaagcaagtgtcgggttcagctctatcaaaatctaccaagtatagctgaccctctaacactcccttaaatgctattgaatcatcacttcttctaaagacagtgacaccttggtttccatccccgaatgtgatagctcgttggggatcctggtttttctcgtaggaggagaacattttcttctcccctgtcatgtggtttgtgcacccgctatcaatgatccaacttgagcccccggatgcataaaccttgacggatttgttagttaacacataagatgcatcaaaagttttaaatgaaatgctatgttcatttgatgcactaggagttttcttcttaggcaacttagcatgggttggttgcctagaactagatgcctcacccttatacataaaagcatggttagggccagagtaagacttcctagaatgaattctcctaattttgctctcgggataaccggcagggtataaaatgtaaccctcgttatcctgaggcatgggagccttgcccttaacaaagttagataatcttttaggaggggcattaagtttgacattgtcccccttttggaagccaatgccatccttgatgcccaggcgtctcccactatagagcatgcttctagcaaatttaaatttttcattttctaagtcatgctcattaattttagcattaagttgagctatgtgatcattttgtttcttaattaaagctaggtgatcatggatagcatcaacattaatgtctctacatttagtgcaaatggcagtatgctcaacggtagatgtatagggtttgcaagattttaattctacaaccttagcatgcaatatatcatttttacttctaaggtcggaaatggaagcattgcaaacatcaaaatctttagccttagcaattaatttttcattttcatttctaaggctagtaagagacatgttcaattcttcaatcttagcaagcaaatcatcattatcattcctaagattgggaattgaaacatcacaaacatttgaatcaaccttagctaacaaattagcattctcattcctaaggttgtctatagtctcatggcaagtgcttagctcactagatagtttttcacatttttctacttctagagcataagcatttttaaccttaacatgctttttgttttctttaataaggaagtcctcttgggtgtccaagagatcatccttctcatgaatagcactaatcaattcatttaatttttctttttgttgcatgtttaagttggcaaaaagaatgcgcaagttatcctcctcattactagcattatcctcatcactagaggtttcatatttggtggatgatcttgattttaccttcttccttttgccgtcctttgccatgaggcacttgtggccgatgttggggaagagaagtcccttggtgacggcgatgtttgcggcgtcctcatcggaggaggagtcggtggagctctcatcggagtcccattcccggcaaacatgggcatcgccacccttcttcttgtagtacttcttcatctcctttcttctccccttcttgtcgtcgcccctatcactgtcactagaaataggacattttgctataaagtgatcgggcttaccacacttgtagcaaactttcttggagcagggcttgtaatctttccctttcctttgcttgaggatttggcggaagctcttgataatgatcgccatctcctcgttgtcgagcttggaggcgtcgatgggtgttcgacttggagtagattcctccttcttttcttccgtcgccttgaatgcgaccggttgtgcttcggatgtggaggggccatcaagctcgttgatcttctttgagcctttgatcatcatttcaaagctcacaaaattcccgattacttcctcgggagtcattagtgtatatctaggattgccacgaattaattgaacttgagtagggttaagaaaaacaagtgatcttagaataaccttaaccatttcgtggtcatcccattttttgctcccgaggttgcgcacttggttcaccaaggttttgagccggttatacatgtcttgtggctcctccccttggcgaagtcggaagcgaccgagctcccccttgatcgtttcccgcttggtgattttggtcacctcgtctccttcatgcgcggtctttagtgtgtcccaaatctccttggcacctttcaacccttgcaccttattatactctctcgactgtacaccaaactcaacaacatcccatatacttttgtggagtgaggttggatgaaatcgcatcaaatcactccacctagcataatcttcaccatcaaatgttggtggtttgcctaatgggacggaaagtaaaggcgtatgtttaggaatgcgaggatagcgtaaggggatcttactaaacttcttgcgctcatggcgcttagaagtaatggatggcgcgtcggagccggaggtggaaggtgatgaagtatcggtctcgtagtagaccaccttcctcatcttctttttcttgtcgccactccgatgcgacttgtgggaagaggatttcttctccttcccctttcccttgttgcgggactcttccgatgaagctttcccgtggcttgtagtgggcttgtcgcctgtctccatctccttcttggcgtgatctcccgacat

SEQ ID NO: 5079 - DNA, 2798 bp, Zea mays
  unsure (1)..(2798): unsure at all n locations
  Clone ID: TF_ZmC951_378
cgggggaccacgtcccaatggaatgttccttagcgcgatgtcacggagcctcttcatcacctatctcatcaagatcaacttgctctacttgagagccgttagtctcatcaaacacaacgtcacaagaaacttcaacttgtccggaggacttgttaaagactctatatgcccttgtgtttgaatcatatcctagtaaaaagccttctacagtcttaggagcaaatttagattttctacctcttttaacaagtataaagcatttgctaccaaagactctaaaatatgaaatattgggctttttaccggttaggagttcgtatgatgtcttcttgaggattcggtgtagatataaccggttgattgcttagcaggcggtgttgactgcctcggcccaaaaccgatccgaagtcttgtactcatcaagcatggttctagccatgtcaaatagagttcaattcttcctttccactacaccattttgttgtggcgtgtagggagaggagaactcatgcttgatgccctcctcctcaagaaagccttcaatttgagagttcttgaactccgtcccgttgtcgcttctaattntcttgctccttaagccgaactcattntgagcccgtctcaagaatccctttaaggtctcttgggtatgagatttttcctgcaaaaagaatacccaagtgaagcgagaataatcatccacaataactagacagtacttactcccgctgatgcttatgtaagctatcgggccgaataaatccatgtggagtagctcgagcggtatgtcagtcgtcataatattcttgtgtggtgggcaccaacttgctttcctgcttggcatgtgctacaaaccctgtctttctcaaaatgaacatttgttagtcccaaaatgtgttctcccttcagaagcttggaagattcttcatcccaacatgggctagtcggcgatgccagagccaacccatattagtcttagcaattaagcaagtatcgagttcagctctattaaaatcaactaagtatagctgaccctctaatactcccttaaatgctattgaatcatcacttcttctaaatacagtaacacctaaatcttgatttccatccccgaatgtgataactctttggggatcatcatttttctcgtaggaggagaacatccttttctcccatgtcatatggtttgtgcatctgctatcaataatccaacttgagctccaggatgcataaaccttaggtacccaaacacgagtcttggagcccttgtgtttgcccccaacatatttggcaactattttgcctgatttgttagtaagcgcataagaagcatcaaaagtcttaaatgaaacattaggttcatttgatgcagtaggagttatctttttagacattttaacataggtagaatgcctagagctagatgcctcattcttgtacataaaagcatgatgggaaacagaatgagacttcctagcatgacttctcctaatcttatgctcaggataaccagcaggatataaaatgtaaccctcgttatcctgagccttgggagccttacccctcatcactagatgtagtatacttggggtggttctagcttgtaccctctttttcttgccgtcctttgccatgtagcatttgtggccgacgtttgggaagagaagtcccttgttgacgatgatgtttgcggcgtcctcgtcggaggaggagtcccattcccaacacacgtgggcatcgtcgcccttcttcttgtagtatttattcttttccttcttcatccccttcttgtcgttatccctgtcactatcactagacatagggcatttagcgataaaatgtctgggcttaccacacttgtagcacaccctcttagagcgaggtttgtagtccttccccctcctttgcttgaggatttggcggaagctcctaatgatgagcgtcatttcctcattgtcgagcttggaggcgtcaatggggagcctacttgatgtagactcttctttcttatcctccgtcgctttgaatgcgatgggttgcacctcgggtgtggaggtgtcgccttgctccaagttgactatttgtttggagcctttgatcatcaattcaaagctcacaaactttcctataacttcctcgggagacattagcttatatctaggatcacctcgaattaattgaacttgcgtaggattacgaaaaatgagtgatcttagaataatttggttgaccaaggtcttgagccgattgtacattgcttgtggctcctctccttggttgaggacaaatcgaccgagctccccctcgatcgtctcccgcttggtggtcttggtcacctcatccccttcatgcgcagtctttagtacatcccaaatctttttggcactttttagccattgcaccttattatactcctctcgacacaaggaggcgaggagtatagtagttgcttgggagtcaaagtgccagatttgggcgatttcgttcgaatcataatcttcatcccctatgggtggtacctgcgctccaaactcaacaatgtcccatatgctagcgtggagtgaggttaggtgatgcctcaatttatcactccacatacaataatcttcaccataaaaaataggtggtttgcctaatgagatggaaagtaaaggagtgcgtttagaaatgcggggatagcgtaaggggatcttactaaacttcttgcgctcatggcgcttagaagtgacggacggagcgtcggagccgaaggtggagggcgacgaagaatcgatctcgtagtagaccactttcttcat

SEQ ID NO: 5080 - DNA, 3840 bp, Zea mays
  Clone ID: TF_ZM3644.C1.o16.fg
atgtcgggagatcacgccaagaaggagatggagaccggcgaaaagcccactataagccacgggagcacttcatcggaagagtcccgcaccaagaggaaggagaagaaggactcctccaaagggaaggagaagagatcttcttcacatcacaaagagaagaaggagaaatcctcttcccacaagccgcatcggagtggggacaagaaaaagaggatgaggaaggtggtctactacgagaccgattcttcatcggcatccacctccggctccgacgcggcgtccgtcacttctaagcgccaagagcgtaagaagtatagtaagattcccctacgctaccctcgcatttctaaacatacacctttactttccgtcccattaggcaaaccaccaacatttgatggtgaagattacgctaggtggagtgatttaatgcgatttcatctaacctcgctccacaaaagtatatgggatgttgttgagtttggtgcacaggtaccatccgtaggggatgaagactatgatgaggatgaagtggcccaaatcgagcacttcaactcccaagccacaaccatactccttgcctctctaagtagagaggaatataacaaggtgcaagggttgaagagtgcaaaggagatttgggacttactcaagaccgcgcacgagggtgatgaactcaccaagattaccaagcgggaaacgatcgagggggagctcggtcgcttccgtcttcgccaaggggaggagccacaagacatgtacaactggctcaaaaccttggtgaaccaagtgcgcaacctcgggagcaaaaagtgggatgaccacgaagtggttaaggttattctaagatctcttattttccttaaccctactcaagttcaattaattcgtggcaacccaagatatacactaatgactcccgaggaggtaatcgggaattttgtgagctttgagtatatgatcaagggctcgaagaagatcaacgagctagatgatccctccacatccgcggcacaaccggacgcatttaaggcgacggaggagaaggatgagtctacatcgagtagacaaccaatcgacacctcaaagctcgacaacgaggagatgacgcttgtcatcaaaagctttcggcaaatcctcaagcaaaggagggggaaggattacaagccccaatcaaagaaggtttgctacaagtgtggtaagcccgatcactttatagctaaatgtcctatttctagtgacagtgacaggggcgatgacaagaagggcagaagaaaggagaagaagagatactacaagaagaagggcggcgatgcccatgtttgtcgggagtgggactccgacgaaagctctagcgactcctccgacgacgaggacgccgccaacatcgccgtcaccaagggactcctcttccccaacgtcggccacaagtgtctcatggcaaaggatggcaaaagaaagaaggttaaatccaaatcatccactaaatatgagacttctagtgatgataatgctagtgatgaggaggataacttgcgtaccctttttgccaaccttaacatggaacaaaaagaaaaattaaatgaattaattagtgctattcatgaaaaggatgaccttttggattctcaagaggacttcctaattaaggaaaataagaaacatgttaaggttaaaaatgcttatgctctagaaatagaaaaatgtgagaaattatctagtgagctaagcacatgccatgacactattgccaaccttagaaatgaaaatgccaaattaattgctaaggttgattctcatgtttgcaatgtttcaacttccaatcctagagatgataatgttgatttacttgctaggattgatgaattgaacatttctcttgttagccttaggattgaaaatgagaaattgcttgctaaggctaaagattttgatgtttgcaatgttactatttctaaccttagaagtgaaaatgacatattgcatgctaaggttatagaattaaaatcttgcaaaccctctacatctatcgttgagcatgtatctatttgtactagatgtagagatgttgatgttaatgctattcttgatcacatggctttaattaaacaacaaaatgatcatatagcaaaattagatgctaaaattgtcgagcataacttagagaatgaaaaatttaaatttgctagaagtatgctctataatgggagacgccctggcatcaaggatggcattgacttccaaaggggagacaatgtcaaacttaatgcccctcctaaaagattgtctaattttgttaagggcaaggctcccatgcctcaggataacgagggttacattttgtaccctgccggttatcccgagagcaagattaggagaattcactctaggaagtctcactctggccctaaccatgcatttatgtataagggtgagacatctagttctaggcaaccaacccatgccaagttgcctaagaagaaaactcccagtgcatcaaatgaacatagcatttcatttaagacctttgatgcatcttatgttttgactaacaaatccggcaaaatagttgccaagtttgttgggggcaaacacaagggatcaaagacttgtgtttgggtacccaaagttcttgtttctaatgccaaaggacccaaaaccgtttgggtttatgcatccgggggctcaagttggatactcgacagcggatgcacaaaccatatgacaggggagaagaagatgttctcctcctacgagaaaaaccaggatccccaacgagctatcacattcggggatggaaatcaaggtgtcactgtctttagaagaagtgatgattcaatagcatttaagggtgtgttagagggtcagctatacttagaaaaatctcaaacccaagaaaccttaaagggattcttgagacgagctcaaaacgagttcggcttaaggatcaagaaaattagaagcgacaacgggacggagttcaagaactctcaaatcgaaggcttccttgaggaggagggcatcaagcatgagttctcttctccctacacgccacaacaaaatggtgtagtagagaggaagaatcgaactctattggacatggcaagaaccatgcttgatgagtacaagacttcggatcggttttgggccgaggcggtcaacaccgcttgctacgccatcaaccggttatatctacaccgaatcctcaagaagacatcttatgaactcctaaccggtaaaaagcccaatatttcatattttagagtctttggtagcaaatgttttattcttattaaaagaggtagaaaatctaaatttgctcctaagactgtagaaggctttttactaggacatgattcaaacacaagggcatatagagtctttaacaggtccactggacaagttgaagtttcttgtgacgttgtgtttgatgagactaacggctctcaaatagagcaagttgatcttgatgagataggtaatgaagaggctccatgcatcgcgctaaggaacatgtccattggggatgtgtgtcctaaggaatccgaagagcctccaaatgcacaaaatcaaccatcctcctccacgcaagcatctccatcgactcaaaatgaggatgaagctcaagttgatgaagtagaagatcaagcaaatgagccacctcaagatgacgacaatgatcaaaggggagatgcaaatgatcaagacaaggaggatgaagagcaaaggccgccacacccaagagtccaccaagcaattcaacgagatcaccccgtcgacaccatcctcggcgacattcataagggggtaactactagatctcgtgttgcacatttttga

SEQ ID NO: 5081 - DNA, 945 bp, Zea mays
  Clone ID: TF_ZM4612.C4.o4.fg
atggagaacttgagtcaaatgaccctgaccattgtgattggaaaaattgtggtcgatgatcttctctttaacactgaaggaaaatgcaaagaaagaaaggatgcttctcatgcggggagaagggccacttcagggacaactgtccaaacatgtccgaacccacaaaggggaggagcaaagccaaggcgcttacaagtgtcaaaacttgagataactcttcaaacgaagatgaacctccaaggacacgcaaccaccaatcctcatcacgcccatcacggtcattgcacaagtgccttatggcaagaggtaacaactaaaattgagcaactagagtctgatgttccatcctcagctaccgatgatggccttattaaaaataatgaaaaacttaaggctaagttagctagctctcaagaagcaattgaaaacttgctagagaaaatggaaattcttagcatacacaataatgaactaactactaagctagaaaagatcgatagcaccttagaagtatttttagttgaaatacctaaaattattgaaaaagatgcttctacttcttgctttgatttaattgatgattctaacccctgcaaccaagttcttgttgagaatgttgttatagaaacatgttcgaacgaggtttcaaaggaaaatgagcaattaaggcaagaagtggctcgccttggcaaggccttgtatggcaagaaaggcaaagccaaacaaatccaaactcctcagggtaacaccactgcaggagtgaacaagcctgtggagggaggaactgtgatttgtaggatatgccacaaggaagggcacaagttttatcaatgcaaggcgaagaccggggataagcaaaagcaaaagctcaagaaaaagtcaaacaacaaaatctccaacacctacatcaacaaggtggataaaaggctgctacaccatatttga

SEQ ID NO: 5082 - DNA, 1987 bp, Zea mays
  Clone ID: TF_ZM4913.C4.o2.fg
atggatcctaagggaaaggggatggtggtcaacaacaacgagaaggagtctatcttcaacgagccgaaggatgacaagcctaccgactcgggctcgagccacaagcgcaaagacgggaagaagaagaagacaaggcgcatcaaggagatcgtctactatgacagcgacgaatcttcctcttctcaaaaggacgacgactacgagaaaaagaaaacggtcaattcgaacttttcttttgattactctcgtattcctcaaagtacaaatgctcatttattatctattccacttgataaacctcctcattttgatggagaagactacggattttggagtcacaaaatgcgtagtcacttgttctctctccatcctagtatatgggagattgtagagagtggaatgcactttgatagtacggatagtcccatgttcattaatgagcaaattcataaaaatgcacaagctactactgttcttctagcttcattgtgcagggatgaataccacaaagtgagcggcttggataacgccaagcaaatttgggacaccctcaagatctctcatgaggggaatgacgtcacaatgctcaccaagatggagttggtggagggcgaactcgggagattcgctatgataaggggagaagagccaacccaaacgtacaaccgactcaagacccttgtcaacaagataagaagctatcgaagcacgcgatggacggaccacgacgtcgtccgcctaatgctaaggtcttttactgtccttgatcctcatcttgtaaacaatattcgtgagaatcctaggtacaccaagatgacgcccgaggagatacttggaaagttcgtgagtgggcgaatgatgatcaaggaagcaagatacgtggacaacgcattgaatggtccaatcaatgagcctcaacctcttgctctcaaggcaacaagaagcaaggagacgctacctagcaaggtagcacaaattgaggcggccagacttaattatgaagagatggctctcatcatcaagagattcaagacggcgctaaaaggtcgcaaggggcagccaagcaagaccaagacaaaggggaaacactcatgcttcaaatgtggtaagcttggtcattttattgctaactgtcccgataatgatagtgatcaggatcaagggaacaagagggagaagaagaagaactataagaaggcaaagggcgaggcgcatctaggcaaggagtgggattcgaattgctcctcttccgactccgataatgaaggactcgccgccaccgccttcaacaagtcatccctcttccccaacgagcgtcacacatgccttatggcaagggagaagaaggtatgtactcgaaactctacttatgcttcttcaagtgaggacgaatctagtgatgaggatgaaatagattattcatgtttatttaagggcctagatagaaccaaggtagataaaattaatgaattgattgatgccttgaatgataagaataggcttttagaaaagcaagaggatttgttgtatgaagaacatgacaaatttgtagaagcacaaaaatctcatgctctagaagttaaaagaaatgaaatgctttcttgtgaattatcttcttgccataagacaatttctaacttaaggagcattaatgatgatttgaatgcgaagttagaaatagctagtaaatcaacatgttgtggagaaattgttgcaacttgtaatagatgtaaagattttgacattgatgcttgtagtgaacacctagtttcaatttccaaacttaatgatgaattggctagtcttaatgctcaacttaagactagcaagagcgaatttgataggctaaaatttatgatggatgcctacacgattggtagacacccctcaattaaggatggacttggcttcaagagggaaaccaagaacttaacaagccataaggttcccatccccgccaaggagaaagggaaggctcctatggcaa

SEQ ID NO: 5083 - DNA, 1332 bp, Zea mays
  Clone ID: TF_ZM4986.C2.o5.fg
atggatcctaaggggaagggaatcgtgatcaacgacaaggagaaggagtccttcgtcaacgagccgaaggatgacaagcctactgactcggggtcgggccacaagcgtaaagatgggaagaagaagaagacaaggcgtatcaaggagatcgtctactacgacgatagcgatgagtcgacttcttcccaaaaggacgacgacaacgactacaggaagacggtcaattcgaacttttcatttgattattctcgtattccacatagttcgaattcgcatttgctttccattcctcttggcaaacctccacacttcgatggggaagactacggattttggagtcacaaaatgcgtagtcacttattctctctccatccaagcatggaagagtacaataaggtgagcggcctggacaacgccaagcagatatgggacaccctcaagatctctcacgaagggaacgacatcaccatgctcactaaaatggagttggtggagggcgagcttggacgattcgcaatgataaggggagaggagccaacccaaacttacaaccggctcaagacccttatcaacaaaataaggagctacggaagcacgcgatggacggaccacgacgtcgtccgcctaatgctaaggtcctttaccgttcttgatcctcatctcgtaaacaatattcgtgagaatcccaggtacacgatgatgacgcccgaggaggtactcggaaaattcgtaagcgggcggatgatgatcaaggaggcgagatacgtcgacgacgctctaaacggtccaatcaatgagcctcaacctcttgctctcaaggcaacaagaagcaaggaaatgctacctagcaaggtggcacaaattgaggcggtcggacttaatgatgaagagatggctctcatcatcaagagattcaagacggcactaaaaggccgcaaggggcaaccaagcaagaccaagacaaaggggaagcactcatgcttcaaatgtggtaagcttggtcattttattgctaactgtcccgacaatgatagtgatcaggatcaagggaacaagagggagaagaagaagaactataagaaggcaaagggcgaggcgcatctaggcaaggagtgggactcggactgctcctcttccgactccgacaatgaaggactcgccgccaccgccttcaacaagtcatccctcttcccaaacgagcgtcacacatgccttatggcaagggagaaaaaggtgagtactcgagactccacttatgcttcttctagtgataatgagtctagtgatgatgatgacatagactattcatgcttattcaagggcttagattga

SEQ ID NO: 5084 - DNA, 1761 bp, Zea mays
  unsure (1)..(1761): unsure at all n locations
  Clone ID: TF_ZmC29741_67
cgacnctagactgaactccaagtacacaaaacataaccaaataaagtttgccgtctcagatacacatttaaaagctagagaaccatgagagagagtagtagacagacacaattacatttgtaaatagacagaattattccatattacataaaatgactagcacacaggcaactatatgtagaactctaaacacaaaacacattagagattgaatgggcatttgatattgcaatcttgcctaaacctttgaccatgccttggatcccatcaccaaatatgatggaatcttgggaatccttattcttgacgtaggaggtgaacatctttttaatcggacccatcaggcctttgcagctttatgctgatgggggttaccagctgagaattaggcgtcttgagggtacccctaattatggtccccgacagtacccaactcttgttgggtcctacaaggttagtaacaatggccttagggacccaaatgcaagttttatctcccttgcattttgcccctaatttcctagcgatcactttcttatttttcctacaaattgcaaaagaagcattgcaagcatggtaaattgtagaaggttcattacttggttttctaggtacatgaacaacatttctcctaggcatatctctaccatgcacaaagaaagaacttgaagcaatcatggcatttgaatcataagcatcacaactcccattatgataagcatttctagaaaattttctatcataaataaatgcatgattcttttgactactattagccataggagccttccccttttccttgttgaaaattggagctctttggcttgttaagttcttggcttccctcttgaagccaagcccatccttaattgaggggtgtctaccaatagtgtaggcatcccttgcaaattttagtttgtcaaagtcattcttgctagtcttaagttgggcattaagactagccacttcaccatttaatttcgcaatagaagtaaggtgctcaacacatgcatcaacattaaagtccttacacctattgaaaatcacaacatgttctacacaagagcttgatttattagttatttctaacttagtatttaaatcatcattaatactctttaagctagaaatagattcatggcatgtagataattcacatgaaagcatttcatttcttttaacttctaaagcaagagaattttgcgcactaacaaatttatcatgctcttcatataaaagatcctcttgcttttctaacaatctatctttctcattcaaagcatcaattagttcattgatcttgtcgattttagttctatctaaacctttgaataagcttgcgtagtctacttcatcatcactaggctcatcatcacttgaagaagcatacgtaatagtacgtcgagtacttaccttcttctcctttgccatgagacaggtgtgatgctcgttggggaagagagacgatttgttgaaggctgtggcggcgagtccttcgtcgtcggagtcggacgaagaacaatccgagtcccattcttttccaaggtgtgcctcgctcttagccttcttgtaaaccttcttgttctctctcttcccattctttccttgttcctggtcactatcattatcgagacagttagcaataaagtgaccaatcttaccacacttgaagcaggagcgctttcccttcgtcttgctcttgttgggatgctccttgcgacctttgagcgccgtcttgaagcgcttgatgatgagggccat

SEQ ID NO: 5085 - DNA, 882 bp, Zea mays
  Clone ID: TF_ZM3651.C6.o3.fg
atggatcctaagggcaaggggattgtgatcaatgataaggagaaggagtcatttgtcaacgagcctaaagatgacaagcctaccgactcgggatcgggccacaaacgaagagatgggaagaagaagaagacgaggcgcatcaaggagatcgtctactacgacgacaacgacgagtcctcttcttcccaaaaggatgatgacaacaactacgagaaaaagaagacgattaactcaaacttctctttcgattattctcgtattccgcatagttcaaatgcacatttgctttccattccacttgggacgagtaccataaggtacacgaagatgacgcccgaggagatccttggaaagttcgtaagcgggcggatgatgatcaaggaggctagatacgtcgacgatgcattaaatggtccaatccaagagcctcaaactattgctctcaaggcaacaaggagcaaggaggcactacctagcaaggtggcgcaagttgaggcggccgggcttaatgttgaagagatgaccctcatcatcaagcggttcaagacggcgctaaagggtcgcaaggagcaccccaacaagaacaagacgaaggggaagcactcctgcttcaaatgtggtaagattggtcattttatcactaattgtcccgataatgatagtgaccaggaaaagaagagtggaaagtgggaaaagaagaagaactacaagaaggcgaagggcgaggcacatcttggaaaggagtgggattcggattgctcctcgttcgactccgacaacgaaggactcgccaccaccaccttcaataagtcatccctcttccccaacaagcatcacacttgcctcatggcaagggaaaagaaggtgttaatgatgatttaa

SEQ ID NO: 5086 - DNA, 4986 bp, Zea mays
  Clone ID: TF_ZM4412.C1.o7.fg
atggatcctaaggggaagggaatcgtgatcaacgacaaggagaaggagtccttcgtcaacgagccaaaggatgacaagcctactgactcgggctcgggccacaagcgcaaagatgggaagaagaagaagacaaggcgcatcaaggagatcgtctactacaacgatagcgatgagtctacctcttcccaaaaggacgatgacaacgactacaggaagacggtcaattcgaacttttcatttgattattctcgtattccacatagttcgaattcgcatttgctttccattcctcttggcaaacctccacacttcgatggggaagactacggattttggagtcacaaaatgcgtagtcacttattctctctccatccaagcatatgggagattgtagaaaatggaatgaaatttgatagctcggatagccctatgcttataaatgaacaaatccatagaaatgcacaagctactactgttctattagcatctttgtgcagggaagagtacaataaggtgagcggcttggacaacgccaagcagatatgggacaccctcaagatctctcacgaggggaacgacatcaccatgctcactaaaatggagttggtggagggcgagcttggacgattcgcaatgatgaggggagaggagccaacccaaacttacaaccggctcaagacccttatcaacaaaataaggagctacggaagcactcgatggacggaccacgacgtcgttcgcctaatgctaaggtcctttaccgttcttgatcctcatctcgtaaacaatattcgtgagaatcccaggtacacgatgatgacgcccgaggaggtatacgggaaattcgtaagcgggcggatgatgatcaaggaggcgagatacgtcgtcgacgctctaaacggtccaatcaatgagcctcaacctcttgctctcaaggcaacaagaagcaaggaaacactacctagcaaggtggcacaaattgaggcggtcggacttaatgatgaagagatggctctcatcatcaagagattcaagacggcactaaaaggccgcaaggggcaaccaagcaagaccaagacaaaggggaaacgctcatgcttcaagtgtggtaagcttgatcattttattgctaactgtcccgacaatgatagtgatcaggatcaagggaacaagagggagaagaagaaaaactataagaaggcaaagggcgaggcgcatctaggcaaggagtgggactcggactgctcctcttccgactccgacaatgaaggactcgccgccaccgccttcaacaagtcatccctcttccccaacgagcatcacacatgccttatggcaagggagaagaaggtgagtactcaagactccacttatgcttcttctagtgataatgagtctagtgatgatgatgacatagactattcatgcttgttcaagggcttagatagatctaagatagataaaattaatgaattgattgatgccttgaatgataagaataggcttttagaaaagcaagaggatttgttgtatgaagaacatgacaaatttgtagaagcacaaaaatcacttgcattagagattaagagaaatgaaatgctttcttttgaactatctacttgtcatgaaaccatttctactttaaaaagtgtcaacaatgatttaaatgctaaattagaagcagcaaataaatctaattcttatgtagaacatgttgtaatttgtactaggtgtaaagattttgacattgatgcttgtagtaaacacctagtttcaatttccaagcttaatgatgagttggctagtcttaatgctcaacttaagactagcaagaatgatttcgataagctaaaatttgcaagggatgcctacacgattggtagacacccctcaattaaggatggacttggcttcaagagggaagccaagaacttaacaagccataaggctcctatctccgccaaggagaaagggaaggctcctatggctagtagtactaaaaggaaccatgcttttatgtatcatgataggagacaaactagaaatgcttataggagttataatgcttatgatgattttgactctcatgccatgtttgcttctagttcttcctacatgcatggtagaaatatgtctaggagaaatgctattcatcatgtgcctagaaagaatattattcatactcctaggaaagtagtgaatgaaccctctacaatttattgtgctttaaatgcttcctttgctatttgtagaaaggataggaaaattgttgccaggaagttaggggcaaaatgcaagggagacaaaacttgcatttgggtccctaaggatatttgcactaaccttgtaggacccaacatgagttgggtttatgcattcgggggttcaagctggattattgatagcggatgcacaaaccatatgacgggggagaagaagatgttcacctcctacgtcaagaataaggattcccaagattcaattatattcggtgatgggaatcaaggcaaggataagtctgaaacccaagggaccctcaagcgcttcctcaggagagctcaaaatgagtttgagctcaaggtgaagaagataaggagcgacaacgggtccgagttcaagaaccttcaagtaggggagttccttgaggaggaagggatcaagcacgagttctccgctccctacacaccacagcaaaatggtgtggtagagaggaagaacaggacactaatcgatatggcgaggacgatgcttggagaattcaagacccccgagtgtttctggtcggaaaccgtgaacacggcttgccacgccatcaacagggtctaccttcatcgcctcctcaagaagacttcgtatgagctactaactggtaacaaacccaatgtatcttactttcgtgtatttgggagcaagtgctacattctagtaaagaagggtagaaattctaagtttgctcccaaagctgtagaagggtttttgttaggttatgactcaaatacaaaggcgtatagagtcttcaacaaatcatcgggtttggttgaagtctctagcgacgttgtatttgatgagactaatggctctccaagagagcaagttgttgatcttgatgatgtagatgaagaagacgttccaacggccgctatgcgcaccatggcgattggtgatgtgcgaccacaggaacaattggagcaagatcaaccttcttcctcaacaatgatgcatcccccaactcaaaacgatgaacaggttcatcaagaggagtgtgatcaagggggagcacaagatgatcatgtgatggaggaagaagcacaaccggcacctccaacccaagttcgagcgatgattcaaagggatcatcccgtcgaccaaattctgggtgatattagcaagggagtaactactcgatctcgattagttaatttttgtgagcattactcctttgtctcttctattgagcctttcaaggtagaagaggccttgctagatccggactgggtgttagccatgcaggaggaactcaacaacttcaagcgcaatgaagtttggacactggtgcctcgtcccaagcaaaacgttgtgggaaccaagtgggtattccgcaacaaacaggacgagcacggggtggtgacgaggaacaaggctcgacttgtggcaaaaggttatgcccaagtcgcaggtttggactttgaggagacttttgctcctgtggctaggctagaatcaattcgtatcttgctagcatatgccgctcaccattctttcaggttgttccaaatggatgtgaagagcgccttcctcaacgggccaatcaaggaggaggtgtacgtggagcaaccccctggcttcgaggatgaacggtaccccgaccacgtgtgtaagctctctaaggcactctatggacttaagcaagccccaagagcatggtatgaatgccttagagactttctaattgttaatgctttcaaggttgggaaagccgatccaactctctttactaagacatgtgatggtgatttgtttgtgtgccaaatttatgtcgatgacataatatttggttctactaaccaaaagtcttgtgaagagtttagcagggtgatgacgcagaaattcgagatgtcgatgatgggagagttgaactacttccttgggttccaagtgaagcaactcaaggacgacaccttcatctcccaaacgaagtacacgcaagatctgctaaagcggtttgggatgaaggatgccaagcccgcaaagactccgatgggaaccgacggacacaccgacctcaacaaaggaggtaagtccgttgatcaaaaagcataccggtcaatgatagggtctttactttatttatgtgctagtagaccggatattatgcttagcgtatgcatgtgtgctagatttcaatccgatcctaaggagtgtcacttagtggcagtgaagcgaattctaagatatttggttgctacgccttgtttcgggctctggtatccaaaagggtctacctttgacttggttggatactcagattccgactatgctggatgtaaggtcgataggaagagtacatcagggacgtgccaattcttaggaaggtccctggtgtcgtggaactctaagaaacaaacctccgttgccctatccaccgctgaggccgagtatgttgccgcaggacagtgttgcgcgcaactactttggatgaggcaaaccctcagggactttggctacaatctgagcaaagtcccactcctatgtgataatgagagtgctatccgcatggcggaaaatcctgttgaacacagccgcacaaagcacattgacatccggcatcactttttgagagaccaccagcaaaagggagatatcgaagtgtttcatgttagcaccgagaaccagctagccgatatcttcactaagcctctagatgagaagactttttgcaggttgcgtagtgagctaaatgtcttagattcgcggaacctggattga

SEQ ID NO: 5087 - DNA, 4077 bp, Zea mays
  Clone ID: TF_ZM4640.C8.o1.fg
atgacttctcatggatcctcagacgaagggaatgcacagtcccacacggacggacttgcacgagagggtttccgctgtatcttgtgggaggtacttcagggagcaggttacatgacacctcccctgtacgcggtgcagcagttagagaagcaccgagtgccccgctgtagggtgaggatgaccctggagcctcatcccctgcagccaggctggcgttcgctggactttgaatgttttgggtaccgggctgaggatactatcgaggcgatcgctcttcacggactgaccactttctgcagattccaccccttggagctgtccactcaccccattggcttgttcctcactgagaaggaggacgacccaatgtggaaggaccgagtggagcatgccaaggacatctgggctatctacccatgtcagactgctcacttaacggtgcggtgcatgaatgccctgtatcgtctgcaagtgatgcgtggagaggcaatgtcccatctgatggcattgttagaggcaaccaaaattaccttggataatagagaggaacttgtggttgacttgtccactgagatggtggaaaaggacttacaggtggagcaactgtcaaatgagatccaagagcttgaggaactagtggggacgagggagaacacccttgaggagctgatggctcaacagaatgagatcttgaggcagctagctcagcgtcagccaccacctcagcactatggtggtggtgatcatcagcgtcaccccgcggcagccacctatcaggagttcctcagtacccagccaccattgttcaccagggcagaggacccccttgatgcggatgtatggttgagagtagtggaatccaaattcccgctactccatggagtttgttcagaggtcactaagccagaggaccgagaggtggaatggagagagttcaaggcagctttcagggggcaccatataccagcgggcattatggaccgcaagctcaacgagtttctggcactcactcaatggaaccggacagtgttacagtattctcaggccttcaatgatctgtgccagtatgccggatatcacgcagacacggatgagaagaagtgggacaggttcaggagggggctcagcactaagctccgtgaccgtctcaacacagtcagggccaacagttataatgagttagtcaatatggccatttctcaggaggattgtatcacagctcgtcaggcagaaaagaagaggaagtcccctgtggaaggaccttcagctcagccacaacacttcaggatcgtgtctgatactcagaacagaggacccaagcagcagcaaggacgttgggtgatccgcccacagcagcagcagcagtaccgtcaggccaatgacaacatgtgtttcacttgtggtaacactggacattatgccaagaattgccccatgaaccagcagaggcagaggcagaatgccaaccagaatcaaggcaagagacaaaaggttcaagtgaggcaaggcagattgaacttcaccaccatggctgacattccagagggagcacccgtcatgactggtatcttttcagtttcgaattatcctgctattattctttttgattctggtgcatcacatagttttatcagtgccaaatgtcagttacctttccatcataccaatgggggtattacaatttcaacaccaggaggcagggttgccacctaccaaatcaacaagaatgtgcctataaagtttggtagtttgataatcaaaacgaacctcctcattttgggtttgaatagtgtggatatcatattgggaactgactggttaaccaaacatcaggccacgatggatactgcagctagggccattgaggtgcactcaccgacttgtggtgaaaccacattatatttgcccaaccagggttgtacccgttcttgtgccttcgttatgatagagtccccagtggaaaggatcccattggtctgtgactacccagatgtttttccggatgaattgccagggatgccacctgacagagacattgagttcgcaattgaattgcaaaccggaactgctcctacatccaagagaccctataggatgcctccagcagaattggcagaattgaagaagcaactgcaagagttgttggacaaggggttcattcgcccaagtacttcaccttggggatgtccggccctatttgtaaagaagaaggatgaaagtctgagaatgggtgtcgactaccgccctctcaatgcggtgaccatcaagaacaaatacccactgccccacattgatgttttatttgatcagttgctaagagaaattaaattcttgggtcacacaatttctcaggatgggatatcagttgatcctgagaaggtgcaagaggtaatgtattggaaacctcctaccacagtgagacagattcggagttttctgggattggcagggtattatcgacgattcattccggatttctccagaattgccaagccaatgactgaactattgaagaagggagtcaagtataattggagccagaagtgtgaagatgcctttcatacactaaggcagcacttgacaacagccccagtgctagctcaacctgacaacaccaagccctttgaagtgtattgcgatgcttctggtacgggactgggatgtgtcttaatgcaagataacagagtaattgcttatgcctcccaagcacttagaccccatgagcagaactaccctacacatgatctggagttagcagctgtggttcatgctctcaagatatggagacatttcttgatgggagctcactgtaacatttacactgatcataagagtctcaaataccttttcactcaggcagaccttaatatgaggcagagaagatggttagagttaatcaaggactatgatttggaggtgcattaccatcctggcaaagccaatgttgtagcagatgccttgagcagaaaggcccagtgcaattgtgctttaaattatatctcggtggagcccacaatgcaagagcaaatagtcagggcacagattgaagacaagggtgttcaggtcattaaggaaatgatcaagcagaaagcagaaaaatacaaatgcttccggcaggacagcaaaggaatcctatggtttggagatcgattggttgttcccaaggaccctgagctcagaaagaagatattggatgaggctcacctttcaaaattctccatgcacccaggcagcaataagatgtatcatgatctcagatccttatactggtggaccagaatgaagagggaaattgccaagtatatatccgaatgtgacacctgccagagaattaaagtcattcatttgaaggtagcaggccccctgcaaccccttcccataccatcttggaaatgggaagacatttgcatagatttcatcgtgggattgcccaatacctcccgacaccatgattctatttgggttattgtggatagattgaccaagaccgctcatttcttgccagtgcataccacccacaagacagagaaatatgcagaaatctatgttgatccgatagtgcgtttgcatggtattccaaagaccattgtatatgacagaggagcactgtttgtggcacgcttttgggagcagctacaagaatcacttgggacccatgcaataaggagctccgcatatcatccgcagacagatggccagacagaaagagtgaatcaaatcctcgaagacatgttgcgagcctgtgtgctacactatggtaaaaattgggacaagtgtctttctttggcagagttctcctataataacagctaccagtccagtctaaagatggcgccttttgaggccttatatgggagaaggtgtaggacaccgctcaattggtctcaagcaggagagagggaaatatttggaccagacttggtacttgaagcagaggaaaaggtcagagtcattaagaagaacctagaagctgctcaggccaggcagaagagctatcatgataagaggcggaagcctctacagtttgaagtgggagatcatgtttatcttaaggtgtcacccaccaagggtgtctag

SEQ ID NO: 5088 - DNA, 4557 bp, Zea mays
  Clone ID: TF_ZM4871.C2.o15.fg
atggatcctaagggcaaggggattgtgatcaatgataaggagaaggagtcctttgtcaacgagccgaaagatgacaagcctaccgactcgggctcgggccacaaacgaagagatgggaagaagaagaagacgaggcgcatcaaggagatcgtctactacgacgacagtgacgagtcctcttcttcccaaaaggacaacgacgacaacgactacgacaaacgaaagacgatggagttggtggagggagagcttggaagatttgcaatgataaggggagaggagccaacccaaacaaataaccggctcaagaccctcatcaacaagataaggagctacggaagcacgcgatggacggaccacgacatcgttcgcctattgctaaggtcttttactgtacttgatccacatttggtgaacaatatccgtgaaaatcctaggtacaccaagatgtcgcccgaagaagttctttggaaattcgtaagcgggcgaatgatgatcaaggaggcgagatatgtcgacgacgcgttgaacggtccaatccatgagcctcaacccattgctctcaaggcaacaaggagcaaggagtcgctacctagcaaggtggcacaaattgaggcgacagggctcaatgatgaagagatggccctcatcatcaagcgcttcaagacggcgctaaaggatcgcaagggacagccaagcaagaccaagacaaaggggaagcgttcatgcttcaaatgcggtaagattggtcattttattgctaactgcctcgataatgaaagtgaccaggaacaagggagcaagagggagaagaaggcatacaagaaagctaagggcaaggcacaccttggaaaggagtgggactcggattgttcgtcatccgactccaaaaatgaaggactcgccgccaccgccttcaacaagtcctccctcttcccaaacgagcgacacacatgcctcatggtaaaggagaagaaggtatgtactcgagacagtactacttatgattcttctagtgatgaagaaatagattactctagtttgttcaagggattggatagaactaaagtagataagattaatgaattgattgatgccttgaatgaaaaggataaactcttagaaaaacaagaggaccttttatatgaagagcatgacaaatttgtagaggcacaaaaatcttatgctttagaagttaaaagaaatgaaatgctttcttgtgaactatcttcttgccatgagacaatttctagcttaaggagcataaatgatggtttgaatgctaagttagagatagcaagtaaatctaactcttgtgtagaacatgttatgatttgcaataggtgtaaagattttgacattgatgcttgtagtgaacacatagcttctattgcaaaattaagtgatgaagtagctagtcttaatgcccaacttaagactagcaaaagcgaatttgataagttaaaatttgcaagggatgcctacactattggtagacacccctcaattaaggatggacttggcttcaagagagaagccaagaacttaacaagccataaggctcccatccccgccaaggagaaagggaaggcccctatggctagtagtcctaaaaagaaccatgcttttatgtaccatgatagaagacagtcttataggagttgtaatgcttataatgcttttgactctcatgccatgtttgcttctagttcttcctatatgcatggtagagatatgtctagaagatacgttgttcatatgcctaggagaaatgttgttaatgttcctaggaaagttaatgaaccctctacaatatatcatgctttaaatgcttcctttgctatttgtagaaaggataggaagatagttgctagaaaattaggggcaaaatgcaagggagacaaaacttgcatttgggtccctaaggatatttgtgctaaccttgtaggacccaacatgagttgggtttatgcatccgggggttcaagctggattatcgacagcggatgcacaaaccatatgacgggggagaagaagatgttcacctcctacgtcaaaaacaaggattcccaagattcaataatattcggtgatgggaaccaaggcaaggataaatctgaaacccaagggaccctcaagcgctttctaaggagagctcaaaacgagtttgagctcaaggtgaagaagataaggagtgacaatgggtccgagttcaagaaccttcaagtggaggagtaccttgaggaggaagggatcaagcacgagttctccgctccctacacaccacaacaaaatggtgtggtagagaggaagaacaggacgctaatcgatatggcgagaacgatgcttggagagttcaagacccccgagcgtttttggtcggaagccgtgaacacggcttgccacgccatcaaccgggtctatcttcaccgcctcctcaagaagacttcgtatgagcttctaaccggtaacaaacccaatgtatcttactttcgtgtatttgggagcaaatgctacattctagtgaagaagggtagaaattctaagtttgctcccaaagctgtagaagggtttttgttaggttatgattcaaatacaaaggcgtatagggtcttcaacaaatcatcgggtttggttgaagtctctagcgacgttgtatttgacgagactaatggctctccaagagagcaagttgttgatcttgatgatgtagatgaagaagatgttccgacggccgctatacgaaccatggtgattggtgatgtacgaccacaggaacaaaaggagcaagatcaaccttcttcctcaacaatggtgcatcccccaactcaagaagatgaacaggtttatcaaaaggaggcgtatgatcaagggggagcacaagatgatcaagtaatggaggaagaagcacaatcggcacctccaactcaagtccgagcgatgattcaaagggatcatcccgtcgaccagattttgggtgacataagcaagggagtaactactcggtctcgattagttaatttttgtaagcattactcctttgtctcttccattgagcctttcagggtagaggaggccttgctagatccggactgggtgttggccatgcaagaggagctcaacaacttcaagaggaatgaagtttggacactggtgcctcgtcctaagcaaaatgttgtgggaaccaagtgggtattccgcaacaaacaagacgagcacggagtggtgacgaggaacaaggctcgacttgtggcaaaaggttatgcccaagtcgcaggtttggactttgaggagacttttgctcctgtggctaggctagagtccattcgtattttgctagcatatgccgctcaccattctttcaggttgttccaaatggatgtgaagagcgctttcctcaacgggccaatcaaggaggaggtgtacgtagagcaaccccctggcttcgaggatgaacggtaccccgaccacgtgtgtaagctctctaaggtgctctatggacttaagcaagccccaagagcatggtatgaatgccttagagactttctaattgctaatgctttcaaggttgggaaagccgatccaactcttttcactaagacttgtgacggtgatctttttgtgtggcaaatttatgtcgatgacataatatttggttctactaataaaaagtcttgtgaagagtttagcagggtgatgacgcagaaattcgagatgtcaatgatgggcgagttgaactacttccttgggttccaagtgaagcaactcaaggacgacaccttcatctctcaaacgaagtacacgcaagacttgctgaagcggtttgggatgaaggatgccaagcccgcaaaaactccgatggggaccgacggacacaccgatctcaacaaaggaggtaagtccgttgatcaaaaggcataccagtcaatgatagggtcattactttacttgtgtgctagtagaccggatattatgcttagcgtatgcatgtgtgctagatttcaatccgatcctaaggagtgtcacttagtggcagtgaagcgaatccttagatatttagttgctacgccttgctttgacctgattggatattcagattccgactatgctggatgtaaggtcgataggaagagtacatcggggacgtgccaattcttaggaaggtccctggtgtcatggaattctaagaaacaaacctctgttgccctatccaccgctgaggccgagtatgttgccgcaggaaagtgttgcgcacaactactttggatgaggcaaaccctccaggactttggctacaatctgagcaaagtcccactcctatgtgataatgagagtgccatccgcatggcgggaaatcctgttgaacacaaccgcacaaagcacatagacatccgacatcactttttgagagaccaccagcaaaagggagatatcgaagtgtttcatgttagcaccgagaaccagctagccgatatctttaccaagcctctagatgagaagaccttttgcaggttgcgtagtgagctaaatgtcttagattcgcggaacttggattga

SEQ ID NO: 5089 - DNA, 4893 bp, Zea mays
  Clone ID: TF_ZM4926.C1.o9.fg
atggatcctaagggcaaggggattgtgatcaatgataaggaaaaggagtctttcgtcaacgagcccaaagatgacaagcctaccgactcaggctcgggccacaaacgtagagatgggaagaagaagaagacaatgcgcatcaatgagatcgtctactacgacgacagcgatgggtcctcttcttcccaaaaggacaacgacgacaacgactacgacaaaagaaagacgattcataaaaatgcacaagctactactgtgttgttagcctctttgtgcagggacgagtatcataaggtgagcggcttggacaatgccaagcagatctgggacaccctcaagatctctcatgaggggaacgacgtcaccttgctcaccaagatggagttagtagagggcgaactcgggagatttgcaataataaggggcgaggagccaacccaaacatacaaccggctcaagaccctcatcaacaaaataaggagctacagaagcacacaatggacggaccacgacgtcgttcgcctaatgctaaggtcatttactgtacttgatccacatctggtgaacaatattcgtgaaaatcctaggtacaccaagatgtcacccgaagaagttcttgggaagttcgtgaacgggcgaatgatgatcaaggaggcaagatacgtggacgacgcattgaatggtccaatcaatgagcctcaaccctttgctctcaaggcaacaagaagcaaggaggcgctacctagcaaggtggcacaagttgaggcggcagggctaaatgatgaagaaatggctctcatcatcaagcgcttcaagacgacgctaaagggtcacaaggggcagctaagcaagaccaagacaaaggggaagcgctcatgcttcaagtgtggtaagattggtcattttatcgctaactgcctcgataatgatagtgaccaggaacaagggaacaagagggagaagaagaaggcatacaaaaaggctaagggcgaggcacaccttggaaaggagtgggactcggattgttcgtcatccgactccgacaatgaaggactcgccgccaccaccttcaacaagtcatccctcttccccaacgagcatcacacatgcctcatggcgaaggagaagaaggtatgtactcgaaacaatgccacttatgattcttctagtgatgaagaaatagattactctagtctgttcaagggattggatagaactaaaatagataagattaatgaattgattgatgccttgaatgaaaaggataaacttttacagaaacaagaggaccttttatatgaagagcatgacaaatttgtagaggcacaaaaatctcatgctttagaagttaagagaaatgaaatgctttcttgtgaactatcttcttgccatgagacaatttctagcttaaggagcataaatgatgatttaaatgctaagttagttatagctagtaaatctaactcttgtgtagaacatgttatgatttgcaataggtgtaaagattttgacattgatgcttgtagtgaacacctagtttcaatttccaaattgaatgatgaattagctagtcttaatgcccaacttaagactagcaagaatgaatttgacaagctaaaatttgcaagggatgcctacacgattggtagacacccctcaattaaggatggacttggcttcaagagggaagccaaggacttaacaagctataaggctcccatctccgccaaggagaaagggaaggctcctatggctagtagtgcaaaaaggaaccatgcttttatgtaccatgatagaagacagtcttataggagttgtaatgctaatgatgcttttgtctctcatgccatgtttgcttctagttcttcctataggcatgatagagatatgtctaggagaaatgctgttcatatgcctaggagaaatgttgttaatattcctaggaaagtcaatgaaccttctacaatatatcatgttttaaatgcttcctttgctatctatagaaaggataggaagatagttgctagaaaattaggggcaaaatgcaagggagacaagacttgcatttgggtccctaaggatatttgtactaaccttgtaggacccaacaagagttgggtttatgcatccgggggttcaagctggattatcgacagcggatgcacaaaccatatgacgggggagaagaagatgttcacctcctacgtcaaaaacaaggattcccaagacttaataatattcggtgatgggaatcaaggcaaggtaaaagggttagatgtgtctgtctttagaagaagtgatggttcattagcttttaagggtgtattagacggcaaactttatttagtcgattttgcaaaagaggaggccggtctagatgcatgcttaattgctaagactagcatgggctggctgtggcatcgccgcttagcacatgtggggatgaagaaccttcacaagcttctaaagggagaacacgtgataggtctaaccaatgttactttcgaaaaagatagaccttgtgcagcttgtcaagcaggtaaacaagtgggaggagcgcatcatagcaagaatgtgatgaccacatcaagacctctggagccgctacatatggacctcttcggacccgtcgcctatctaagcataggaggaagtaagtatggactagttattgttgatgacttttcccgcttcacttgggtattctttttgcaggataaaactgaaacccaagggaccctcaagcgcttcctaaggagagctcaaaacgagtttgagctcaatgtgaagaagataaggagcgacaatgggtccgagttcaagaaccttcaagtggaggaatatcttgaggaggaagggatcaagcacaagttctccgctccctgcacaccacagcaaaatggtgtggtagaaaggaagaacaggacacttatagacatggcgaggacgatgcttggagagttcaagacccccgagtgcttttggtcggaagccgtgaacacggcttgccacgccatcaaccgggtctaccttcatcgcctcctcaagaagacttcgtatgagctactaaccggtaacaaacccaatgtttcgtattttcgagtttttgggagtaaatgctacattctagtgaagaagggtagaaattccaaatttgctcccaaagccgtagaagggtttttgttaggttatgactcaaatacaaaggcgtatagagtcttcaacaaatcatcgggtttggttgaagtctctagcgacgttgtatttgatgaaactaatggctctccaagagagcaagttgttgattttgatgatgtagatgaagaagacgttccaacggccgcaatacgcaccatggcgattggagatgtgcggccacaggaacaaggtgaacgagatcaaccttcttcctcaacaatggtgcatcccccaactcaagatgatgaacaggaggtgtgtgatcaagggggagcacaagatgatcatgtaatcgaggaagaagcgcaaccagcacctccaacccaagttcgagcaatgattcaaagggatcatcccatcgaccagatcttgggtgacattagcaagggagtaattactcgatctcgattagttaatttttgtgagcattactcctttgtctcttctattgagcctttcagggtagaagaggccttgctagatccggactgggtgttggccatgcaggaggagctcaacaacttcaaaagaaatgaagtatggacactggtgcctcgtcccaagcaaaatgttgtgggaaccaattgggtgttccgcaacaaacaagacaagcacggggtggtgacaaggaacaaggcacgacttgtggcaaaaggttatgcccaagtcgcaggtttggactttgaggagacttttgctcctgtggctaggctagagtccattcgtattttgctagcatatgccgctcaccattctttcaggttgttccaaatggatgtgaagagcgctttcctcaacgggccaatcaaggaggaggtgtacgtggagcaaccccctggctttgaggatgaacggtaccccgaccacgtgtgtaagctctctaaggctctctatggacttaagcaagccccaagagcatggtatgaatgccttagagactttctaattgctaatgctttcaaggtcgggaaagccgatccaactcttttcactaagacatgtgatggtgatctttttgtatgccaaatttatgtcgatgacataatatttggttctactaaccaaaagtcttgtgaagagtttagcagggtaatgactcaaaagttcgagatgtcgatgatgggcgagttaagctacttccttgggttccaagtgaggcaactcaaggatgggaccttcatctcccaaacgaagtacacacaagacttgatcaagcggtttgggatgaaggacgccaagcccgcaaagactccaatgggaaccgacggacacaccgacctcaacaaaggaggtaagtccgttgatcaaaaggcatataggtctatgatagggtctttactttacttatatgctagtagaccggatattatgcttagcgtatgcatgtgtgctagatttcaatccgatcctaaggagtgtcacttagtggctgtgaagcgaattcttagatatttagtcgctacgccttgcttcgggatctggtatccaaaggggtctacctttgacttgattggatattcagactccgactatgctggatgtaaggtcgataggaagagtacatcggggacgtgccaattcttaggaaggtccctggtgtcatggagttctaagaaacaaatttcgttgctctatccaccgctgaggccgagtacgttgccgcaggatagtgttgcgtgcaactactttggatga

SEQ ID NO: 5090 - DNA, 1908 bp, Zea mays
  Clone ID: TF_ZM4991.C3.o7.fg
atggatcctaaggggaagggaatcgtgatcaacgataaggagaaggagtccttcgtcaacgagccgaaggatgacaagcctaccgactcgggctcgggccacaaacgcaaagatgggaagaagaagaagacgagacgcatcaaggagatcgtctactacgacgacaacgatgagtccacttcttcccaaaaggacaacgacgacaacgactacgacaaacgaaagacggttaactcaaacttttctttcgattattcgcgtatcccgcatagctcaaatgcacatttgctttccatccctcttggcaaacctccacactttgatggggaggactacggattttggagtcacaaaatgcgtagtcacttgttctctctccatccaagcatatggttgattgttgagaatggaatgaaatttgatagctcggatagtcctacatttattaatgaacagattcataaaaatgcacaagctactactgtgttgttagcctccttgtgcagggacgagtaccataagatggagttggtggagggcgagcttggaagattcgcgatgataaggggcgaggagccaacccaaacatacaaccggctcaagacccttatcaacaaaataaggagctacggaagcacgcgatggacggaccacgacgtcgtccacctaatgctaaggtcctttactgtacttgatccacatttggtgaacaatattcgtgaaaatcctaggtacaccaagatgtcgcccgaagaagtccttggaaagttcataagcgggcgaatgatgatcaaggaggcaaggtacgtggacgacgcgttgaacggtccaatccatgagcctcaacccattgctctcaaggcaacgaggagcaaggaggtgctacctagcaaggtggcgcaagttgaggcggccgggctcaatgatgaagagatggccctcatcatcaagcgcttcaagacggcgctaaagggtcgcaagggacagccaagcaagaccaagacaaaggggaagcgctcatgcttcaaatgtggtaagattggtcattttattgctaactgtctcgataatgatagtgaccaggaacaagggggaaagagggagaagaagaaggcatacaagaaggctaagggcgaggcacaccttggcaaggagtgggactcggattgttcatcatccgactccgaaaatgaaggactcgccgccaccgccttcaacaagtcatccctcttccccaacgagcgtcacacatgcctcatggcaaaggagaagaaggtatgtactcgagacagtactacttatgattcttctagtgatgatgaatctagtgatgaacaaatagattactctagtttattcaagggattggatagaactaaaatagataagattaacgaattgattgatgccttgaatgaaaaggatagacttttagaaaaacaagaggaccttttatatgaagagcatgataaatttgttagtgcacaaaattcacttgctctagaagttaaaaggaatgaaatgctttctagtgaagtgtctacatgtcatgactctatctctagtttaaagagaattaacaatgatttaaatgctaaactagaagtagcaaataaatctaactcttgtgtagaacatgttatgatttgcactaggtgtaaagattttgacattgatgcttgtagtgaacacctagtttgcatttctaaattaaatgatgaagtggctagtcttaatgcccaagttaagactagcaagagtgaatttgataagctaaaatttgcaagggatgcctacacgattggtagacacccctcaattaaggatggacttggcttcaagagggaagccaagaacttgacaagccataaggctcccatctcagccagggaaggcccctatggctag

SEQ ID NO: 5091 - DNA, 4194 bp, Zea mays
  Clone ID: TF_ZmC951_407
tcaatcaaagttccgagaatcaagtatatttagctcattcctaagtttgctaaaggttttctcatctaatgggttggtaaagatattggctaattgttctttggtgctaacataagctatctcgatatcctccctttgttggtgatccctcaaaaagtgataccgaatgtctatgtgcttagtgcggttgtgttcaacgggattatccgccatgcggattgcactctcattatcacataggagaaggactttgctcaatttgtagccataatccctgagggtttgccccatccaaagtaattgcgcacaacaatggcctgcggcaatgtactcagcttcggcagtaaaaagagctactgagttttgtttctttgaagcccaagacaccagggatcttcccagaaactgacaagtcccggatgtgctcttcttatcaattttacaccctctcgtatcgaggtcgagatgcccattagttcccatgggtgtcttgatgggcttagcatccttcattccaaacttgttgagtatgtcttgaatatactttgtttggcagatgaaggtgccctcttggagttgcttgacttgaaatcctagaaagtacttcaactcccccatcatagacatctcgaatttctgaatcatgatcctactaaactcttcacaagtagatttgttagtagacccaaatatgatatcatcaacataaatttggcatacaaacaaatcttttgcaatgtttttagtaaagataataggatcggctttaccgactttgaagctattagtgataaggaaatctcttaggcattcataccatgctcttggggcttgcttgagcccataaagcgcctttgagagtttgtaaacatagttagggtactcactatcttcaaagccgggaggttgctcaacatagacctcttccttgattggtccattgaggaaggcacttttcacgtccatttggtaaaacttaaagccatggtaagtagcataggcaagtaaaatgcgaattgactcaagcctagctacgggtgcataggtttcaccgaaatccaaacctttgacttgtgaatatcccttggctacaagtcgggctttgttccttgtcaccacaccatgctcatcttgtttgttgcggaagacccatttggttcctacaacattttggttaggatgtggagctaaatgccatacctcattcctcgtgaagttgttgagttcctcttgcatcgccaacacccaatctgaatcccttaatgcgtcttccaccctgtatggctcaatagaagacacaaaggagtaatgttcacaaaaatgagcaacacgagatcgagtggttacccccttatgaatatcgtcgaggatggagttcacggggtgatctctttgtattgcttggtggactcttgggtatggcggtcttggaccgtcattatcatccttgtcttgatcacgggcatctcccccttgatcattgccctcctcttgaggtggctcatcttcttgatcctcattctcatcatcttgagcttgatcctcatcttgggttggtggagatgcttgatttgaagatgatggttgatcttgtgcttgtggagaatctttggattctttaggacacacatccccaatggacatgttccttagcgtgacgcacagagtctcttcatcatctagctcatcaagatcaacttgctcaacttgagagccgttagtctcatcaaacacaatgtcaccagaaacttcaactagtctggtggacttgttaaagactctatatgcccttgtgtttgaatcatatcctagtaaaaagccttctacagccttaggagcaaaattagattttctacctcttttaacaagaataaaacatttgctaccaaagactctaaaatatgaaacattgggctttttaccggttaggagttcatacgatgtcttcttgaggattcggtgaaggtagaggcagttgatggcgtagcaagcggtgttgatcgcttccgcccaaaaccggtccgaagtcttgtactcatcaagcatggttcttgccatgtcaagtagagatctattcttcctttccactacaccattttgttgtggtgtgtagggagaagagaactcatgcttgatgccctcatcctcaagaaagccttcaatttgagagttcttgaactccgtcccgttgtcgcttctaatctttttgatccttaagccaaactcattttgagctcgtctcaagaatccctttaaggtctcttgggtttgtgatttttccaaaccttgatttccatccccgaatgtgatagctctttggggatcatggtttttctcgtaggaggagaacatctttttctccccaatcatgtggtttgtgcacccgctatcaatgatccaacttgatcccccggatgcataaacattgtctcccttttggaagccaatgccatccttaatgcctgggcatctcccactataaagcatactacgagcaaatttaaatttctcattttctaattcatgctcggcaattttagcatctaattttgctatattatcattttgttgtttaatcatagcaatgtgatcatggatagcatcaacattaacatctctacatctagtgcaaatggagacatgactaacggtagatgtagagggtttgcaagtatttaattcaacaatcttagcatgtaaaatagcattctcatctctaagattggaaatggaaacattgcaaacatttaagtctttagccttagcaatcaatttttcattctcaactttaaggctagagagagatgcattcaacttgtcaatcttagcaattaaactagcattatcatttctaagattaacaattgaatcatcacaaacatttaatttctcaaccttagcaatcaatttgtcattttcaaatctaaggttggaaatagtgtcatggcaagtgcttagctcactagttaaattttcacatttttctatctcttgagcataagcatttttaactttaacatgctttttattttccttaataaggaagtcctcttgggtatccaaaagttcatccttgtcatgaatagcactaatcaattcatttaatttttctttttgttgcatgtttaagttggcaaaaagggtgagcaaatcatcctcatcatcactagagctagcctcatcactagaagttgcatacttagtggaagatctagattttaccttcttccttttgccgtcctttgccatgaggcacttgtggccgacgttggggaagagaagacctttggtgacggcgatgtttgtggcgtcctcgtcggaggagtcggtggagctctcgtcggagtcccactcccggcaaacatgggcatcgccgcccttcttcttgtagtacctcttcttttctcttctctttcccttcttgtcgtcgccactgtcactatcactagataatggacatttagcaatcaaatgatcaggcttaccacacttgtagcacaccttcttggaacggggcttgtaatctttccccttcctttgcttgaggatttggcgaaatcttttgatgattaaagtcatctcctcattgtcgagcttggaggcgtcgatagggagcctacttgatgtagactcttccttcttctcctccgtcgctttgaaggcgacgggttgcacctcgggtgtggaggtggcgcctcgctcaatgatttgtttggagcctttgatcattagttcaaagctcacaaactttcctatcacttcctcgggagacattagttgatatcttggatcaccacgaattaattgtacttgtgtagggttaagaaaaacgagtgatctaaaaataaccttgaccatttcatggtcatcccatttggtgctcccgaggttgcgcacttggttcaccaaggttttgagccggttgtacatggcttgtggctcctctccttggtgaagcatgaagcgaccgagctccccctcgatcgtatccctcttggtgatcttggtaacctcgtctccttcgtgcgcggtcttgagcacgtcccaaatatcctttgcactcttcaacccttgcaccttattatactcctcccgacttagagaggcgaggactatagtagtggtttgggagttgaagtgttggatttgttcgacctcctccgaatcataatccttgtcccctttctttggtac

SEQ ID NO: 5092 - DNA, 1590 bp, Zea mays
  Clone ID: TF_ZM4640.C5.o2.fg
atgctcaacatcgcccaatgctcggaccgggagaaggtcctttatgcttctggtcgtctgacaggtcctgctgctgactggtgggattcttatgttgttgcccatgatgctgctgacactattacttgggcggaattcacaactgagttcagaaactaccacattcttgctggattgatgaagatcaagaagaaggagtttctgtcattgaagcaaggcaatatgtctgtcagtgtgtacaaagacaaattcattaagctgtctagatatgctcctgatgaggtgagactgctggataaggctcttgctattgaacacaagcgtgttcaactaggtgacttgaagaggaaggccattacccaggggcaggggtacaccagctcatccaggaggaggaccacgcccagctcagtacactccacaggggtctccacggacacctcccattcgtcaggctgcccccactggcacccggtgaggcctacaggacagaagactggccctacatgcttcaagtgcagtcaggttgggcactatgctaatgcttgtccggtggggaattccggtacaccagctcagaacaagcaacagactcctagcaagggatactctattgccagggttaatcaagtcagcgcagatgctactcctgatggtgctgacatcacacttggtacattttacgttaatgcaattcctgcaacaatattatttgattctggtgctacacattcatttatgtctgctcgatatgctaatacaattgaaataccactacaacatatgagaaaaccaatgatagtaatcacacctatagggcctgttgaggcaaatcatataacacataaattggcattaacaattatgggaagagaaatctgggctaccgctatagtattagaggaaagcagtatagatctgatccttggtatgtcatggttaaggaaggcaaatgacataatacaatgtgctaggggtactgtagaactcaccaaccctaaaggagaaagatttcaagttcaaattgcagtaaccacctcttccagacgtgcgatgttctttatagctgaggagtttgttggtgaaaacatccgtgtggttagggattttccatatgtctttccagaggagttaccagggatgccacctgagagatcacttaatgatgtcaccatcaagaacaagtactcgttacctcgtattgatgacttatttgatcagatgagaggtgctagggtgttctctaagattgaccccagatcaggctaccatcaaatgaagattaggccatctgatattcctaacacggttttttctacccgatatggtctatatgaattcacagtcatgtcatttggcttaaccaatgcaccagcttattttatgaatctgatgaataaggtgttcatggagtatcttgataaattcgtcgtagtattgatcgacgacattcttatttattccaagaatgatagttattactggcgattcattgaagggttctccaagatttctaagcatatgacctcattgttggagaagggcaaggagtttaagtggactgagaaatgccaagagagtttcgattag

SEQ ID NO: 5093 - DNA, 4410 bp, Zea mays
  Clone ID: TF_ZmC119_1021
ttaagaagatctagggaaaaggtggggaaaatctatacgaagctcttcttctctttcccaagttgcttcgtcttcaccgtggtggctccattgaactttgcacatctttataaccttattccttgtaacacgagtcagtgtatccagaatcttgatgggatactcagcataagtcaaatcttcctgaacactaaggtcttccataggtaattgttcctcaggtaccctaagacatttcttcagctgagacacatgaaagacatcatgaacatccgcaaggtgatccggtaactccaattgatatgcaacctcacccactcgctttaagattaagaagggtccaataaagcgaggggacaactttcctttgactttgaatcttctcataccccggagtggtgacaccttcaaatagacataatctccctccttaaactcaagcagtctcctccgggtgtcagcatagcttttctgcctggactgtgcagttctcaaattctcccttatttgttgaacttgttcttctgcttcctgtataatctcaggcccaaacaactgcctttcaccagtttgatcccaatacaatggagtcctgcactttctgccatataaagcctcaaacggtgacatcttcaaactggcctgatagctattattgtaagagaactctgcatacgacaaactcttatcccaacttccaccatgtttaagagcacaagctcttaacatatcctcaagcacttggttggtcctctcagtctgcccatcagtctgtggatggtaagccgaactaaaattcaatcttgtatccaaggactcgtgcaacttcttccaataccgagaagtaaactgtgatccccggtctgacacaatcttctttggcacaccatgtaggcaaacaatccgtgccatgtacaactctgctaacttggctcctgaatatgtggtcttcactggaataaagtgggctactttagttagcctgtccacaatcacccatatagaatcatatccagcagacgtgcggggtaatccaacaatgaaatccatgtcaatctcttcccatttccactcaggtatcttcagtggatgcagtagtccggctggcctttggtgttcagccttaactctttggcacacatcgcacatagccacatgtgcagccacatctctcttcaatccataccaccaatatttttgcttcaaatcctgatatatcttagtactcccaggatggatagaataaactgaatcatgtgcatccttcaatatggtttctcgaagactatcaatatcgggaacacagatccgattcttgaaccatatcgtgccttgctcatcctctgtgaattccgggcctctaccctctttacgaatttcttgctccaaggtaggttccaattcaatagtcactccttccgtatgtgtaacaattcccaggttgagcctctcaaaatcttttgctaactcatcaggtagctggacaacgaaagcggagtgaacatgctccttccgactcaaggcatctgcaaccaaatttgccttgcctgggtggtaatgaatctccaaatcataatccttaataagctccaaccaacggcgttgcctaaggttgagatccttctgagtgaatatgtacttcaagctcttatgatccgtatatacttggcacttagttcccataacatagtgtctccaaatcttcagtgcatgcacaacggcagccagctccaagtcatgagtggggtagttcaattcatgcttcctcaactgacgagatgcataggcgatcacatgtccttcttgcatgagcacacatccaagtccttggccacatgcatcacagtaaatgtcaaatcccttctgtagatctggcataatcaatactggtggcgacatcaacctctccttcaattgatcaaagctttcttggcatttctcatcccacttgaattctcttcctttctccaaaagcgatgtcataggcttggcaatcttagagaacccttcaataaatctccgataatatcctgcaagtcccaagaaactccgaatctcagtaactgtagtgggcactatccactccataatctccttgaccttagcaggatccactgctattcctccattagaaataatatgtccaaggaatgacaccttgtcaatccaaaactcgcacttgctgaacttagcatagagttgattatctcgcagcttttgtagcaccaaccttagatgttgtacatgatcactttcattcctagaatagatcagaatatcgtcgataaacaccacgacgaatctgtccaaatactccataaacactttgttcatcaaattcatgaaataagctggtgcattggttaatccaaatgacataacagtaaactcatataatccatatcgggttgagaaagtcgtcttaggaatatccgagggtctaatcttcatctgatggtatcccgatcggagatcaatcttcgagaataccctggctcctctcatctggtcaaacaaatcctcaatacggggtaatggatacttgttcttcaccgtgacatcattaagtgatctatagtccacacacatccgttgcgatccatccttcttctgcacaaataacaccggtgctccccaaggtgaggaactcggacgaatgtaccccgcttcttgtaactcagttaactgcttcttaagctccttcagttcttctacagccatcctgtatggtcgcttagaaataggggcggttccaggtaagagatcaataacaaactcaacttctctatcaggtggcatccctggtaactcctctggaaagacatccggaaaatctctaaccacccggatgttgtcaccaacaaactcctcaggcataaagaacattgcacgcatggatgaggaggttactgcaatattaacttgaaatctttctcctttagtggtagtgagctctacgatacctctaccacatgctataacggcatttgcctttcttagccatgacataccaaggatcagatctatactgcttgactctaatattatggcagtagctccaaattctctacccataatggtcaatgtcaatctacgtgtcatttgattcgcctcaacaggccctttaggtgtaattactatcaggagttttctcatatttagtagtggtatttcatttgtgttggcatatctagcagacatgaatgaatgtgtagcaccagaatcaaataatatggttgcaggaattgcattaacataaaacataccaagtacgatgtcaccaccatcaggagtatcatcaacgctgacttgattcaccctggcagaattccccatcgggcaagcattagcataatgcccaatttgactgcacttgaaacatgtagggctagtcttctgtcctgtagacctcgtcggggtgccagtcggagtggcctgacgagtaggtgtccgtggagagccctgtggagcatactgaactgggcgtggtcctcctggtcgagtcggtgtaccctgtggcggtacgtagcggggacgaacactgctgctaccctgtccctgtgagatagccttcctcttcaaatcactcagttgaacacgcttgtgttcaatagcaagagccttatccagtagtctctgaaatgatggaaaggtgtgtgcaaccagtgcatactgcaagggtccattaagtccttcaataaagtgctcctgctttctttcatcctcagcaacttcctccggagcatacctcgacagctgaataaatttgtctctgtactcgctgaccgacatgttgccttgcttcaatgacagaaactccttcttcttgatctttatcataccagctggaatatggtagttcctgaactgtgtactgaactccgcccaagtaatagtatcagcagcatcgtgggcagcagtataagaatcccaccagtcagcagcaggacctgtcagacgacctgaggcataaagaactttctcccggtccgtgcactgtgcaatattcagcatcttctcaatagacttcagccaatcatccgcgtccagtggatcaggtgagcttgcaaatgtaggtggcttatgactcatgaactctctatgcttgtctcggggtggaactggtggtggtggtggaggcagtggtacttgttgttgctgctgctgctgttgttgctgttgcatttgttgttgcagctgctgttgttgtgccctcctttcctggcgtatctcctctcgctcttggcgcaactcctgtcgtatatcttctctttcctgacgcatctcctggcgttcttgctgcatctgggcacgcatatcagccatagtgtccgtcatttgctgcatcaccgccatctgagcagcaactagtgggtcaactccgcctggtggaggattaggaggattcat

SEQ ID NO: 5094 - DNA, 4047 bp, Zea mays
  Clone ID: TF_ZM4625.C2.o3.fg
atggcggagagagaagagatacgccaggagagaagggcgcaacagcagctacaacaacaatttcagcaacagcagcaacaacaacaagtaccatttcctccaccaccaccaccagttccacctcgtgataagcaccaggaatttatgagccataagccaccgaccttcgccagttcgccagatccacttgatgcagatgattggttgaagtcaattgagaagatgctcaacattgcccaatgctcagacagggagaaagttctttatgcctcaggtcgtctgatagatcctgctgctgactggtgggattcttatactgctgcccatgatgctgctgatactattacttgggtggagttcagtacacagttcagaaactatcacattccagctggtttgatgaagatcaagaagaaggagtttctgtcattgaagcaaggcaacatgtctgtcagcgagtacagagataaattcattcagctgtcgagatatgctctggacgagaggcttctggataaggctcttgctattgaacacaagcgtgttcaactgggtgatttgaagaggaaggctatctcacagggacagggtagcagcagtgtttgtccccgctacgttccaccacagggtacaccgactcgattaggagggccacacccagttcagtatgctccacaggcgtctccacggacacctcctactcgtcaggctactcccaatggtaccccgacgaggcccacaggacagaagaccgaccctacatgcttcaagtgcagtcagattgggcactatgctaatgcttgtccgatgggaaattctggtacaccagctaagaacaagcaacagactcctggcaagggatattctatagccagggtgaatcaagtcagcgttgatgctactcctgacggtgcggacatcgtacttggtatgttttatgttaatgcaattcctgcaaccatattgtttaattctggtgctacacattcattcatgtctactcgttatgccaacacaaatgagataccactgctaaatatgagaaaaccaatgatagtaatcacacctaaagggcctattgaggcaaatcaaatgacacgtagattgacattaacaattatgggaagagaatttggagctactgctataatattagaggccagcagtatagatctgattcttggtatgtcatggttaaggaaggcaaaggccattatagcatgtggtaggggtactatagaactcactagccctaaaggagaaacgtttcaagttcaatttgcagtaaccacctcttccaagcgggctatatactttatacctgaggagtttgttggtgacaacatccgtgtggttacatattttccggatgtctttccagaggagttaccagggatgccaccagatagggaagttgagtttgtgattgatcttctacctggaactgcccctatatctaagcgaccatacaagatgtctgtagaagagttaaaggaactgaagaagcagttaacagagttacaagaggctggatacattcatctgagttcctcaccttggggagcaccagtgctatttgtacagaagaaggatggatcgcaacggatgtgtgtggattatagatcacttaatgatgttactgtgaagaacaagtatccattaccccgtattgaggatttgtttgatcagatgagaggtgctagggtattctcgaagattgatctcctatcgggataccatcagatgaagattagaccatcagatattcctaagacggctttctcaacccgatatggattatatgagttcactgttatgtcttttgggttaaccgatgcaccagcttattttatgaatttgatgaataaggtgtttatggaatatttggacagattcgtcgtggtgttcatcgacgatattcttatctattctaagagtgaaagtgatcatgaagaacatctaaggttggtgctacagaagctacgagataaccaactctacgctaagtttagcaagtgcgagttctggattgacaaggtgccattccttggacatatcatttctaatggaggaatagcagtggatcctgttaaagtgaaggagataatggaatggagcgtgcccactactgttacggagattcagagtttcttggggcttgcgggatattatcggagatttattgaaggattctctaagattgccaagcctatgacctcgcttctggagaagggcagagaatttaagtgggacgagaaatgtcaagacaactttgatcaattgaagaagagattgatggcaccaccagtgttgattatgccagatctgcagaaaggatttgacatttattgtgatgcatgtggacaaggattgggatgtgtgcttatgcaagaaggacacgtgattgcctatgcgtctcgtcagttgcggaaacatgaattgaactaccccactcatgacttagaactggcagccgtggtgcatgcactgaagatttggagacactacattatgggaactaagtgtcaagtgtacatggatcataagagtttgaagtacatattcactcagaaggatctcaaccttaggcaacgccgttggttggagctcattaaggattatgatttggagattcactatcacccaggcaaggcgaatttggttacagatgccttgagtcggaaggagcatggagtcaccattgaattggagcctaccttggagcaagaaattcgtaaaggccaagtgggtgatgctaaaattcaagagattaaggatctgattatggaaggtcgagtgccagatttcacggaggatgagcaaggtactatatggttcaatgatcggatatgtgttccagagattgatagccttcgtgagactattttaaaagaagcccatgattctgattactctatccaccctggtagcactaagatgtatcaggatttaaagcaaaagtattggtggtatggattgaaaagagatgtggctgctcatgtggctaagtgtgatgtgtgtcaaagagtcaaggccgaacatcaaagtcccgctggactattgcacccattgaagatacccgagtggaaatgggaagaaattggtatggatttcattgttggactaccccgcaccccagtaggatatgactctatttgggtgattgtggacagattgacaaaagtggctcatttcatacctgtgaggactaattacacgggagccaagctagtagaattgtatatgactcggatagtttgcctacatggagttcctaagaagatcgtgtctgatcgaggatcacagtttacttctcggttttggaagaagttgcatgagagcttggatacaaggttgaattttagttcagcctaccatcctcagactgatgggcagaccgagaggacaaatcaagtactagaggatatgttaagagcttgtgctcttaaacatggtggaagttgggataagagcttaccatatgcagagttctcttataataatagctaccaggccagtttgaagatgtcaccgtttgaggctctatatggcagaaaatgcaggacaccactacaaaagagctatgctgataataggagaagactactggagtttaaggagggtgatcacgtgtatctgaaggtgtcaccaatccagggtatgaggagatttaaagtcaaaggaaagttgtcccctcgcttcattggacctttcttgatcttaaagcgagtgggagaagttgcatatcagctagaactactcgatcacctatcaaatgtacatgatgtattctatgtatctcaactgaagaaatgtctcacggtacctgaggagcagctaccaatggaggaccttagtgttcaagatgatctgacttatgctgagtaccctatcaagattctggacactctgactcgagttacaagaaataaggtgataaagatgtgcaaagtacaatggagtcaccacggagaggatgaagctacttgggaaagggaagaagaccttcgcatagattttccccatcttttccctagaccttcctaa

SEQ ID NO: 5095 - DNA, 5136 bp, Zea mays
  Clone ID: TF_ZM5057.C1.o8.fg
atggatcctaagggcaagaggattgtgatcaatgacaaggagaaggagtcattcgtcaacgagcccaaggatgacaagcataccgactcgggctcgggccacaaacgcaaagatgggaagaagaagaagacaagacgcatcaaggagatcgtctactacgacgacagcgatgagtccacttcttcccaaaaggacaacgacgacaacgactacgagagaaggaaaccggttaattcgaacttttcttttgactactctcgtattccgcaaagtacaaatgctcatttactctccattccacttggcaaacctcctcactttgatggagaggactacggattttggagtcacaaaatgcgtagtcacctgttctctctccatccgagcatatgggagattgtggaaagtggaatgaaatttgatagctcggatagtcctatgtttatcaatgaacagattcatagaaatgcacaagctactactatgttgttagcctccttgtgcagggacgagtatcataaggtgagcggcttggacaatgccaagcagatctgggacaccctcaggatctcacatgaggggaacgacgtcaccttactcaccaaaatggagttggtggagggcgagcttggaagattcgcaatgatcaggggagtggagccaacccaaacatacaaccggctgaagacccttatcaacaagataaggagctatagaagcacacgatggacggaccacgacgtcgttcgtctaatgctaaggtcctttactgtacttgatccacatttggtgaacaatatccgtgaaaatcctaggtacaccaagatgtggcctgaagaagttcttgggaaatttgtaagcgggcgaatgatgatcaaggaggcaagatatgtcgacgacgcgctgaacggtccaatccatgaacctcaacccattgctctcaaggcaacgaggagcaaggaggcgctacctagcaaggtggcgcaagttgaggcggccgagctcaatgatgaagagatggccctcatcatcaagcgcttcaagacggcgctaaagggtcgcaaggggcagccaagcaagaccaagacaaaggggaagcgctcatgcttcaaatgtggtatggttggtcattttattgctaactgtcctgacaatgatagtgaccaggaagaagggaacaagagggagaagaagaagaattataagaaggcaaaaggcgaggcacatcttggcaaggagtgggactcggattgttcgtcgtccgactctgacaacgaaggactcgccgccactaccttcaacaagtcatccctcttccccaacgagcatcacacttgcctcatggcaagggaaaagaaggtaagcgctcataacactagtacttatgcttcttcaagtgaggatgagtctagtgatgatgatgaaatagattattcatgtttattcaaaggtctagatagaaccagggtggataaaataaatgaattgattgatgctttgaatgataagaatagattgctagaaaagcaagaggatctcttatatgatgaacatgacaagtttgtagaagctcaaaaatcccttgctttagaaataaagaggaatgaaatgctttcttgtgaattgtctacatgccatgactctatttctagtttaaaaagcataaacgatgacttgaatgctaagttagaaatagctaataaatcaacatcttgtgtagaacatgttgtgctttgcactaggtgtaaagattttaatattgatgcttgtagtgaacacctagtttcaatttctaaattgaatgatgaagtagctagtcttaatgcccaacttaagactagcaaaagcgaatttgataagttaaaatttgcaagggatgcctacacgattggtagacacccctcaattaaggatggacttggtttcaagagggaagccaagaacttaacaagccataaggctcccatccccgccaaggagaaagggaaggcccctatggcaagtagtgctaaaaggaaccatgcttttatgtatcatgatagaaaacagtcttataagagttgtaatgcttatgatgcttttgactctcatgccatgtttgcttctagttcttcctatatgcatggtaaagatatgtctaggagatatattgttcatatgcctaggagaaatgttgttaatgttcctaggaaagttaatgaaccttctacaatatatcatgctttaaatgcttcctttgccatttgtagaaaggataggaagatagttgctagaaaattaggggcaaaatgcaagggagacaaaacttgcatttgggtccctaagacaattgtgactaaccttgtaggacccaacaagagttgggtttatgcatccgggggttcaagctggattatcgacagcggatgcacaaaccatatgacgggggagaagaagatgttcacctcctacgtcaaaaacaaggattcccaagattcaataatatttggtgatgggaatcaaggcaaggtaaaagggttagatgtgtctgtcattagaagaagtgatggttcactagcttttaagggtgtattagacgacacactttacttagttgattttgcaaaagaggaggccggtctagatgcatgcttaattgctaagactaacatgggctggctgtggcatcgccgcttagcacatgtggggatgaagaaccttcacaagcttctaaagggagaacacgtgacaggtctaactaatgtgcaattcgaaaaagatagaccttgtgcagcttgtcaagcaggcaaacaggataaatctgaaacccaagggaccctcaagcgcttcctaaggagagctcaaaacgagtttgagctcaaggtgaaaaagataaggagcgacaatgggtccgaattcaagaaccttcaagtggaggagtaccttgaggaggaagggatcaagcacgagttctccgctccctacacaccacagcaaaatggtgtggtagagaggaagaacaggacgcttatagacatggcgaggacgatgcttggagagttcaagacccccgagcgtttttggtcggaagccgtgaacacggcttgccacgccatcaacagggtctaccttcatcgcctcctcaagaagacgtcgtatgagctactaaccggtaacaaacccaatgtttcgtattttcgagtttttgggagtaaatgctacattctagtgaagaagggtaggaattccaaatttgctcccaaagtcgtagaagggtttttgttaggttatgactcaaatacaaaggcgtatagagtcttcaacaaatcatcgggtttggttgaagtctctagcaatgttgtatttgatgagactaatggctctccaagagagcaagttgttgactatgatgatgtagatgaagaagaagttccaacgaccgcaatacgcaccatggcgattggagatgtgcggccacaggaacaagatgagcaagatcaaccctcttcctcaacaatggtgcaacccccaactcaagatgatgaacaggaggcgtgtgatcaagggggagcacaagatgatcatgtaatggaggaagaagcacaaccggcacctccagcccaagttcgagcaatgattcaaagggatcatcctgtcgaccaaattttgggtgatattagcaagggagtaactactcgatctcgattagttaatttttgtgagcattactcctttgtctcttctattgagcctttcagggtagaagaggccttgctagatccggactgggtgttggccatgcaggaggagctcaacaacttcaaaagaaatgaagtctggacactggtgcctcgtcccaagcaaaatgttgtgggaaccaagtgggtgttccacaacaaacaagacgagcacggggtggtgacaaggaacaaggctcgacttgtggcaaaaggttatgcccaagttgcaggtttggactttgaggagacttttgctcctgtggctaggctagagtccattcgtatattgctagcatatgccgctcaccattctttcaggttgttccaaatggatgtgaagagcgctttcctcaacgggccaatcaaggaggaggtatacgtggagcaaccccctggcttcgaggatgaacggtaccccgaccacgtgtgtaagctctctaaggcgctctatggacttaagcaagccccaagagcatggtatgaatgccttagagactttttaattgctaatgctttcaaggctgggaaagccgatccaactctttttactaagacttgtgatggtgatctttttgtgtgccaaatttatgtcaatgacataatatttggttctactaaccaaaagtcttgtgaagagtttagcagggtgatgacgcagaaattcgagaggtcaatgatgggcgagttaagctacttccttgggttccaagtgaggcaactcaaggatggaaccttcatctctcaaaccaaatacacgcaagacttgatcaagcggtttgggatgaaggacgccaagccgcaaagactccaatgggaaccgacggacacaccgacctcaacaaaggaggagtgtcacttagtggctgtgaagcgaattcttagatatttagtcgctacgccttgtttcgggatctggtatccaaaggggtctacctttgacttgattggatattcagactctgactatgctggatgtaaggtcgataggaagagtacatcggggacgtgccaattcttaggaaggtccctggtgtcatggagttctaagaaacaaacctccgttgccctatccaccgctgaggccgagtacgttgccgcaggacagtgttgcgcgcaactactttggatgaggcaaaccctcagggactttggctacaatctgagcaaagtcccactcctatgtgataatgagagtgctatccgcatggcggataatcctgttgaacacagccgcacaaagcacatagacatccggcatcactttttgagagaccaccagcaaaagggagatattgaagtgtttcatgttagctccgagaaccagctagccgatatctttaccaagcctttagatgagcagaccttttgcaagttgcgtagtgagctaaatgtcttagattcgcggaacttggattga

SEQ ID NO: 5096 - DNA, 2492 bp, Zea mays
  Clone ID: TF_ZmC10872_12
atggcgctcatcatcaaaagtttctgccaaatcctcaagcaaaggagggggaaggactacaagccccgctccaagaaagtttgctacaagtgtgataagcctggtcattttattgctaaatgtccattatcaagtgatagtgacaagggcgacgacaagaggaaaaaaagaaggataagaagaggtactacaagaagaagggcggcgatgcccatgtttgtcgggagtgggactccgatgagagctccaccgactcctcctccgacgaggacaccacaaacatcatcgtcaaccaaaggtctcctcttccccaacgtcggccacaagtgcctcatggcaaaggacgacaaaaagaaggtaaaatctagagcctccactaaatatgcaacatctagtgatgaggaaaactctagtgatgatgaagataatttgcttgctctttttgccaacctaaacatgcaacaaaaagaaaaattaaatgaattgataggtgctattcatgagaagtatgaactcttggataaccaagaggacttccttattaaggaaaataagaagcatgttaaggttaaaaacgcttatgctcaggaagtagagaggtgtgaaaaattgactagtgagctaagcacttgccatgatattatctcaaaccttagaaatgaaaatgcaaaattaattgctaaggttgagaagttagatgtttgtgatgattcaattgttagtcttagaaatgataatgctagtttgattactaagattgacaagtttaatgcatcactctctagccttaaaattgagaataaaaaattaattgctaaggctaaagatttaaatgtttgcaatgtttctatttccaatcttaagaatgaaaatgctatttcacatgctaagattgatgaattaaatgcttgcaaaccctctacatctactgttagtcacgtctctatttgcactagatgtagagatgttaatgttgatgctatccatgataacattgctatgattaaacaacaaaatgatcatatagaaaaattagatgctaaaattgccgagcatgacatggaaaatgaaaattttaaatttgctcgtagtatgctttatagtgggagatgccctggcattggcttccaacagggaggcaatgtcaagctcaatgcccctaaaagattgtctaattttgttaagggcaaggctcccatgcctcaggataacgagggctatatattatatcctgctggttatcctgaggataagattaagagaattcatgctaagaagactcattctgtttctcaccatgcttttatttataagaatgaggcttctagctctaggcattctacccatgttaaaatgcctaaaatgaaatctcctattgcatcaaatgatcataacatttcatttaagacttttgatgcttcatatgttttaactaacaaatcaggcaaagtagttgccaaatatgttggggccaaacacaagggctcaaagacttgtgtttgggtacccaaggtttatgcatccgggggctcaagttggatcattgatagcgggtgcacaaaccacatgactggggagaaaaggatgttctcctcctatgagaaaaaccatgatccccaaagagctatcacattcggggatggaaatcaaggtttggtcaaaggacttggtaaaattgctatatcgcctggccattcgatttccaatgtttttcttgtagattctttagactataacttgctttcagtttctcaattatgtaaaatgggctacaattgtctttttacgaatatagatgttactgtctttagaagaagtgatgattcagtagcatttaagggagtgttagagggtcagctatacttagttgattttaatagagctgaactcgacacttgcttaattgctaagactaacatgggttggctctggcatcgccgactagcccacgttgggatgaagaattttcataagcttctaaagggagaacacattttgggactaacaaatgttcattttgagaaagacaggatttgtagcgcatgtcaagcagggaagcaagttgatgttcatcatccacacaagaacatcatgacgactgacagaccgcttgagctactccacatggacctattcggcccgatagcttacataagcatcgacgggagtaagtactatctagttattgtggatgattattctcgcttcacttgggtgttctttttgcaggataaatctcaaacccaagagaccttaaagggattcttaagatgggctcaaaatgagttcgggttaaggataaaaaagattagaagcgacaatgggacggagttcaagaactcacaaatagaaggcttccttgaggatgagggcataaaacatgagttctcttctccctacacaccacaacaaaatggtgtagtagagaggaagaatagaactctacttgacatgacgaggaccaagcttgatgagtacaagacttcggaacg

SEQ ID NO: 5097 - DNA, 4767 bp, Zea mays
  Clone ID: TF_ZmC4916_426
atggatcctaatggaaaggggatgatggtcaacgacaaggagaaggagtccatcttcaacgagccaagggacgacaacccactgactcaggatcaagtcacaagaagagggacgggaagaagaagaggcagatcaagaagatcatttactacgacaacgacgcctcctcttcttcaccaagagacgacaacgacgatgactcgtctaaaaagaaaccgtatttgggagatagttgaaaatggaatgcattttgatagtacggataaccccgtgtttattaatgaacaaattcataagaatgcacaagctaccactgtgttgctagcatttttgtgcagggatgaatacaacaaggtgagcgacttagacaacgccaagcaaatttgggataccctcaagatatcacacgagggaaacgacaccaccatgatcaccaagatggagttggtggaaggcgaactgggaagattcgcgatgatcaggggagaggagccaacacaaacatacaacaggctcaagaccctggtcaacaagattaggagctatggaagcacaagatggacggaccacgacgtcgttcgactaatgctaaggtcatttatggtaattgaccctcatcttgtcaaccttattcgtgagaatcccaggtacaccaagatgacgcccgaggagattcttgggaagtttgtgagcgggcgcatgatggtaaaagaggctcgatatgtggacgatgctctaaacggaccactacccgtccacgagcctcaaaccattgccctcaaagcaaccagcaatagggagaagctaccaagcaaggtggcacaagtggaggccgcgggcctcaatgaagatgagatggcgcttatcatcaagcgcttcaagaccgcattgaaaggacgcaaggagtaccccaacaagaacaaagcaaggggaaagcgctcctgcttcaaatgcggtaacactggtcattccatagcacaatgccccgataatgatgatgaccatgaacaagaaaagcacgggaagagggagaagaagaaggtctataagaaggcgaagggcaaggcgcaccttggtaaagaatgggattctgactactcttcatccgactccgacgatgaaggactggcagcctcggccttcaacaaatcttcgctcttccccaacgaatgccacacctgccttatggccaaggaaaagaaggtgagtgttcgagattcccccaagtactctacttctagtgatgaggattctagtgatgatgaagtagattactctaccttgttcaaaggattagatagagctaaagtagaaaagattaatgaactaattgatgctttaaatgaaaaggatagacttttagaaaagcaagaggatattttgtatgaagagcatgataaatttgttagtgcgcaaaaatctcttgctttagaaactaagagaaatgagatgctatcttctaaattatctgcttgccatgaatctatctctaggttaaagattttaaatgatgatttaaatgctaagttagaggtagctaatcaatctagttcatgtgtagaacatgttgtaatttgcaatagatgcaaggattttgatattgatgcttgtgatgaacatcttacgtccattactaaattaagtgatgaggtggcaagtcttaatgctcaacttaagacttgcaaggttgattttgataagcaaaaatttgctagggatgcctatgctattggtagacacccctctattaaggatggacttggttttcgaaaggaaaccaggaacttaacaagccaaaagactcccgttctcaacaaggagaaagagaaggctcctatggctagtagttctaaaaaatgtcatgcttacatttatgatagaaaattttctagaaacgctcattataataggagttataatgcgtttaattcacatgctatgtttgcttctagctctacttttgtgcatggtagaagtaagcctaggagaaatcatgttgtgcatcatgtgcctaggaaagtttatgcatccgggggctcaagctggattatcgacagcggatgcacaaaccacatgacgggggagaagaagatgtttacctcctacgtcaagaacaaggattcccaagattcgatcatctttggagatgggaaccaaggcaaggttaaaggattgggaaagatagccattacatccgagcattcaatctccaatgtgttcttagttgaatcgctcgggtacaacctattgtccatgtttctgtctttagaaaggagtgatggttcattagcgtttaagggtgtattagacaacaaactctacttagttgatttttcgagagaagaggtcgatctagatgcatgcttaatagctaagactagcatgagctggttgtggcatcatcgtctagcacatgtcgggatgaagaaccttcataaacttctaaagggagaacatgtgttaggactaaccaatgtctgcttcgagaaagacagaccttgtgcaacttgtcaggcagggaaactggtgggaagcactcatcacagtaagaatgtgatgacaacatcaagaccactggagcttcttcacatggacctcttcggacccgtcgcctaccttagcatcggaggaagtaagtatggtcttgtaattgtagatgacttttcccgcttcacttgggtgttctttttgcaggataaatcagaaacccaagggaccctaaagcgctttctaaggagggctcaaaacgaatttgagctcaaggtgaaaaagataagaagcaacaacgggtccgagttcaagaacttacaagttgaggagtatcttgaggaggaaggtgtcaagaatgagttctccgctccctacacaccacagcaaaatggtgtagtagagaggaagaacaggacacttatcgacatggtgaggacgatgcttggagagtttaagatgctcgagcggttttggtcggaagctgtgaacacagcttgccacgccataaaccggctctatctgcatcatctcctcaagaagacctcctacgaactccttaccgataacaaacccaatgtctcttactttcgtgtatttgggagaaaatgctatattttggcgaagaaaggtagacattcaaaatttgctcccaaagctgtagaagggtttttactagggtatgactcaaatacaaaggcatatagagtcttcaacaaatcatcggctttggttgaagtctctagcgatgttgtattttatgagactaatggctctccaagagagcaagttgatcttgatgacataaatgaagatgatgttccgacggcagcaatacgcaccatggcaattggagatgtgcgaccacaggaacaacaagagcaagatcaaccttcttcctcaataatggtgcatccccctactcaagatgatggacaggttcctcaagaagaggcgtgtgatcaagggggagcacaagaagaacaagctatggaggaagaagcaccaccggcccctccaactcaagtccgagcgacgattcaaagaaatcaccccgtcgatcagattctgggtgacataagcaagggagtaactactcgctcaagattagctaatttttgtgagcattactcgtttgtctcttctattgagcctttcagggtagaagaggccttgcaagacccggactgggtgttggccatgcaggaacagctcaacaacttcaagagaaatgaagtttggagcctggtgccacgtccaaagcaaaacgttgtgggaaccaagtgggtgttccgcaacaagcaagacgagcatagagtggtgacaagaaacaaggctcgacttgtagcaaaaaggttatgcccaagtcgcaggttgtttcaaatggatgtgaagagcgcttttctcaacgggccaataaaggaggaggtgtacgtggaacaaccccctgactttgaggatgacaggtacccccaccatgtgtgtaagctctctaaggcgctctatggacttaagcaagccccaagagcatggtatgaatgccttagagatttcttaattgctaattctttcaaggttgggaaagctgatcccactcttttcactaagacttgtaatggtgacctttttgtgtgccaaatttatgtcgatgacataatatttggttctactaatcaaaagtcttgtgaggagtttagcagggtgatgactcagaaatttgagatgtcaatgatgggcgagttgaactacttccttgggttccaagtgaagcaactcaaggatggcaccttcatctcccaaacgaagtacactcaagatcttcccatgcggtttgggatgaaggacactaagcccgcaaagacacctatgggaaccgacggacatgtcgacctcaacaaaggaggtaagtccattgatcaaaaggcatactggtctatgataaggtcattgctttatttatgtgctagtagaccgtatattatgcttagcgtatgcatgtgtgctagatatcaatccgacccaagggaatgccaccttgtggctgttaagcggattcttagatatttagtctctacgccttgcttcgggatctggtatccaaaggggtctacctttgacttgattggatattcagactcggattatgctggatgcaaggttgataggaagagtacatcagggacgtgccaattcctaggaaggtccctggtgtcttggagttcaaagaaacaaacctccattgccctatccaccgctgaggccgagtatgttgccacatga

SEQ ID NO: 5098 - DNA, 5207 bp, Zea mays
  Clone ID: TF_ZM4405.C4.o1.fg
acaaccaaaaattgaagaattacttgactgatgcaactactagaggaaaagttgctattgagaacaatgatttcaacaatgagttggcagtggataatcaaaggcttaagaatgaggtcaagaaactaaaaagtgaaaatgaacaccttgcaacaagtgtgcaaaagttcaacaagggtcaatacctccaaaatgagctgcttatgaacactgttatgaaaaataacaagagtggtattggatacaatgcttttgtgcaaaagaaagctatcactcaatacaagccaaagcagactcacaagcctatcaaatgctttgagtgtggaaatgaaggtcattttgcccacaactgcaaagctaaaccaccaactcccttgcctaagcactcaagaccatttgctttcaatgctcactatgttctaagaaaggttgcaaatggaaagattaaggtgaactacaagaccggtgggagccattgggttattgacagtggatgcacacaacatatgacaggcaacccacggatgttcacctcactagatgagaatgttgatggtcaagataaaatcacatttggagacaactcaaaaggaaaagtgcaaggacttggcaaggtggcaatctcaaatgacttatcaatatcaaatgttctcttagttgcacccttgagcttcaatttattatcagtgggacaactctgtgatcttggacttcaatgcttattcactccatcagaggttattgtaacaaaaatggatgatgaatcaatggtattcaagggatttagatacaacaacctctacttagtggatttcacttcagaagatgcagacttaagaacttgcctcttcaccaaagcttctcttggatggctttggcataggaggcttgcacatgttgggatgagcacactcaagaaggtattaaagaaagatatggttagaggattaaaggatgtggtgtttgaaaaagacaagccatgcagtgcatgtcaagctggaaagcaagttgctaatacacatcctactaaagctttcatgtcaacatcaaggccactggaactacttcatatggatttatttggacctacaaattatgtcagtgccggtggcaacctctactgtctagtaattgttgatgacttctcaagatacacttgggtgttctttctccatgacaaatctgaagttgcatctatattcaagaaatttgccaagaaagcacaaaatgaatttgattgcaagattaagaagattagaagtgacaatggcaaagaatttgacaacaccaacattcatgagtactgtgatgaaattgggatcaagcatgaagtatctgccacatatacacctcaacaaaatggagttgttgaaaggaaaaataggatattgatcacccttgcaagaacaatgattgatgagtataacacaccggagaggttttgggctgaagctgtcaacactgcttgttatgcatcaaacaggctatttcctcaccggctacttgcgaagactccttatgaactgctaaatgggaaaaagccagacgtctctttcttccgggtatttgggtgcaaatgctacatctacaagaaacgccatcacctagggaagtttcaaagacgttgtgatattggttttcttttgggttattcattaaagtccaaagcatatcgagtattcaaccatgccactggcgtggtagaagaaacatatgatgtggaatttgatgagactaatggctcccaaggagcacttgaaaatcttgatgatgtaggtgatgagccacttagggaagcaatgaagaacatgcctattggagctatcaaaccaaaagaagatgaagaagaggtgcaaatcattgacaggccttcttcatcaaatgtaccacaagatgatgaaaaatatgagaggcatgcaaatgaagatacatttgtctcttatgaacaagcaagggtacaagccgaagatgttgatgctccaggatcctcttcccaagtggttgacaggagaaactcatcactacttcaagctcatcctgaaagccaaatcatcgggagtccttcacaaggggttattactcgatcacatagacatgctactttcattgaacatcactcttttgtttcttgtgttgagcctacttgtatagatgaggcgctacaggatccggactgggtgaatgccatgcatgaagaacttaacaacttcacccgtaacgaagtttggaccctggagaagcccccacaagatgcaagaatcattggaacaaagtgggtgttcagaaacaaacaagatgatcaaggtgtgattgtaagaaacaaggcaagacttgtcgcaaagggattctctcaagttgaaggcttagattttggagagacctttgcaccggttgctcgactagaagccatctgtatcctacttgcatatgcatcatgctatgatataaaactttatcaaatggatgtaaaaagtgcatttttaaatggcttcataaatgaacttgtatatgttgagcaaccgcctggatttgaagaccctagatatcctaaccatgcttacaggttgtccaaggcgctttatgggctaaagcaagctccaagggcttggtatgagcgtcttcgcgacttcctcatcgaaaagggcttcaagatcgggaccgtcgacacaactctcttcacaaagaaacataacggtgatattttcatttgtcaagtatatgttgatgatataatctttggctcgacaaatgactatcattgcaaggaatttggtgagttgatgtcgaaggagttcgagatgtcaatgattggtgagctaacatacttcctcggctttcaagtcaagcaaatgaaagatggtaactttctctcacaagagaagtataccaaagacttgttgaaaagattcaacatggagaagtgcaaaccaatcaagacccccatgcctacaaatggacatctcgacttagatgagggaggtaacccggttaatcaaactctctaccgttctatgattggtagtttattgtaccttaccgcatctaggcccgatattatgttcagtgtctgcatgtgtgctagatttcaatctaatcctaagaaagctcatcttcgcgctgttaagagaattcttaggtatctcaggcacaccacaagcgttggtctgtggtatccgaaaggagctacttttgatttaattggctattccgattcggattatggcggttgcaaaattgataggaaaagtacttctgggggatgccatcttcttggtagatcactagtttcatggacatccaaaaagcaaaatagtgttgccttgtcaactgccgaagcggaatacattgccgcaggtgcttgttgcacacagattttatatatgaaacaaactcttctagactatggcgtagttctagaaaaggtacctttgttgtgtgataatgagagtgctgttaaaattgctaataatcctgtacaacactctcgcaccaagcacattgatatccgtcatcactttcttagagatcatgttgctaaaggagatatcattttagaaggagtgagacatcagatcaggatgccgcgcacgaagaatgcgtcggcgccagggggtggcgatgatgaggagcctcgtcgccccttcaggcaggtcaagggcaagactgtctatttggagcagcaggaaggccgcaagaagcggtacgtacccgtggagtcttggctaccagctcagagagaccctgcagcaggtgatcttttcagcacacggattcaggagtcattcttcagagctcagatgtctgctcagatagctctgcgagtgcaccggcttttggatcttccagcctttctgcttgcagccggtgctgactctgaggcgcatctcacctatttgcctggccttcagacccttctgactatcagcggcagatacgttgaggagtgggtccgagtcttctacgcctctgtttggattgacccggatcatcactggataaggttccgctttgagcgagaggatgtcacaattactgccagtcagatccgtcagctctttggattcccagagtcgacgactcgcctacacagtctctgttacggctcttctgaccctcctcatcgccctcacggcggtgtggcaccagggacagctcacgtcgcggctctgttccgcccgcctttcacagatgggtcgcgacgttcaccggcagactttactacagcagcgaagtacttatatgagctcatcagacggactcttctgccaaggatgggatacagggaggctaccactcatattcaactttggctccttggtgccctggtctcccactctgagtttgacgttgtggacttcctgatttgtgagatcgaggacaccgttctggatgggattcgtgctcgtcggcagttgccttatgctcactacttatgccacatctttgcgcagctgattcagccacctcgctttcagagcacccttgaggcctcacgcctttttgacactcagggtacaacagctgatgatgatgatgatgatgatgattttggggttcctcctccgcctccgcctcctatgcctccacgctcacatgatcatgaggctgggagttctcgtgctgcccctgctcctccttcggctatggaccctgctcttgcgacgattctggccaacctggcagccgagcaggcccggttatccgagacgatgctctcgatgtttcagagcatgcaggacaggcaggatgcacttcagcagcagctacttcaggatcgggctgagagtagggcattcatggcccttatgcttcagcattctggtatctcagcacctccggttcagtctgctccacctcctccgcttcacgctccagtggtgccatcgattttgtcaggaccccctgttggtacctctccgctccggccggtcactttggcgttcacctctccggttctcagctctgtctgtccgcagccgccagtgccaccagcatctgctgttaccactaccgctgtggcagtatctgtgaccgcttctgttccggtagctcctgcagcgcggcctcagtctgagtcagtaccagctccagcttctaccgcagatcctggatccgagactgactctgaccctccgccggcgttcgccctgctacctcgaccacgaccgaatgcgcccccgccgcctcctcctgcttcagatgtttag

SEQ ID NO: 5099 - DNA, 4449 bp, Zea mays
  Clone ID: TF_ZmC3792_17
atgtctgacaacaggcgccgatgcaacaggcgtgctcagcaggagcagcatgaccagcaggaggaaaatcagaggcagcctcccccaccacccccgatgtcagtggagcagatgttcttgatgcagacccaggcagtgcaggccattggacagactctggcagccatgcagcaggctcaacagcagccccaaccccagttgcaagtgcagatgccccagatgccacgagataagcgtggtgagttcatgagagggcaccctcctaccttcgcccattctgctgaccccatggatgcagaagactggttgcgcgcagtggaaagggagctgcgcaccgcccaatgcgacgacagagagaaggttctgtatggtccccgccagctgaggggagcagcccagtcctggtgggagtcctacctcgccacccatgctgaccccgaagccatcacctgggaggaattcagcgagagtttccgtcggtaccatgtgccggagggactgatgatcgtgaagaaggaggagtttctggctctgaagcatggacccatgtctgttagtgagtacagagacaagtttctgcagctgtctcgttatgcacccgaggatgtcaacactgatgccaagaggcagtacaggttcatgagaggtttggtggatcccctacattaccagttgatgaatcacaccttccccaccttccagcacctgatcgatagggcagtcatgactgagaagaagcgtaaggatatggaagatcggaagcgcaagatgagtggaccccagtccggaggcatcagccgtccacgtttctcaggcagttcatctcagcaaggcagacctggtcacccacagggatatcagaatcagaatcagcgtccgcatcagcagcagtttcagaggcagtacccgcagcagcagcagcagtatcgtcagcacagccagcaaggaggtaatcagtatcagaagcagaacaaccaggcacctcgccttcctgccccagcagcgaatcagagcaaccaagcagccccagcacaaggaggaggcagaggatgtttccactgtggagatcaaggccactgggcgatgcagtgcccaaagaagatggctcagcagcagaccaaccccaatgctcccgcaaggcaaggtgtactgcagccggcagcaggcaatcgtaaccaagcgtacaaccgtggaaaggtgaaccacttggaggccgaagcgatccaggatgcaccagatgtggcagtaggtatgttctcagtcgaatctcatcccgcgaaagtgctatttgatactggtgcaactcattcttttgtcactgcaacatgggtagaattgcataacatctcagtagaggcaatggtgccacccatgaggattaattcggttggtggcaaggtgcaaacagataaaatatgttcaaacataatggtggaaataagggggataggattccctagtgacttaatagtaataggcacccctgggatagatgtcattctagggatgaactggttgatgaagtatgaagcaaatgttagttgtgacaaaaggaccataacattgaagtccccgtcaggagaagaggtagtggccgagctaaggatgcctaagtcagaagaaggagtctgtcatcagatttcagttgatagtaaggagcccaacccgctcgaggctatcaaggttgtgtcggactttccggatgtgtttcccgaggagctaacgggcatgccacccgaaaggaaagtcgagtttgccatagagcttatccctggtaccgcccccatttcaaagagagcctatcgagtgtctggaccagaattggtggaactcaagaagcagatagatgagatgttagagaagggttacatcagaccaagtacctcgccttgggccgctccagtattgtttgtagagaagaaagatggtaccaaaaggatgtgcatagactacagagccttgaatgaagtcactgtcaagaacaagtaccccctgccaaggatagaagatttgtttgaccagctcagaggtgccagcgtattctcgaagatagatctgagatcaggttaccatcagctcagaatccgaccctcggatataccgaagacggcattcatcaccaagtatgggttatatgagttcacggttatgtcctttggtttgacaaatgcgccagccttctttatgtacctgatgaacagtgtgttcatggactatctagacaagtttgtggtagtgttcatcgacgacattctcatatactctcaaagtgaggaagatcatgtagagcatttgaagatggtattgcaaaggcttcgagagcatcagttgtatgccaagctgggcaaatgcgagttctggattcatgaagtcttgtttctgggtcacatcataaaccaagatgggttggcagtggatccaaagaaagtagcagatatcctgaactggaaagcaccgaaggatgttcgtgggatcaagagcttcattggaatggctggatactataggcgtttcattgaaggcttctcaaagattgctagaccaatgacagcgttactagcgaagaaagttgagtttaagtggactcaaaagtgtcaggaagcatttgaagaactgaagaatagactgactacagctcctgtgctagtcctgcctgatgttcacaagtcattctcagtgtattgcgacgcttcgtacaccggattgggatgcgtgctaatgcaagaaggaagagttgtagcatactcgtctcgacagctgaagatccatgagaagaattatcccacacatgacctggaattggcagcagtggttcatgctttgaagacctggagacattacctgtacgggcagaagtgcgacatctacacagatcataagagtctgaagaagagtcaagttaatatgttggcctcgtacccaatgccatatgagttagccaaggaatttgacagactgagtctcggtttcctgaatagtacgcaaggagtgacagtggaattagagcccaccctagagcgggagatcaaagaagggcagaaggatgatgaaaacatcaacaaaatccggcagctgatcctagaaggaagaggcaaagactttcgagaggatgaagaaggggtaatctggttcaaggaccgattgtgtgttcccgacctcaaacctattcggggactgatcctcaaggaagctcatgagacagcctactccatacacccgggaagtgagaagatgtaccaggatttaaaaaggaggttttggtggtatggtatgaaaagggagatcgcagaatatgttgccatctgtgttagctgtcagagaaccaaagcagagcatcagaggcccgccggactgttgcagccattgcggattcctcagtggaagtgggatgagatcgggatggatttcatagttggcctacctcgtacccgggccggttatgattccatctgggtggtcgtggaccgcttaacaaaggtggcccacttcatacctgtgaagacgacatacactggagcaacgttagctgagttatacatgtcacggatagtctgccttcatggtgtgccgaagaagatagtgtcagatcgaggaacgcagttcacctctcatttttggcagcagctacaagaagctttgggcacacatttgaacttcagctcagcttatcacccgcagacagacggtcagactgaaagaactaatcagatcctagaagatatgttgagagcctgtgcgttgcaagacaagtcaggatgggacaaaaggttaccttatgcagaattctcttacaacaatagttaccaggccagcttgaagatgtcaccgtttcaggcactctacggacggagttgtaggactccgctgcactgggaccagcctggagagagacaggtgtttggccccgacatcttgcttgaagccgaagagaatatcaaaatggttcgggagaacctgaagacagcccagtcaagacagcgaagctatgctgacagaaggagaagggaactgagttttgaagtgggagactacgtctatctgaaggtgtcacctatcaggggagtcagaaggttcggagttaaaggcaagttagcaccccggtacgtcggaccatatcagattcaagccaagcgtggagaagtggcctaccagctcgacctaccagagagtttgtcagcagtgcacaacgtgttccatgtgtcgcaattgaagaagtgtctgcgagtgccagaagaacagttgccagtggagggtttggaagtccaagaagatctgacatacatagagaagccaacgcagattctggagtttgcagacagagtcacccggaggaacaccatcagaatgtgcaaagtcagatggggtcaccactcggaggatgaagcaacctgggaacgagaagatgacctgaaggccaaataccctgaactctttgctgaccaaccttga

SEQ ID NO: 5100 - DNA, 4365 bp, Zea mays
  Clone ID: TF_ZmC3792_22
atgccccagatgccacgggataagcgtggtgagttcatgagagggcaccctcctaccttcgcccattctgctgaccccatggatgcagaagactggctgcgcgcagtggaaagggaactgcgcaccgcccaatgtgacgacagggagaaggtcctgtatggtccccgccagctaaggggagcagcccagtcctggtgggagtcctacctcgccacccatgctgaccccgaagccatcacctgggaggaattcagcgagagtttccgcaggtaccatgtgccggagggactgatgatcgtgaagaaggaggagtttctggctctgaagcagggacccgtgtctgttagtgagtacagagacaagtttctgcagctgtctcgttatgcacccgaggacgtcaacactgatgccaagaggcagtacaggttcatgaggggtttggtggatcccctgcattaccagctgatgaatcacaccttccccaccttccagcacctgatcgatagggcagttatgactgagaagaagcgtaaggatatggaagatcggaagcgcaagatgagtggaccccagtccggaggcatcagccgtccacgcttctcaggcagttcgtctcagcaaggcagacctggtcacccacagggatatcagaatcagaatcagcgtccgcatcagcagcagtttcagaggcagtacccgcagcagcagcagcagtatcgccagcacagccagcagggaggtaatcagtatcagaagcagaacaaccaggcacctcgccttcctgccccagcagcaaatcagagcaaccaagcagccccagctcaaggaggaggcagaggatgtttccactgcggagatcaaggccactgggcgatgcagtgcccaaagaagttggcgcagcagcagaccaaccccaatgctccaacaaggcaaggtgtactgcagccggcagcaggcaatcgtagccaagcgtacaaccgtggaaaggtgaaccacttggaggccgaagcgatccaggatgcacccgatgtggcagtaggtatgttctcagtcgaatctcatcccgcaaaagtgctatttgatactggtgcaactcattcgtttgtcactgcaacatgggtagaattgcataacatctcagtagaggcaatgatgccgcccatgaggattaattcggttggtggcaaggtgcaaacagataaaatatgctcaaatgtaagggtggaaataagggggatagggttccccagtgacctaatagtaatagacacccccggggtagatgtcatcctagggatgaactggttgatgaagtatgaggcgaatgttagttgtgacaagaggaccgtaacattgaagtccccgtcaggagaagaggtagtggccgagctatggatgcctaaatcagtggagggagcctgtcatcagatttcagttgatagtaaggagcccaacccgctcgaggctatcaaggttgtgtccgactttccggatgtgtttcccgaggagctaacgggcatgccacccgagagaaaggttgaatttgccatagagcttgtccctggtaccgcccccatttccaaaagagcctatcgagtgtctggaccagaactggtggaactcaagaagcagatagatgagatgttagagaagggttacatcaggccaagcacctcgccttgggccgctccagtgttgtttgtagagaagaaagatggtaccaaaaggatgtgcatagactacagagccctgaatgaagtcactgtcaagaacaagtaccccctgccaaggatagaagatctgttcgaccagctcagaggtgccagcgtattctcgaagatagatctgagatcaggttaccatcaactcagaatccgaccctcggacataccgaagacggcattcatcaccaagtatgggttatatgagttcacagttatgtcctttggtttgacaaatgcgcccgccttctttatgtacctgatgaacagtgtgttcatggattatctggacaagtttgtggtagtgttcatcgacgacattctcatatactctcaaagtgaggaagatcatgtagagcatttgaagatggtattgcaaaggcttcgagagcatcagttgtatgccaagctgggcaaatgcgagttctggattcatgaagtcttgtttctgggtcacatcataaatcaagatgggttggcagtggatccaaagaaagtagcagatatcctgaactggaaagcaccgaaggatgttcgcgggatcaagagcttcatcggaatggccggatactacaggcgtttcatcgaaggcttctcaaagattgctagaccgatgacagcgttactagcgaagaaagttgagtttaagtggacccaaaagtgtcaggaagcatttgaagaactgaagaatagattgactacagctcctgtgttagtcctgcctgatgttcacaagccattctcagtgtattgcgacgcttcttacaccggattgggatgtgtgctaatgcaagaagggagagttgtagcatactcgtctcgacagctgaagatccatgagaaaaactatcccacacatgacctggagttggcagcagtggttcatgctttaaagacctggagacattacctgtatgggcagaagtgcgacatctacacagatcataaaagtctgaagtacatattcacccagtcagagttaaacatgaggcagcgaagatggttggaattgatcaaagactacgagctggagatacattaccatccaggcaaagccaatgttgttgcagatgctctgagcaggaagagtcaagtcaatatgttggcctcgtacccgatgccgtatgagttagccaaagagttcgacagactgagcctcggtttcctgaacagtacgcaaggagtaacggtggagttagagcccaccctagagcgggagatcaaagaagggcagaaggacgatgaaagcatcaacaagatccggcagctgatcttagaaggaagaggcaaagactttcgagaggatgaagagggggtaatatggttcaaggaccgattgtgtgttcccgacctcaaacctattcgggagctgatcctcaaggaagctcatgagacagcctactccatacacccggggagcgagaagatgtaccaggacttaaaaagaaggttttggtggtatggcatgaaaagggagatcgcagaatatgtcgccatctgcgatagctgtcagagaaccaaagcggagcaccagaggcctgccggattgttgcagccattgcggattcctcagtggaagtgggatgagatcgggatggattttatagttggcctacctcgcacccgggccggttatgattccatctgggtggttgtggaccgcctaacaaaggtggcccatttcatacccgtgaagacaacatacaccggagcaacgttagctgagttatacatgtcacggatagtctgccttcatggtgtgccgaagaagatagtgtcagatcgaggaacgcagttcacatctcatttttggcagcagctacaagaagctttgggcacccatttgaacttcagctcagcttatcacccgcagacagacggtcagactgaaagaactaatcagatcctagaagatatgctgagagcttgtgcgttgcaagacaagtcaggatgggacaaaaggttaccttatgcagaattctcctacaacaatagttatcaggccagcttgaagatgtcgccgtttcaggcactctatgggcggagttgtaggaccccgctgcattgggaccagcctggagagagacaggtgtttggccccgacatcttgcttgaagccgaagagaatatcaaaatggttcgggagaacctgaagatagcccagtcaagacagcgaagctatgcggaccgaaggagaagagaactgagtttcgaagtgggggattacgtctatctgaaggtgtcacctatcaggggagtcagaaggttcggagttagaggcaagctagcaccccggtacgtcggaccatatcagattcaagcaaagcgtggagaagtggcctaccagctcaacctaccagagagcttgtcagcagtgcacaatgtgttccacgtatcgcaattgaagaagtgtctgcgagtaccagaagaacagttgccagtggagggtttggaggtccaggaggatctgacatacatagaaaagccaacgcagattctggagtttgcagacagagtcacccggaggaacaccatcagaatgtgcaaagtcagatggggtcaccactccgaggaagaagcaacctgggaacgagaagatgatctgaaggccaaataccctgaactctttgctgaccaaccttga

SEQ ID NO: 5101 - DNA, 5418 bp, Zea mays
  Clone ID: TF_ZM3616.C5.o3.fg
atggctcgtcttagacacactgcacgtaagtcggtgattcctttcctgccgtctcgacttgcggagcgtcctctgcaccgcaccgtgtctggtcagtcgagtcacctggagaggctgcaccaccgcctgcgtgaggagcaggaacgccggcgccagcacagagagcagcagggctcttcctccccaccccagcgagaggtggagtccgtgaggccccgttcctctgtggcccagctggaggcgccccctgcaccgccacgggacgtcccggctgttggaggagctactggtggagatcctggaggagaccccgacgacgacgactcagaccacagcacggagtcttctgagccgcaggaggcggaaggatgggtcgcccgacccatcacccgtgacgccgctcgcggttgtcacttccacgacgcactcgacaccttgctgcgccaggctttcgaccggcacacctggtcgatcgagtatcgttgtgtagtctaccagcacagttgcgggaggtacccggaccgctgggaggctacctgcctagttcgccgtccggaggatgacctccggggtgcggaggccgtttcggagcactattccatctccgagagggacactgcagaggcggctatgcaggatgcagcacggcgtgcactctcccagtactgttctttgttcggtggggtggccgacggtcttaaccttcggtactacccccgccgccctactggcagcaccgagagtgtggttgtctcacctgttggtgaggctaaccctaggttgagcagcacagtcaacctagtcgcagtgcttaacacggagctggaccactctctggacgagctaagcagggctcgaacggagattgcggagttgcgtgctgagttggcagagcgccatcaccaggagggtggttcccccgcccctgtcgggactcagcacccataccgctcaccgccacgtggtcaccacacttatggttcccctattgtaagatcaatgctgatgtatgaatgtcttccacagatgtctgacaacaggcgccgatgcaacaggcgtgctcagctagagcagcatgaccagcaggaggaaaatcagaggcagcctcccccaccacccccgatgtcagtggagcagatgttcttgatgcatacccaggcagtgcaggccattgggcagactctagcagccatgcagcaggctcaacagcaaccccaaccccaattgcaagtgcagatgccccagatgccacgagataagcgtggtgagttcatgagagggcaccctcctaccttcgcccattctgctgaccccatggatgcagaagactggctgcgcgcagtggagagggagctgcgcaccgcccaatgcgacgacagggagaaggttctgtatggtccccgccagctgaggggagcagcccagtcctggtgggagttctacctcgccacccatgctgaccccgaagccatcacttgggaggaattcagcgagagtttccgtcggtaccatgtgccggagggactgatgatcgtgaagaaggaggagtttctggctctgaagcagggacccctgtctgttagtgagtacagagacaagtttctgcagctatctcgttatgcacccgaggatgtcaacactgatgccaagaggcagtacaggttcatgagaggtttggtggatcccctgcattaccagctgatgaatcacaccttccccaccttccagcacctgatcgatagggcagtcatgactgagaagaagcgtaaagatatggaagatcggaagcgcaagatgagtggaccccagtccggaggcatcagccgtccacgtttctcaggcagttcatctcagcaaggcagacttggtcacccacagggatatcaaaatcagaatcagcgtccgcatcagcagcagtttcagaggcagtacccgcagcagcagcagcagtatcgtcagcacagccagcagggaggtaatcagtatcagaagcagaacaaccaggcacctcgccttcctgccccagcagcgaatcagagcaaccaagcagccccagcacaaggaggaggaagaggatgtttccactgtggagatcaaggccactgggcgatgcagtgcccaaagaagacggctcagcagcagaccaaccccaatgctccagcaaggcaaggtgtactgcagccggcagcaggcaatcgtaaccaagcgtacaaccgtggaaaggtgaaccacttggaggccgaagcgatccaggatgcacccgatgtggcagtaggtatgttctcagtcgaatctcatcccgcgaaagtgctatttgatactggtgcaactcattcatttgtcactgcaacatgggtagaattgcataacatctcagtagaggcaatgatgccacccatgaggattaattcggttggtggcaaggtgcaaacagataaaatatgttcaaacataatggtggaaataagggggataggattccccagtgacttaatagtaatagacacccccgggatagatgtgattctagggatgaactggttaatgaagtatgaagcaaatgttagttgtgacaagaggaccataacattgaagtccccgtcaggagaagaggtagtggccgagctaaggatgcctaagtcagaagagggagtctgtcaccagatttctgttaatagtaaggagcccaacccgctcgaggctatcaaggttgtgtcggactttccggatgtgtttcccgaggagctaacgagcatgccccccgagagaaaagtcgaatttgccatagagcttatccctggtaccgcccccatttcaaagagagcctatcgagtgtctggaccagaattggtggaactcaagaagcagatagacgagatgttagagaagggttacattagaccaagcacctcgccttgggccgctccagtgttgtttgtagagaagaaagatggtaccaaaaggatgtgcatagactacagagccttgaatgaagtcactgtcaagaacaagtaccccctgccaaggatagaagatttgttcgaccagctcagaggtgccagcgtattctcgaagatagatctgagatctggttatcatcaactcagaatccgaccctcggatataccgaagacggcattcatcaccaagtacgggttatatgagttcacagttatgtcctttggtttgacaaatgcgccagccttctttatgtacctgatgaacagtgtgttcatggattatctggacaagtttgtggtagtgttcatcgatgacattctcatatactctcaaagtgaggaagatcatgtagagcatttgaagatggtattgcaaagacttcgagagcatcaattgtatgccaagctaggcaagtgcgagttctggattcatgaagtcttatttctgggtcacatcataaaccaagatgggttagcagtggatccaaagaaagtagcagatatcctgaactggaaagcaccgaaggacgttcgtgggatcaagagctttattggaatggccggatactataggcgtttcattgaagtcttctcaaagattgctacaccaatgacagcgttgctagcgaagaaagttgagtttaagtggactcaaaagtgtcaggaagcatttgaagaactgaagaatagattgactacagctcctgtgttagtcctgcctgatgtccacaagtcattctcagtgtattgcgacgcttcgtacaccggattgggatgtgtgctaatgcaagaaggaagagtggtagcatactcatctcgacagctgaagatccatgagaagaattcccccacacatgacctggaattggcagcagtggttcatgccttaaagacctggagacattacctgtatgggcagaagtgtgacatctacacagatcataagagtctgaagtacatattcacccagttagagttaaacatgaggcagcgaagatggttggaattgatcaaagactatgagttggagatacattaccatccaggcaaagccaatgttgttgcagatgctctgagcaggaagagtcaagttaatttgttggcctcgtacccgatgccgtacgagttagccaaagagttcgacagactgagcctcggtttcctgaacagtacgcaaggagtaacagtggaattagagcccaccctagatcgggagatcaaagaagggcagaaggatgatgaaaacatcaacaagatccggcagctgatcctagaaggaagaggcaaagactttcgagaggatgaagagggggtaatctggttcaaggaccgattgtgtgttcccgacctcaaacctattcgggaactgatcctcaaggaagctcatgagacagcctactccatacacccaggaagtgagaagatgtaccaggatttaaaaaggaggttttggtggtatggcatgaaaagagagatcgcagaatatgtcgccatctgtggtagctgtcagagaaccaaagcagagcatcagaggcctgccggattgttgcagccattgcggattcctcagtggaagtgggatgagatcgggatggatttcatagttggcctacctcgtacccgggccggctacgattccatctgggtggttgtggaccgcttaacaaaggtggcccatttcatacctgtgaagacgacatacaccggagcaacgttagctgagttatacatgtcacggatagtctgccttcatggtgtgccgaagaagatagtgtcagatcgaggaacacagttcgcctctcatttttggcagcagctacaagaagctttgggcacacatttgaacttcagctcagcttatcacccgcagacagacggtcagactgaaagaactaatcagatcctagaagatatgttgagagcctgtgcgttgcaagacaagtcaggatgggacaaaaggttaccttatgcagaattctcctacaacaatagttatcaggccagcttgaagatatcgccgtttcaggcactctatgggcggagttgcaggactccgctgcattgggaccaggctggagagagacaggtgtttggccccgacatcttgcttgaagccgaagagaatatcaaaatggttcgggagaacctgaagacagcccaatcaagacagcgaagctatgcggacagaaggagaagggaactgagttttgaagtgggagactacgtctatctgaaggtgtcacctatccgaggagtcagaaggttcggagttaaaggcaagttagcacctcggtacgttggaccatatcagattcaagcaaagcgtggagaagtggcttaccagcttgacctaccagagagtttgtcagcagtgcacaatgtgttccatgtgtcgcaattgaagaagtgtctgcgagtaccagaagaacagttgccagtggagggtttggaagtctag

SEQ ID NO: 5102 - DNA, 4326 bp, Zea mays
  Clone ID: TF_ZM4327.C5.o5.fg
atgtcagtggagcagatgttcttgatgcagacccaggcggtgcaagccatcgggcagactctggcagccatgcagcaggctcaacagcaaccccaaccccaattgcaagtgcagatgccccagatgccacgagataagcgtggtgagttcatgagagggcaccctcctaccttcgcccattctgctgaccccatggatgcagaagactggttgcgcgcagtggagagggagctgcgcaccgcccaatgcgacgacagggagaaggttctgtatggtccccgccagctgaggggagcagcccagtcctgtgagtacagagacaagtttctgcagctgtctcgttatgcacccgaggatgtcaacactgatgccaagaggcagtacaggttcatgagaggtttggtggatcccctgcattaccagctgatgaatcacaccttccccaccttccagcatctgatcgatagggcagttatgactgagaagaagcgtaaggatatggaagatcggaagcgcaagatgaatggaccccagtccggaggcatcagccgtccgcgcttctcaggcagttcatctcagcaaggcagacctggtcacccacagggatatcagaatcagaatcagcgtctgcatcagcagcagtttcagagacagtacccgcagcagcagcagcagtatcgtcagcacagccagcagggaggtaatcagtatcagaagcagaacaaccaggcacctcgccttcctgccccagcagcgaatcagagcaaccaagcagccccagcacaaggaggaggcagaggatgtttccactgtggagatcaaggccactgggcgatgcagtgcccaaagaagacggctcagcagcaaaccaaccccaatgccccagcaaggcaaggtgtactgcagccggcagcaggcaatcgtagccaagcgtacaaccatggaaaggtgaaccacttggaagccgaagcgatccaggatgcaccagacgtggcagtaggtatgttctcagtcgaatctcatcccgcgaaagtgctatttgatactggtgcaactcattcatttgtcactgcaacatgggtagaattgcatagcatctcagtagaggcaatgatgccacccatgaggattaattcggttggtggcaaggtgcaaacagataaaatatgttcaaacataatggtggaaataagggggataggattccccagtgacttaatagtaatagacacccctgagatagatgttattctagggatgaattggttaatgaagtatgaagcaaatgttagttgggacaagaggaccgtaacattgaagtccccgtcaggagaagaggtagtggccgagctaaggatgcctaagtcagaagagggagtctgtcaccagatttcagttgatagtaaggagcccaacccgctcgaggctatcaaggttgtgtcggactttccggatgtgtttcccgaggagctaacaggcatgccacccgagagaaaagtcgaatttgccatagagcttatccctggtaccgcccccatttccaaaagagcctaccgagtgtctggaccagaattggtggaactcaagaagcagatagatgagatgttagagaagggttacatcaggccaagcacctcgccttgggccgctccagtgttgtttgtagagaagaaagatggtactaaaaggatgtgcatagactacagagccttgaatgaagtcactgtcaagaacaagtaccccctgccaaggatagaagatttgttcgaccagctcagaggtgccagcgtattctcgaagatagatctaagatctggttatcatcaactcagaatccgaccctcggatataccgaagacggcattcatcaccaagtacgggttatatgagttcgcggttatgtcctttggtttgacaaatgcgccagccttctttatgtacctgatgaacagtgtgttcatggattatctggacaagtttgtggtagtgttcatcgatgacattctcatatactctcaaagtgaggaagatcatgtagagcatttgaagatggtattgcaaagacttcgagagcatcagttgtatgccaagctgggcaaatgcgagttctggattcatgaagtcttatttctgggtcacatcataaatcaagatgggttagcagtggatccaaagaaagtagcagatatcctgaactggaaagcaccgaaggatgttcgtgggatcaagagcttcattgggatggccggatattataggcgtttcatcgaaggcttctcaaagattgctagaccaatgacagcgttactagcaaagaaagttgagtttaagtggacccaaaagtgtcaggaagcatttgaagaactgaagaatagattgactacagctcctgtgttagtcctgcctgatgttcacaagtcattctcagtgtattgcgacgcttcgtacaccagattgggatgtgtgctaatgcaagaagggagagttgtagcgtactcatctcgacagctgaagatccatgagaagaattatcccacacatgacctggaattggcagcagtggttcatgctttaaagacctggagacattacctgtatgggcagaagtgcgacatctacacagatcataaaagtctgaagtacatattcacccagtcagagttaaacatgaggcagcgaagatggttggaactgatcaaagactatgagttggagatacattaccatccgggcaaagccaatgttgttgcagatgctctgagcaggaagagtcaagtcaatatgttggcctcgcacccaatgccgtatgagttagccaaggagtttgacagactgagcctcggtttcctgaatagtacgcaaggagtgacagtggaattagagcccaccctagagcgggagatcaaagaagggcaggaggatgatgaaaacatcaacaagatccggcagctgattctagaaggaagaggcaaagactttcgagaggatgaagagggggtaatctggttcaaggaccgattgtgtgttcccgacctcaaacctattcgggaactgatcctcaaggaagctcatgagacagcctactccatacaccctggaagtgagaagatgtaccaggatttaaaaaggaggttttggtggtatggcatgaaaagagagatcgcagaatatgtcgccatctgtgatagctgtcagagaaccaaagcagagcatcaaaggcctgccggattgttgcagccattgcggattcctcagtggaagtgggatgagatcgggatggatttcatagttggcctacctcgtacccgggccggctacgattccatctgggtggttgtggaccgcttaacaaaggtggcccatttcatacctgtgaagacgacatacaccggagcaacgttagctgagttatacatgtcacggatagtctgccttcacggtgtgccgaagaagatagtgtcagatcgaggaacacagttcacctctcatttttggcagcagctacaagaagctttgggcacacatttgaacttcagctcagcttatcacccgcagacagacggtcagactgaaagaactaatcagatcctagaagatatgttgagagcctgtgcgttgcaagacaagtcaggatgggacaaaaggttaccttatgcagaattctcctacaacaatagttaccaggccagcttgaagatgtcaccgtttcaggcactctacggacggagttgtaggactccgctgcattgggaccagcctggagagagacaggtgtttggccccgacatcttgcttgaagccgaagagaatatcaaaatggttcgggagaacctgaagacagcccagtcaagacagcgaagctatgctgacagaaggagaagggaactgagtttcgaagtgggagattacgtctatctgaaggtgtcacctatcaggggagtcagaaggttcggagttaaaggcaagttagcaccccggtacgtcggaccatatcagattcaagccaagcgtggagaagtggcctaccagctcgacctaccagagagcttgtcagcagtgcacaatgtgttccacgtgtcgcaattgaagaaatgtctgcgagtaccagaagaacagttgccagtggagggcttggaagtccaggaggatctgacatacatagagaagccaacgcagattctggaggttgcagacagagtcacccagaggaataccatcagaatgtgcaaagtcagatggggtcaccattcggaggaagaagcaacctgggaacgagaagatgatctgaaagccaaataccctgaactctttgctgaccaaccctga

SEQ ID NO: 5103 - DNA, 5413 bp, Zea mays
  Clone ID: TF_ZM4454.C1.o11.fg
ggggctcaggctgtttcctgagtacctctccatggctcgtcttagacacactgcacgtaagtcggtgattcctttcctgccgtctcgacttgcggagcgtcctctgcaccgcaccgtgtccggacagtcgagtcacctggagaggctgcaccaccgcctgcgtgaggagcaggaacgccggcgccagcacggagagcagcagggctcttcctcctcaccccagcaggaggtggagaccgtgaggccccgttcctctgttgcccagcttgaggcgccccttgtaccgccgcgggacgccccggctgttggaggagctactggaggagatcccgacgacgacgactcagaccacagcacggagtcttctgagtcgcaggaggcggaaggatgggtcgcccgacccatcacccgtgacgccgctcgcggttgtcacttccacgacgcactcgacaccttgctgcgccaggctttcgaccggcacacctggtcgatcgagtatcgttgtgtagtctaccagcacagtcgcgggaggtacccggaccgctgggaggctacctgcctagttcgccgtccggaggatgacctccggggtgcggaggccgtttcggagcactattccatctccgagagggacactgcagaggcggctatgcaggatgcagcacggcgtgcactctcccagtactgttctttgttcggtggcgtggccgacggtcttaaccttcggtactacccccgccgccctactggcagcacggagagtgtggttgtctcacctgttggtgaggctaaccctaggttgagcagcacagtcaacctagtcgcggtgcttaacactgagctggatcactctctggacaagctaagcagagctcgaacggagattgcggagttgcgtgctgagttggcagagcgccaccaccaggagggtggttctcccgcacctgttgggactcagcacccataccgctcaccgccacgtggtcaccacacttatggttcccctgtctgcgcagatgcaacaggcgtgctcagctggagcagcatgaccagcaggaggaaaatcagaggcagcctccccccaccacccccgatgtcagtggagcagatgttcttgatgcagacccaggcagtgcaggccattgggcagactctggcagccatgcagcaggctcaacagcaaccccaaccccaattgcaagtgcagatgccccagatgccacgagataagcgtggtgagtttatgagagggcaccctcctaccttcgcccattctgctgaccccatggatgcagaagactggctgcgcgcagtggaaagggagctgcgcaccgcccaatgcgacgacagggagaaggttctgtatggtccccgccagctgaggggagcagcccagtcctggtgggagtcctacctcgccacccatgctaaccccgaagctatcacttgggaggaattcagcgagagtttccatcggtaccatgtgctggagggactgatgatcgtgaagaaggaggaatttctggccctgaagcagggacccctgtctgttagtgagtacagagataagtttctgcagctgtcttgttatgcacctgaggacgtcaacactgatgctaaaaggcagtacaggttcatgagaggtttggtggatcccctgcattaccagttgatgaatcacaccttccccaccttccagcacctgatcgatagggcagttatgactgagaagaagcgtaaggacatggaagatcggaaacgcaagatgagtggaccccagtccggaggcatcagccgtccacgtttctcaggcagttcatctcagcaaggcagacctgcagcgaatcagagcaaccaagcagccccagcacaaggaggaggcagaggatgtttccactgtggagatcaaggccactgggcgatgcagtgcccaaagaagacggctcagcagcagaccaaccccaatgctccagcaaggcaaggtgtactgcagccggcagcaggcaatcgtaaccaagcgtacaaccgtggaaaggtgaaccacttggaggccgaagcgatccaggatgcaccagatgtggcagtaggtatgttctcagtcgaatctcatcccgcgaaagtgctatttgatactggtgcaactcattcatttgtcactgcaacatgggtagaattgcatagcatctcagtagaggcaatgatgccacccatgaggattaattcggttggtggcaaggtgcaaacagataaaatatgttcaaacataatggtggaaataagggggataggattccccagtgacttaatagtaatagacacccctgggatagatgttattctagggatgaactggttaatgaagtatgaagcaaatgttagttgtgacaagaggaccataacattgaagtccccgtcaggagaagaggtagtggccgagctaaggatgcctaagtcagaagagggagtctgtcaccagatttcagtcgatagtaaggagcccaacccgctcgaggctatcaaggttgtgtcggactttccggatgtgtttcccgaggagctaacgggcatgccacccgagagaaaagtcgaatttgccatagagcttatccctggtaccgcccccatttcaaaaagagcctatcgagtgtctggaccagaattggtggaactcaagaagcagattgatgaactgttagaaaagggttacatcagaccaagcacctcgccttgggccgctccagtgttgtttgtagagaagaaagatggtaccaaaaggatgtgcatagattacagagccctgaatgaagtcactattaagaacaagtaccccctgccaaggatagaagatttgttcgaccagcttagaggtgccagcgtattctcgaagatagatctaagatctggttatcatcaactcagaatccgaccctcggatataccgaagacggcattcatcaccaagtacgggttatatgagttcacagttatgtcctttggtttgacaaatgcgccagccttctttatgtacctgatgaacagtgtgttcatggattatctggacaagtttgtggtagtgttcatcgatgacattctcatatactctcaaagtgaggaagatcatgtagagcatttgaagatggcattgcaaagacttcgagagcatcagttgtatgccaagttgggcaaatgcgagttctggattcacgaagtcttgtttctgggtcacatcataaaccaagatgggttggcagtggatccaaagaaagtagcagatatcctgaactggaaagcaccgaaggatgctcgtgggatcaagagcttcattggaatggctggatactataggcgtttcattgaaggcttctcaaagattgctagaccaatgacagcgttgctagcgaagaaagttgagtttaagtggactcaaaagtgtcaggaagcatttgaagaactgaagaatagattgactacagctcctatgttagttctgcctgatgttcacaagtcattctcagtatattgcgacgcttcttacaccggattgggatgtgtgctaatgcaagaagggagagttgtagcgtactcatctcgacagctgaagatccatgagaagaattatcccacacatgacctggagttggcagcagtggttcatgctttaaagacctggagacattacctgtatgggcagaagtgcgacatctacacagatcataaaagtctgaagtacatattcacccagtcagagttaaacatgaggcagcgaagatggttggaactgatcaaagactatgagttggagatacattaccatccgggcaaagccaatgttgttgcagatgctctgagcaggaaaagtcaagtcaatatgttggcctcgcacccaatgccgtatgagttagccaaggagtttgatagactgagcctcggtttcctgaatagtacgcaaggagtgacagtggaattagagcccaccctagagcgggagatcaaagaagggcagaaggatgatgaaaacatcaacaagatccggcagctgatcctagaaggaagaggcaaggactttcgagaggatgaagaaggggtaatctggttcaaggaccgattgtgtgttcccgacctcaaacctattcgggaactggtcctcaaggaagctcatgagacagcctactccatacaccctggaagtgagaagatgtaccaggatttaaaaaggaggttttggtggtatggcatgaaaagagagatcgcagaatatgtcgccatctgtgatagctgtcagagaaccaaagcagagcatcaaaggcctgccggattgttgcagccactgcggattcctcagtggaagtgggatgaaatcgggatggatttcatagttggcctacctcgtacccgggccggctacgattccatctgggtggttgtggaccgcttaacaaaggtggcccatttcatacctgtgaagacgacatacaccggagcaacgttagctgagttatacatgtcacggatagtctgccttcatggtgtgccgaagaagatagtgtcagatcgaggaacgcagttcacatctcatttttggcagcagctacaagaagctttgggcacccatttgaacttcagctcagcttatcacccgcagacagacggccagactgaaagaactaaccagatcctagaagatatgttgagagcctgtgcgttgcaagacaagtcaggatgggacaaaaggttaccttatgcagaattctcctacaacaatagttaccaggccagcttgaagatgtcaccgtttcaagcactctacggacggagttgtaggactccgctgcattgggaccagcctggagagagacaggtgtttggccccgacatcttgcttgaagccgaagagaatatcaaaatggttcgggagaacctgaagacagcccagtcaagacagcgaagctatgctgacagaaggagaagggaactgagtttcgaagtgggagattacgtctatctgaaggtgtcacctatcaggggagtcagaaggttcggagttaaaggcaagttagcaccccggtacgtcggaccatatcagattcaagccaagcgtggagaagtggcctaccagctcgacctaccagagagcttgtcagcagtgcacaatgtgttccatgtgtcgcaattgaagaagtgtctgcgagtaccagaagaacagttaccagtggagggcttggaagtccaggaggatctgacatacatagagaagccaacgcagattctggaggttgcagacagagtcacccggaggaataccatcagaatgtgcaaagtcagatggggtcaccattcggaggaagaagcaacctgggaacgagaagatgacctgaaggccaaataccctgaactctttgctgaccaaccttga

SEQ ID NO: 5104 - DNA, 645 bp, Zea mays
  Clone ID: TF_ZM4581.C2.o10.fg
atggaggacttgagtgcaatgaccacgacaactgtgatcagaaagattgcagcatttgaaatatcgcaaaaaatgggtcaagaggagccaacttcttcaaggccatatgcttttgcatgtgatgaaaagaagaaaggcaagaaaaaggctcccactccaagatccttaagtgaagaagaggaagaagaagaaagaaaaagcaaagaaagagaggatgttttgcatgtggggagaagggtcacttcagggacaactgtccaaatatgtccgaacgcacaaaaaagaggagcaaaggcaaggcattcacaagtgtcaaaacttgggatgattcttcaagcgaagatgatcctccatggtctcacagccaccaatcctcatcattcttatcacggccatcacacaagtgctctatggcaagaggataacaccactgcggaagtgaacaagcctggggagggagaaaccatggtttgtaggctatgctacaaggaatgccacaagtcttaccaatgcaaggtgaagaccgaggataagcaaaagcaaaagctcaagcaaaagccaacaagcaaaatctccaacacctacatcaacaaggtggacaaaaaggtcgctacgccatatttgatcaagaagaaaaagaattga

SEQ ID NO: 5105 - DNA, 5778 bp, Zea mays
  Clone ID: TF_ZM4889.C4.o1.fg
ccgcggaggtccgccaccgtcgccccgggccaccgtcgcgccattgccgtcgccgaggagtccccggagcccgccttgagggggctcaggctgtttcctgagtacctctccagggtagtgaaactgatatatcagtcgtgctcacggttaagagcagccttgggatcctctttgattagagatacagatggttcgagatacaaggattatgttatggttttgatggctcgtcttagacacactgcatgtaagtcggtgattcctttcctgccgtctcgacttgcggagcgtcctctgcaccgcaccgtgtccggtcagtcgagtcatctggagaggctgcaccaccacctgcgtgaggagcaggaacgtcggcgccagcatagagagcagcagggctcttcctccccaccccagcaagaggtggagtccgtgaggccccgttcctctgttgcccagctggaggcgccccctgcaccgccgcgggacgccccggctgttggaggagctactggaggagatcttggaggagaccccgacgatgacgactcagaccacagcacggagtcttctgagccgcaggaggcggaaggatgggtcgcccgacccatcacccgtgacgccgctcgcggttgtcacttccacgacgcactcgacaccttgctgcgccaggcttttgactggcacacctggtcgatcgagtatcgttgtgtagtctaccagcacgggaggtacccggaccgctgggaggctacctgcctagttcgccgtccggaggatgacctccggggtgcggaggccgtttcggagcactattccatctccgagagggacactgcagaggcgactatgcaggatgcagcacgacgtgcactctcccaatactgctctttgttcggtggggtggccgacggtcttaaccttcggtactacccccgccgccctactggcagcaccgagagtgtggttgtctcacctgttggtgagggtaaccctaggttgagcagcacagtcaacctagtcgtggtgcttaacactgagctggatcactctctggacgagctgagcagggctcgaacggagattgcggagttgcgtgctgagctggcagagcgccatcaccaggagggtggttcccccgctcctattgggactcagcacccataccgctcaccgccacgtggtcaccacacttatggttcccctatgtctgacaacaggcgccgatgcaaccggcgtgctcagcaggagcagcacgaccagcaggaggaacatcagaggcagcctcccccaccacccccgatgtcagtggagcagatgttcttgatgcagacccaggcagtgcaggccattgggcagacactggcagccatgcagcaggcccaacagcaaccccaaccccaattgcaagtgcagatgccccagatgccacgagataagcgtggtgagttcatgagagggcaccctcctaccttcgcccattctgctgaccccatggatgcagaagactggctgcgcgcagtggaaagggaactgcgcaccgcccaatgtgacgacagggagaaggttctgtatggtccccgtcagctaaggggagcagcccagtcctggtgggagtcctacctcgccacacatgctgaccccgaagccatcacctgggaagaattcagcgagagtttccgcaggtaccatgtgccagagggactgatgatcgtgaagaaggaggagtttctggctctgaagcagggacccctgtctgttagtgaatacagagacaagtttctgcagctgtctcgttatgcacccgaggatgtcaacactgatgctaaaaggcagtacaggttcatgaggggtttggtggatcccctgcattaccagctgatgaatcacaccttccccaccttccaacacctgatcgatagggcagttatgactgagaagaagcgtaaggatatggaagatcggaagcgcaagatgagtggaccccagtccggaagcatcagccgtccccgtttctcaggcagttcatctcagcaaggccggcctggtcatccacggggatatcagaatcagaatcagcgtccgcatcagcagcagtttcagaggcagtacccacagcagcagcaacagtatcgtcagcacagccagcagggaggtaatcagtatcagaagcagaacaaccaggcacctcgccttcctgcccccgcaacaaatcagagcaaccaagcagccccagcacaaggaggaggcagaggatgtttccactgtggagatcaaggccactgggcgatgcagtgcccaaagaagttggcgcagcagcagaccaaccccaatgctccaacaaggcaaggtgtactgcagccggcagcaggcaatcatagccaagcgtacaaccgtggaaaggtgaaccacttggaggccgaagcaatccaggatgcaccagatgtggcagtaggtatgttctcagtcgaatctcatcccgcaaaagtgctatttgatactggtgcaactcattcgtttgtcactgcaacatgggtagaattgcataacatctcagtagaggcaatgatgccgcccatgaggattaattcggttggtggcaaggtgcaaacagataaaatatgttcaaatataatggtggaaataagggggataggattccctagtgacttaatagtaatagacacccccgggatagatgttattctagggatgaactggttaatgaagtatgaagcaaatgttagttgtgacaagaggaccgtaacattgaaatccccgtcaggagaagaggtagtggccgagctaaggatgcctaaatcagaagagggagtctgccatcagatttcagttgatagtaaggagcccaacccgctcgaggctatcaaggttgtgtccgactttccggatgtgtttcccgaggagctaacgggcatgccacccgagagaaaggttgaatttgccatagagcttatccctggtaccgcccccctttccaaaagagcctatcgagtgtctggaccagaattggtggaactcaagaagcagatagatgagatgttggagaagggttacatcaggccaagtacctcgccttgggccgctccagtgttgtttgtagagaagaaagatggtaccaaaaggatgtgcatagactacagggccttgaatgaagtcactgtcaagaacaagtaccccctgccaaggatagaagatttgttcgaccagctcagaggtgccagcgtattctcgaagatagatctgagatcaggttaccatcaactcagaatccgaccctcggacataccgaagacagcattcatcaccaagtacgggttatatgagttcacagttatgtcctttggtttgacaaatgcgtcagccttctttatgtatctgatgaacagcgtgttcatggactatctagacaagtttgtggtagtgttcatcgatgacattctcatatactctcaaagtgaggaagatcatgtagagcatttgaagatggtattgcaaaggcttcgagagcatcagttgtatgccaagctgggcaaatgcgagttctggattcatgaagtcttatttctgggacacatcataaaccaagatgggttggcagtggatccaaagaaagtagcagatatcctgaactggaaagcaccgaaggatgttcgtgggatcaagagcttcattggaatggtcggatactataggcgtttcattgaaggcttctcaaagattgctagaccaatgacagcgttgctagcgaagaaagttgagtttaaatggactcaaaaatgtcaggaagcatttgaagaactgaagaatagattgactacagctcctgtgttagtcctgcctgatgttcacaagtcattctcagtgtattgcgacgcttcgtacaccggattgggatgtgtgctaatgcaagaaggaagagtggtagcatactcatctcgacagctgaagatccatgagaaaaattatcccacacatgacctggagttggcagcagtggttcatgccttaaagacctggagacattacctgtatgggcagaagtgtgacatctacacagatcataaaagtctgaagtacatattcacccagtcagagttaaacatgaggcagcgaagatggttggaattgatcaaagactatgagttggagatacattaccatccaggcaaagccaatgttgttgcagatgctctgagcaggaagagtcaagtccatatgttggtctcgtacccgatgccgtatgagttagccaaagagttcgacagactgagcctcggtttcctgaacagtacgcaaggagtaacagtggaattggagcccaccctagagcgggagatcaaagaagggcagaaggatgatgaaaacatcaacaagatccggcagctgatcttagaaggaagaggcaaagactttcgagaggatgaagagggggtaatatggttcaaggaccgattgtgtgtccccgacctcaaacctattcgggaattgatcctaaaggaagctcatgagacagcctactccatacacccgggaagtgaaaagatgtaccaggatttaaaaaggaggttttggtggtatggtatgaaaagagagatcgcagaatatgtcgccatctgtgatagctgtcagagaaccaaagcagagcatcagaggcctgccgagttgttgcagccattgcggattcctcagtggaagtgggatgagatcgggatggattttatagttggcctacctcgtacccgggccagttatgattccatctgggtggttgtggaccgcttaacaaaggtggcccatttcatacctgtgaagacaacatacaccggagcaacgttagctgagttatacatgtcacggatagtctgccttcatggtgtgccgaagaagatagtgtcagatcgaggaacgcagttcacctctcatttttggcagcagctacaagaagctttgggcacacatttgaacttcagctcagcttatcacccgcagacagacggtcagactgaaagaactaaccagatcctagaagatatgctgagagcctgtgcgttgcaagacaagtcaggatgggacaaaaggttaccctatgcagaattctcctacaacaatagttaccaggccagcttgaagatgtcgccgtttcaggcactctatggacggagttgtaggactccgctgcattgggaccagcctggagagagacaggtgtttggccccgacattttgcttgaagccgaagagaatatcaaaatggttcgggagaatctgaagatagcacaatcaaggcagcgaagctacgcggacagaaggagaagagaactgagttttgaagtgggagactacgtctatctgaaggtgtcacctatcaggggagtcagaaggttcggagttaaaggcaagttagcaccccggtacgttggaccatatcagatccaagccaagcgtggagaagtggcctaccagctcaacctaccagaaagtttgtcagcagtgcacaatgtgttccacgtgtcgcaattgaagaagtgtctgcgagtaccagaagagcagttgccagtggagggtttggaagtccaggaagatctgacatacatagagaagccgacgcagattctggagtttgcagacagggtcacccggaggaacaccatcagaatgtgcaaagtcagatggggtcaccactcggaggaagaagcaacctgggaacgagaagatgatctgaaggccaaataccctgaactctttgctgaccaaccttga

SEQ ID NO: 5106 - DNA, 4563 bp, Zea mays
  Clone ID: TF_ZM4985.C1.o5.fg
atgtctgacaacaggcgtgctcagcaagagcagcatgaccagcaggaggaacatcagaggcagcctcccccaccacccccgatgtcagtggagcagatgttcttgatgcagactcaggcagtgcaggccattgggcagactctggcagccatgcagcaggctcaacagcaaccccaaccccaattgcaagtgcagatgccccagatgccacgggataagcgtggtgagttcatgagagggcaccctcctaccttcgcccattctgccgaccccatggatgcagaagactggctacgcgcagtggagagggaactgtgcaccgcccaatgtgacgacagggagaaggttctgtatggtccccgccagctaaggggagcagcccagtcctggtgggagtcctacctcgccacccatgctgaccccgaagccatcacctgggaagaattcagcgagaatttccgcaggtaccatgttccagagggactgatgattgtgaagaaggaggagtttctggatctgaagcagggacccctatctgttagtgaatacagagacaagtttctgcagctatctcgttatgcacctgaagacgtcaacactgatgctaaaaggcagtacaggttcatgaggggtttggtggatcccctgcattaccagctgatgaatcacaccttccccaccttccagcacctgatcgatagggcagttatgactgagaagaagcgtaaggatatggaagatcggaaacgcaagatgagtggaccccagtccggaagcatcagccgcccccgtttctcaggcagttcatctcagcaaggcaggcctggacacccacagggatatcagaatcagaatcggcgtccgcatcagcagcagtttcagaggcagtacccacagcagcagcagcagcagtatcgtcagaacagccagcaaggaggtaaccagtatcagaagcagaacaaccaggcacctcgccttcctgcccccgcaacaaatcagagcaaccaagcagccccagcacaaggaggaggcagaggatgtttccactgtggagatcaaggccactgggcgatgcagtgcccaaagaagatggcgcagcaacagaccaaccccaatgctccaacaaggcaaggtgtactgcagccggcagcaggcaatcgtggccaagcgtacaaccgtgggaaggtgaaccacttggaggccgaagcaattcaggatgcaccggatgtggcagtaggtatgttctcagtcgaatctcatcccgcaaaagagctatttgatactggtgcaactcattcatttgtcactgcaatatgggtagaaatgcataacatctcagtagaggcaatgatgccgcccatgaggattaattcggttggtggtaaagtgcaagcagatagaatatgctcaaatataagggtggaaataagggggatagggttccccagtgatctaatagtaatagacacccttgaggtagatgtcatcctagggatgaattggttaatgaaatatgaagcgaatgttagctgtgacaagaggaccgtaacattgaagtccccgtcaggagaggaggtagtggccgagctaaggatgcctaaatcagcggagggagtctgtcaccagatttcagttgatagtaaggagcccaacccgctcgaggctatcaaggttgtgtcggactttccagacgtgtttcccgaggagctaacgggcatgccacccgagagaaaagtcgaatttgccatagagcttatccctggtaccgtccccatttccaaaagagcctatcgagtgtctggaccagaattggtggaactcaagaagcagattgatgagctattagaaaagggttacatcagaccaagtacctcgccttgggccgctccagtgttgtttgtagagaagaaagatggtaccaaaaggatgtgcatagactacagagccttgaatgaagtcactgtcaagaacaagtaccccctgccaagaatagaagatctgtttgaccaactcagaggtgccagcgtattctcgaagatagatctgaggtcaggctaccatcaactcagaatccgaccctcggacataccgaagacagcattcatcaccaagtacgggttatatgaattcagagttatgtcctttggtttgacaaatgcgccagccttctttatgtatctgatgaacagcgtgttcatggactatctagacaagtttgtggtagtgttcatcgatgatattctcatatactctcaaagtgaggaagatcatgtggagcatttgaagatggtattgcaaagacttcgagagaaacagttgtatgccaagctgagtaaatgcgagttctggattcatgaagtcctgttcctgggccacatcataaatcaagatgggttagcagtggatccaaagaaagtggcagatatcctgaactggaaagcaccgaaggatgttcgtgggatcaagagcttcatcggaatggccggatactacaggcgtttcatcgaaggcttctcaaagattgctagaccaatgacagcgttgctagcgaagaaagttgagtttaagtggacccaaaagtgtcaggaagcattcgaagaactgaaaaatagattgactacagctcctgtgttagtcctgcctgatgttcacaagccattctcagtgtattgtgatgcttcttacaccggattgggatgtgtgctaatgcaagaaggaagagttgtagcatactcatctcgacagctgaagatccatgagaaaaattatcccacacatgacctggagttggcagcagtggttcatgctctaaagacatggagacattacctgtatggacagaaatgcgacatctacacagatcataaaagtctgaagtacatattcacccagtccgagttaaacatgaggcagcgaagatggttggaattgatcaaagactacgagttggaaatacattaccatccaggcaaagccaatgttgttgcagatgctctgagcaggaagagtcaagtcaatatgttggccacgtacccaatgccatatgagttagccaaggagttcgacagactgagtctcggtttcctgaacagtatacaaggagtaacagtggaattagagcccaccctagagcgggagatcaaagaagggcagaaggatgatgaaaacatcaacaatatccggcagctgatcttagaaggaagaggcaaagactttcgagaggatgaagagggagtaatatggttcaaggaccgattgtgtgttcctgacatcaaacctattcggaagctgatcctcaaggaagctcatgagacagcctactccatacaccccggaagtgaaaagatgtatcaggatttaaaaaggagattttggtggtatggcatgaaaagagaaatcgcagaatatgtcgccatttgtgatagctgtcaaagaaccaaagcagagcatcaaaggcccgccggattgttgcagccattgcggattcctcagtggaagtgggatgagatcgggatggattttatagttggcctacctcgtacccgggccggctatgattccatctgggtggttgtggaccgcttaacaaaggtggcccatttcatacccgtgaagacaacatacactggagcaatgttagctgagttatacatgtcacggatagtctgccttcatggtgtgccgaagaagatagtgtcggatcgaggaacacagtttacctctcatttttggcagcagctacaagaagctttgggcacacacttgaacttcagctcggcttatcacccacagacagacggtcagactgaaagaactaatcagatcctagaagatatgctgagagcctatgcgttacaagacaagtcaggatgggacaaaagattaccttatgcagaattctcctacaacaatagttaccaggccagcttgaagatgtcaccgtttcaggcactctatggacggagttgtaggactccgctgcattgggaccagcctggagagagacaggtgtttggccccgacattttgcttgaagccgaagagaatatcaaaatggttcgggagaatctgaagatagcacaatcaagacagcgaagctatgcggaccgaaggagaagagaactgagttttgaagtgggagattacgtctatctgaaggtgtcacctatcaggggagtcagaaggttcggagttaaaggcaagttagcaccccggtacgtcggaccatatcagatccaagcaaagcgtggagaagtggcctaccagctcgacctaccagagagcttgtcagcagtgcacaacgtgttccacgtgtcgcaattgaagaagtgtctacgagtaccagaagaacagttgccagtggagggtttggaggtccaggaggatctgacatacatagagaagccaacgcagattctggagtttgcagacagagtcacccggaggaacaccatcagaatgtgcaaagtcagatggggtcaccactcggaggaagaagcgacctgggaacgagaagatgatttgaaggccaaataccctgagctctttgctgaccaaccttga

SEQ ID NO: 5107 - DNA, 5409 bp, Zea mays
  Clone ID: TF_ZM4995.C3.o5.fg
atggctcgtcttagacacactgcacataagtcggtgattcctttcctgccgtctcgacttgcggagcgtcctctgcaccgcaccgtgtccggacagtcgagtcacctggagaggctgcaccaccgcctgcgtgaggagcaggaacgccggcgccagcacggagagcagcagggctcttcctcctcaccccagcaggaggtggagaccgtgaggccccgttcctctgttgctcagctggaggcgccccttgttccaccgcgggacgtcccggctgttggaggagctactggaggagatcccgacgacgacgactcagaccacagcacagagtcttctgagccgcaggaggcggaaggatgggctttcgaccgacacacctggttgatcgagtatcgttgtgtagtctaccagcacagtcgcgggaggtacccggaccgctgggaggctacctgcctagttcgccgtccggaggatgacctccggggtgcggaggccgtttcggagcactattccatctccgagagggacactgcagaggcggctatgcaggatgcagcacgacgtgcactctctcagtactgttctttgttcggtggcgtggccgacggtcttaaccttcggtactacccccgccgccctactggcagcacagagagtgtggttgtttcacctgttggtgaggctaaccctaggttgagcagcacagtcaacctagtcgcagtgcttaacacggagctggatcactctctggacgagctaagcagggctcgcacggagattgcggagttgcgtgctgagttggcagagcgccatcaccaggagggtggttctcccgctcctgtcgggactcagcacccataccgctcaccgccacgtggtcaccacacttatggttcccctattgtaagatcaatgctgatgtatgaatgtcttccacagatgtctgacaacaggcgccgatgcaacaggcgtgctcagctggagcagcatgaccagcaggaggaaaatcagaggcagcctcccccaccacccccgatgtcagtggagcagatgttcttgatgcagacccaggcagtgcaggccattgggcagactctggcagccatgcagcaggctcaacagcagccccaaccccagttgcaagtgcagatgccccagatgccacgagataagcgtggtgagttcatgagagggcaccctcctaccttcgcccattctgctgaccccatggatgcagaagactggctgcgcgcagtggagagggagctacgcacccccaatgcgacgacagggagaagcgagagtttccgtcggtaccatgtgccagagggactgatgatcgtgaagaaggaggagtttctggctctgaagcagggacccatgtctgttagtgagtacagagacaagtttctgcagctgtctcgttatgcacccgaggatgtcaacactgatgccaagaggcagtacaggttcatgagaggtttggtggatcccctgcattaccagctgatgaatcataccttcccaaccttccagcacctgatcgatagggcagtcatgactgagaagaagcgtaaggatatggaagatcggaagcgcaagatgagtggaccccagtccggaggcatcagccgcccacgtttctcaggcagttcatctcagcaaggcagatctggtcacccacagggatatcagaatcagaatcagcgtccgcatcagcagcagtttcagagacagtacccgcagcagcagcagcagtatcgtcagcacagccagcagggaggtaatcagtatcagaagcagaacaaccaggcacctcgccttcctgccccagcagcgaatcagaacaaccaagcagccccagcacaaggaggaggcagaggatgtttccactgtggagatcaaggccactgggcgatgcagtgcccaaagaagtcggctcagcagcagatcaaccccaatgctccagcaaggcaaggtgtactgcagccggcagcaggcaatcgtaaccaagcgtacaaccgtggaaaggtgaaccacttggaggccgaagcgatccaggatgcaccagatgtggcagtaggtatgttctcagtcgaatctcatcccgcgaaagtgctatttgatactggtgcaactcattcttttgtcactgcaacatgggtagaattgcataacatctcagtagaggcaatgatgccacccatgaggattaattcggttggtggcaaggtgcaaacagataaaatatgttcaaacataatggtggaaataagggggataggattccccagtgacttaatagtaataggcacccctgggatagatgtcattctaggaatgaactggttaatgaagtatgaagcaaatgttagttgtgacaagaggaccataacattgaagtcctcgtcaggagaagaggtagtggccgagctaaggatgcccaagtcagaagagggagtctgtcaccagatttcagttgatagtaaggagcccaacccgctcgaggctatcaaggttgtgtcggactttccggatgtgtttcccgaggagctaacgggcatgccacccgagaggaaagtcgaatttgccatagagcttatccctggtaccgcccccatttcaaagagagcctatcgagtgtctggaccagaattggtggaactcaagaagcagatagacgagatgttagagaagggttacatcaggccaagcacctcgccttgggccgctccagtgttgtttgtagagaagaaagatggtaccaaaaggatgtgcatagactacagagccttgaatgaagtcactatcaagaacaagtaccccctgccaaggatagaagatttgttcgaccagctcagaggtgccagcgtattctcgaagatagatctgagatcaggttaccatcaactcagaatccgaccctcggacataccgaagacaacattcatcaccaagtacgggttatatgagttcacagttatgtcctttggtttgacaaatgcgccagccttctttatgtacctgatgaacagtgtgttcatggactatctagacaagtttgtggtagtgttcatcgatgacattctcatatactctcaaagtgaggaagatcatgtagagcatttgaagatggtattgcaaaggcttcgagaacatcagttgtatgccaagctgggcaaatgcgagttctggattcatgaagtcttatttctgggtcacatcataaaccaagatgggttagcagtggatccaaagaaagtagcagatatcctgaactggaaagcaccgaaagatgttcgtgggatcaagagcttcattggaatggctgggtattataggcgtttcattgaaggtttctcgaagattgctagaccaatgacagcgttactcgcgaagaaagttgagtttaagtggactcaaaagtgtcaggaagcatttgaggagctgaagaatagattgactacagctcctgtgttagtcctgcctgatgttcacaagtcattctcagtgtactgcgacgcttcttacaccggtttgggatgtgtgctaatgcaagaagggagagttgtagcatactcatctcgacagctgaagatccatgagaagaattaccccacacatgacctggaattggcagcagtggttcatgccttaaagacctgtagacattacctgtatgggcagaagtgcgacatctacacagatcataagagtctgaagtacatattcacccagtcagagttaaacatgaggcagcgaagatggttggaactgatcaaagactatgagttggagatacattaccatccgggcaaagccaatgttgttgcagatgctctgagcaggaaaagtcaagtcaatatgttggcctcgcacccaatgccgtatgagttagccaaggagtttgacagactgagcctcggtttcctgaatagtacgcaaggagtgacagtggaattagagcctaccctagagcgggagatcaaagaagggcagaaggatgatgaaaacatcaacaagatctggcagctgatcctagaaggaagaggcaaagactttcgagaggatgaagaaggagtaatctggttcaaggaccgattgtgtgttcccgacctcaaacctattcgggaattgatcctcaaggaagctcatgagacagcctactccatacacccagggagtgagaagatgtaccaggatttaaaaaggaggttttggtggtatggtatgaaaagggagatcgcagaatatgtcgccatctgtgatagctgtcagagaaccaaagcggagcatcagaggcctgccggattgttgcagccattgcggattcctcagtggaagtgggatgagatcgggatggatttcatagttggcctacctcgtacccgggccggctacgattccatctgggtggttgtggaccgcttaacaaaggtggcccacttcataccggtgaagacgacatacaccggagcaacgttagctgagttatacatgtcacgaatagtctgccttcatggtgtgccgaagaagatagtgtcagatcgaggaacgcagttcacatctcatttttggcagcagctacaagaagctttgggcacacatttgaacttcagctcagcttatcacccgcagacagacggtcagactgaaagaactaatcagatcctagaagatatgttgagagcctgtgcgttgcaagacaagtcaggatgggacaaaaggttaccttatgcagaattctcctacaacaatagttaccaggccagcttgaagatgtcaccgtttcaggcactctatgggcggagttgcaggactccgctgcattgggaccagcctggagagagacaggtgtttggccccgacatcttgcttgaagccgaagagaatatcaaaatggttcgggagaatctgaagacagcccagtcaagacagcgaagctatgcgaacagaaggagaagagaactgagttttgaagtgggagactacgtctatctgaaggtgtcacctatcaggggagtcagaaggttcggagttaaaggcaagttagcaccccggtacgtcggaccatatcagattcaagcaaagcgtggagaagtggcctaccagcttgacctaccagagagcttgtcagcagtgcacaatgtgttccatgtgtcgcaattgaaaaagtgtctgcgagtaccagaagaacagttgccaatggagggtttggaggtccaggaggatctgacatacatagaaaagccaacgcagattctggagtttgcagacagagtcacccggaggaatactatcagaatgtgcaaagtcagatggggtcaccactctgaggaagaagcaacctgggaacgagaagatgacctgaaggccaaataccctgaactctttgctgaccaaccttga

SEQ ID NO: 5108 - DNA, 5358 bp, Zea mays
  Clone ID: TF_ZM4158.C1.o6.fg
atggatcctaaggggaagggaatcgtgatcaacgataaggagaaggagtccttcgtcaatgaggccaaagatgacaagcctaccgactccggctcaggtcatagacgaaaggaagggaagaagaagaagacgaggcgcatcaaggagatcgtctactacgacgacagtgatgagtctacttcttcccaaaaggacgacgaccacaacgactacgagcaaaggaaaccggttaattctaacttttcctttgactactctcgtattccgcaaagttcaaattcacatttgctttccattccactcggcaagcccccacactttgatggagaggactacggattttggagccacaaaatgcgtagtcacctattctctctccatcctagtatatgggagattgtagatagtggaatgcactttaatagttcggatagtcctatattcattaatgagcaaatccataagaatgcacaagctactactgttcttctagcttcattgtgcagggatgaatataacaaattggtggagggcgagcttggacggttcgcgatgataaggggcgaggagacaactcaaacatacaaccggctcaagacccttatcaacaaaataaggagctacggaagcacgcgatggacggaccacgacgtcgtccgcctaatgctaaggtcctttaccgttcttgatcctcatttggtgaataatattcgtgagaatcccaggtacaccaaaatgtcgcccgaagaagtcttaggaaaattcgtcagcgggcgaatgatgatcaaggaggcaaggtacgtggacgacgccttgaatggaccgatcaatgaaccacaaccttttgctctcaaagcaacaagaagtaaggaggcgctacctagcaaggtggcacaaattgaggcggtcggacttaatgatgaagagatggctctcatcatcaaacgcttcaagacggtactaaagggtcacaaagggcagccaagcaagaccaaggcgaaggggaagcactcatgcttcaagtgcggtaagtttggtcattttatcgctaactgccccgataatgatagtgaccaggaaaagggaaacaagagggactccgacaatgaaggactcgccgccaccgccttcaacaaatcaaccctcttccccaacgagcgtcacacatgccttatggcaagggagaagaaggtatgtactcacaactctacctatgcttcttcaagtgaggacgaatctagtgatgaggatgaagtagattattcatgtttgttcaagggtttagatagatctaagatagacaaaattaatgaattaattgatgccttgaatgaaaagaatatacttttagaaaagcaagaggatttgttgtatgaagaacatgataagtttgtagaggctcaaaaatcccttgcattagaaattaagaggaatgaaatgcttgcttgtgaagtgtcaacatgccatgattctatttctaacttaaagagcataaacgatgatttaaatgctaaactagtagaagcaaataaatccaacttttgtgttgaatatgttgaaatttgcactaggtgtaaagatattaacattgatgattatagtgaacacctagcttgtatttctaaattaaatgaagaggtagctagtcttaatgcccaacttaagactagcaaaagtgattttgagaaactaaaatttgctagggatgcctacacggttggtagacacccctcaattaaggatgggcttggcttcaagagggaagccaagaacttaacaagccataaggctcccattcccactaaggagaaagggaaggctcctatggctactagcactaaaaggaatcatgcttttatatatcatgataggagacaaactagaaatgcttataggagttataatgcgtacgatgatttttctcatgctatgtttgcttctagttcttcatatgtgcacaatagaaatgttggtagaagggatgttgttcataatatgcctagaaaaaatattattcatgctcctaggaaagtagtgaatgaaccatctacaatttattgtgctttaaatgcttcctttgcaatttgtagaaaggatagaaagataattgctaggaagttaggggcaaaatgcaagggagacaaaacttgcatttgggtccctaaagatatttgtgctaaccttgtaggacccaacatgagttgggtttatgcatccgggggttcaagctggattattgatagcggatgcacaaaccatatgacgggggagaagaagatgttcacctcctacgtcaagaataaggattctcaagattcaattgtattcggtgatgggaatcaaggcaaggtaaaagggttagtagagtctcttggttataatttgctatctgttagtcaattatgcaacatggggtataactgtctattcacaaatgtagatgtgtctgtctttagaagaagtgatggttcactagcttttaagggtgtattagacggcaaactctatttagttgattttgcaaaagaagaggctggtctagatgcatgcttaatagctaagactagcatgggctggctgtggcatcgccgcttagctcatgtggggatgaagaaccttcacaagcttctaaagggagaacacgtgataggtttgactaacgtacaattcgaaaaagatagaccttgtgcagcttgtcaagcaggtaaacaagtgggaggagcacatcacagcaagaatgtgatgaccacttcaagacccctggagctgctgcatatggacctcttcggacccgtcgcctatctgagcataggagggagtaagtatggtctagttattgttgatgacttttcccgcttcacttgggtgttctttttgcaggataagtctgaaacccaagggaccctcaagcgcttcctcaggagagctcaaaatgagtttgagctcaaagtgaagaagataaggagcgacaacgggtccgagttcaagaaccttcaagtggaggagttccttgaagaggaagggatcaagcacgagttctccgctccctactcaccgcagcaaaatggtgtggtagagaggaagaacaggacgctcatcgacatggcgaggacgatgctaggagagttcaagacccccgagtgcttttggacggaagccgtgaacacggcttgccacgccatcaaaaaggtctaccttcatcgcctcctcaagaagacgtcgtatgagctactaaccggtaacaaacccaatgtatcttactttcgcgtatttgggagcaagtgctacattctagtgaagaagggtagaaattctaaattcgctcccaaagctgtagaagggtttttgttaggttatgactcaaatacaaaggcgtatagagtcttcaacaaatcatcgggtttggttgaagtctctagcgacgttgtatttgatgagactaatggctctccaagagagcaagttgttgattgtgatgatgtagatgaagaagatgttccgacggccgctatacgaaccatggcgattggagacgttcggccacaggaacaagatgaacgagatcaaccttcttcctcaattatggtgcatcccccaactcaagacgatgaacgggttcatcaacaggaggcgtgtgatcaagggggagcacaagatgatcatgtgatggaggaagaagcggaaccggcacctccaacccaagttcgagcgatgattcaaagggatcatcccgtcgaccaaattctgggtgacattagcaagggagtaactactcgatctcgactagttaatttttgtgagcattactcctttgtctcttctattgagcctttcagggtagaggaggccttgctagatccggactgggtgttggccatgcaggaggagctcaacaacttcaaaaggaatgaagtttggacactggtgcctcgtccgaagcaaaatgttgtgggaaccaagtgggtgttccgcaacaaacaggacgagcacggggtggtgacgagaaacaaggctcgacttgtggcaaaaggttatgcccaagtcgcaggtttggatttcgaggagacctttgctcctgtggctaggctagaatcaattcgtatcttgctagcatatgccgctcatcattctttcaggttgtaccaaatggatgtgaagagcgctttcctcaacgggccaatcaaggaggaggtgtacgtggagcaaccccctggcttcgaggatgaacggtaccccgaccatgtgtgtaagctctctaaggcgctctatggacttaagcaagccccaagagcatggtatgaatgccttagagactttctaattgttaatgctttcaaggttgggaaagccgatccaactctttttacaaaaacatgtgatggtgatttgtttgtgtgccaaatttatgtcgatgacataatatttggttctactaaccaaaagtcttgtgaagagtttagcagggtgatgactcagaaattcgagatgtcgatgatgggcgagttgaactacttccttgggttccaagtgaagcaactcaaggatggcaccttcatctctcaaacgaagtacacgcacgacttgctaaagcggtttgggatgaaggacgccaagcccgcaaagacgccgatgggaaccgacggacacaccgacctcaacaaaggaggtaagtccgttgatcaaaaagcataccggtcaatgatagggtcattactttacttatgtgctagtagaccggatattatgcttagcgtatgcatgtgtgctagatttcaatccgaccctaaggagtgtcacttagtggcggtgaagcgaattttgagatatttagttgctacgccttgcttcgggctctggtatccaaaggggtctacctttgacttggttggatactcagattccgactatgctggatgcaaggtcgataggaagagtacatcggggacgtgccaattcttaggaaggtccctggtgtcatggaactctaagaaacaaacttctgttgccctatccaccgctgaggccgagtatgttgccgcaggacagtgttgcgcgcaactactttggatgaggcaaaccctcagggactttggctacaatctgagcaaagtcccactcctatgtgataatgagagtgctatccgcatggcggaaaatcctgttgagcacagccgcacaaagcacatagacatccggcatcactttttgagagaccaccagcaaaagggagatatcgaagtgtttcatgttagcaccgagaaccagctagccgatatctttaccaagcctctagatgagaagaccttttgcaggctgcgtagtgagctaaatgtcttagattcgcggaacctggattga

SEQ ID NO: 5109 - DNA, 525 bp, Zea mays
  unsure (1)..(525): unsure at all n locations
  Clone ID: TF_ZmC1020407_1
cattgactgaattatgatcctggatggataaaaatcacagttattctatctgatgctaatgttcctggcgaaggggagctttnaataatgtcgtatattcgtggtcaacggaatctccctggatttaatccagacacacgccattgcttatatggcctggatgcagacctcataatgttagtttagcaactcatgaagtacacttctctatattgagagatgtagtctttacacctgggcagcaggacaaatgcttcttatgtggtcaggtggggcatctagccgctaattgtgaaggaaaggcaaagagaaaagctggggaatacgatgagaaaggtgaagctattgttccaaagaaaccataccagttcttgaataactggaaccttcgggagtacttaggatatgagttcagaatggccaatccggctttccagattgattttggacggattgttgatgatttcatcttcatgtgctttttcgttggcaacgattttcttccgcatatggcaacactaggga

SEQ ID NO: 5110 - DNA, 4275 bp, Zea mays
  unsure (1)..(4275): unsure at all n locations
  Clone ID: TF_ZmC5679_1
ggcatccaantattttattattttcttaatatgttcgggcatgttttgggtgacctggaggcctgggcctagttagcgaagggcttggacctaacattacagtggaattttgggccctttaagggctgggcaatttctttttcttctaccagacatctagcactggacctaaactagacgagcactttgtcgtgaggaacaaccacgccgggcgcgcacaatatttttttcagcaaatggaagaaaaatttttgtggtggatctaagccccatttgatgtgttttctcccaatactctaagatggactgattgatttcacatctgtgttgttaaaggtcatctattccagctttataacctaggttgtataaactcatttggtgaacaaaaagacccagttattgtccaatcgcaagaaactacgccagcccatgagtccgtctcgacagtgaccggacctcttcgttagggtttcgcgcctcttctcaccgtctgcctactactagggatagacctccggcaaggcctccctcgcgccggcggcgtcagcagcggatatgggtgttccggcgttctaccgatggctggcggagaagtacccgatggtggtggtggacgtggtggaggaggagcccgtagagatcgagggcgtcaaggtgcccgtcgacacctccaagcccaaccccaacagcctcgagttcgacaacctctacctcgatatgaacggaatcatacacccctgcttccacccggaggacaggccctccccaacaacatttggtgaggttttccagtgcatgtttgattatatcgacagactattcgtcatggttcgcccccggaggcttttgtacatggccattgatggtgttgctcctcgtgctaagatgaaccagcagcgctcaagacgattcagggctgcaaaagatgcagctgatgcggctgcagaagaagaacggttacgtgaagagtttgagagggaaggcagaaagcttcctccaaagcagcaatcacaaacatgtgattcaaatgttattactccagggactgaatttatggctgttttatcagttgctttgcagtattacatccatcgtagattgaattatgatcctggatggaaacaaattaaagggaacataaaatcatatatgtcctacctggccaacggaatctgtctggttttaacccaaatacgcgccattgcctgtatggcctggacgcagatctgatcatgctagctttggcgacacatgaagtacacttctcaatactgagagaggtagtttatacacctggacagcaggataaatgcttcttgtgtggtcaggtgggacatctagcagcaaactgtgaaggaaaggtgaaaagaaaagctggggagtttgatgagaagggtggtgctattgttcccaagaagccctatcagttcttgaatatatggaccctgcgggaatatttagaatacgagttcagaatgccaaacccacctttcaagattgattttgaacgcattgttgatgatttcatcttcatgtgcttctttgttggcaacgattttcttccacatatgccgacgctagagatccgtgagggagctattaatttgctaatggcagtgtacaagaaggaatttccctcaatgggtggatatttaactgattcttgcacgcctgatctgagcagagttgagcacttcattcaagcagttggttcatatgaggacaaaatatttcagaaaagagcacgtttgcatcagcgtcaagcggaaaggataaaacgggaaaaagctcaagcaaagcggggtgatgatctggatccccatgttagggatgaccttattgtacctattcaacgttttcaagggtctcgcctagcctctggggctgtacctgtgccatatgagcagaatggatcccataaagacaataaagaaaggaatagtcgagcccggaaagctgcacgagtatcaacgtcaggttccagcattgcctcagccttagttgaagctgaaaatgacctcgaagcccaagaatgtgaaaacaaagaagaactgaagtcaatgcttaaagatgcacttcgcgagaaatctgatatttttaattctgacaatccagaggaggataaggtgaaacttggagaaccaggatggagggaaaggtactatgaagagaaatttggggcaagaacacccgagcagattgaagaaatacgcagagatgttgttctcaaatacacagaaggattgtgttgggtaatgcactactattatgaaggggtatgctcatggcaatggttctacccttatcattatgctccgtttgcttcggatctaagtggattgggccaacttaatattaaatttgaacttgggacaccattcaaaccttttgatcaacttatgggtgttttcccagctgcaagtgcccatgcgctaccgctacagtatcgacgattgatgaccgatccaaattcaccaataattgatttttatcctacagattttgaagtagatatgaatgggaagagatattcttggcaagggattgcaaaactaccgtttattgatgaagatcgtttgttggctgagataaaaaaagttgagcatactttgacgcctgaagaagcaaggagaaacagtatcatgtgtgatatgctttttgtgaatgggtcacatccactttcgccttatatctactctctcaacagcaaatttgggcatctgcctgacaaaaggagaaatgaaattaaagaaaaacttgatccttctgctagtggaggaatgaatggatacataacactttgcagtggggatccatgccctcctatctttaggtctcctgtggacgggctggaggatattatggacaatcaagtgatatgttcaatctacaatcttccagaccatcataagcacatagcccagccgccagttggtgttatcatgcccaagaagattgttgaagccggtgatctgaaaccacctccagtgctgtggcatgaagatagtggcaggcggcctcatgataatagcaacaggcaaaacccatctggtgccatatcaggccgtcaacttggagaggcagctcaccgacttgtcataaacagcttaaatgctcagggtagggggcaacatagtggcacatcaatgccatatcgaactataatgaatggcttgcatcatctggatgtagcgtcccctgtcagcgatcaaggcatgcgtccacaagtggggcagtctgccggacctcctggttggtatgttcctaggggtagtgtatcaaatggtcaaccaccagcttatgcatcatcaggatcaggtcattatcagtatgaaagttcggggcattcacaatatgaacaaggtaaccatggaaggcaacaatctcacccatatgcaagagatggcttccatgatacacgaggaagggttccacctgcatatgggtaccagcagagcaacatgtatccatcgggtcctggattgtatgggcaacctccatcagcatatcctggggttcatggtggaggctaccaaccccctccatatggcggaggccagcagtggcagcaacaatcatatagttcgtatgccgtgcgaggcccctacggaggcaggccaccacccacaagggctgattcagggtcacagcaaccacagaaccgttatggtgctttagacagaagtaacaaccggaggccttcatctggatacagaagataatagtttgtgacccagtttatgttatagctcaaagtttgttatcagtagagcttcgagtaactcagctaaagcataggcggaatagtctgctaagtcttgtgaccttcaagcagttagggggtggccatcaaagatattgggaggcaaaatttgtatgctagtgcagactttcaggtactagcggttttgatcgccattgaagcagctaggtttgcggcatcagaggttttgcgaagcaagatttgtatactactgttatcaacgggccatcaggtactggtggctggtcgccattctttatctgtagttaccatttgtttagaagatgtcataaacggccctggggcttaaataggtcccattgagaatatttttgaaggacgtttactctgagacttgacaagttttgggggcattttgatatcagataaatgtatgcaggagtgcagttttgatgatgtgtgtattccaagtcattaatttaaaaaaaaaaaaaaaaaaaaaaaaaaaaaaaaaaaagatcccttcaaagagcggcatattgcccgca

SEQ ID NO: 5111 - DNA, 576 bp, Zea mays
  unsure (1)..(576): unsure at all n locations
  Clone ID: TF_LIB3060-078-Q1-K6-A1
gtccttttgggtggataaccaancaagggnaaagtgatacagtagnagatggttctgttccactgtatgaccgggagtttaccttgcactcgactcctctaggtggttcatcaaacactgaaagggtggataaggacgattcacgctgcttcaattgtggttcttatagccatgctatgaaggattgcccaaagcctcgggacaatgttgcaattagcaatgcacgaaaacagcataatttgaaaagaaaccaatctaatgttaaccgtgtacaaaaccgatactaccagaaaacgcccggcaaatttgatgatttgaaagctggagtactgggacctgaaactagacagtgcttggggatcggggtactgactataccatttgcagtcaaaatttgaacatcctgattttattgatattatggttatatttggctggtctaccagtacacataagtcttctgatgtatttacagtgagataaaaatgacatttatctgtactcctgttagttaatgagataccactacacatttaacattcatgagatgaaaatgattagtttattactctcaat

SEQ ID NO: 5112 - DNA, 2389 bp, Zea mays
  Clone ID: TF_ZmC6869_1
gccggccgggtcggggggatcgcccgcccagtccacgcatcaaatttccattccggtgggtcttacctgcttgagtactactctcccgttcaccacgttcactccgtatctctcgtgcctttttcctttcctggttgcgacgagccgacgactgggcggacgccgctgccgccctacgccaggtcttcgtcggccccttcgacgagcacacacaagattcagtcgggaatgttgaatgcatagtgtaatttctgcgcaaaaagatggcatcagacgagttcatcagccttgacgcaccttgtgaggctgatgcgaaagatgaagggggagacgttcaggttaaagctcctgatgtgagtgggatggagcctctggtatcggatctccaaccagaagggaaagctggtgctgtgggtagtaatcccaagacatctgctgggaacctggatcttgaagaggggcaagtggaagatatggacctcgcggatgatgacgtagtggttggaaaggatcagctattagatgcttccattcagcccgagatcagtgttgcagctgtgcagactgtgattggttttgaggtcaagctggacaagggggacgggactgaaaatgaaataatttatgagtcaaacagcatctctattgaagaaagtcgtatcctattgaatggaatattatgtatttcttctaatatacttgtgcaactgcaagtgtctatgttttctgaagattcatttgtttccattgaatccttggaactgtacttgcataagaagtgcagactcttgcttatactcctgggaccctaaacatgttattgtgatctggggggaatttatagttgttgttgttccttgatgtggcatttttagcctcaagaggagttaaaagagcccgtgtggaatcaaaggaaccttctgttcgtgtcatctacagtgacttgacaagggaaagcaaacgaaagcttatgcaattgatgcaacaatggtctgagtggcaggctagaaggatgcaccatttggaggaagctgtggaagtgaccttagaaagtggtgaagagacttattatcctgcattacatgttggttctgagaaatcttgtgccgtgtccttttgggtggataaccaagcaagggaaagtgatacagtagatgatggttctgttccactgtatgaccgggagtttaccttgcactcgactcctctaggtggttcatcaaacactgaaagggtggataaggacgattcacgctgcttcaattgtggttcttatagccatgctatgaaggattgcccaaagcctcgggacaatgttgcaattagcaatgcacgaaaacagcataatttgaaaagaaaccaatctaatgttaaccgtgtacaaaaccgatactaccagaaaacgcccggcaaatttgatgatttgaaagctggagtactgggacctgaaactagacagtgcttggggatcggggagaatgatcctcctccttggctgcacagaatgcgtgagttaggctatcctccgggctacctagatgtggttgacgatgaagatagaccttctggtatcaccatatttggagatggtgaggtgaaactagagtatgaggagggagagctttcagagcaaggcgaagcatctccgcctaagaaaaagatgacagtggaattccctggaataaacgcccccatcccagaaaatggtgatcagtggctgtggggtagcaccccgccccagtcctcaggccgccaccactcattggattcgagggatttccatgatagagggcctcctggcgctgatcattattcaccgagataccactcccacgattttggacctttgcgcccaagcatagggagatcacactcagacagggggtggagaagcccacctcgttatgataatccgcctgcagatgatggtgcctggaccccgcattcataccccagcaggcagcacttgggccattacagctcgagctctgagatgtcgtcacgccattccagggacaaagacagagataggcatgatagcaggcactaccaccaccgcagatgagtcaagcctgtagctgatttgtatcatattcttttgctgaagaatcctctacctgacgcattcgatctgacatagaaatcagtcctgctatagtttcttaagttacgaaatttcctttccttccaatatatttttgcagcagtgctcccaaacccatggtagagagtgaccttatctcgtctggtccgtgagctgtatctgaattatatgactgccttcctcacatatgcaactcttgctccttccttgactgttatgggcctgcttggttcagggactaactaatgtttagtcaggggactaaagttatacctgtttgattac

SEQ ID NO: 5113 - DNA, 4653 bp, Zea mays
  Clone ID: TF_ZmC951_287
ctaagtttggtaaaggtttttctcatctaatgacttggtaaagatatcggctaattgttcttttgtgctaacataagcaatctcgatatcccccctttgttggtgatccctcaaaaagtgataccgaatggctatgtgcttagtgcggctgtgttcaacgagattatccgccatgcggattgcactctcattgtcatataggggagggactttgcttaatttgtagccatagtccctaagggtttgcctcatccaaagtaattgcgcgcaataatgacctgcgacaatatactcggcttcggcggtagaaatagctactgaattttgcttctttgaagcccaagacaccagggatctccctagaaactgacaagtccctgatgtgctcttcctatcaattttacaccctctcgtgtcgaggtcgagatgcccattggttcccatgggtgtcttgatgggcttggcatccttcattccaaacttggtaagtatatcttgaatgtacttagtttggctgatgaaggtgccctcttggagttgcctcacttgaaatcctaggaaatacttcaactcccccatcatcgacatctcgaatttttgaatcataatcctactaaactcttcacaagttgatttgttagtagacccaaatatgatatcatcaacataaatttggcatacaaacaaatcatttgcaatagttttagtaaagagagtaggattagcttttctgactttgaagccattagtgataaggaaatctcttaggcattcataccatgctcttggggcttgcttgagcccataaagcgccttagagagtttatacacatggttagggtactcactatcttcaaagccaggaggttgctcaacatagacttcttccttgattggtccattgaggaaggcacttttcacgtccatttgatagagcttaaagccatggtaagtagcataggcaagtaatatatgaattgactcaagcctagctatgggtgcataggtttcaccaaaatccaaaccttcgacttgtgaatatcccttggccacaagtcgggctttgttccttgtcaccacaacatgctcatcttgcttgttgcggaaaacccactcattccttatgaagttgttgagttcctcttgcattgccaacactcgattcgaatctcttaatgcgtcttccaccctgtatggcctgtacttcttgctcatcttccttttcttgatcattatcatctccccttgatcattgtcctcctcttgaggtggctcatcctcttgatcttcattttcatcatcttgagcttgatcctcatcttgggttggtggagatgcttgcatggaagatgacgcttgatcttgagcttgagtgggctctttggattccttaggacacacatatccaatggacatgttccttagcacgacgcatggagcctcttcatcatctagctcatcaagatcaacttgctccacttgggagccataagtctcatcaaacacaatatcacaagaaacctcaactaatccagtggatttgttgaagactctatatgcccttgtgtttgaatcatatcctagtaaaaaggcttctacagccttaggagcaaatttagattttctacctcttttaacaagaataaagcatttgctaccaaagactctaaaatatgaaacactgggctttttaccggttaggagttcatatgatgtcttcttgatgattcggtggagatacaatcggttgatggcgtagcaggtggtgttgaccgcctcggcccaaaaccgatctgaagttttgtactcatcaagcatggtccttgccatgtccaatagagttctattcttcctctccactacaccattttgttgtggcgtgtagggagaagagaactcatgcttgatgccctcctcctcaaggaagccttcaatttgagagttcttgaactccgtcccgttgtcgcttcggattttcttgatccttaagccgaactcgttttgagccatctcaagaatccttttaaggtctcttgggtatgagatttttccctctaacactcccttaaatgctattgaatcatcacttcttctaaagacagtgacaccttgatttccatccccgaatgtgatagctcgttggggatcttggtttttctcataggaggagaacatctttttctcccttgtcatgtggtttgtgcacccgctatcgatgatccaacttgagcccccggatgcataaaccttgcctgatttgttagttaaaacataggatgcatcaaaagttttaaatgaaatattatgatcatttgatgcaataggagttttctttctaggcaatttagcacgagttgattgcctagaactagatgtctcacccttatacataaaagcatgattagggccagagtgagactttctagagtgaattctcctaatcttgctctcgggataaccggcagggtacaaaatgtaaccctcgttatcctgaggcatgggagccttgccctttacaaagttagacaatctcttaggaggggcgttaagtttgacattgtcccccttttggaagccaatgccatccttgatgccagggcgtctcccattatagagcatgcttctagcaaatttaaaattttcattttctaagtcatgctcattaattttagcattaagttgagctatgtgatcattttgtttcttaattaaagctaggtgatcatgagtagcatcaacattaatgtctctacatctagtgcaaatggaaacatgctcaatggtagatgtagagggtttgcaagaattaagttcaacaatcttagcacgtaaaatatcattcttatctctaagatcagaaatggaagcattgcaaacatctaaatccttagccttagcaatcaaattttcattttcatttctaaggctagcaagagaaacattcaattcttcaatcttagcaagtaaattaacattatcatctctaagattgggaattgaaacataactaacattagaatcaaccttagcaattaatttagcattttcatttctaaggttggcaattatatcaatacaagtgcttagctcactagataatttttcacatttttctacttctagagcgtaagcatttttaaccttaacatgcttcttgttttccttgattaggaagtcctcttgagagtccaagaggtcatccttctcatgaatagcactaattaattcatttaatttttccttttgttgcatgttgaggttggcaaaaagggtgcgcaaattatcctcctcatcacaacagttatcctcatcactagaggtttcatatttagtggaggattttgattttaccttcttccttttgccgttcttggccatgaggcacttgtggccgacgttggggaagaggagtcccttggtgacggcgatgttggcggcgtcctcgtcggaggaggagtcggaggagctctcgtcggagtcccacttgcggcacacatgggcatcgccgcccctcttcttgtggtacctcttcttttctctcctcttgcccttcttgtcttcacccctgtcactatcactagataatagacatttagcaatgaaatgaccgggcttaccacatttgtagcatactttcttggagcggggcttgtaatccttcccccttctttgcttcaggatttggcggaagctcttgatgatgagcgccatttcctcgttgtcgagcttagatgcatcgatgggttgtctacttgatgtagactcctcctttttctcctctgttgccttgaatgcgaccggttgtgctttggacgtggaggggccatctagctcgatgattttctttgagcctttgatcatcaactcaaagctcacaaagtttcctattacctcctcaggagacattagtgtatatctaggattacctaggattaattgaacttgcgtaggattaagaaaaacgagggatcttagaataaccttgaccatctcatggtcatcccatttggtgctcccgaggttgcgcacttgattcaccaaggtcttcaagcggttgtacatggcttgagggtcctcgccttggttgagtcggaacagaccgagctcctcctcgatcgtctcctgcttggtgattttagtcacctcatctccttcgtgcgcggttttaagcacgtcccaaatttccttggcgctctttaacccttgcaccttgttatactcctctcgctgtactccaatctcaacaacatcccaaatgctagtgtggagtgaggttagatgatgcctcattttatcactccacatattataatcttcaccatcaaacataggtggtttgcctagtgggacggaaagtaatggagtacatttggaaatacgtggatagcgtaggggaatcttactaaacttcttgcgctcatggagcttagaagttacggagggcgtgtcggagccggaggtggatggcgacaaagagtcggtctcgtagtagaccaccttcctcatcttcttcttgtcaccgctccaccccgacttgttgtgtgaaggggatcccttcaccttgttggtggactcctcggatggagccttcccatggcttgtagcgggcttctcgccggtcccgaactccctcttggcggatgctcccgacat

SEQ ID NO: 5114 - DNA, 556 bp, Zea mays
  Clone ID: TF_LIB5117-003-Q1-PF1-H3
accttccccactccctccgctgtcacccgcgattccctcctcctctccgccctctacaccgcgattccggacgctctgcgatgcggcctgcagcgccgctcgcccatctccggtttccccggccgccactgttgcggacggcgctcccactccgctacagtcctataaggacgcactgctctccccggctcctcctcatctccaccgtcgccgcctccttgccttcctctcctctccagtcaaaaaactgtgccacaagtgctactccgctgagcacctcgtccgcgattgccgcgaccccgtgcgctgccgtgactgcgggcgttccgggcacttaagctcagcatgtaagttcgagcccctccttcccccgtcccttgtgtcccctgcctctcaccctcctctcccccctcgcaggctctccaacgagcttctccggtctctgtcccgctcccgctcgacctcgccgcccaactcccccatgtcgcgtgctcctccgcgtgagcactggttggaccgctactaccgggaggtcgaggcggagcgcaccatcccc

SEQ ID NO: 5115 - DNA, 5535 bp, Zea mays
  Clone ID: TF_ZmC951_385
tcacttgaagaacacattagtcatagtaatatgaaagagatgatcaaaggtatataactgagctatgtgtgcaaaatatctatataagtttctagaatcaagaatatttagctcatgcctaagtttggtaaatgttttctcatctaaaggcttggtaaagatattggcgagttgttctttggtgttaatgtaagcaatctcgatatctccccgttgttggtgatccctcaaaaaatgatactgaatggctatgtgtttagtgcggctatgctcaacaggattatccgccatgcggattgcactctcattatcacatagaagaggaactttggttaatttataaccatagtccctcagggtttgcctcatccaaagcaattgcgcgcaacaatggcctgcggcaatatactcggcttcggcggaagaaagagctacagaattttgcttctttgaagcccaagacaccagagatcttcccaagaactggcaaggccctgatgtgctctttatatcgatcttacaacccgcccaatcggcatccgaataaccaattaaatcaaaagtggatcccctaggataccaaagcccaaacttaggagtataagccaaatatctcaagattcgttttacaaccgtaaggtgagcttccttagggtcggcttggaatcttgcacacatgcatacggaaagcataatgtccggtcgagatgcacataaatagagtaatgaacctatcatcgaccggtataccttttgatctacggatttaccttccgtgtcgagatcgagatgcccattggttcccatgggtgtcttgatgggcttggcatccttcatcccaaacttgcttagaatgtcttgagtatacttcgtttggctaatgaaggttccctcttggagttgctttacttgaaatcctaagaaatacttcaactcccccatcattgacatctcgaatttctgtgtcatgatcctactaaactcttcacatgtagattcgttagtagacccaaatataatatcatcaacataaatttggcatacaaacaaatcattttcaagtgttttggtaaagagtgtaggatcggcctttccgactttgaatccattagtgataaggaaatttcttaggcattcataccatgctcttggagcttgcttgagcccataaagcgccttagagagtttatacacatggttagggtactcactatcttcaaagacgggaagttgctcaacatagacttcttccttgattggtccgttgaggaaggcactcttcacgtccatttgataaagcttgaagccatggtaggtagcataggctaataatatgcgaattgactcaagcctagctatgggtgcataggtttcaccgaaatccaaaccttcgacttgtgaataccccttggccacaagtcgggctttgttccttgtcaccacaccatgctcatcttgcttgttgcggaagacccatttggttcctacaacattttgattaggacatggaactaaatgccatacctcgttcctagtgaaattgttgagctcctcttgcatcgccaccacccaatccgaatcttgtagtgcttcctctaccctgtgtgactcaataggggaaacaaaagagtaatgctcacaaaaatgtgcaacacgagatctagtggttacccccttatgaatgtcgccgaggatggtgtcgacagggtgatctcgttggattgcttggtgggctcttgggtgtggcggccttggttcttcatcctccttgccttgatcatttgcatctcccccttgatcattgccgtcatcttgaggtggctcatctctttgatctcccccttcatcaacttgagcctcatcctcattttgagttggtggagatgcttgcgtggaggaggatggttgatcttgtgcatttggaggctcttcggattccttaggacacacatccccaatggacatgttccttagcgcgatgcatggagcctcttcatcacctatctcatcaagatcaacttgctctacttgagagccgttagtctcatcaaacacaacgtcacaagaaacttcaacttgtccagaggacttgttaaagactctatatgcccttgtgtttgaatcatatcctagtaaaaagccttctacagtcttaggagcaaatttagattttctacctcttttaacaagaataaagcatttgctaccaaagactctaaaatatgaaatattgggctttttaccggttaggagttcgtatgatgtcttcttgaggattcggtgtagatacaaccggttgatggcgtagcaggcggtgttgaccgcctcggcccaaaaccgatccgaagtcttgtactcatcaagcatggtccttgccatgtccaatagagttctattcttcctctccactacaccattttgttgtggcgtgtagggagaagagaactcatgcttgatgccctcctcctcaagaaagccttcaatttgagagttcttgaactccgtcccgttgtcgcttcttattttcttgatccttaagccgaactcattttgagcccgtctcaagaatccttttaaggtctcttgggtttgagatttttcctgcaaaaagaatacccaagtgaagcgagaataatcatccacaataactagacagtacttactcccgccgatgcttatgtaagctatcgggccgaataggtccatgtgtaggagctccagtggcctgtcagtcgtcatgatgttcttatgcggatgatgaacaccaacttgcttccctgcttggcatgcgctacaaatcctgtctttctcaaaatgaacatttgttaatcctaaaatgtgttctccctttagaagcttatgaagattcttcatcccaacatgggctagtcggcggtgccagagccagcccatgttagtcttagcaattaagcaagtgtcgagttcagctctatcaaaatctaccaagtatagctgaccctctaacactcccttaaatgctattgaatcatcactccttctaaagacagtgacacctttgaccaacccttggtttccatccccgaatgtgatagctctttggggatcttggtttttctcgtaggaggagaacatcttcttctccccagtcatatggtttgtgcacccgctatcgatgatccaacttgagtccccggatgcataaaccttgccggatttgttagttaaaacatacgatgcatcaaaagtcttaaatgagattttagaatcatttgaagcagtaggagtttttttcctaggcaattttgcatgagttgattgcctagagctagatgtctcacccttatacataaaagcatgattagggccagagtgagacttcctagagtgaattctcctaattttgctctcaggataaccgacagggtataaaatgtaaccctcgttgtcctgaggaatgggagccttgcccttaacaaaattagataatcttttaggaggggcattaagtttgacattgtctcccctttggaagccaatgccatccttgatgccagggcgtctcccactataaagcatactacgagcaaatttaaaattttcattttcaagttcatgctcggcaattttagcatctaattttgctatatgatcattttgttgcttaattaagaccatatgatcatgaatagcatcaatatcaacatctctacatctagtgcaaatagaaacatgctcaacggtagatgtagagggtttgcaagtttttagttcaacaatcttagcatgtaaaatatcattctcacttctaagatcggaaatagaagcattgcaaacatctaagtttttagccttagtaagcatttttttcattttcaatcctaaggtagacaatttttcacatttctcaacttctagagcgtaagcatttttgaccttaacatgctttttgttttccttgattaggaagtcctcttgggtgtccaaaagttcatctttttcatggatggcactaattaattcatttaatttttccttttgttgcatgtttaggttggcaaaaagggtacgcaaattatcctcctcatcactagcattatcatcactagaggactcatatttagtggaggatttggatttaaccttcttctttttgccgtcctttgccatgaggcacttgtggccgacgttggggaagagaagtcccttgttgacggcgatgttggcggcgtcctcgtcggaggaggagtcggtggagctctcatcggagtcccactcgtggcacacatgggcatcgccgcccttcttcttgtgatttctcttcttctcctttcttctccccttcttgtcgtcgcccctgtcactgtcactagaaataagacatttagcaataaagtgaccgggcttaccacacttgtagcaaaccttcttggagcagggcttataatccttcccccttctttgcttgaggatttggcggaaactcttgatgatgagcgtcatttcctcgttgtcgagcttggaggcgtcgatgggttgtctacttgatgtagactcctccttcttctcctccgtcgccttgaatgccaccggttgtgcttcgagcgttgaggaggtaccttgctcgatgattttctttgagcctttaatcgttagctcaaagctcacaaattttcctataacctcctcgggagacattagcttatatctaggatcacctcgaattaattgaacttgtgtagggttaagaaatacgagggatctaagaataaccttgaccatctcatggtcatcccatttttcgctcccgaggttgtgcacttgattcaccaaggtcttcaagcggttgtacatggcttgtgggtcctccccttggtgaagcatgaagcgaccgagctccccctcgatcatttcccgcttggtgatttttgtcacctcgtctccttcgtgcgcggtcttgagtacgtcccaaatttccttcgcactctttaacccttgcaccttattatactcctctcgagttagagaggcgaggagtatagtagtggcttgggagttaaagtggtgaatttgggccacttcgtccgagtcatagtcttcatcccctacggatggtacctgtacaccaaactcaacaacattccaaatgcttgtgtggagtgaggttagatgatgcctcattttgtcactccacatattataatcttcaccgtcaaacagtggtggtttgcctaatggaacggagagcaatggagtacgctttgaaatacgggggtagcgtagggggatcttactaaacttcttgcgctcatggcgcttagaagtaatggatgacgcgttggagccagaggtggaaggcgatgaagtatcggtctcgtagtagaccaccttcctcatcttctttttcttgtcgccactccgatgcgacttgtgggaagaggatttcttctccttccccttccccttgttgcgggactcttccgatgaagtcttcccgtggcttgtagtgggcttgtcgccggtctccatctccttcttggcgtgatctcccgacat

SEQ ID NO: 5116 - DNA, 4968 bp, Zea mays
  Clone ID: TF_ZM3738.C1.o1.fg
atgtccggtggggatggacctcctcccgtttttgatggtgacgattttccttattggaaaattcgtatggaagcatacttagaggctatagacattggtgtctataaagccgccacacaaggattccccgaacctagagatcccacaaatcttgtaggtgatgagttcaattatgagaagtggaatgctaaggccaaaaacaccctttttagaggcctttgcaaagatgtgttcaatagagtaagaaatcataaaaatgctcatgatttgtggatggacatttgtgctctacacgaaggaactagaagtgagcgtgaggagagatatcacatagccatgcgaaagttaaattcttttgaaatgcttgctaatgaaaatgcaaatgctatgtactcacgtctaaatattcttgtagaggaagttaatggattggggcttactcaaatctcacaaccggatgttgtgaggaagattctcagtgtcctcccaatagacaaatatggacacattgtcactgtgctacatcaaatggatctttcagttaccacacctacacagattttgggaaagatcaatgcccatgaaatgaagaccaccaagatgttgaagaagctaaatagagaaggcatcaaatttgattcaagaaagaaaaaattcttttccaacaaaagaaagcccatttctgagatggactgctacaactgtggtgagctcggtcatcttgctcatcaatgcaacaagcccaagaagaataagttcaagggcaagaaacaagatgacaacgatgatgaaaagaaggaaaagaaattcttcaagaggaaggatgggaagcaaaagaggttccacaagaagaagaatggaaaggcatatattgttggtgactggctcaccgacattgaatcatcaagtgggtcttcttcaagtgaaaaagagaatgatgaaaaagttgccgccatcgccggggacttctcttcaccaccaccatcgccatcatcgacttctcacatatgcctcatggctaggggtgaacggaaggtacaaaacgatattaatattgttgatgatagtgatagtgatagtgatagtgatgaggaatttgcttcaccttcatatgatgagctagctgacttgcttaaagaatatactcaaatcattagaaagtcaaaagctaaatgtgataggttgaaaaatgaaaatgaatctttaaatgctaaatatgacatagttataaaagctagtgatgaaataaaagaagaaaataaaactatgtcatcaactgtaaatgagctcacaaactccctaaaagatgctaaggaaaaatgtgacaaattaaatgaagctaatagggagttgcaaaatagactagttaaaatcaaggaagactatactcaaattaaatttgatcatgacaatcttcttgttgaaaatgaacttttatcttgcaaaacacatgaggctattaaccctgttgttaagattgatgtagcaacctcatgtgatgatttgagtcaagaagagcaaactagtctacatgctgaattgactgaaaaagttgaagtcctgactttagacaaccaaaaattgaagaattacttgactgatgcaactactagaggaaatgttgctattgagaacaatgatttcaacaatgagttggcagtggataatcaaaggcttaaaatgagtgtgcaaaagttcaacaagggtcaatacctccaaaatgagctgcttatgaacactgtcatgaaaaacaacaggagtggtcattttgcccacaactgcaaagccaaaccgccaacccccttgcctaagcactcaagaccatttgctttcaatgctcattatgttctaagaaaggttgcaaatggaaaggtgaactacaagaccggtgggagccattgggttattgacagtggatgcacacaacatatgacaggcaacccacggatgttcacctcactggatgaaaatgttgatggtcaagataaaatcacatttggagacaattcaaaaggaaaagtgcaaggacttggcaaggtggcaatctcaaatgatctatcaatatcgaatgttctcttagttgcacctttgagcttcaatttattatcagtgggtcaactctgtgatcttggacttcaatgcttattcactccaacagaggttattgtaacaaagatggatgatgaatcaatggtgttcaaaggttttaggtacaacaacctctacttagtggatttcacttcagaagatgcaaacttaagaacttgcctcttcaccaaagcttcacttggatggctctggcataggaggcttgcacatgttgggatgagcacactcaagaaggtattaaagaaagatatggttagaggattaaaggatgtggtgtttgaaaaagacaagccatgcagtgcatgtcaagctggaaagcaagttgctaatacacatcctactaaagctttcatgtcaacatcaaggccactggaactacttcatatggatttatttggacctacaaattatgtaagtgtcggtggcaacctctactgtctagtgattgttgatgacttctcaagatacacttgggtgttctttctccatgacaaatctgaagttgcatctatattcaagaagtttgccaaaaaggcacaaaatgaatttgattgcaagatcaagaagattagaagtgacaatggcaaagaatttgacaacaccaacattcatgagtactgtgatgaaattgggatcaagcatgaagtatctgcaacatacacacctcaacaaaatggagttgttgaaaggaagaacaggaccatgatcactcttgcaagaacaatgattgatgagtataacacaccggagaagttttgggccgaagctgtcaacactgcttgttatgcatcaaacagactatttcctcaccggctacttgagaagactccttatgaactgctaaatgggaaaaagccagacatctctttcttccgggtgtttgggtgcaaatgctacatctacaagaaacaccatcacctagggaagtttcaaagacgttgtgatattggttttcttttgggttattcattaaagtccaaagcatatcgagtattcaaccatgccactggcgtggtagaagaaacatatgatgtggaatttgatgagactaatggctcccaaggagcacttgaaaatcttgatgatgtaggtgatgagccacttagggaagcaatgaagaacatgcctattggagctatcaaaccaaaagaagatgaagaagaggtgcaaatcattgacatgccttcttcatcaaatgtaccacaaaatgatgaaaaagatgagaggcatgcaaatgaagatacatttgtctctcatgaacaagcaagggtacaagccgaagatattgatgctccaggatcttcttcccaagtggttgacaggagaaactcatcactacttcaagctcatcctcaaaaccaaatcatcgagagtccttcacaaggggttattactcgatcacacagacatgcttcttttattgaacatcactcttttgtttcttgtgttgagcctacctgtatagatgaggcgctacaggatccggactgggtgaatgccatgcatgaagaacttaacaacttcacccgtaacgaagtttggaccctggagaagcccccacaagatgcaagaatcattggaacaaagtgggtgttcagaaacaaacaagatgatcaaggtgtgattgtaaggaacaaggcaagacttgtcgcaaagggattctctcaagttgaaggcttagattttggagagacctttgcacctgttgctcgactggaagccatccgtatcctacttgcatatgcatcatgctatgatataaaactttatcaaatggatgtaaaaagtgcatttttaaatggcttcataaatgaacttgtatatgttgagcaaccgcctggatttgaagaccctagatatcctaaccatgcttacaggttgtccaaggcgctttatgggctaaagcaagctccaagggcttggtatgagcgccttcgcgacttcctcatcgaaaagggcttcaagatcgggaccgtcgacacaactctcttcacaaagaaacataacggtgacattttcatttgtcaagtcaagcaaatgaaagatggtaactttctctcacaagagaagtataccaaagacttgttgaaaaggttcaacatggagaagtgcaaaccaatcaagacccccatgcctacaaatggacatctcgacttagatgagggaggtaaccctgttaatcaaactctctaccgttccatgattggtagtttattgtaccttaccgcatctaggcccgatattatgtttagtgtctgcatgtgtgctagattacaatctaatcctaagaaagctcatcttcgcgctgttaagagaattcttaggtatctcaggcacaccacaagcgttggtctgtggtatcccaaaggagctacttttgatttaattggctactccgattcggattatgccggttgcaaaattgataggaaaagtacttctgggggatgccatctgcttggtagatcactagtttcatggacatccaaaaagcaaaacagtgttgccttgtcaactgccgaagcggaatacattgccgcaggtgcttgttgcacacaaattttgtatatgaaacaaactcttctagactatggagtagttctagaaaaggtacctttgttgtgtgataatgagagtgctgttaaaattgctaacaatcctgtacaacactctcgcaccaagcacattgatatccgtcatcacttccttagagatcatgttgctaaaggagatatcattttagaaggagtgaggttggaagatcaattagcggatattttcactaagccacttgataagacccgcttttgcatgttgaggaatgaactaaatattcttgatctcagaaattttatgtaa

SEQ ID NO: 5117 - DNA, 4965 bp, Zea mays
  Clone ID: TF_ZM4509.C5.o5.fg
atgtcgggagctcacgccaagaaggagatggtgaccggcgagaagcccgccacaagccacggtaaggctccatcgggagagtccgacaacaagaagagggaggaatcacctccccgtgtcaagtcgcaccggagtggcgacaagaagaagaaaatgaagaaagtggtctactacaagaccgattcttcgtcgccttccacctccagctccgacgcgtcgtccgtcacttctaagcgccatgagcgcaagaagtttagtaagatccccttacgctatcctcgcatttccaaacgcacccctttactttacgtcccactaggcaaaccaccggaaccatccgtgggggatgaaggctatgactcggacgaggtagcccaaatccggcacttcaactcccaagccactactatactcctcgcctctctaagtcgagaggagtataataaggtgcaagggttgaagagtgccaaagagatttgggacgtgctaaaaaccgcgcacgaaggagacgaggtgaccaagatcaccaagagggaaacgatcgagggggagctcggtcgcttcatgcttcaccaaggggaggagccacaagccatgtacaaccggctcaagaccttggtgaaccaagtgcgcaacctcgggagcaccaaatgggatgaccatgaaatggtcaaggttattcttagatcactcgtttttcttaaccctactcaagtacaattaattcgtggtgatcctagatataaactaatgtctcccgaggaagtgatagggaagtttgtgagctttgagctaatgatcaaaggctccaaacaaatcattgagcgaggcgccacctccacacccgaggtgcaacctgttgccttcaaagcaacggaggagaagaaagaagagtctacatcaagtaggctccccatcgacgcctccaagctcgacaatgaggagatggctttaatcgtcaaaagctttcgccaaatccgcaagcaaaggaggggtaaggactacaagccccgctccaagaatgtttgctacaagtgtggtaagcacggtcatttcattgctaaatgtccattatcaagtgatagtgacagaggcgacgacaagaaggggagaagacaggagaagaagtattacaagaagaagggcggcgatgcccatgtttgtcgggagtgggactccgatgagagctccaccgactcctcctccgacgaggacgcggcaaacatcaccgtcaacaagggtcttctcttccccaacgtcggccacaagtgcctcatggcaaaggacggcaaaaagaagaaggtaaaatctagagcttccactaaatatgcaacatctagtgatgaggctagctctagtgatgatggggatgatttgctcaccctttttgccaacttaaacatgcaacaaaaagaaaaattgaatgaattgattagtgctattcatgagaaggatgaactcttggatagccaagaggacttccttattaaagaaaataagaagcatgttaaagttaaaaatgcttatgctcaggagatagaaaaatgtgaaaaaataactagtgagcaaagcacttgccataacactatttccaaccttagatttgaaaatgataaattgattgctaaggttgagaaattaaatgatagtgatgattctcttgtcaaccttagaaatgataatgctaatttgattgctaagattgacaaattgaatgcatctctctctagccttaaaattgagaatgaaaaattaatttctaagcctaaagattcaaatgtttgcaatgtttctatttccaatcttagagatgagaatgctattttacatgctaagattgttgaattaaatacttgcaaaccctctacatctactgttagtcatgtctctatttgcactagatgtagagatgttaatgttgatgctattcatgatcacattgctatgattaaaaaacaaaatgatcatatagcaaaattagatgctaaagttgccgagcatgaattagagaatgaaaattttaaatttgctcgtagtatgctttatagtgggagacgtcctggcattaacgatggcattggcttccaacagggaggcaatgtcaaactcaatgcccctaaaagattgtctaactttgttaagggcaaggctcccatgcctcaggataacgagggctatattttatatcctgcaggttatcctaaggataagattaggagaattcatgctaagaagactcattctgtttcacaccatgcttttatttataagaatgaggcttctagctctaggcgttctacccatgttaaaatgcctaaaaagaaatctcctattgcattaaatgatcataacatttcatttaagacttttgatgcttcatatgttttaactaacaaatcaggcaaagtagttgccaaatatgttggggccaaacacaagggctcaaagacttgtgtttgggtacccaaggtgcttgtttctaatgtgaaaggacccaagaccgtctgggtttatgcatccgggggctcaagttggatcatcgatatcgggtgcacaaaccacatgaatggggggaaaaggatgttctcctcctacgagaaaaaccatgatccccaaagagctatcacattcggggatggaaatcaaggtgttactatctttagaagaagtgatgattcagtagcatttaagggagtgttagagggtcagctatacttaattgattttaatagagctgaactcgacacttgcttaattgctaagactaacatgagttggctctggcatcgccgactagcccatgttgggatgaagaatcttcacaagcttctaaagggagagcatattttaggactaacaaatgtttattttgagaaagacaggatttgtagcacatgtcaagcaggaaagcaagttggtgttcatcatccacacaagaacatcatgacgaccgacaggccgcttgagctactccacatggatctattcggcccgatcgcttacataagcatcggcgggaaaaccttaaagagattcttgagacgggctcaaaatgagttcggcttaaggatcaaaaagattagaagcgacaacgggacggagttcaagaactcacaaattgaaggctttcttgaggatgagggcatcaagcatgagttctcttctccctacacaccacaacaaaatagtgtagtggagaggaagaatagaactctacttgacatggcgaggaccatgcttgatgagtacaagacctcggaccggttttgggtagaagcagtcaacaccgcttgctacgccatcaaccgtctataccttcaccgaatcctcaagaagacatcatatgaactcctaaccggtaaaaagcccaatgtttcatattttagagtctttggtagcaaatgctttattcttattaaaagaggtagaaaacccaaatttgctcctaaggctgtagaaggctttttacttggttatgactcaaacacaagggcatatagagtctttaacaagtccactcggctagttgaagtttcttgtgatattgtgtttgatgagactaacgactctcaagtagagcaagttgatcttgatgagctagatgatgaagaggctccgtgtgtcgcgctaaggaacatgtccattggggatgtgtgtcccaaggaatccgaagagcctccacatgcacaagatcaaccatcatcttcaaatcaagcatctccacctacccaagatgaggatcaagctcaagatgatgaaaatgaagatcaagaagagccacctcaagaggaggacaataatcaagggggagatgccaatgatcaatataaggaagatgatgagggtcccgcaccaccacaccgaagagtccaccaagcaatacaacgagatcaccccgtgaactccatcctcggcgatattcataagaggagggtggaagatgcattaagagattcagattgggtgttggcgatgcaagaggagctcaacaacttcacgaggaatgaggtatggcatttagttccacgtcctaatcaaaatattgtaggaaccaagtgggtcttccacaacaaacaggatgagcatggtgtggtgacaaggaacaaagctcgacatgtggccaaggaatactcccaagtcgaaggtttggatttcggtgaaacatatgcacccgtagctaggcttgagtcaatttgtatattacttgcttatgctacttaccatggctttaagctttaccaaatggacatgaaaagcgccttcctcaatagaccaatcaaggaggaggtctatgttgagcaacctcccggctttgaagatagtgagtaccctaaccatgtctataaactctctaaggcgctttatgggctcaagcaagccccaagagcatggtatgaatgcctaagagattttcttattgctaatggcttcaaagtcggaaaaaccgatcctactctctttactaaaacaattgcaaatgatttgtttgatcatggttcaaaaattcgagatgtccatgatgggggagttgaagtatttcttaggatttcaagtcaagcaactccaagaggcaccttcattagccaaacgaagtacattcaagacatactcaccaagtttgggatgaaggatgccaagcccatcaagacacccatgggaactaatgggcatctcgacctcgacatgggagggtgtaaaattgatagaaagagcacatcagagacttgccagttcttggaaagatctctggtgtcttgggcttcaaagaaacaaaattttgtagctctttctaccgccgaagccgagtacattgccgcaggccattgttgcacgcaattactttggatgaggcaaacccttagggactatgattacaagttaatcaaagttcctctcctatgtgataatgagagtgcaatccgcatggcggataatcccgtgagcacagccacactaagcacatag

SEQ ID NO: 5118 - DNA, 2194 bp, Zea mays
  Clone ID: TF_ZM4581.C2.o19.fg
atgtcgggagctcacgccaagaaggagatggtgaccggcgagaagcccgccacaagccacggtaaggctccatcgggagagtccgacaacaagaagagggaggaatcacctccccgtgtcaagtcgcaccggagtggcgacaagaagaagaaaatgaagaaagtggtctactacaagaccgattcttcgtcgccttccacctccagctccgacgcgtcgtccgtcacttctaagcgccatgagcgcaagaagtttagtaagatccccttacgctatcctcgcatttccaaacgcacccctttactttacgtcccactaggcaaaccaccggaaccatccgtgggggatgaaggctatgactcggacgaggtagcccaaatccggcacttcaactcccaagccactactatactcctcgcctctctaagtcgagaggagtataataaggtgcaagggttgaagagtgccaaagagatttgggacgtgctaaaaaccgcgcacgaaggagacgaggtgaccaagatcaccaagagggaaacgatcgagggggagctcggtcgcttcatgcttcaccaaggggaggagccacaagccatgtacaaccggctcaagaccttggtgaaccaagtgcgcaacctcgggagcaccaaatgggatgaccatgaaatggtcaaggttattcttagatcactcgtttttcttaaccctactcaagtacaattaattcgtggtgatcctagatataaactaatgtctcccgaggaagtgatagggaagtttgtgagctttgagctaatgatcaaaggctccaaacaaatcattgagcgaggcgccacctccacacccgaggtgcaacctgttgccttcaaagcaacggaggagaagaaagaagagtctacatcaagtaggctccccatcgacgcctccaagctcgacaatgaggagatggctttaatcgtcaaaagctttcgccaaatccgcaagcaaaggaggggtaaggactacaagccccgctccaagaatgtttgctacaagtgtggtaagcacggtcatttcattgctaaatgtccattatcaagtgatagtgacagaggcgacgacaagaaggggagaagacaggagaagaagtattacaagaagaagggcggcgatgcccatgtttgtcgggagtgggactccgatgagagctccaccgactcctcctccgacgaggacgcggcaaacatcaccgtcaacaagggtcttctcttccccaacgtcggccacaagtgcctcatggcaaaggacggcaaaaagaagaaggtaaaatctagagcttccactaaatatgcaacatctagtgatgaggctagctctagtgatgatggggatgatttgctcaccctttttgccaacttaaacatgcaacaaaaagaaaaattgaatgaattgattagtgctattcatgagaaggatgaactcttggatagccaagaggacttccttattaaagaaaataagaagcatgttaaagttaaaaatgcttatgctcaggagatagaaaaatgtgaaaaaataactagtgagcaaagcacttgccataacactatttccaaccttagatttgaaaatgataaattgattgctaaggttgagaaattaaatgatagtgatgattctcttgtcaaccttagaaatgataatgctaatttgattgctaagattgacaaattgaatgcatctctctctagccttaaaattgagaatgaaaaattaatttctaagcctaaagattcaaatgtttgcaatgtttctatttccaatcttagagatgagaatgctattttacatgctaagattgttgaattaaatacttgcaaaccctctacatctactgttagtcatgtctctatttgcactagatgtagagatgttaatgttgatgctattcatgatcacattgctatgattaaaaaacaaaatgatcatatagcaaaattagatgctaaagttgccgagcatgaattagagaatgaaaattttaaatttgctcgtagtatgctttatagtgggagacgtcctggcattaacgatggcattggcttccaacagggaggcaatgtcaaactcaatgcccctaaaagattgtctaactttgttaagggcaaggctcccatgcctcaggataacgagggctatattttatatcctgcag

SEQ ID NO: 5119 - DNA, 1653 bp, Zea mays
  Clone ID: TF_ZM4939.C2.o4.fg
atggatgctcaatttgatgtgactcaagaatggcttgatagggtgaagatagcaaggaaagggcttcgaggaactaagcgaagtctgcaagtcagactggcaaacaggtcgccagaggtgtcaggggaggctcaaccgccctgggggggcggttcaaccgccctagtcaaccctgaccagtctgcagatgttgatcctagggcaatagatcttgccatgaaaatcgccgaaaggatgttcctcaaaatgaaggaagatgaggcgaagaacaagattgaagaagaagaaaatgatcgatggagaccaaacgacgaatccacctcttcacaaggttcatctttcaaatccacttctcatatgtgctttattgctaatgggagtgacagtgaaagcgaaagtgaggatgaggaggagcaagaaagtgatagtgaagatgaggatgatcttcaacaattcttcgctcagctaagcaagaaacatcggatgagcttgcttaaactcatgaaaagagcggaagaacaaaaagaaatgcttcataagcaagaagacttcctcatcagaaaaattgaagacttagagaagttgaccaaagagcatgagaagctaaagtgctctcatgatgatttggtccaaaggtatgaagacatttcaattgagcaaattaaagttgttaatcattcatcatatattgctcaattagaaaataaaaatgctatgttcaagaacacgatagaaaggctaaatattgaaaatctagctttgcaagaaaaacatgatatgcttgtgtgctctcataataaatttatggattcacatatcatgttagaaatggctcatgaggttgtgttaactaatttgaaatcataccaacctcacatgtgcacatgtgttgaaattgaaactatatcaccatgtgctaacaattgttgttatcaagcaagccaatcttccattgagctagaaatttcaggaattagtgatatttctatcacacaagaaaataaagagctcaaggaagaagttggaaggctaagaaggagcttaacacttttgaagggaaagtgtcatgctcaaccttctcacgataaccgtgataatatggtgaaaaagcttgagaaggggacaaccgtagcatgcacaaaaccccttcaaaagaataccaagcttttcaagaagggcatgagcaaaattcatggtaagaaaattaatgatcatactatttgctctaacaatgtgcctatgtgcttcaacaaagaaagatcaaagagaagcgatagaaggtgctatggatgcaaggagaagggtcatgaaattggttcatgcccccacatgaagaacaaagaccttgcacaatcaagaaagatgatcatcaagaaagatgaaagcaaaaggcaaatgcattgcaaggacaagcaccgcatttgctacaattgccgtaaaaaaggtcatctattcaaggtttgtccaaatggtaaaactcctaagcctaacttgtcaatacattcaaatatgcttaggagacccaaatttgactcttgtgctacaaaggtgatgagttcaccacattctaggaccaaggctgtttgggtgcctaagtccttattggctaaccttgatggacccatcatgagatgggtaccaaaatgtacttaa

SEQ ID NO: 5120 - DNA, 4173 bp, Zea mays
  Clone ID: TF_ZM5005.C1.o15.fg
atggaagcatatttagaggctatagacattggtgtctacaaagctgccacacaaggattcctcgaacctagaaatcccacaaatcttgtaggtgatgagtttaattatgagaaatggaatgctaaggccaaaaacaccctttttagaggcctttgcaaagatgtgtttaatagagttagaaatcataaaaatgctcatgatttgtggatggacatttgtgctctacatgaaggaactagaagtgagcgtgaggagagatatcacattgctatgagaaagttaaattcttttgaaatgcttgctaatgaaaatgccaatgctatgtactcacgtctcaatattcttgtagaggaagtaaatggattggggcttacacaaatttcacaacaggatgttgtgaggaagattctcagtgtcctcccaattgacaaatatggacacattgtcattgtactgcatcaaatggatctttcagttaccacacctacacagatattgggaaagatcaatgctcatgatatgtacatgcacatcaatgacaaggatgagtcatattccaagagaaaggatttggctctcaaagcaaatcaagaaagaaaaggaaaagctaaagtacaaattgaggaagaatcctcaagtgatgatgatcttaatgctaacattgccttgatggtgaggaagaccaccaagatgttaaagaagctcaacagagaaggcatcaaatttgattcacgaaagaagaaattcttttccagcaaaagaaagcccatttctgagatggattgctacaactgtggagaacttggtcatcttgctcatcaatgtaacaagcccaagaagaacaagttcaagggcaagaaagaagatgacaacgatgatgagaaaaaggaaaagagattcttcaagaggaaggatgggaagcacaagaggttccacaaaaagaaaaatggaaaggcatatattgttggtgactggctcactgacattgagtcatcaagtggatcttcttcaagtgaagaagagaatgatgaaaaagttgccaccatcgtcgggaacttctcttcaccaccaccatcgccatcatcgacttctcacctatgcctcatggctagaggtgatcggaacatacaaaatgatattgatattactgatgatagtgatagtgatagtgatgaggaatttgcttcaccttcctatgatgaactagctgacttgcttaaagaatacactcaaatcattaggaagtcaaaagctaaatgtgataagttgaaaaatgaaaatgaatctttgaatgctaaatatgacatagataaatgtgacaagttaaatgaagctaatagggagttgaaagatagactagtgaaaatcaaggaagactatactaagattaaatttgataatgataatcttcttgttgaaaatgaacttttatcttacaatacacatgaggctattaaccctgttgttaagattgatgtagcaacctcatgtgatgatttgaatcaaggagagcaaactagtgtacatgatgaattgaccgaaaaagttgaagtcctgactttagacaaccaaaaattgaagagatacttgactgatgcaactactagaggaaaggttgccattgagaacaatgatttcaacaatgagttggcagtggataatgaaaggcttaaaaatgaggtgaactacaagaccggtggcagccattgggttattgacagtggatgcacacaacatatgacaggcaacccacggatgttcacctcacttgatgagaatgttgatggacaagacaaaatcacatttggggacaattcaaaagggaaagttcaaggacttggcaaggtggcaatttcaaatgatctatcaatttcaaatgttctcttggttgcacctttgagcttcaatttattatcagtggggtttagatacaacaatctctacttagtggatttcacctcagaagatgtagacttaagaacttgcctcttcaccaaagcatcacttggatggctttggcataggaggcttgcacatgttgggatgagcacactcaagaaggtattaaagaaggacatggttagaggatcaaaggatgttgtatttgaaaagaacaagccttgtagtgcatgtcaagctgggaagcaagttgctaacacacatcctacaaaagctttcatgtcaacatcaaggccactggaactacttcatatggatttatttggacctacaaattatgtaagtgctggtggcaacctctactgtctggtgattgttgatgatttctcaagatacacttgggtgctatttctccatgataaatctgaagttgcatctatattcaagaagtttgccaagaaggctcaaaatgaatttgattgcaagatcaagaagattagaagtgataatggtaaagaatttgacaacaccaacattcatgagtactgtgatgagattgggatcaagcatgaagtatctgcaacatatacacctcaacaaaatggagttgttgaaaggaaaaataggaccttgatcacacttgcaagaacaatgattgatgagtataacacaccggagaggttttgggccgaagctgtcaacactgcatgttatgcatcaaacaggctatttcctcactggctacttgcgaagactccctatgaactgctaaatgggaaaaagccagacgtctccttccgggtgttcggatgcaaatgctacatctacaagaaacgccatcacctagggaagtttcaaagacgttgtgatattggttttctattgggttattcatttaagtccaaagaatatcgagtattcaatcatgccactggcgtggtagaagaaacatatgatgtggaatttgatgagactaatggctcccaaggagcacttgaaaatcttgatgatgtaggtgatgagccacttagggaagcaatgaagaacatgccaattggagctatcaaaccaaaagaagatgaagaagaggtgcaagacattggtaggccttcttcatcaaatgtaccacaagatgatgaaaaagatgagaggcatgcaaatgaagatacatttgtctctcatgaacaagcaaggcctacatgtatagatgaagcgctacaggatctggactgggtgaacgctatgcatgaagaacttaacaacttcacccataaccaagtttggaccctagagaagcccccacaagatgcaagaatcattggaacaaagtgggtgttcagaaacaaacaagatgatcaaggcgtgattgtaaggaacaaggcaagacttgttgcaaagggattctctcaagttgaaggcttagattttggagagacctttgcaccggttgctcgactggaagccatccgtatcctacttgcatatgcatcatgctatgatataaagctttatcaaatggatgtaaaaagtgcatttttaaatggcttcataaatgaacatgtatatgttgagcaaccacctggatttgaagaccctagatatcctaaccatgcttacagattgtccaaggcgctatatgggctaaagcaagctccaagggcttggtatgagcgtcttcgtgacttcctcatcgaaaagggcttcaagatcgggaccgtcgacacaactctattcacaaagaaacataacggtgatattttcatttgtcaagtatatgttgatgacacaatctttggctcgacaaatgactatcattgcaaggaatttggtgagttgatgtcgaaggagttcaagatgtcaatgattgagaagtataccaaagacttgttgaaaaggttcaacatggagaagtgcaaaccaatcaagacacctatgccaacaaatggaaatcccgacctagatgagggaggtaacccggttaatcaaactctctaccgctctatgattggtagtttattgtatcttaccgcatctaggcctgatatcatgtttagtgtctgcatgtgtgctagatttcaatctaatcctaagaaagttcatcttcgctctattaaaagaattcttaggtatctcaggcacaccctaagcgttggtttgtggtatcccaaaggagctacttttgacttaattgactattccgattcagattatgccggttgcaaaattgatagaaaaagtacttctgggggtgccatttgcttgggagatcactag

SEQ ID NO: 5121 - DNA, 2018 bp, Zea mays
  Clone ID: TF_ZmC4916_457
atggatcctaaggggaagggaattgtgatcaacgacaaggagaaggagtccttcgtcaacgagccaagggatgacaagtccaatgactcgggctcgggccacaagcgaagagatgggaagaagaagaagacaagacgcatcaaggagatcgtctactacgacagcgatgagtcctcttcttcccaaaaggacgacgaccacgacaaacaaaggaaaccggttaattctaacttttcttttgactactctcgtattccgcaaagttcaaattcacatttgctttccattccactcggcaagcccccacactttgatggggaggactacggattttggagccacaaaatgcgtagtcacctattctctctccatcctagcatatgggagattgtagatagtggaatgcactttaatagttcggatagtcctatattcattaatgagcaaatccataagaatgcacaagctactactgttcttctagcctcattgtgcagggatgaatataataaagtgagtggcttggataacgccaagcaaatctgggataccctcaagatctctcatgagggaaatgacgctaccttgctcaccaaaatggagttggtggagggcgagcttggacggttcgcgatgataaggggcgaggagccaactcagacatacaaccggctcaagacccttatcaacaaaataaggagctacggaagcacgcgatggacggaccacgacgtcgtccgactaatgctcaggtcctttaccgttcttgatcctcatttggtgaataatattcgtgagaatcccaggtacaccaaaatgtcgctcgaagaagtcctaggaaaattcgtcagcgggcgaatgatgatcaaggaggcaaggtatgtggacgacgccttgaatggaccgatcaacgagccgcaaccttttgctctcaaagccacagggaacaaggaggcgctacccagcaaggtggcgcaaattgaggcggccggtcttaatgaagaagaaatggccctcattatcaagagattcaagacggtgctaaagggtcgcaatggacagccaagcaagactaagaccaaggggaagcgatcatgcttcaaatgcggtaagcttggtcattttattgctaactgtctcgataatgatagtgaccaggaaaagggaaacaagagggaaaagaagaagcattacaagaaggcaaagggcgaggcgcatctaggcaaggagtgggactcggattgctcctcgtccgactccgacaatgaaggactcgccgccaccgccttcaacaaatcaaccctcttccccaacgagtgtcacacatgccttatggcaagggagaagaaggtatgtactcgcaactctacctatgcttcttcaagtgaggacgaatctagtgatgaggatgaagtagattattcatgtttgttcaagggcttagatagatctaagatagacaaaattaatgaattaattgatgccttgaatgaaaagaatatacttttagaaaagcaagaggatttgttgtatgaagagcatgataaatttgttgaggcacaaaaatcctatgctttagaagttaaaagaaatgaaatgctttcttttgaactatctacttgtcatgaaaccatttctactttgaaaggtgtcaacaatgatttaaatgctaaattagaagtagcaaataaatccaattcttgtgtagaaaatgttgttatttgcaatagatgtaaagactttgatattgatgcttgtagtgaacacatagcttctattgcaaagttaaataatgaagtggctagtcttaatgcccaacttaagactagcaaaagtgaatttgataagttaaaatttgcaagggatgcttacacaataggaagacatccctcaattaaggatggacttggcttcaagagggaagccaagaacttaacaagccataagactcccatctccaccaaggagaaagggaaggctcctgtggctaatagtgttaagaagaatcatgctttcat

SEQ ID NO: 5122 - DNA, 1324 bp, Zea mays
  Clone ID: TF_ZmC8013_1
gcgatctaaaactagtcggcatggtaggttgagcgtgcacatgcagggagtgcgatccgagttagttggagtggtggcgcaggaatcccttaccgttgggcgcgtgcgggtcgtgcggacaaacgcgtcctgcgggcacgacgcagcgcacaggcgcggacatggtggggacccgggtggtggaagggagctctgccccggctatatgtaccacccctctctgctgtaatcgtgctcggggtgtccaggaaataaaggccaacatacaggcgagggagagcttctcgccggggcgttcgtcggccatatccactgttcatctccttcctctcagtgttctctgctttctagggtgtgagcgctctttcttgagtgagagggtccaacatttggtaccagagctaggatggagacgccgccggcaaaggatggcctcaagatgttcgacggcatgggctcgacgagtgccgcgatggagcgcgtcatcaacagcagctccgttgagctcccgctgctgaccaaggcgaattaccacgagtgggcgttggttatgcaggtctcgctggaggcgatggaactgtgggacgcggtggaggccgtgtgcaaggagcgtcccaaggatcggcgggcaatggccgccatcctgcgcggagtgccgccggagatgaaggcggggctcgccgtgaagaagacggcgaaagaagcgtgggaggcggtgaggtcgatgaggatcggcgatgaccgggtgaaggccgcgagcgtgcaacgcttgtggaaagagtacgagaacgtcggtttctgtgatggtgagagcgtcggcgacttcgcgttgcggatcaacggcctcgtcgcaagccttcgagagatgggcgagacgctggaggaccaccgcgtcgtgaagaagatcctccgcgtcgtccccaaacgtctcaagcaggtggccgtggcgatcgagatgctcaccgacctcaacacgacgacgattgaagagctcgtcggccgactacgcgttgcggaggacgccgacgcggacgacgccaaggcgaaggaggtctccacggagggcgtcgggcagctgttgctcactgaggcacagtgggaggcgcggcgtcgggaacggaacaagcagcgcaagccccgtgacggtgacaagaggcgcggcaatggcgatcgcggcaacaacggagacgatgagcacagcgacggcgacgacgatgcgagcagcatggcctcgggttcaagccggagaggctggagccgcaacaagggccagtgcttcgagtgcggcggctatggtcacatcgcccggttctgccgtgagaag

SEQ ID NO: 5123 - DNA, 1185 bp, Zea mays
  Clone ID: TF_ZM4488.C6.o1.fg
atggggatgatccgcaagattaatctaatgggtgtgcccttgcaggtcgaagatattctctttaacattgataggaaaaagcaaagaaagagaggatgcctcgcatgtggggagaagggccactttagggacagctgtccaactatggccaaacccaaaaaggagaggagcagaggcaaggcgctaacaagtgttagaacttgggatgattcttcaagtgaagatgaacctccaaggacgcgcagccactggtcctcatcacgctcatcacgatcatcacacaaatgccttatggcaagaggtaacaaaagcattccatcctctagtgatgaaaatagtagtgatgatgaaggtttgctagaaaattttgaaacttttgcaaacttaaatagtgagttgtcaactaaaattgagctattagagtctagtgttccatccaatactgctgatgatgaccttattaaaaagaatgaaaaacttaaggctaagttagctagctcccaaaatactattgaaaatttgctagagaaaatggaaattcttagcatacataatgatgagctaactactaagctagaaaacattggtagcaccccaggagcatctttagttaaaattctcgaaattattaaaaaggatgcttctacttcttgctttgatttaatggatgatactaacccctgcaaccaagttcttgttgagaatattgttatagaaacatgttcggatgaggttgcaaaggaaaatgagcaattaaggcaagaagtggctcgtcttggcaaggctttgtatgacaagaaaggcaaagccaaacaaatccaacttccacagtataacactactgcgggagtgaacaagcctatggagggagaaactgtgatttgtaggttatgtcacaaggaaagccacaagtctttccaatgcaagacgatgaccggggataagccaaggcaaaagctcaagcaaaagccatcaagcaaaatctccaacacctacatcaaaaaggtggacaaaaagactgctacaccatatttgatcaagaagaaaaagaatggaaaggtgatagcaatcaaggccaacaagcaagccaacaaaggaaagggggccaaacgcatctgggtgccaaaggaaataatttcaaccatgaaaagcaccaagaaggtttggatcccgaaagggaagtaa

SEQ ID NO: 5124 - DNA, 4452 bp, Zea mays
  Clone ID: TF_ZmC951_363
tcaatcaaaattcctagaatcaagaatatttagctcatgcctaagtttggtaaatgtttgctcatctaatggcttggtaaagatatctgctaattgttctttggtgttaacatatgcaatcttgatatcccccttttgttggtgatcccttaaaaaatgataccgaatggctatgtgtttagtgcggctatgttcaacgggattatccgctatgcggattgcactctcattatcacatagaagaggaactttggttaatttgtaaccatagtccctaagggtttgcctcatccaaagcaattgcgcgcaacaatggcctgcggcaatgtactcggcttcggcggtataaagagcgacagaattttgcttctttgaagcccaagacaccagagatcttcccaagaactgacaagtccctgatgtgctctttctattaattttacaccctcctgtgtcgaggtcgagatgcccattagttcccatgggtgtcttgatgggcttggcatccttcatcccaaactttgtgagtatgtcttgaatgtacttcgtttggctaatgaaggtgccctcttggagttgctttacttgaaatcccaagaaatacttcaactcccccatcatcgacatctcaattttttgtgtcatgatcctactaaacttatcttcaaagccgggaggttgctcaacatagacctcctccttgattggtccatttaggaaggcacttttcacgtccatttgataaagcttattccttgtgaagttgttgagctcctcttgcatcgccagcacccaatccgaatcttgaagtgcttcctctaccctgtgtggcatcatcatcttccttgtcttgattattaacatctccccttgatcattgccctcctcttgaggtggctcatcttcttgatcttctccttcatcattttgagcctcactctcatcttgagttggtggggatgcttgcatgggggaagatggttgatcttgtgcttgtggaggctcttcggattccttaggacacacatccccaatagacatgttccttagagtgacgcacggagcctcttcatcatctagctcatcaagatcaacttgctttacttgagagctgttagtttcatcaaacacaatgtcacaagaaacttcaactagtccagtggacttgttaaagactctatatgcccttgtgtttgaatcaaaaccaagtaaaaagccttctacagccttaggagcaaatttagattttctacctcttttaacaagaataaagcatttgctaccaaagactctaaaatatgaaacattgggctttttaccggttaggagttcataagatgtcttcttgaggattcgatgaagatataaccggttgatggcgtagcaagcggtgttgaccgcctcggcccaaaaccgatctgaagtcttgtactcatcaagcatggtccttgccatgtccaatagagttctattcttcctctccactacaccattttgttgtggcgtgtagagagaagagaactcatgcttgatgccctcctcctcaagaaagccttcaatttgagagttcttgaactgcgtcccgttgtcgcttcttatcttcttgatacttaatccgaactcattttgagcccgtctcaagaatccctttaaggtctcttgggtttgagatttttcttgcttccctgcttgacatgcgctacaaaccctgtctttctcaaaatgaacattggttagtcccaaaatgtgctctccctttataagcttatgaagattcttcatccccatatgggctagtcggcggtgccagagccaacccatgttagtcttagcaattaagcaagtgtcgagttcagctctatcaaaatctactaagtatagctgaccctctaacactcccttaaatgctactgaatcatcacttcttctaaagacagtaacaccttgatttccatccccgaatgtgatagctcgttggggatcttggtttttctcataggaggagaacatattctcccctgtcatatggtttgtgcactcgctatcgatgatccaacttgagcccccggatgcataaaccttgggtacccaaacacaagtctttgacccgttgtgtttgcccccagcatatttggcaactactttgcctgatttgttagttagcacataagatgcatcaaaagtcttgaatgaaatgttatgatcatttgatgcaataggagttttcttcttaggcaatttagcatgagtagattgcctagaactagatgcctcactcttgtacataaaatcatgattagggccagagtgagacttcctatagtgaattctcctaattttgtgctcaggataaccggcagggtacaaaatgtaaccctcgttattctgaggcatgggagccttgcccttaacaaagttagataatcttttaggaggggcattgagtttgacattgcctccctgttggaagccaatgccatccttaatgccagggcatctcccactatagagcatactacgagcaaatttaaaattttcattttctaactcatgctcggcaattttagcatctaattttgctatatgatcattttgttgtttaatcatagcaatgtgatcatggatagcgtcaatgttaacatctctacatttagtgcaaatagtaacatgctcaatggtagatgtagagggtttgcaagaatttaattcaacaatcttagcatgtaatatggcattttcatctctaagattggaaatggaaacattgcaaacatttaattccttagccttagcaattaatttctcattctcatttctaaggctagcaagagaggcatttaatttttcaatcttagcaattgaactagcattatcatttctaagattgacaattgaatcatcacaaatatttgacttctcaaccttagcaattagtttggcattttcatttctaaggttggaaataacatcatggcaagtgcttagctcactagataatttttcacattttctaattaggaagtcctcttggctatccaagagttcatccttctcatgaatagcactaattaattcatttaatttttccttttgttgcatgtttaagttggcaaaaaggatgagcaaattatcctcatcatcactagaattatcctcatctctagaagtttcatacttagtggaggattttgattttaccttcttccttttgtcgtcctttgccatgaggcatttgtggccgacgttggggaagagaaggcctttggtgatggcgatgtttgcggcgtcctcgtcggaggaggagtcgatggagctctcgtcggagtcccattcccggcaaacatgggcatcgccgcccttcttcttatagtatctcttcttctccttcttcttccccctcttgtcgttatccctgtcactatcactagacaaaggacatttagcgataaaatgactgggcttaccacacttgtagcaaactttcttggagcgagacttgtagtccttccccctcctttgcttgaggatttggcgaaagctcttgatgatgagcgtcatttcctcgttgtcgagcttggaggcgtcgatcgggaccctactaggtgtagagtcttctttcttctcctccgttgccttgaatgcaacgggttgtacatcgggtgtggaggaggcgccttgctcgatgattttcttggagcctttgattatcaactcaaagctcacaaattttcctattacttcctcgggagacattagtgtgtatctaggatcaccatgaattaattgaacttgcatagggttaaggaaaacgagtgatctaagaataaccttgaccatttcatggtcatcccattttgtgctcccgaggttgcgcacttggttcaccaaggtcttgagccggttgtacatcacttgtggctcctccccttggtaaagcatgaagcgaccgagctccccctcgatcgtctcccgcttggtgatcttggtcacctcgtctccttcgtgcacggtcttgagcacgtcccaaatttcctttgcgttcttcaacccttgcaccttattatactcctctcgacttagagaggcgaggagtatagtagtggcttgggagttgaagtgttggatttgttcgacctcctccgagtcgtaatccttttctcccttctttggtacctgcgctccatactcaacaatatcccatatgcttttgtggagtgaggttaggtgatgcctcattttatcactccacatagaataatcttcaccttctagcataggtggtttgcctaatgcaacggaaagtaatggagtgcgttttgaaatgcgaggatagcgaaggggcatcttactatacttcttgcgctcatggcgcttagaagatgcggatgccgatttcgagccggaggtggagggtgacaaagagtcggtctcgtagtagaccaccttcttcat

SEQ ID NO: 5125 - DNA, 3267 bp, Zea mays
  Clone ID: TF_ZM4578.C3.o6.fg
atgtacaaccggctcaagaccttggtcaaccaagtgtgcaacctcgggagcaccaaatgggatgaccatgaaatggtcaaggttattcttagatcactcatttttcttaaccctactcaagtacaattaattcatggtgatcctagatataaactaatgtctcccgaggaagtgataggaaagtttgtgagctttgagttaatgatcaaatgctccaaacaaatcatcgagcgaggcgccacctccacacccgaggtgcaacccgtcgccttcaaagcgatggaggagaagaaggaagagtatacatcaagtaggctccccatcgacgcctccaagctcgacaatgaggagatggctttaattattaaaagctttcgccaaatactcaagcaaaggaaggagagagattacaagccccattccaagaaggtgtgctacaagtgtggtaagcccagtcatttcattgctaaatgtccattatcaagtgatagtgataggggcgacgacaagaagggaagaaggaaggagaagaagaagtattacaagaagaagggcggcgacgcccatgtttgccgggagtgggactccgatgagagctccaccgactcctcctttgacgaggacaccgcaaacatcgccttcaacaaaggtctcctcttccccaacgtcggccacaagtgcctcatggcaagggatgacaaaatgaagataaaatctagagcctccactaaatacgcgacatctagtgaggaggagaactctagtgatgatgaggataatttacttgccctttttaccaacctcaacatgcaacaaaaagaaaaactaaatgaattgatagcgggtgttactgtctttagaagaagtgatgattcagtagcatttaagggagtattagagggtcagctatacttagttgattttaatagagctgaactcgacacttgcttaattgctaagactaacatgggttggctctggcatcgccgactagctcacgttgggatgaagaatcttcataagcttctaaagggagagcacattttgggactaacaaatgttcattttgagaaagacaggatttgtagcgcatgtcaagcaggaaagcaagttggtgttcatcatccacacaagaacatcatgacgaccgacaggccgcttgagctactccacatggacctattcggcctgatcgcttacataagcatcggcgggagtaagtactgtctagttattgtggatgactattctcgcttcacttgggtgttctttttgcaggaaaaatctcaaacccaagagaccttaaagggattcttaagacggactcaaaacgagttcggtttaagaatcaagaaaataagaagcaacaatgggacggagttcaagaactcacaaatagaaggcttccttgaggatgagggcatcaagcatgagttctcttctccctacacaccacaacaaaatggtgtagtggagaggaagaatagaactctacttgacatggcgaggaccatgcttgatgagtacaagacctcggaccggttttgggcggaagcagtcaacatcgcttgctactccatcaaccgactctatcttcaccgaatcatcaagaagacatcatatgaactcctcaccggtaaaaagcccaatgtttcatattttagagtctttggtagcaaatgctttattcttgttaaaagaggtagaaaatctaaatttgctcctaaggctgtaaaaggctttttacttggttatgattcaaacacaagggcatatagagtctttaacaagtccactggactagttgaagtttcttgtgacattgtgtttgatgagactaacggctctcaagtagagcaagttgatcttgatgagctagatgatgaagaggctccgtgcatcgcgctaaggaacatgtccattggggatgtgtgtcctaaggaatccgaagagcctccacatgcacaagatcaaccatcatcttcaaatcaagcatctccaccaacccaagatgaggatcaagctcaagatgatgagaatgaggatcaagaagatgagccacctcaagaggagggcaatgatcaagggggagatgcccatgatcaagacaaggaagatgatgagggtccaagaccgccacacccaagagtccaccaagtgatacaacgagatcaccctgtgaactccatcctcagcaatattcataagggggtaaccactcgatcttgtgtcgctcatttttgtgaacattactcctttgtgtcttctattgagccatacagggtggaagatgcattatgggatttggattgggtgttggcaatgcaagaggagctcaacaacttcacgaggaatgaggtatggcatttagttccacgtcctaatcaaaatgttgtaggaaccaagtgggtcttccacaacaagcaagatgagcatggtgtggtgacaaggaacaaagcccaacttgtggccaaaggatattcacaagtcgaaggtttggatttcggtgaaacttatgcacccgtagctaggcttgagtcaattcgtatattacttgcctatgcttcttaccatggctttaagctttaccaaatggacgtgaaaagtgccttcctcaatggaccaatcaaggaggaggtctatgttgagcaacctcccggctttgaagataatgtctatgatgggggagttgaagtatttctaggatttcaagtgaagcaactccaagagggtaccttcattagccaaacgaagtacactcaagacatactcaccaagtttgggatgaaggatgtcaagcccatcaagacacccatgggaaccaatgggcatctcgacctcaacacgggaggatgcaaaattgatagaaagagcacatcaaggacttgtcagttcttgggaagatccctggtatcttgggcttcaaagaagcaaaattcagtagctctttctaccgccgaagccgagtatattgccgcaggccattgttgcgcgcaattactttggatgaggcaaacccttagggactatggttacaaattaaccaaagttcctctcctatgtgataatgagagtgcaatccgcatggcggataatcccgttgagcacagccgcactaaacacatagccattcagtatcactttttgcgggatcaccaacaaaggggggatatcgagattgcatatgttagcaccaaagaacaattagccgatatctttaccaagccactagatgagaaaacttttacaaacttaggcatgagctaa

SEQ ID NO: 5126 - DNA, 1287 bp, Zea mays
  Clone ID: TF_ZM4590.C5.o1.fg
atgtcgggagatcacgccaagaaggagatggagaccggcgaaaagcccactacaagccacgggagcacttcatcggaagagtcccgcactaagaggaaggagaagaagaaggactcctccaaaggaaaggagaagagatcttcttcacaccacaaagagaagaaggagaaatcctcttcccacaagccgcatcggagtggggacaagaaaaagaggatgaggaaggtggtctactacgagaccgattcttcatcggcatccacatccggctccgacgcggcgtccgtcacttctaaacgccaagagcgtaagaagtatagggatgaaaactatgatgaggatgaagtagcccaaatcgagcacttcaactcccaagccacaaccatattcctcgcctctctaagtagagaggagtataacaaggtgcaagggttgaagaatgcgaaggagatttgggatctactcaagaccgcgcacgagggtgatgaactcaccaagatcaccaagcgggaaacgatcgagggggagctcggttgcttccgtcttcgccaaggggaggagccacaggatatgtacaaccggctcaaaaccttggtgaaccaagtgcgcaacctcgggagcaagaaatggaatgaccacgaggtggttaaggttattcttagatcactcatcttccttaaccccactcaagttcaattaattcgtggtaatcctagatacacactaatgactcccgaggaagttatcgggaattttgtgagctttgaatgtatgatcaagggctcaaaaaagaacaacgagcttgatgatccctccacatccgaagcacaaccggtggcattcaaggcgacggaggagaagaagaaggagtctacaccaagtagacaaccaatcgacgcttcaaagctcgacaacgaggagatggctttaatcatcaaaagctttcgccaaatcctcaagcaacggaagaggaaggattacaaatcccgttccaagaaggtttgctacaagtgtggtaagcccagtcactttattgctaaatgtccattatcaagtgacagtgacagggataacgacaagaagggcaagaggagagaaaagaagaggtaccacaagaagaggggcggcgatgcccacgtatgccgcgagtgggactctgacgagagctccaccgactcctccgacgacgaggacgccgccaacatcgccgtcaccaagggactcctcttccccaacgtcggccacaagtgtctcatggcaaaggacggcaaaaggaagaagccttaa

SEQ ID NO: 5127 - DNA, 3990 bp, Zea mays
  Clone ID: TF_ZM4903.C2.o1.fg
atgagggagatcgagaccggtgacaagtccgcaagcttgggaagaacacactcaagggagtctgcccacaagcacaaggaggaatcctcttcctccatcaagtcccaacggaagggcaaaccacctatgtttgatggtgaatattattctatgtggattgataaaatgaggcatcacctaacctcactccacaaaagcatatgggatattgttgagtatggagcgcaggtaccaaaggaaggggacaatgattgtgattcggaggaggtcaaacaaatccaacacttcaactcccaagccactactatactccttgcctctctaagtcgagaggagtataataaagtgcaagggttgaagagtgcaaaggagatttgggacgtgctcaagaccgcgcacgaaggatacgaggtgaccaagatcaccaagagggagacgatcgagggggagctcggtcgattcatgcttcaccaaggggaggagccacaagcgatgtacaaccggctcaagaccttggtgaaccaagtgcgcaacctcgggagcaccaaatgggatgaccatgagatggtcaaggttattcttagatcactcgtttttcttaaccctacacaagttcaattaattcgtggtgatccaaggtataaactaatgtctcccaaggaagtgataggaaaatttgtgagctttgaattgatgatcaaaggctccaagaaaatcatcgagcaaggcgccacctcaacacccgaggtacaacccgtcgcattcaaggcgacgaaagaagagaagaaggattctacaccaagtaggattcccatcgacgcctccaagctcgacaacgaggaaatgtcgctcatcatcaagagctttcgccaaatcctcaagcaaaggagggggaaggactacaagccccgctccaagaaagtttgctacaagtgtggtaagcccagtcattttatcgctaaatgtcctttgtctagtgatagtgacaggggcgacgacaagaagggaaagagaagagaaaagaagagctccaccgactcctcctccgatgaggacgccgcaaacatcaccgtcaccaaaggccttctcttccccaatgtcggccacaagtgcctcatggaaaaggacggcaagaagaagaaggtaaaatctagatcctccactaagtatgcaacttctagtgatgaggataattgtagtgacgatgaggacaacttgcttattctttttgccaatcttaacatgcaacaaaaggaaaaattaaatgaattgattagtgttattcatgagaaggatgaactcttggatagccaagaggatttccttattaaggaaaacaaaaaacatgttaagactaaaaatgcttatgctcaggaggtagagaaaaataaaaaattaactagtgagcttagcacttgccatgacactatttctagccttagaaatgaaaatgctaaattaattgctaacgttgagaagttagatgtttgtgatgattcaattgttaatcttagaaatgataatgctagtttaattgctaagattgataagttgaatgcatccctcactagccttaaatttgagaatgaaaaattaattgctaaggctaaagatttaaatgtttgcaatgtttctatttccaatcttagagatgagaatgctattttacatgctaagattgttgaattaaatatttgcaaaccctctacatctactgttgagcatgtttatgcatccgggggctcaagttggatcatcgatagcgggtgcacaaaccacatgacaggggagaaaaggatgttctcctcctatgagaaaaaccaagatccccaacgagctatcacattcggggatggaaatcaaggtgttactgtctttagaagaagtgatggttcagtagcatttaagggagtgttagagggtcagctatacttagttgattttaatagagttgaactcgacacttgcttaattgctaagactaacatgggttggctctggcatcgccgactagcccacgttgggatgaagaatcttcacaagcttctaaagggagagcacattttgggactaaccaatgttcattttgagaaagacagggaaaaatctcaaacccaagagactttaaagagattcttgagacgggctcaaaatgagttcagcttgaggatcaagacaataagaagcgacaacgggacggagttcaagaactcacaaatcgaaggctttcttgaggaggagggcatcaagcatgagttctcttctccctacacgccacaacaaaatggtgtagtgaagaggaagaatagaactccattggacatggcaaggaccatgcttgatgaatacaagacttcggatcggttttgggccgaggcggtcaacaccgcttgctacgccatcaaccggaatatgtccattggagatgtgtgtcctaaagaatccaaagagcctccacatgcacaagatcaaccatcttcctcaatgcaagcatttcaaccaactcaagatgaggatcaagctcaagatgatgaagatgaagatcaagaggagccacctcaagaggaggacaatgatcaagggggagatgctaatgatcaagacaaggaagatgatgagggtccaagaccgccacacccaagagtccaccaggcgattcaaagagataaccccatgaacaccatcctcggcgatattcataaggggccacacagggtagaggaagcacatcaagattcggattgggtgctggcgatgcaagaggagctcaacaacttcacaaggaatgaggtatggcatttagttccacgtcctaaccaaaatgttgtaggaaccaagtgggtcttcagcaacaagcaagatgagcatggtgtggtgacaaggaacaaaccccaacttgtggccaagggatattcacaagtcgaaggtttggatttcggtgaaacctatgcacccgtagctaggcttaagtcaattcgcattttacttgcctatgctacttaccatggcttcaagctttatcaaatggacgtgaagagtgccttcctcaatggaccaatcaaggaggaggtctatgttgagcaacctcccggctttgaagatagtgagtaccctaatcacatctacaaactctctaaggcgctttatgggctcaagcaagccccaagggcatggtatgaatgcctaagagattttcttatcgctaatggcttcaaagtcggaaaatccgatcctactctattcactaaaactattgcaaatgatttgtttgtatgccaaatttatgttgatgatatcatatttgagtctactaacaaatctacttgtgaagaatttagtaggatcatgattcaaaaattcgagatgtcaatgatgggggaattgaagtattttctaggctttcaagccaagcaactccaagaaggcaccttcattagccaaacaaagtacattcaagacattcttgcaaagtttgggatgaaggatgccaagcccatcaagacacccatgggaaccaatgggcatctcgacctcgacacgggagggtgtaagattgatagaaagagcacatcagggacttgccagttcttgggaagatctctggtgtcttgggcttcaaagaaacaaaattctgtagctctttctaccgccgaagtcgagtatattgtcgtaggccattgttgcgcgcaattactttggatgaggcaaacccttagggactatggttacaagttaaccaaagttcctctcctatgtgataatgagagtgcaatccgcatggcggataatcccgttgagcacagccgcactaaacacatagtcattcggtatcactttttgagggatcaccaacaacggggggatatcgagattgcttatattaacaccaaagaacaattagccgatatctttaccaagccactagatgagaaaacatttaccaaacttaggcatgagctaaatattcttgattctaggaattttgattga

SEQ ID NO: 5128 - DNA, 1395 bp, Zea mays
  Clone ID: TF_ZM4983.C2.o13.fg
atggctcgaagaagatcccaaaagaacaagaagacacctccgaagaaaaacaatgaggtaactcttgaggtattactttccgattgttctaattatgcttcatggtccactagggtgataaatgcttttagaaccatagactcacaattagaacaagttttagacaagagtattataccctctaattatgataaggaaaatgcttccgaggaagatcaaagatgtatacgcttaaactatcttgcttatgacatcttaagtaattctcttagcaaagaagattatcgtgccttcataatgaattataatgaatatattcctgatgcgcatggtatttggacaagaattaaaagtaaatttaatgagtccaaacatattagttcatatgatgcttatacttcctttagtccttgtgaaactaaccctttgaaggaagaagaagaaaatgaacgttggagactaaacgatgaatccacctctccaaaagaaaacttaaaatcccaacaacctcactcatgcacatgtattcaaattgaaactatattaccatgtgctaatgcttgttgctcgtcaacaagcaaatcctcctttgagctagaattttcaggaacaaaagatgatacatgtcaagagctcaaggaagaaaatgagaagctaaggacgagcttgacacaactaaaagggaagtgcactgcccaaccttctcaagataaccgtgattacatggtgaaaaagcttgagacgggaacaactgtggcatgcacaaaatccctcgaagaaaaagtcaaggacttgaggattgtcaagagtaaagaacaaaagaagaaaatcaatacctctgccaaaagcctcaaccatgcctccatgcaaggtaacatccaaggtaatgatcaagccacacttcacactaagaaaagtaagaagtgtagtgaatgctttgaaaatgggcacttgattaggtcatgtccctatattaaagaaaatggcttgattattaacaaggatgataaacattgttttagatgctctaagaagggacatttagttaagtcatgtccctatgaagaacaaaaatgcatagttttagaaaagaaaatatttactaaccatgtagcaagcaagaaacaaggaaagaagaaatcttcaagatatgatgatcgcctttggtacatatgccgaaagaaaggacatcaatgtaaggattgtcctattggtaactatcccgcccccaacttgtcaattgattcatatgtaactaggcaatccaaaattgcaacttgtgctagaaaggtaatgagtttaccaagtgctagcacaaaggacatctgggttcctagatctctgatgactaaccttgatggacccatcaagagatggggaccaaaatatgcatga

SEQ ID NO: 5129 - DNA, 372 bp, Zea mays
  Clone ID: TF_ZmC14166_328
tagatacaaacagatgtcccccgaggaggtgattggcaagttcatgagctttgaacttatgatcaaagactccaaacacattgtcaacttggagtaaggcgccaccttcacacctgaggtgcaacccgttgcattcaaagcaacagaagagaagaaggaagagtctacaccaagtagactcccaatcaacccctccaagcttgataatgaggaaatgactcttatcatcaagatcttctggtaaatcctcaagcaaagaaaggggaagcccgctttaagagggtttgctacaggtgtggtaagtccggtcactttatcgctaaatgtccatatacaagtgacagtgatagggacgacgacaagaaagggaag

SEQ ID NO: 5130 - DNA, 4569 bp, Zea mays
  Clone ID: TF_ZmC951_355
ttaaaatcctaagaaatacttcaactcccccatcatagacatctcgaatttttgaatcatgatcctactaaactcttcacaagtagatttgttagtagacccaaatatgatatcatcaacataaatttggcatacaaacaaatcatttgcaatggttttagtaaagagagtaggatcggctttgccgactttgaagccattagtgataagaaaatctcttaggcattcataccatgctcttggggcttgcttgagcccataaagcaccttagagagtttgtaaacatgattagggtactcactatctttaaagccgggaggttgctcaacatagacctcctccttgattggttcattgaggaaggcactcttcacgtccatttgataaagcttgaagccgtggtaaatagcataggcaagtaatatgcgaattgactcaagcctagctatgggtgcataggtttcaccgaaatccaaaccttcgacttgtgagtatcccttggctacaagtcgggctttgttccttgtcaccacaccatgctcatcttgcttgttgtggaagacccacttggtccctacaacattttggttagcatgtggaacaagatgccatacctcattcctcgtgaagttgttgagttcctcttgcattgccaacaaccaatccgaatcccttaatgcgtctttcaccctgtatggatcaatagaagacacaaaggagtaatattcacaaaaatgagcgacacgagatcgagtggttacccccttataaatatcgccgaggagggagttcacgaggtgatcttgttgtatctcttggtggactcttgggtgtggcggtcttggaccctcatcatcttccttgttttgatcattggcatctcccccttgatcattgtcctcctcttgaggcagcttttcttgatcttcattttcatcatcttgggcttgatcctcatcttgagttggtggagatgcttgtatggaagaagatggttgatcttgtgcttgtggaggctcttcggattctttaggacacacatccccaatggacatgttccttagcgcgacgcatggagcctcttcatcatctagctcatcaagatcaacttgctctacttgagagccattagtctcatcaaacacaatgtcacaagatacttcaactagtccagtggacttgttaaagactctatatgcccttgtgtttgagtcataaccaagtaaaaagtcttctacatccttaggagcaaatttagattttctacctcttttaacaagaataaagcatttgctaccaaagactctaaaatatgaaacattgggctttttaccggtgaggagttcataagatgtcttcttgaggattcggtgaaggtagagacggttgatggcgtagcaagcggtgttgattgcttccgcccaaaaccgatccgaggtcttgtactcatcaagcatggtcctcgctaagtcaagtagagttctattcttcctctccactacaccattttgttgaggtgtgtagggagaagaaaactcatgcttgatgccctcgtcctcaagaaagccttcaatttgagagttcttgaactccgttccattgtcgcttctaatctttttgatccttaagccgaactcattttgagcccatctcaagaatccctttaaggtctcttgggtttgagatttttccctgtctttctcaaaatgaacatttgttagtcctaaaatgtgctctccctttagaagcttgtgaagattcttcatcccaacatgggctagtcggcgatgccagagccaacccatattagtcttagcaattaagcaagtgtcgagttcagctctattgaaatcaactaagtatagctgaccctccaacactcccttaaatgctactgaatcatcacttcttgtaaagacagtaacacctatatcttgatttccatccccgaatgtgatagctctttggggatcatggtttttctcataggaggagaacatccttttctcccctgtcatatggtttgtgcacccgctatcaatgatccaacttgagcccccggatgcataaaccttgggtacccaaacacaagtctttgagcccttgtgtttggccccaacatatttggcaactactttgcctgatttgttagttaaaacatatgaagcatcaaaagtcttaaatgaaatgttatgatcatttgatgcagtaggagttttctttttaggaaatttagcatgagtggattgcctaaaactagatgcctcactcttatacataaaagcatgatgagagccagagtgagacttcctagaatgaattctcctaatcttatgttcgggataaccagcaggatataaaatgtatccctcgttatcctgaaccatgggagctttgcccttaacaaagttggacaatttcttaggggcattaagcttgacattgtctccctgttggaagccaatgtcatccttaatgccagggcgtctcccattatagagcatacttctagcaaatttaaaattttcattttctaagtcatgctcattaattttagcactaagttgagctatgtgatcattttgttgtttaattaaagctaggtgatcatggatagcatcaacattaatgtctctacatctagtacaaatagtaacatgctcaatggtagatgtagagggtttgcaaacatttaattcatcaatcttagcatgtaacatgacattttcatttctaagattggaaacaatatcattgcaaacatttaaatttttagccttagtaatcaatttattattttctatcttaaggctagcaattgattcatttaacttgtcaatcttagcaatcaaattagcattatcatttttaagtttgacaagagaatcatcacaaacatttaaattctcaaccttagcaattaatttagcattctcatttctaaggttgaaaatagtatcatggcaagtgcttagctcactagtcaatttttcacatttttctacttcctgagcataagcatttttaaccttaacatgcttcttgttttctttaaaaaggaagtcctcttggctatccaagagttcatccttctcatgaataacacctattaattcattcaatttttccttttgttgcatgtttgggttggcaaaaagggcaagcaagttatcctcatcatcactagagttctcctcatcactagatgttgcatatttagtggaggctctagattttaccttctttttgccgtcctttgccatgaggcacttgtggccgacattgtggaaaaggagacctttgttgacggtgatgtttgcggcgtcctcgtcggaggagtcagtggagctctcatcggagtcccactcccagcatacatgggcatcgccgcccttcttcttgtaatacttcttcttctccttccttcttcccttcttgtcgtcgcccctgtcactatcacttgataatggacatttagcaatgaaatgaccgggcataccacacttgtagcaaactttcttggagcggggcttgtagtccttccccctcctttgcttgaggatttggcagaaacttttgatgatgagtgtcatctcctcattgtcgagcttggaggcgtcgatggggagcctacttgatgtagactcttctttcttctcctccgttgctttgaaggcaacgggttgcacctcgggtgtggaggtggcgcctcgctcgatgatttgtttggagcctttgatcatcaattcaaaactcacaaactttcttattacttcttcgggagacattagtttatatctaggatcaccacgaattaattgaacttgtgtagggttaagaaaaacgagtgatcttagaataaccttgaccatttcatggtcatcccatttggtgctcccgaggttgcgcacttggttcaccaaggtcttgagccggttgtacatggcttgtgactcctcatctccttcgtgcacggtcttgagcacgtcccaaatatctttggtggtttcaaacccatgcactttgttatactcctctcgacttaaagagacgaggagtatagttgttgcttgcgagttaaagtgtcgtatttggtcggcctcatccgagtcatagtccttatcccccacctgtggtacctgcgctccatactcaacaacatcccatatgcttttgtggagtgaggttagatgacctttcattctagcactccacatagagtaatcttcaccctcaaaaaccggtggtttccctaatggaacagaaagtaaaggagtgtgtttaggaatgcgaggatagcgtagggggatcttactaaacttcttgcgctcatgacgcttagaagtgatggatggcgtgttggagccggatgtagaaggtgatgaagaatcggtctcgtagtagaccaccttcttcattttctttttcttctcgccgctccaatgcgacttgttgtgtgaaggggatcccttcatcttgttgccgaactctcccgatggagtcttcccgtggcttgtggcgggcttctcgccagtcaccatctccttcttagcgtgatctcccgacat

SEQ ID NO: 5131 - DNA, 1629 bp, Zea mays
  Clone ID: TF_ZM4596.C2.o8.fg
atgtacaaccggctcaagacaatggtcaaccaagtccgcaacctcgggagcactaagtgggatgactatgaaatggtcaaggttattctaagatctcttgtttttcatagtcccactcaagtgcaactaatccgtggagattctagatataaacagatgtcttccaaggaggttattgacaagtttgtgagctttgaacttatgctcaaagactccaaacatattgtcaactcgaatcaaggtgccacctccacacccgatgtgcaacccgttgcgttcaaaccaacaaaagaaaagaaggaagagcctacaccaacaagtagattcccaatcgacgcctccaagctcgacaatgagaagatgactcttatcatcaagagcttctggcacgtcctcaaacaaaggaaggggaaggactacaaaccccgttccaagagggtttgctacaggtgtggtaagtccggtcattttatcgctaaatgtccatatacaagtgatagtgatagggacgatgacaagaaagggaagaaggagatgacaaagaaaagatattacaacaagaagaagggtggcgaggcacacatggggcgaaaatgggactccgacaagagctccaccgactcctccttcgacgaggacgccgccaacatcgtcatcaacaaaggccttctcttccccaacgtcggccacaaatgcctcatggttaaggatagcaaaaagaagaaggtacattctagagataccaccaagtacactacttccgatgatgagggtaactctagtgatgataatgatgatttgacttctctttttgcaaaccttagtaaagatcaaaagaagaaaattaatgaattgatagaaaccattaacgagaaggatgatatcttggaataccaagaggacttgctcattaaggaaaataaaaagtttgttaagctaaaagatgtttatgctcttgaagtagaaaaatgtgaaaatttgtctaaagagcttaatatttgcaatgattcaatttcttgtcttataactgaaaatgttagtttaatttataagattaaagaattgaacgcttgcaaaccctctacatctactattgagcatgttaccgtttgcactaaatgtagagatgttaatattgatgctatgaatgatcaccttgctatgattaaagaacaaaatgatcacataaacaaattaaatgctaaaattgtcgagcatgaactagagaatgaaaattttaaatttgctcgtagtatgctatataatgggagacgccctagcattaaggatgtcattggtttccaacaaggaagccaaagcaacgtcaaacttaatgcccctaagaacatgctttctaactttgttaagggcaaggcacccatggttcaggatagggaagaatcttcacaagcttctaaagcggagcacattttaggactaaccaatgttcattttgagaaagacaggatttgtagtgcatgtcaagcagggaagcaggttggagctcatcatccacacaaaaacatcatgatgaccgagaggccgcttgagctactccacatggatctcttcggcccgattgcttacataatcattggtgggagaaaatctcaaacccaagagacctaa

SEQ ID NO: 5132 - DNA, 972 bp, Zea mays
  Clone ID: TF_ZM4948.C1.o9.fg
atgtctcgagatcacgccaagagagagatcatgaccggcgacaagcccgcgagctcggggaagactctctcaagagagtccgacaacaagtataaggaggaatcatcttcctccatcaagtcacatcagaggggtgacaagaagaagaggaagaacaaagtggtctactacgagaccgactctttgtcaccctccacatccggtaccgactcgtccactacttctaagcgccatgagcacaagaagtataaggtgtataacaaggtgcaaggattaaaaaatgccaaagaaatttgggatgtcctcaaaacggcgcacgaaggggacaaggtgaccaagatcaccaagagagagacaatcgaggcagagtttggtcgattcgtcctaaacaaaggggaagagccgcaagtcatgtacaatcggctcaagacaatggtgaaccaagtgcgcaacctcgggagcaccaaatgggatgaccatgaaatggtcaaggttattctaagatcccttgttttttgtaatcctactcaattacaattaatacgtggggatcctagatacaaacagatgtctcccgaggaggtaattggcaagtttgtgagctttgaactaatgatcaaagactccaaacacattgtcaacttggagcaaggcgccacctccacacccgaggtgcaacccgttgcattcaaagcaactgaagaaaagaaggaggagtctacactaagtagacttccaatcgacacctccaagctcgacaacgaagaaatggcgctcatcatcaagagcttccgccaaatcctcaagcaaaggagggggaaggactacaagccccactccaaaagggtgtgctaccggtgtggtaagtccggtcactttattgctaaatgtccatattctagtgaaagtgatagggatgaagacaaaaaggggaagaagaagtactacaagaagaagggcggcgaggcgtga

SEQ ID NO: 5133 - DNA, 4179 bp, Zea mays
  Clone ID: TF_ZmC119_1038
atggggggtctggcgccggtgagaaattgcgacgcgaccgtccaagttctggggtggggaggccacgacactactgggacgcccctacgaccctcccaagtcaccaatcgagaacggagcatgacccaggacgtaggccggcgacggcgctcctccgccagcgattcaattggtgactgggtactcgacgagatggaaaagggagctggagcgatggcacctagcacaccaacatttactttgcgatcaattcttgaaaaggataagttaaatggaacaaactatacggattggatccgtaacctgagaattgttctcagggctgaaaaaaaggaagacgttctagacaccccactgccagaggatcctggtgaaaatgcaactgctgcagctaaaaccgcttacaagaaagcaatggatgctaatcttgaagtgagttgcctaatgcttgcttgcatggagcctgagctccagatgcagtttgagtcaaaccatgaggtgtacgatatgatcgtggcgctcaaggatatgttccagactcaggctaggactgaaaggttcaatgtgtccaaagcctttctggaatgcaagctagcagaaggcgcagcagttgggccacatgtaatcaaaatggttggttacagtcagaggttggagaagctaggcttcccaataagccaagagttggccactgacttcattttggcatctcttccgcccagctatggaaacttcatcacgaactaccatatgcatggggcggagaggggcctcaatgaactatgtggcatgctgaaaacagcagagggggacataaagaaaagcgctggcagcagcggccatgtgatggcggtccaaaacaaacccaactttaagaagaagggtaaatctcaaaagaagaagggcaaggcaaaggatacagtatccaagccaaatcaaaagcccaaggctggaccagctgcagatgcagagtgcttttattgcaaagaacttggtcactggaaaaggaattgcaagcagtacttggcctctattaaggatcgcggcggtaagggtacagccgcagcaggtacacttgctattcacattacagaaatttttcttgctgattcttatattaattcttgggtatttgataccggatcggttgcccatatttgcaattcgatgcagggaatgataagaagtagaagcgtgaaaagaggagaagttgatttccgggtaggcaataatgcaagagttgctacgttgactgtcgggacgatgcaactccacctcccatcaggatttattttggagttaaataattgttatctagttcctagtatgagtcaaaacattatgtctccttcatgtttgatgaaggatggttattcatttgcgagtgaaaacaatggttgtgtgatctctaagaatggcatgtttgtggcttttgcatccattatgaatgggttattcattttaaatcttgatgatgcacctatctgtaatattagtgctaaaaggcctcggcctaatgatttaagtcctacctacatgtggcactgtcgtttgggtcatataagtgagaatcgcatgaagaagcttcattctgatgggcttttaacttcgtttgattttgaatcatacgagacatgtgaagcttgcttacttggtaagatgaccaaggcgcccttcacgggtttaccggagaggacgttagatttattggaactcatacatactgatgtgtgcggaccaatgagtacgacagctaggggaggattccaatacttcataaccttcactgatgattttagtagatatgggtatgtctacttaatgaaacacaagtctgaatccttagaaaagttcaaagagtttcagaatgaagtagaaaatcagcgtggcaagaaaattaaagcactgcgatcagatcgtggtggtgaatatttgagtcatgagtttagcaatcatctaaagagttgtggaattgttccacagcttacgccgcctggaacgcctcagaggaatggcgtgtctgagcgacgtaatcggactttattggatatggttcgatcaatgatgagccagtcggacctacctttgtcgttttggggatacgctctagaaacagcagctttcacactaaatagggtaccgtctaagtccgtagttaagacaccatatgagatgtggactgggaagactcccagcttgtcttttctgaagatttggggttgtgaggtttacgtcaagcgactacagtcggataaactcactccaaaatcggacaagtgcatgttcgtgggatatccaaaggaaactttaggatattacttttaccaccggtcagagggcaaagtgtttgtcgcccggaacggtgtgttcttagagaaagagtttctcaaaagagagaaaagtaaacaaaaggtgtatcttgaagaagttcaggatgagccagtgggacaagattcaacaagtgatgctaatgtagcagaacaagttgagacgtctatggcaagagaatcaccaccacaaccacgaaggtcagcaaggcttcgcgaggcacgaggagaagtgctattgttgggcaatggggaagtgttgttgttagacaacgacgaacctgcaacatattcagaagcgatgatggacccagattccgagaaatggcatgtcgccatgagatccgagatagattccatgggagaaaatcaagtttggaacttggttgacccgcctgatggtgttagacctatagaatgcaaatggatctataagaagaagaaagacatggatggaaatgttcacatctataaggctcgacttgttgcaaagggttttcgacaagttcaaggagttgactatgacgagacattctcgccagtagcgatgcttaaatctattcggatcattctagctattgccgcatatttcgattatgagatttggcagatggatgtcaaaacagctttccttaatggaaacctagatgaggacgtgtatatgatacagcccgagggttttgtcgatccgatcaatgctggaaagatatgcaaacttcagaaatccatttatgggttgaagcaagcatctcggagttggaacattcgttttgatgaagtgatcaaagggcttggttttcatcagaatgaagaagaagcttgtgtttacaagaaggaaagtgggagcgctgttgtatttctgatcttgtatgtggatgacatattattgattgggaatgacattcctatgctggagtccgtcaaggcttcactgaaaaagagtttttctatgaaggacttaggggaagcagcatatattttgggcataaggatctatagagataggtcgaagaggcttataggattaagtcaagatacgtacattgacaaggttttgaaacggttcaacatggaacagtccaagaaaggtttcatacctatgtcacatggtaaacaccttagccagatgcaatgtcctgcgacggctaatgagcgagagcgcatgagtaaggtaccatacgcctcagcgattggatcaatcatgtatgccatgataagtacacgcccagatgtttcatacgctataagtgctacgagtagataccaggctgatccaggtgaggatcactggacagcggtaaaaggcattcttaagtacttaagaaggactaaagatatgttcctggtatatgggggtaaggaggagctcgttgtaactggttacactgatgctagcttccaaactgacccagacgagttaaaatcgcaatcaggttttgtgttcacaataaatggtggtgctgttagttggaagagttccaaacaggagactgtgactgattctacaacagaagccgagtacattgcagcttctgaatctgcgaaagaaggtgtttggataaggaagttcctcatcgagcttggtgtgtttcctaatgcatctagcccattgaacctctactgtgacaacaatggggctattgcgcaagctaaggagccaaggaaccaccagaaaaacaaacatgtactgcggaagtttcacctcatacgggaattcattaggcggggtgagataaagatatgcaaaatacatacggatttgaatgttgctgatcctttgacaaaacctcttccacaacctaagcatgaggcacacgtgagatctatgggtattagatatcttctagattaa

SEQ ID NO: 5134 - DNA, 4275 bp, Zea mays
  Clone ID: TF_ZmC119_814
atggcacctagcacaccaacatttactttgcgatcgattcttgaaaaggataagttaaatggaacaaactatacggattggatccgtaacctgagaattgttctcagggctgaaaaaaaggaagacgttctagacaccccactgccagaggatcctggtgaaaatgcaactgccgcagctaaaaccgcttacaagaaagcaatggatgctaatcttgaagtaagttgcctaatgcttgcttgcatggagcctgagctccagatgcagtttgagacaaaccatgaggtgtacgatatgatcgtggcgctcaaggatatgttccagactcaggctaggactgaaaggttcaatgtgtccaaagcctttctggaatgcaagctagcagaaggcgcagcagttgggccacacgtaatcaaaatggttggttacagtcagaggttggagaagctaggcttcccaataagccaagagttggccactgacttcattttggcatctcttccgcccagctatggaaacttcatcacgaactaccatatgcatggggcggagaggggcctcaatgaactatgtggcatgctgaaaactgcagagggggacataaagaaaagtgctggcagcagcggccatgtgatggcggtccaaaacaaacccaactttaagaagaagggtaagtctcaaaagaagaagggcaagggaaaggatacagtatccaagcccaatcaaaagcccaaggctggaccagctgcagatgcagagtgcttttattgcaaagaacttggtcactggaaaaggaattgcaagcagtacttggcctctattaaggatcgcggcggtaagggtacagccgcagcaggtacacttgctattcacattacagaaatttttcttgctgattcttatattaattcttgggtatttgataccggatcggttgcccatatttgcaattcgatgcagggaatgataagaagtacaagcgtgaaaagaggagaagttgatttccgggtaggcaataatgcaagagttgctgcgttgaccgtcgggacgatgcaactccacctcccatcaggatttattttggagttaaataattgttatctagttcctagtatgagtcgaaacattatgtctccttcatgtttgatgaaggatggttattcatttgcgagtgaaaacaatggttgtgtgatctctaagaatggcatgtttgtggcttttgcatccattatgaatgggttattcattttaaatcttgatgatgcacctatctgtaatattagtgctaaaaggcctcggcctaatgatttaagtcctacctacatgtggcactgtcgtttgggtcatataagtgagaatcgcatgaagaagcttcattctgatgggcttttaacttcgtttgattttgaatcatacgagacatgtgaagcttgcttacttggtaagatgaccaaggcgcccttcacgggtttaccggagaggacgttagttttattggaactcatacatactgatgtgtgcggaccaatgagtacgacagctaggggaggattccaatacttcataaccttcactgatgattttagtagatatgggtatgtctacttaatgaaacacaagtctgaatccttagaaaagttcaaagagtttcagaatgaagtagaaaatcagcgtggcaagaaaattaaagcactgcgatcagatcgtggtggtgaatatttgagtcatgagtttagcaatcatctaaagagttgtggaattgttccacagcttacgccgcctggaacgcctcagaggaatggcgtgtctgagcgacgtaatcggactttattggatatggttcgatcaatgatgagccagtcggacctacctttgtcgttttggggatacgctctagaaacagcagctttcacactaaatagggtaccgtctaagtccgtagttaagacaccatatgagatgtggactgggaagactcccagcttgtcttttctgaagatttggggttgtgaggtttacgtcaagcgactacagtcggataaactcactccaaaatcagacaagtgcatgttcgtgggatatccaaaggaaactttaggatattacttttaccaccggtcagagggcaaagtgtttgtcgcccggaacggtgtgttcttagagaaagagtttctcaaaagagagaaaagtaaacaaaaggtgtatcttgaagaagttcaggatgagccagtgggacaagattcaacaagtgatgctaatgtagcagaacaagttgagacgtctatggcaagagaatcaccaccacaaccacgaaggtcagcaaggcttcgcgaggcacgaggagaagtgctattgttgggcaatggggaagtgttgttgttagacaacgacgaacctgcaacatattcagaagcgatgatggacccagattccgagaaatggcatgtcgccatgagatccgagatagattccatgggagaaaatcaagtttggaacttggttgacccgcctgatggtgttagacctatagaatgcaaatggatctataagaagaagaaagacatggatagaaatgttcacatctataaggctcgacttgttgcaaagggttttcgacaagttcaaggagttgactatgacgagacattctcgccagtagcgatgcttaaatctattcggatcattctagctattgccgcatatttcgattatgagatttggcagatggatgtcaaaacagctttccttaatggaaacctagatgaggacgtgtatatgatacagcccgagggttttgtcgatccgatcaatgctggaaagatatgcaaacttcagaaatccatttatgggttgaagcaagcatctcggagttggaacattcgttttgatgaagtgatcaaagggcttggttttcatcagaatgaagaagaagcttgtgtttacaagaaggaaagtgggagcgctgttgtatttctgatcttgtatgtggatgacatattattgattgggaatgacattcctatgctggagtccgtcaaggcttcactgaaaaagagtttttctatgaaggacttaggggaagcagcatatattttgggcataaggatctatagagataggtcgaagaggcttataggattaagtcaagatacgtacattgacaaggttttgaaacggttcaacatggaacagtccaagaaagggttcatacctatgtcacatggtaaacaccttagccagatgcaatgtcctgcaacggctaatgagcgggagcgcatgagtaaggtaccatacgcctcagcaattggttcaatcatgtatgccatgataagtacacgcccagatgtttcatacgctataagtgctacgagtagataccaggctgatccaggttttgtgttcacaataaatggtggtgctgttagttggaagagttccaaacaggagactgtgactgattctacaacagaagccgagtacattgcagcttctgaatctgcgaaggaaggtgtttggataaggaagttcctcatcgagcttggtgtgtttcctaatgcatctagcccattgaacctctactgtgacaacaatggggctattgcgcaagctaaggagccaaggaaccaccagaaaaacaaacacgtactgcggaagtttcacctcatacgggaattcattaggcggggtgagataaagatatgcaaaatacatacggatttgaatgttgctgatcctttgacaaaacctcttccacaacctaagcatgaggcacaccgtagcctccccgtaatcctacagaatatacacattataactcctatcaaatcaagagatatcggactggacaagacgatgcacccattgggtccactacttcagatcatcagcgaagacatgcatggcgatcttctgaagaaagtgctatttgggaccttcgagtcgattgtttcccaagtcgtcccaaagctcgggggctacaccccttgggtgcacctacccaagacactcggcggaagttgcattccaagcaagtttctgcatctcagagctcaggcgccaatggtgacaaatgagattgttattgaagctatgatcaaggggcttcaaccaggaccaacaacacagtatttcgccaggaagcccccacaaactctggagaagcttcttcagaaaatggacgagtacatcagagccgataatgactttcgacagagaagggaagaagcctacagatactctgtaaggcccaaaatatgcataaaaacatataaataa

SEQ ID NO: 5135 - DNA, 3903 bp, Zea mays
  Clone ID: TF_ZmC119_998
atggcacctagcacaccaacatttactttgcgatcgattcttgaaaaggataagttaaatggaacaaactatacggattggatccgtaacctgagaattgttctcagggctgaaaaaaaggaagacgttctagacaccccactgccagaggatcctggtgaaaatgcaactgccgcagctaaaaccgcttacaagaaagcaatggatgctaatcttgaagtaagttgcctaatgcttgcttgcatggagcctgagctccagatgcagtttgagacaaaccatgaggtgtacgatatgatcgtggcgctcaaggatatgttccagactcaggctaggactgaaaggttcaatgtgtccaaagcctttctggaatgcaagctagcaaaaggcgcagcagttgggccacacgtaatcaaaatggttggttacagtcagaggttggagaagctaggcttcccaataagccaagagttggccactgacttcattttggcatctcttccgcccagctatggaaacttcatcacgaactaccatatgcatggggcggagaggggcctcaatgaactatgtggcatgctgaaaactgcagagggggacataaagaaaagtgctggcagcagcggccatgtgatggcggtccaaaacaaacccaactttaagaagaagggtaagtctcaaaagaagaagggcaagggaaaggatacagtatccaagcccaatcaaaagcccaaggctggaccagctgcagatgcagagtgcttttattgcaaagaacttggtcactggaaaaggaattgcaagcagtacttggcctctattaaggatcgcggcggtaagggtacagccgcagcaggtacacttgctattcacattacagaaatttttcttgctgattcttatattaattcttgggtatttgataccggatcggttgcccatatttgcaattcgatgcagggaatgataagaagtagaagcgtgaaaagaggagaagttgatttccgggtaggcaataatgcaagagttgctgcgttgaccgtcgggacgatgcaactccacctcccatcaggatttattttggagttaaataattgttatctagttcctagtatgagtcgaaacattatgtctccttcatgtttgatgaaggatggttattcatttgcgagtgaaaacaatggttgtgtgatctctaagaatggcatgtttgtggcttttgcatccattatgaatgggttattcattttaaatcttgatgatgcacctatctgtaatattagtgctaaaaggcctcggcctaatgatttaagtcctacctacatgtggcactgtcgtttgggtcatataagtgagaatcgcatgaagaagcttcattctgatgggcttttaacttcgtttgattttgaatcatacgagacatgtgaagcttgcttacttggtaagatgaccaaggcgcccttcacgggtttaccggagaggacgttagatttattggaactcatacatactgatgtgtgcggaccaatgagtacgacagctaggggaggattccaatacttcataaccttcactgatgattttagtagatatgggtatgtctacttaatgaaacacaagtctgaatccttagaaaagttcaaagagtttcagaatgaagtagaaaatcagcgtggcaagaaaattaaagcactgcgatcagatcgtggtggtgaatatttgagtcatgagtttagcaatcatctaaagagttgtggaattgttccacagcttacgccgcctggaacgcctcagaggaatggcgtgtctgagcgacgtaatcggactttattggatatggttcgatcaatgatgagccaggtaccgtctaagtccgtagttaagacaccatatgagatgtggactgggaagactcccagcttgtcttttctgaagatttggggttgtgaggtttacgtcaagcgactacagtcggataaactcactccaaaatcggacaagtgcatgttcgtgggatatccaaaggaaactttaggatattacttttaccaccggtcagagggcaaagtgtttgtcgcccggaacggtgtgttcttagagaaagagtttctcaaaagagagaaaagtaaacaaaaggtgtatcttgaagaagttcaggatgagccagtgggacaagattcaacaagtgatgctaatgtagcagaacaagttgagacgtctatggaaagagaatcaccaccacaaccacgaaggtcagcaaggcttcgcgaggcacgaggagaagtgctattgttgggcaatggggaagtgttgttgttagacaacgacgaacctgcaacatattcagaagcgatgatggacccagattccgagaaatggcatgtcgccatgagatccgagatagattccatgggagaaaatcaagtttggaacttggttgacccgcctgatggtgttagacctatagaatgcaaatggatctataagaagaagaaagacatggatggaaatgttcacatctataaggctcgacttgttgcaaagggttttcgacaagttcaaggagttgactatgacgagacattctcgccagtagcaatgcttaaatctattcggatcattctagctattgccgcatatttcgattatgagatttggcagatggatgtcaaaacagctttccttaatggaaacctagatgaggacgtgtatatgatacagcccgagggttttgtcgatccgatcaatgctggaaagatatgcaaacttcagaaatccatttatgggttgaagcaagcatctcggagttggaacattcgttttgatgaagtgatcaaagggcttggttttcatcagaatgaagaagaagcttgtgtttacaagaaggaaagtgggagcgctgttgtatttctgatcttgtatgtggatgacatattattgattgggaatgacattcctatgctggagtccgtcaaggcttcactgaaaaagagtttttctatgaaggacttaggggaagcagcatatattttgggcataaggatctatagagataggtcgaagaggcttataggattaagtcaagatacgtacattgacaaggttttgaaacggttcaacatggaacagtccaagaaagggttcatacctatgtcacatggtaaacaccttagccagatgcaatgtcctgcaacggctaatgagcgggagcgcatgagtaaggtaccatacgcctcagcaattggttcaatcatgtatgccatgataagtacacgcccagatgtttcatacgctataagtgctacgagtagataccaggctgatccaggtgaggatcactggacagcggtaaaaggcattcttaagtacttaagaaggactaaagatatgttcctggtatatgggggtaaggaggagctcgttgtaactggttacaccgatgctagcttccaaactgacccagacgagttaaaatcgcaatcaggttttgtgttcacaataaatggtggtgctgttagttggaagagttccaaacaggagactgtgactgattctacaacagaagccgagtacattgcagcttctgaatctgcgaaggaaggtgtttggataaggaagttcctcatcgagcttggtgtgtttcctaatgcatctagcccattgaacctctactgtgacaacaatggggctattgcgcaagctaaggagccaaggaaccaccagaaaaacaaacacgtactgcggaagtttcacctcatacgggaattcattaggcggggtgagataaagatatgcaaaatacatacggatttgaatgttgctgatcctttgacaaaacctcttccacaacctaagcatgaggcacacgtgagatctatgggtattagatatcttctagattaa

SEQ ID NO: 5136 - DNA, 1895 bp, Zea mays
  Clone ID: TF_ZM3660.C11.o1.fg
atggatgctaatcttgaagtgagttgcctaatggttgcttgcatggagcctgagctccagatgcagtttgagacaaaccatgaggtgtacgatatgatcgtggcgctcaaggatatgttccagactcaggctaggactgaaaggttcaatgtgtccaaagcctttctggaatgcaagctagcagaaggcgcagcagttgggccacacgtaatcaaaatggttggttacagtcagaggttggagaagctaggcttcccaataagccaagagttggccactgacttcattttggcatctcttccgcccagctatggaaacttcatcacgaactaccatatgcatggggcggagaggggcctcaatgaactatgtggcatgctgaaaacagcagagggggacataaagaaaagcgctggcagcagcggccatgtgatggcggtccaaaacaaacccaactttaagaagaagggcaaggcaaaggatacagtatccaagccaaatcaaaagcccaaggctggaccagctgcagatgcagagtgcttttattgcaaagaacttggtcactggaaaaggaattgcaagcagtacttggcctctattaaggatcgcggcggtaagggtacagccgcagcaggtacacttgctattcacattacagaaatttttcttgctgattcttatattaattcttgggtatttgataccggatcggttgcccatatttgcaattcgatgcagggaatgataagaagtagaagcgtgaaaagaggagaagttgatttccgggtaggcaatagtgcaagagttgctgcgttgaccgtcgggacgatgcaactccacctcccatcaggatttattttggagttaaataattgttatctagttcctagtatgagtcgaaacattatgtctccttcatgtttgatgaaggatggttattcatttgcgagtgaaaacaatggttgtgtgatctctaagaatggcatgtttgtggcttttgcatccattatgaatgggttattcattttaaatcttgatgatgcacctatctgtaatattagtgctaaaaggcctcggcctaatgatttaagtcctacctacatgtggcactgtcgtttgggtcatataagtgagaatcgcatgaagaagcttcattctgatgggcttttaacttcgtttgattttgaatcatacgagacatgtgaagcttgcttacttggtaagatgaccaaggcgcccttcacgggtttaccggagaggacgttagatttattggaactcatacatactgatgtgtgcggaccaatgagtacgacagctaggggaggattccaatacttcataaccttcactgatgattttagtagatatgggtatgtctacttaatgaaacacaagtctgaatccttagaaaagttcaaagagtttcagaatgaagtagaaaatcagcgtggcaagaaaattaaagcactgcgatcagatcgtggtggtgaatatttgagtcatgagtttagcaatcatctaaagagttgtggaattgttccacagcttacgccgcctggaacgcctcagaggaatggcgtgtctgagcgacgtaatcggactttattggatatggttcgatcaatgatgagccagtcggacctacctttgtcgttttggggatacgctctagaaacagcagctttcacactaaatagggtaccgtctaagtccgtagttaagacaccatatgagatgtggactgggaagactcccagcttgtcttttctgaagatttggggttgtgaggtttacgtcaagcgactacagtcggataaactcactccaaaatcggacaagtgcatgttcgtgggatatccaaaggaaactttgggatattacttttaccaccg

SEQ ID NO: 5137 - DNA, 3324 bp, Zea mays
  Clone ID: TF_ZM4447.C1.o15.fg
atggcacctagcacaccaacatttactttgcgatcaattcttgaaaaggataagttaaatggaacaaactatacggattggatccgtaacctgagaattgttcttagggctgaaaaaaaggaagacgttctagacaccccactaccagaggatcctagtgaaaatgcaactgctgcagctaaaaccacttacaagaaagcaatggatactaatcttgaagtgagttgcctaatgcttgcttgcatggagcctgagctacagatgcagtttgagacaaaccatgagatgcacgatatgatcgtggcgctcaaggatatgttccagactcaggctaggactgaaaggttcaatgtgtccaaagcctttctggaatgcaagctagcagaaagcgcagcagttgggccacacgtaatgaaaatggttggttacagtcagaggttggagaagctaggcttcccaataagccaagagttggccactgacttcattttggcatctcttccgaccagctatggaaacttcatcacgaactaccatatgcatggggcggagaggggcctcaatgaactatgtggcatgctgaaaacagcagagggggacataaagaaaagcgctggcagcagcagccatgtgatggcggtccaaaacaaacccaactttaagaagaagggtaaatctcaaaagaagaagggcaaggcaaaggatacagtatccaagccaaatcaaaagcccaaggctggaccagctgcagatgcagagtgcttttattgcaaagaacttggtcactggaaaaggaattgcaagcagtacttggcctctattaaggatcgcggcggtaagggtacaaccgcagcaggtacacttgctattcacattacagaaatttttcttgctgattcttatattaattcctgggtattttataccggatcggttgcccatatttgcaattcgatgcagggaatgataagaagtagaagcgtgaaaagaggagaagttgatttctgggtaggcaataatgcaagagttgctgcgttgaccgtcgggacgatgcaactccacctcccatcaggatttattttggagttaaataattgttatctagttcctagtatgagtcgaaacattatgtctccttcatgtttgatgaaggatggttattcatttgcgagtgaaaacaatggttgtgtgatctctaagaatggcatgtttgtggcttttgcatccattatgaatgggttattcattttaaatcttgatgatgcacctatctgtaatattagtgctaaaatgcctcggcctaatgatttaagtcctacctacatgtggcactgtcgtttgggtcatataagtgagaatcgcatgaagaagcttcattctgatgggcttttaacttcgtttgattttgaatcatacgagacatgtgaagcttgcttacttggtaagatgaccaaggcgcccttcacgggtttactagagaggacgttagatttattggaactcatacatactgatgtgtgcggaccaatgagtacgacatctaggggaggattccaatacttcataaccttcactgatgattttagtagatatgggtatgtctacttaatgaaacacaagtctgaatccttagaaaagttcaaagagtttcagaatgaagtagaaaatcagcgtggcaagaaaattaaagcactgcgatcagatcgtggaggtgaatatttgagtcatgagtttagcaatcatctaaagagttgtggaattgttccacagcttacgccgcctggaatgcctcagaggaatggcgtgtctgagcgacataatcggactttattggatatggttcgatcaatgatgagccagtcggacctacctttgtcgttttggggatacgctctagaaacagcagctttcacactaaatagggtaccgtctaagtccgtagttaagacaccatatgagatgtggactgggaagactcccagtttgtcttttctgaagatttgtggttgtgcggtttacgtcaagcgacttcagtcagataaactcactccaaaatcggacaagtgcatgttcgtgggatatccaaaggaaactttaggatattacttttaccaccggtcagagggcaaagtgtttgtcgcccggaacggtgtgttcttagagaaagagtttctcaaaagagagaaaagtaaacaaaaggtgtatcttgaagaagttcaggatgagccagtaggacaagattcaacaagtgatgctaatgtagcagaacaagttgagacgtctatggcaagagaatcaccaccacaaccacgaagacctatagaatgcaaatggatctataagaagaagaaagacatggatggaaatgttcacatctataaggctcgacttgttgcaaagggttttcgacaagttcaaggagttgactatgatgagacattctcgctaatggatgtcaaaacagctttccttaatggaaacctagatgaggacatgtatatgatacagcccgagggttttgtcgatccgatcaatgctggaaagatatgcaaacttcagaaatccatttatgggttgaagcaagcatctcggagttggaacattcgttttgatgaagtgatcaaagggcttggttttcatcagaataaagaagaagcttgtgtttacaagaaggaaagtgggagctctgttgtatttctaatcttgtatgtggatgacatattattgattgggaatgacattcctatgctggagtccgtcaaggcttcactgaaaaagagtttttctatgaaggacttaggggaagcagcatatattttgggcataaggatctatagagataggtcgaagaggcttataggattaagtcaagatacgtacattgacaaggttttgaaacggttcaacatggaacagtccaagaaagggttcatacctatgtcacatggtaaacaccttagccagatgcaatgtcctgcgacggctaatgagcgggagcgcatgagtaaggtaccatacgcctcagcaattggatcaatcatgtatgccatgataagtacacgcccagatgtttcatacgctataagtgctacgagtaggtaccaggctgatccaggtgaggattactggacagcggtaaaaggcattcttaagtacttaagaaggactaaagatatgttcctggtatatgggagtaagaaggagctctttgtaactggttacaccgatgctagcttccaaactgacccagacgagttaaaatcgcaatcaggttttgtgttcacaataaatggtggtgttgttagttggaagagttccaaatag

SEQ ID NO: 5138 - DNA, 3039 bp, Zea mays
  Clone ID: TF_ZM4489.C3.o3.fg
atggttggttacagtcagaggttggagaagctaggcttcccaataagccaagagttggccactgacttcattttggcatctcttccgcccagctatggaaacttcattacgaactaccatatgcatggggcggagaggggcctcaatgaactatgtggcatgctgaaaacagcagagggggacataaagaaaagcgctggcagcagcggccatgtgatggcggtccaaaacaaacccaactttaagaagaagggtaaatctcaaaagaagaagggcaaggcaaaggatacagtatccaagccaaatcaaaagcccaaggctggaccagctgcagatgcagagtgcttttattgcaaagaacttggtcactggaaaaggaattgcaagcagtacttgtcctctattaaggatcgcggcggtaagggtacagccgcagcagttcctagtatgagtcgaaacattatgtctccttcatgtttgatgaaggatgattattcatttgcgagtgaaaacaatggttgtgtgatctctaagaatggcatgtttttggcttttgcatccattatgaatgggttattcattttaaatcttgatgatgcacctatctgtaatattagtgctaaaaggcctcgacctaatgatttaagtcctacctacatgtggcactgtcgtatgggtcatataagtgagaatcacatgaagaagcttcattctgatgggtttttaacttcgtttgattttgaatcatacgagacatgtgaagcttgcttacttggtaagatgaccaaggcacctttcacgggtttaccggagaggacattagatttattggaactcatacatactgatgtgtgcggaccaatgagtacgacagctaggggaggattccaatacttcataaccttcactgatgattttagtagatatgggtatgtctacttaatgaaacacaagtctgaatccttagaaaagttcaaagaatttcagaatgaagtagaaaatcagcgtgacaagaaaattaaagcactgcgatcagatcgtggaggtgaatatttgagtcatgagtttagcaatcatctaaagagttgtggaattgttccacagcttacgccgcctggaacacctcagaggaatggcgagtccgagcgacgtaatcggactttattggatatggttcgatcaatgatgagtcagtcagacctacctttgtcgttttggggatacgctctagaaacagcagctttcacactaaatagggtaccgtctaagtccgttgttaagacaccatatgagatgtggactgggaagactcctagtttgtcttttctgaagatttggggttgtgaggtttacgtcaagcgacttcagtcggataaactcactccaaaatcggacaattgcatgttcgtgggatatccaaaggaaactttaggatattacttttaccaccggtcagagggcaaagtgtttgtcgcctggaacgaagcgatgatggacctagattccgagaaatggcaagtcgccatgagatccgagatagattccatgggagaaaatcaagtttggaacttggttgacctgcctgatggtgttagacccatagaatgcaaatggatctataagaagaagaaagacatggatggaaatgttcacatctataaggctcgacttgttgcaaagggttttcgacaagttcaaggagttgactatgacgagacattctcgctagtagcgatgcttaaatctattcggatcattctagctattgccacatatttcgattatgagatttggcagatggatgtcaaaacagctttccttaatggaaacctagatgaggacgtgtatatgatacaacccgagggttttgtcgatccgatcaatgctggaaagatatgtaaacttcagaaatccatttatgggttgaagcaagcatctcggagttggaacattcgttttgatgaagtgatcaaagggcttggttttcatcagaatgaagaagaagcttgtgtttacaagaaggaaagtgggagcgctgttgtatttctgatcttgtatgtggatgacatattattgattgggaatgacattcctatgctggagtccgtcaaggcttcactgaaaaagagtttttctatgaaggacttaggggaagcagcatatattttgggcataaggatctatagagataggtcgaagaggcttataggattaagtcaagatacgtacattgacaaggttttgaaacggttcaacatggaacagtccaagaaagggttcatacctatgtcacatggtaaacaccttagccagatgcaatgtcctgcgacggctaatgagcgagagcgcatgagtaaggtaccatacgcctcagcgattggatcaatcatgtatgccatgataagtacacgcccagatgtttcatacgctataagtgctacgagtaggtaccaggctgatccaggtgaggatcactggacaacggtaaaaggcattcttaagtacttaagaaggactaaagatatgttcctggtatatgggggtaaggaggagctcgttgtaactggttacaccgatgctagcttccaaactgacccagacgagttaaaaccgcaatcaggttttgtgttcacaataaatggtggtgctgttagttggaagagttccaaacaggagactgtgactgattctacaacagaagccgagtatattgcagcttctgaatctgcgaaggaaggtgtttggataagaaagttcctcatcgagcttggtgtgtttcctaatgcttctagtccattgaacctctactgtgacaacaatggggctattgcgcaagctaaggagccaaggaaccaccagaaaaacaaacacgtactgcggaagtttcacctcatacgggaattcattaggcggggtgagataaagatatgcaaaatacatatagatttgaatgttgctgatcctttgacaaaacctcttccacaacctaagcatgaggcacacatgagatctatgggtattacatatcttctagattaa

SEQ ID NO: 5139 - DNA, 3567 bp, Zea mays
  Clone ID: TF_ZM4630.C4.o4.fg
atggcacctagcacaccaacatttactttgcgatcgattcttgaaaaggataagttaaatggaacaaactatacggattggatccgtaacctgagaattgttctcagggctgaaaaaaaggaagacgttctagacaccccactgccagaggatcctggtgaaaatgcaactgctgcagctaaaaccgcttacaagaaagcaatggatgctaatcttgaagtgagttgcctaatgcttgcttgcatggagcctgagctccagatgcagtttgagacaaaccatgagaggttggagaagctaggcttcccaataagccaagagttggccactgacttcattttggcatctcttccgcccagctatggaaacttcatcacgaactaccatatgcatggggcggaaaggggcctcaatgaactatgtggcatgctgaaaacagcagagggggacataaagaaaagcgctggcagcagcggccatgtgatggcggtccaaaacaaacccaactttaagaagaagggtaagtctcaaaagaagaagggcaaggcaaaggatacagtatccaagccaaatcaaaatcccaaggctggaccagctgcagatgcagagtgcttttattgcaaagaacttggtcactggaaaaggaattgcaagcagtacttggcctctatcaaggatcgcggcggtaagggtacagccgcagcaggtacacttgctattcacattacagaaatttttcttgctgattcttatattaattcttgggtatttgataccggatcggttgcccatatttgcaattcgatgcagggaatgataagaagtagaagcgtgaaaagaggagaagttgatttccgggatggttattcatttgcgagtgaaaacaatggttgtgtgatctctaagaatggcatgtttgtggcttttgcatccattatgaatgggttattcattttaaatcttgatgatgcacccatctgtaatattagtgctaaaaggcctcggcctattgatttaagtcctacctacatgtggcactgtcgtttgggtcatataagtgagaatcgcatgaagaagcttcattctgatgggcttttaacttcatttgattttgagtcatacgagacatgtgaagcttgcttacttggtaagatgaccaaggcgcctttcacgggtttaccggagaggacattagatttattggaactcatacatactgatgtgtgcggaccaatgagtacgacagctaggggaggattccaatacttcataaccttcactgatgattttagtagatatgggtatgtctacttaatgaaacacaagtctgaatccttagaaaagttcaaagagtttcagaatgaagtagaaaatcagcgtggcaagaaaattaaagcactgcgatcagatcgtggtggtgaatatttgagtcatgagtttagcaatcatctaaagagttgtggaattgttccacagcttacgccgcctggaacgcctcagaggaatggcgtgtctgagcgacgtaatcggactttattggatatggttcgatcaatgatgagccagtcggacctacctttgtcgttttggggatacgctctagaaacagcagctttcacactaaatagggtaccgtctaagtccgtagttaagacaccatatgagatgtggactgggaagactcccagtttgtcttttctgaagatttggggttgtgaggtttacgtcaagcgactacagtcggataaactcactccaaaatcggacaagtgcatgttcgtgggatatccaaaggaaactttaggatattacttttaccaccggtcagagggaaaagtgtttgtcgcccggaacggtgtgttcttagagaaagagtttctcaaaagagagaaaagtaaacaaaaggtgtatcttgaagaagttcaggatgagccagtgggacaagattcaacaagtgatgctaatgtagcagaacaagttgagacgtctatggcaagagaaacaccaccacaaccacgaaggtcagcaaggcttcgtgaggcacgaggagaagtgctattgttgggcaatggggaagtgttgttgttagacaacgacgaacctgcaacatattcagaagcgatgatggacccagattccgagaaatggcatgtcgccatgagatccgagatagattccatgggagaaaatcaagtttggaacttggttgacccgcctgatgttcaaggagttgactatgacgagacattctcgccagtagcgatgcttaaatctattcggatcattctagctattgctgcatatttcgattatgagatttggcagatggatgtcaaaacagctttccttaatggaaacctagatgaggacgtgtatatgatacagcccgagggttttgtcgatccgatcaatgctggaaagatatgcaaacttcagaaatccatttatgggttgaagcaagcatctcggagttggaacattcgttttgatgaagtgatcaaagggcttggttttcatcagaatgaagaagaagcttgtgtttacaagaaggaaagtgggagcgctgttgtatttctgatcttgtatgtggatgacatattattgattgggaatgacattcctatgctggagtccgtcaaggcttcactgaaaaagagtttttctatgaaggacttaggggaagcagcatatattttgggcataaggatctatagagataggtcgaagaggcttataggattaagtcaagatacgtacattgacaaggttttgaaacggttcaacatggaacagtccaagaaagggttcatacctatgtcacatggtaaacaccttagccagatgcaatgtcctgcaacggctaatgagcgggagcgcatgagtaaggtaccatacgcctcagcaattggttcaatcatgtatgccatgataagtacacgcccagatgtttcatacgctataagtgctacgagtagataccaggctgatccaggtgaggatcactggacagcagtaaaaggcattcttaagtacttaagaaggactaaagatatgttcctggtatatgggggtaaggaggagctcgttgtaactggttacaccgatgctagcttccaaactgacccagacgagttaaaatcgcaatcaggttttgtgttcacaataaatggtggtgttgttagttggaagagttccaaacaggagactgtgactgattctacaatagaagccgagtacattgcagcttctgaatctgcgaaggaaggtgtttggataagaaagttcctcatcgagcttggtgtgtttcctaatgcatctagcccattgaacctctactgtgacaacaatggggctattgcgcaagctaaggagccaaggaaccaccagaaaaacaaacacgtactgcggaagtttcacctcatacgggaattcattaggcggggtgagataaagatatgcaaaatacatacggatttgaatgttgctgatcctttgacaaaacctcttccacaacctaagcatgaggcacacgtgagatctatgggtattagatatcttctagattaa

SEQ ID NO: 5140 - DNA, 3204 bp, Zea mays
  Clone ID: TF_ZM4992.C3.o2.fg
atggcacctagcacaccaacatttactttgcgatcgattcttgaaaaggataagttaaatggaacaaaccatacggattggatccgtaacctgagaattgttctcagggctgaaaaaaaggaagacgttctagactccccactgccagaggatcctggtgaaaatgcaactgccgcagctaaaaccgcttacaagaaagcaatggatgctaatcttgaagtaagttgcctaatgcttgcttgcatggagcctgagctccagatgcagtttgagacaaaccatgaggtgtacgatatgatcgtggcgctcaaggatatgttccagactcaggctaggactgaaaggttcaatgtgtccaaagcctttctggaatgcaagctagcagaaggcgcagcagttgggccacacgtaatcaaaatggttggttacagtcagaggttggagaagctaggcttcccaataagccaagagttggccactgacttcattttggcatctcttccgcccagctatggaaacttcatcacgaactaccatatgcatggggcggagaggggcctcaatgaactatgtggcatgctgaaaactgcagagggggacataaagaaaagtgctggcagcagcggccatgtgatggcggtccaaaacaaacccaactttaagaagaagggtaagtctcaaaagaagaagggcaagggaaaggatacagtatccaagcccaatcaaaagcccaaggctggaccagctgcagatgcagagtgcttttattgcaaagaacttggtcactggaaaaggaattgcaagcagtacttggcctctattaaggatcgcggcggtaagggtacagccgcagcaggtacacttgctattcacattacagaaatttttcttgctgattcttatattaattcttgggtatttgataccggatcggttgcccatatttgcaattcgatgcagggaatgataagaagtagaagcgtgaaaagaggagaagttgatttccggcttacgccgcctggaacgcctcagaggaatggcgtgtctgagcgacgtaatcggactttattggatatggttcgatcaatgatgagccagtcggacctacctttgtcgttttggggatacgctctagaaacagcagctttcacactaaatagggtaccgtctaagtccgtagttaagacaccatatgagatgtggactgggaagactcccagcttgtcttttctgaagatttggggttgtgaggtttatgtcaagcgactacagtcggataaactcactccaaaatcggacaagtgcatgttcgtgggatatccaaaggaaactttaggatattacttttaccaccggtcagagggcaaagtgtttgtcgcccggaacggtgtgttcttagagaaagagtttctcaaaagagagaaaagtaaacaaaaggtgtatcttgaagaagttcaggatgagccagtgggacaagattcaacaagtgatgctaatgtagcagaacaagttgagacgtctatggcaagagaatcaccaccacaaccacgaaggtcagcaaggcttcgcgaggcacgaggagaagtgctattgttgggcaatggggaagtgttgttgttagacaacgacgaacctgcaacatattcagaagcgatgatggacccagattccgagaaatggcatgtcgccatgagatccgagatagattccatgggagaaaatcaagtttggaacttggttgacccgcctgatggtgttagacctatagaatgcaaatggatctataagaagaagaaagacatggatggaaatgttcacatctataaggctcgacttgttgcaaagggttttcgacaagttcaaggagttgactatgacgagacattctcgccagtagcgatgcttaaatctattcagatcattctagctattgccgcatatttcgattatgagatttggcagatggatgtcaaaacagctttccttaatggaaacctagatgaggacgtgtatatgatacagcccgagggttttgtcgatccgatcaatgctggaaagatatgcaaacttcagaaatccatttatgggttgaagcaagcatctcggagttggaacattcgttttgatgaagtgatcaaagggcttggttttcatcagaatgaagaagaagcttgtgtttacaagaaggaaagtgggagcgctgttgtatttctgatcttgtatgtggatgacatattattgattgggaatgacattcctatgctggagtccgtcaaggcttcactgaaaaagagtttttctatgaaggacttaggggaagcagcatatattttgggcataaggatctatagagataggtcgaagaggcttataggattaagtcaagatacgtacattgacaaggttttgaaacggttcaacatggaacagtccaagaaagggttcatacctatgtcacatggtaaacaccttagccagatgcaatgtcctgcaatggctaatgagcgggagcgcatgagtaaggtaccatacgcctcagcaattggttcaatcatgtatgccatgataagtacacgcccagatgtttcatacgctataagtgctacgagtagataccaggctgatccaggtgaggatcactggacagcggtaaaaggcattcttaagtacttaagaaggactaaagatatgttcctggtatatgggggtaaggaggagctcgttgtaactggttacaccgatgctagcttccaaactgacccagacgagttaaaatcgcaatcaggttttgtgttcacaataaatggtggtgctgttagttggaagagttccaaacaggagactgtgactgattctacaacagaagccgagtacattgcagcttctgaatctgcgaaggaaggtgtttggataaggaagttcctcatcgagcttggtgtgtttcctaatgcatctagcccattgaacctctactgtgacaacaatggggctattgcgcaagctaaggagccaaggaaccaccagaaaaacaaacacgtactgcggaagtttcacctcatacgggaattcattaggcggggtgagataaagatatgcaaaatacatacggatttgaatgttgctgatcctttgacaaaacctcttccacaacctaagcatgaggcacacgtgagatctatgggtattagatatcttctagattaa

SEQ ID NO: 5141 - DNA, 471 bp, Zea mays
  Clone ID: TF_uC-zmflteosinte082f08b1
ttttcataccgatagcgatgtcagctccattaggggtagcctcagcactgacttgggtgaccctagcaatgctgaatcccttgtcagaggttggagtctgttgcttgttctgagctggtgtgttggaattccccatcggacaagcgattgcatagtgcccaacctgactacacttgaagcatgtggggcctgttctctgtctgcgggccttgccggggcgccagagggggcaacctgaccagtgtggggtgtctgcggagtctcctgagctggactcggccctcctccaagacgagctggagtaccctggggcggaacatatcgaggacgaatactgctgctaccctgaccctgagaacggccttgctatacattctcccagcagaacacgctcgtgctcaatagctagagccttttgctacgagtatctaaactgatggaaaggcgtgagcaaccactgcatactatagt

SEQ ID NO: 5142 - DNA, 1284 bp, Zea mays
  Clone ID: TF_ZM4631.C1.o5.fg
atggacgctgaagattggctgcgtaccgtggagcgtgagttgcacactgcccagtgcaacgatcgtgagaaggtgttgtacggtccccgacagctcaggggaacagtccagtcttcttgggagtcttacctcgccacccatgccaaccctgaatccatcacttgggaagaattcagggacaacttccgtcgctaccatgtgcccgagggactgatgatagtgaggaaggaggagtttctcgccttgaagcaaggtcccctgtccgtcagcgagtacagggacaagtttctgcagctgtcgcgttatgtcccagaagatgtcaacacatccaagaggcagcaatccacttcagccattcaagcaaggtcaccagcaccagcaccagcatcagcatcaaaaccagcaacagcagtgccaaaggcagtttcctcagtagcagcagcagtaccgttagaacaacaagcaaggaggaaatcaatatcagcgtcagggcaatcaggcagcccgtcttcttgccccagcaaccaatcagaacaaccaagcagcgccagcgcaaggaggaagtcgtgcatgtttccactgtggggaacaaggccattgggcaaatcattgcccaaagaaagtagctcagaagcagccagctcccaatgccccagtcagacagaatgcaatgcagcaaggaggcaacaaccgtgggcaacctcgtgcccagtatggaaaggtgaaccacttggagtccgacacagtccagaagactccaggagtggcactaggagaagaagtgttatggagttggtcttgtctggaccaaggaaaggaagttgtcaccaagtcaccgcccatattgaggagattaaaccatcagaagctatcaatgtagtatcagaattcccagatgtgtttcccgaggagttactgggtatgccacctgaaaggaaggttgaatttgccatagagcttataccaggcaccacccctatttccaagagagactatcgagtgtccggaccagagttggtggaactcaagaagcagattgatgagttgtcggagaagggctacatcagaccgagtacctcgccttgggcagccccagtgctatttgtggagaaggatggaacaaagaggatgtgcattgactacagatctttgaatgaagtcactatcaagaacaagtaccccctgcccagaattgaagacttattcgatcagttgagaggagccagtctgttctcgaaaatagagaccagggccatggtgggtgcaccagggttctcgatctag

SEQ ID NO: 5143 - DNA, 1926 bp, Zea mays
  Clone ID: TF_ZM4545.C3.o1.fg
atgtcgggagatcacaccaagaaggaggtcatgaccggcgagaagcccgctacaagccacgagaagactccatcaagggagtctggctccaaagtaaagggagaatcaccctcccacaacaagtcgcatcggagtggcgacaaggaaaagaagatgaagaaggtggtctactacgagaccgattcttcgtcgccatccacctccgactctgacacgtcttctgtcacttctaagcgccatgagtgcaagaagtttagtcagatccccttacgctaccctcgcttttctaaacatactcctttactttccgtcccactaggcaaaccacccgtttttagggtgaaggtaccatcgctgggggatgaagattatgattcagacgaggttgaccaaatccggcacttcaactcccaagccactactatactcctcgcctctctaagtcgagaggagtataataaggtgcaagggttgaagagtgccaaagagatttgggatgttctaaaaaccgcgcacgaaggagacgaggtgaccaagatcaccaagatggaaacggtcgaggggaagcttggtcgatttatgctcaaccaaggggaggagccacaagccatgtacaaccggctcaagaccttggtgaaccaagtgcgcaacctcgggagcacaaaatgggatgaccatgaaatggtcaaggaagttataggaaaatttgtgagctttgaattgatgatcaaaggctccaagaaaatcatcgagcaaggcgcctcctccacacccgagatgcaactcgtcgcattcaaggcgacggaggagaagaaagaagagtctacatcaagtagacctcccatcgacgcctcaaagctcgacaacgaggaaatggcactcatcatcaagagcttccgccaaaccctcaagcaaaggagggggaaggattacaagccccactccaagaaagtttgctacaagtgtggtaagcccagtcactttatagcaaaatgtcctatttctagtgacattgacaggggcgacgacaagaagggaaagaggagggaaaagaagaggtactacaagaagaagggcggcgatgcccatttatgccgtgagtgggactccgacgagagctccaccaactcctccgacgaggacgccgccaacatcgtcgtcaacaagggactcgtcttccccaacgtcggccacaagtgcctcatggcaaaggacggcaagaagaagaaggtaaaatctagatcctccactaagtatgcaacttctagtgatgaggataactctagtgatgatgaggataatttgcttactctttttgctaatcttaacatgcaacaaaaagaaaaattaaatgaattgattagtgctattcatgagaaggatgaactcttggatagccaagaggacttccttattaaagaaaacaataagcatgttaaggttaaaaatgcttatgctcaggaggttgagagatttgatgattgtgataattcaattgttagtcttagaaatgataatgccaatttaattgctaagattgacaagttgaatgaatctctttctagccttaagattgagaatgataaattaattgctaaggctaaggaattagatgtttgcaatgtttctattttctatcttagaaatgagaatgctattttacatgctaagattgatgatttaaatgcatgcaaaccctctacttctagtgttgatcatgtttctatttgtactagatgtagagatattaatgttgatgctattcatgatcaccttgctatgattaaacaacaaaatgatcatatagctaaactagatgctaaaattgccgagcatgaactagaaaatgagaagtttaaatttgctcgtagcatgctttatagtgggagacgccctggcattaaggatggcattggcttccaatag

SEQ ID NO: 5144 - DNA, 4869 bp, Zea mays
  Clone ID: TF_ZM4926.C2.o1.fg
atgtcgggagaacacgccaagaaggagatggagaccggcgacaagcccgctacaagccacgggaaggcttcatcggaagagtcccgcaacaaaaagaaagggaaggagaagaaagcctcctcccacaagtcgcatcggagtggcgataagaaaaagaaaatgaggaaggtggtctactacgagaccgatacttcatcaccttccacctccggctccgacgcgccctccataacttctaagcgtcatgagcgcaagaagtttagtaagattcccttacactatcctcgcacctctagacatactccattactttccgttccattaggcaaaccaccaacctttgacggtgaagattatgctagatggagtgatttaatgaaatttcatctaacctcactccacaaaagtatatggaatgttgttgagtttggagcacaggtaccatccgtaggggatgaggattatgatgaggacgaggtggcccaaatcgagcacttcaactcccaagccacaaccatactcatcgcctctctaagtagggaggagtacaacaaggtgcaaggattaaagagcgccaaggaagtttgggacgtgctcaagaccgcgcacgagggtgatgaactcaccaaaatcaccaagcgggaaatgatcgagggggagctctgtcgcttccatctacgccaaggggaggagccacaagacatgtacaaccggctcaaaaccttggtaaatcaagtgcgcaacctcgggagcaagaaatgggatgaccacgaggtggttaaggttattcttagatcactcattttccttaaccctactcaagttcaattaattcgtggcaaccctagatacacactaatgactcccgaggaagtaatcgggaattttgtgagctttgagtttatgatcaaaggctcaaggaagatcaacgaacttgacggcccctccacgtccaaagcacaaccggtcgcatttaaggcgacggaggagaagaaggaggagtctacaccgagtagaacacccatcgacgcctccaagctcgacaacgaggaaatggcgcttgtcatcaaaagctttcgccaaatcctcaagcaaaggagggggaaagactacaagccccgctccaagaaggtttgctacaagtgtggtaagcccagtcactttatagcaaaatgtcctatttctagtgacagtgacaggggcgacgacaagaaggggagaagaaaggagaagaagtggtactacaagaagaagggcggcgatgcccatgtttgtcgcgagtgggactccgacgaaagctctagcgactcctccgacgatgaggatgccgccaacatcgccgtcaccaaggggcttctcttccccaacgtcggccacaagtgcctcatggcaaaggacgacaaaaagaagaaggttaaatctaaatcctccactagatatgagtcttctagcgatgataatgctagtgacgaggaagataatttacgtactctttttgccaacttaaacatgcaacaaaaagagaaattaaatgaattgattagtgctatccatgagaaggatgatctcttggactcccaagaggacttccttataaaagaaaacaagaagcatgttaaagtaaaaaattcttatgctctagaagttgaaaagtgcgaaaaattatctagtgagctaagcacttgccatgagactatagacaaccttagaaatgagaatgctaatttgttagctaaggttgattctattgcttgtaatgtttcaattcccaatcttagaaatgataatgatgatttacttgctaagattgaagaattaaacatgtctcttgctagccttaggattgaaaatgaaaaattgcatgctaaggttgtagaattaaaatcttgcaaaccctctacatctatcgttgagcacacttctatttgtactagatgtagagatgttgatgttaatgctattcatgatcacatggctttaattaaacaacaaaatgatcgtatagcaaaattagatgctaaaattgccgagcatgaacatgaaaatgaaaaatttaaatttgctcgtagtatgatttatagtgggagacgccctggcattaaggatggcattggcttccaaaaggggaacaatgtcaaacttaatgcccctcctaagaaattgtctaattttgttaagggcaaggctcccatgcctcaagataacgagggttacattttgtaccctgccggttatcctgagagcaaaattaggagaattcattctaggaagtctcactctggccctaaccatgcttttatgtataagggtgagacatctagttctaagcaaccaacccgtgctaagttgcctaagaagaaaactcctaatgcatcaaatgatcatgacatttcatttaaaacctttgatgcatcatatgttttaactaacaaatccggcaaggtttatgcatccgggggctcaagttggataatcgacagcgggtgcacaaaccacatgacgggggagaagaagatgttctcctcctacgagaaaaaccaagatccccaacgagctatcacattcggggatggaaaccaaggtgtcactgtctttagaagaagtgatgattcaatagcatttaaaggagtgttagagggtcagctatacttggtagattttgatagagctgaactcgacacttgcttaattgctaagactaacatgggttggctctggcaccgccgactagcccatgttgggatgaagaatcttcataagcttctaaagggagagcacattttaggattaacaaatgttcattttgagaaagacaggatttgtagcgcatgccaagcagggaagcaagttggtgcccatcatccacataagaacatcatgacgactgacaggccactggagctcctacacatggatctattcggcccgattgcttacataagcatcggcgggaagaccttaaagggattcttgagacaggctcaaaatgagttcggcttgaggatcaaaaagattagaagcgacaatgggacggagttcaagaactctcaaattgaaggcttccttgaggaggagggcatcaagcatgagttctcttctccctacacgccacaacaaaatggtgtagtggagaggaagaatagaactctattggacatggcaagaaccatgcttgatgagtacaagacatcggatcggttttgggccgaggcggtcaacaccgcctgctacgccatcaaccagttatatctacaccgaatcctcaagaagacatcatacgaactcctaaccggtaaaaagcccaatatttcatattttagagtctttggtagcaaatgctttatacttgttaaaagaggtagaaaatctaaatttgctcctaagactgtagaaggctttttactaggatatgattcaaacacaagggcatatagagtctttaacaagtcctccagacaagttgaagtttcttgtgacgttgtgtttgatgagactaacggctctcaagtagagcaagttgatcttgatgagataggtgatgaagaggctccgtgcatcgcgctaaggaacatgtccattggggatgatgaagctcaagttgatgaagtacaagatcaagcaaatgagccacctcaagatgacgacaatgatcaagggggagatgcacatgatcaagacaaggaggatgaagaaccaaggcctccacacccaagagtccaccaagcaatccaacgagatcaccctgtcgacaccatccttggcgacattcataagggggtaaccactagatctcgtgttgcacatttttgtgagcactactcttttgtttcctctattgagccacacagggtggaggaagcactacaagattcgaattgggtggtggcgatgcaagaggagctcaacaacttcactaggaatgaggtatggcatttagttccacgtcctaaccaaaatgttgtaggaaccaaatgggtgttccgcaacaagcaagatgagcatggtgtggtgataaggaacaaagcccgacttgtggccaagggatattcgcaagtcgaaggtttggatttcggtgaaacctatgcacccgtagctaggcttgagtcaattcgtatattattggcctatgctacttaccatggcttcaagctttaccaaatggacgtgaagagtgctttcctcaatggacctatcaaggaagaggtctatattgagcaacctcccggctttgaagatagtgagtaccctaatcatgtctataaactctctaaggccctttatgggctcaagcaagctccaagagcatggtatgaatgccttagagatttccttatcactaatggattcaaagtcggaaaagtcgatcctacactcttcactaaaactcttgaaaatgacttgtttgtatgccaaatttatgttgatgatattatatttgggtgtactaacgagtctacatgtgaagaatttagtaggatcatgacacaaaagttcgagatgtcaatgatgggggagttgaagtacttcttaggatttcaagtgaagcaactccaagagggcaccttcctaagccaaacgaagtatactcaagatatactaagcaagtttgggatgaaggatgccaaacctatcaagacacccatgggaaccaatgggcatctcgacctcgacgaaggaggtaaattcgtcgatcaaaaggtataccggtcgatgataggttctttgctctatttatgtgcatctcgactggatattatgctttccgtatgcatgtgtgcaagattccaagctgaccctaaggaagctcaccttacggccgtaaaacgaatcttgagatttttagtttatactcctaagtttgggctttag

SEQ ID NO: 5145 - DNA, 4620 bp, Zea mays
  Clone ID: TF_ZM4932.C3.o1.fg
atgtcgggagaacacgccaagagggagatggagatcggcaacaagcccatcggcgacaagcccactacaagccacgagaaggcttcatcggaagagtcccgcaaaaaggggaaggggaaggagaagaaagcctcttcccacaagtcgcatcagagtggcaacaagaaaaagaagatgaggaaggtggtctactacgagaccgatacttcatcaccttccacctccggctccgacgcgccctccgtaatttctaagcgtcatgagcgcaagaagtttagtaagatccccttacgctatcctcgcattcctaaacatacgcctttactttccgtcccattaggcaaaccactaacttttgatggtgaagattatgcaaggtggagtgatttaatgcgatttcatctaacctcactccacaaaagtatatgggatgtcgttgagtttggtgtacaggtaccatccgtaggggatgaagattatgatgaggacgaggtggcccaaatcgagcacttcaactcccaagccacaactatactcctcgcctctctaagtcgagaggagtataacaaggtgcaagggttgaagagcgccaaggaagtttgggacgtgctcaagaccgcacacgagggagatgagcttaccaagatcaccaagcgggagacgatcaagggggagctcgtgcgcaacctcgggagcaaaaagtgggatgaccacgagatggttaaggttattcttagatcactcattttccttaaccctactcaagttcaattaattcgtggtaatcctagatatacactaatgactcccgaggaagtaatcgggaattttgtgagctttgagtacatgatcaagggctcaaagaaaatcaatgagctagatgatccctccacatccgaagcacaaccggtcgcatttaaggcgacgaaggagaagaaggaggagtctacaccgagtagacaaccaatcgacgcctcaaagctcgacaacgaggaaatggcgtttgtcatcaagagcttccgccaaatcctcaagcaaaggagaaggaaagattacaagccccgctccaagaaggtttgctacaagtgtggtaagcccagtcactttatagcaaaatgtcctatttctagtgacagtgacaggggcgacgacaagaaggggagaagaaaggagaagaagaaatactacaagaagaagggtggcgacgctcatgtatgccgcgagtgggactcggacgagagctcctccgactcctcctccgacgaggacgccgccaacatcgccatcaacaaaggccttctcttccccaacgtcggccacaagtgcctcatggcaaaggacggcaaaaagaagaaggttaaatccaaatcctccactagatatgagtcttctagcgatgataatgctagtgatgaggaagataatttgcgtacactttttgccaacctaaacatgcaacaaaaggaaaaattaaatggattgattagtgctatccatgaaaaagatgatctcttggactcccaagaagacttccttattaaagaaaacaagaagcatgttaaggttaaaaatgcttatgctctagaagtagaaaagtgcgaaaaattatctagtgagctaagcatttgccataagactattgacaaccttagaaatgaaaatgctaatttgttagctaaggttgattcaaatgtttgtgatgtttcaattcccaatcctagaagtgataatgatgatttgcttgctaagattgaagaattgaacatttctcttgctagccttagagatgaaaatgaaaaattgcttgctaaggctaaagattttgatgtttgcaatgctaccatttctgaccttagaagtaaaaatgatatattgcatgctaaggttgtagaattaaaatcttgcaaaccatctacatctaccgttgagcacacttctatttgtactagatgtagagatgttgatattaatgctattcatgatcacatggatttaattaaacaacaaaatgatcatatagcaaaattagatgctaaaattgccgagcatgaacttgaaaatgaaaattttaaatttgctcgtagtatgctttatagtgggagacgccctggcattaaggatggcattggcttccaacagggaggcaatgtcaagcttaatgcccctcctaagaaattgtctaattttgttaagggcaaggctcccatgcctcaagataacgagggttacattttgtaccctgtcggttatcctgagagcaaaattaggagaattcattctaggaagtctcactctggccctaaccatgcatttatgtataagggtgagacatctagttctaggcaaccaacccgtgctaagttgcctaagaagaaaactcctagtgcatcaaatgatcatgacatttcatttaaaacttttgatgcatcatatgtcttaactaacaaattcggcaaggtttatgcatccgggggctcaagttggataatcgacagcgggtgcacaaaccacatgacaggggagaagaagatgttctcctcctacgagaaaaaccaagatccccaaagagcgatcacattcggggatggaaatcaaggtgtcactgtctttagaagaagtgatgattcaatagcatttaagggtgtgttagagggtcagctatacttagtagattttgatagagctgaactcgacacatgcttaattgctaagactaacatgggttggctctggcaccaccgactggcccatgttgggatgaagaatcttcataagcttctaaagggagagcacattttaggattaacaaatgttcattttgagaaagacaggatttgtagcgcatgccaagcaggaaagcaagttggtgctcaccatccacataagaacatcatgacgactgacaggccactggaactcctacacatggacctattcggcccgattgcttacataagcatcggcgggagtaagtactgtctagttattgtggatgattattctcgcttcacttgggtattctttttgcaggaaaaatctcacacccaagagactttaaaaggattcttgagacgggctcaaaacgagttcggcttaaggatcaagaaaattagaagtgacaacgagacggagttcaagaactcacaaatcgaaggcttccttgaggaggagggcatcaagcatgagttctcttctccctacacaccacaacaaaatggtgtagtggagaggaagaatagaactctattggacatggaaagaaccatgcttgatgagtacaagacttcggatcagttttgggccgaggcggtcaacaccgcctgctacgccatcaaccgagtcttcggtagcaaatgctttattcttattaaaagaggtagaaaatctaaatttgctcctaagactgtagaaggctttttactaggatatgattcaaacacaagggcatatagagtctttaacaagtcctctggacaagttgaagtttcttgtgacgttgtgtttgatgagactaacgactctcaagtagagcaagttgatcttgatgagataggtgaggaagaggctccatgcatcgcactaaggaacatgtccattggggatgtgtgtcctaaggaacccgaagagcctccaagtgcacaagatcaaccatcctcctccacgcaagcatctccaccaactcaaaatgaggatgaggctcaaagtgatgaaggagaaaatcaagcaaatgagccacctcaagatgacgacaatgatcaagggggagatgcaaatgatcaagacaaggaggatgaagaaccaaggccgccacacccaagagtccaccaagcaatccaacgagatcaccccgtcgacaccatcctcggcgacattcataagggggtaaccactagatctcgtgttgctcatttttgtgaacattactcttttgtttcctctattgaaccacgtaggatagaggaagcacttcaagattcggattgggtggtggcgatgcaagaggagctcaacaacttcacaaggaatgaggtatggcatttggttccacgtcctaatcaaaatgttgtaggaaccaagtgggtgttccgcaacaagcaagacgagcatggtgtggtgacaaggaacaaagcccgacttgtggcaaaaggatactcccaagtcgaaggtttggatttcagtgaaacctatgcacccgtagctaggcttgagtcaattcgtatattattggcctatgctacttaccatggcttcaagctttatcaaatggatgtgaagagtgctttcctcaatggaccaatcaaggaagaagtctatgttgagcaacctcccggctttgaagatagcgagtaccctaaccatgtatataagctctctaaggcgctttatgggctcaagcaagccccaagagcatggtatgaatgccttagagattttcttatcactaatggattcaaagtcggaaaggccgatcctacactctttaccaaaacacttgaaaatgatttattcgtatgccaaatttatgttgatgatattatatttgggtctactaacgaatctacatgtgaagagtttagtaggatcatgacacaaaaattcgagatgtctatgatggggtag

SEQ ID NO: 5146 - DNA, 583 bp, Zea mays
  unsure (1)..(583): unsure at all n locations
  Clone ID: TF_ZmC685828_1
gcgtttcggnctagttctagnacgcgagcggacgctctttgtcgtttttatttaggtttgcggcgtgacattcaggacattatggattacaaagaatttaacactgtcaacaagttgttccagtttgctatgcttgcagagacggaattgcagggacgccaacatcgacctagggctacttttggcgcctcctctacatcacggacgcacacacctgcctcgagtcatacaccttcgaccactccagcgtccacgcgacctccctcgacacctgctgcacatgttggtaaccttcctttgcaggtacccaccaagaaacataattcactagcacctgcagcaacttccagtggtcgttcttcgggtattgtttgccaccgctgtcatgggattggtcacgtgaagaaggattgcccgagtcagcgaacatacattgctacggatgatggctacattagtacttccgacgctgagggtgacgatgatgactccagtgatgttgctgccaatgatgatgccatgcttggtgctgatgctatagtgaaccttcgaagcatcatggtgcagcgtgttcttagttctc

SEQ ID NO: 5147 - DNA, 1656 bp, Zea mays
  Clone ID: TF_ZM3671.C11.o6.fg
atgccggctacacgcatagtgtcgcttcgcctccagtccaccctcctgaaaaaaggagatcggctgaacttcaacttcaaccggggtccagagaggttcaaccggggtccagggcaagttcaaccggggtccagagaagttcaaccggtgtctagggaaagttcagccggggtattttcccaggacctcactgatgttgatcctagggcaatagaccttgccatgagaatcgccgaaaggatgtttctcaaaatgaaagaagatgaggcaaagaacaagattgaagaagaaaatgatcgatggagaccaaacgacgaatccacctcttcacaaggtttgtctttcaaatccacttctcatatgtgctttatcgctaatgggagtgacagtgaaagcgaaagtgaggatgaggaggagcaagaaagtgatagtgaagatgaggatgatcttcaacaattcttcgctcagttaagcaagaaaaatcggatgagcttgctcaaactcatgaaaagagcggaagaacaaaaagaaatgcttcataagcaagaagacttcctcatcagaaaaatcgaagacttagagaagttgaccaaagagcatgaaaagctaaagtgctctcatgatggtttggtccaaaggtatgaagacatttcaattgagaaaattagagctattaatcattcatcatatattgctcaattagaaaataaaaatgttatgctcaagaacacgatagaaaagctaaatattgaaaatctagctttacaagaaaaacatgatatgcttgtgtgctctcataataaatttatagattcacatatcatgttagaaatggctcatgaggttgtgttaactaatttgaaatcataccaacctcacatatgcacatgtactcaagtagaaactatattatcatgtgctaacaaatgttgctctcaagaaagccaatcttccattgagttagaaatttcaggaattagtgatatttctatcacacaagaaaataaagagctcaaggaagaagttggaagactaagaaggagcttaactcttttgaagggaaagtgtcatgctcaaccttctcaagataaccgtgataatatggtgaaaaagcttgagaaggggacaaccgtagcatgcacaaaaccccttcaaaggaataccaagctttccaagaagggcatgagcaaaatttatggtaagaaacttaatgctcatactatttgctctaacaatgtacctatgtgcttcaacaaagaaagatcaaagagaagcgatagaaggtgttatggatgcaaggagaagggtcatgaaattgattcatgccctcacatgaagaatcaagaccttgcacgatcaagaaagatgaccatcaagaaagatgaaagcagaaggcaaatgcattgcaaggacaagcaccgcatttgctacagttgtcgtgaaaaaggtcatctattcaaggtttgtccaaagggtaaaattcctaagcctaacttgtcaatacattcagatatgcttaggagacccaaatttgattcttgtgctagaaaggtgatgagttcaccacattctaggaccaaggctatttgggtgcctaagtccttattggctaaccatgatggacccatcatgagatgggtaccaaaatatacttaa

SEQ ID NO: 5148 - DNA, 3977 bp, Zea mays
  unsure (1)..(3977): unsure at all n locations
  Clone ID: TF_ZmC36654_1
atgctgattagccagattgctcagatgaaaccgctagatggtagtaattaccattcttggcgggaggatatagacatgataaccacagtgggtgagatagattacgcactgaggtttgataaaccagttgagcccacagtgggcactcccaactatgaccacaggtggatgcaatacagcatcgacaaggtcaagtgggagagatcaaatgacaaatgtatgattattcttaagaggagcatcaaggagcctcttaagagttccataccagagtgcgagactgccaaagaataccttgagagggtagcctctcatcaccaagggtcttctaaggcttatgcttgctatctaatgacagaatttgtcaatgcaaaatacgatggaaatggtgtcagaccattcattcagaaaatgatatccatcgtagctaagataaacaagtacctcgggtctcctttacacgaggaatttgtagtatttatgataatgaagtctctgcccaaggagtttgagacttttcacatacagtacaacactagtgtcactgataagtggaatatagatcaactcttggcacagtgtgtccaggaggaagagaggttaaagcagactggagactctgtcaacctcatcaaaggcaatgtccccagacagaacaagaactcaaagaaaatgttcaagaagcaaggtaaacagaataaccaggcttcctcgagcaataataatcagccaagacaaggaggcagtttctcagttccccctgatacctgcctctattgcaagaagacaggtcattacaagaggaagtgccctgaattcctgcagtatctactagagagtggtaaggaccaagttacttttgtaaatgagtctttatacttagaatatcccagttattcttggtggattgactcgggtgcaactgttcatgttgcaaactctctacagggactccgtacaagccaaaggctcccaaagggccgaagaacaattagagtggcaaatggagttgaagcagcagtcgaggccattggagatatacatcttaaattagttaatggttttgtactgttgttgagagacgtactttatgtaccttccttgcgaaggaaccttatttcggtttctagattagatgatcagcacattcattgccattttggtgatagacagtgtgtcattcagtttgataataaagatgttggtctcgccatccgacgagatatgctttatttactttcgcaaagtgatgttgttaatgtattagatataccagaaaacgatccagccagcagtggcaggaaaagaaaacgaagtgatggagaaacctcgtcgaaattatggcactatcgtttgggccatatttcgannnnnagaatagaaagtcttgttaaggaacagattctccatcccctagatttcacagacttagagcaatgcagagattgcattaagggtaaattcgcgaagcagattaagaaagatgctaagcatagtacgagagtgttagaaattattcatacagatatctgtggtccttttccagttaggacagtagatgggtttaattcgttcataaccttcacagatgactactctcgctacggttatatttatcctattaaggaaagatcagaagctttagacaagtttaaacagttcaaggctgaagtagagaatcaacacgatttgaagataaagattgttcgatcagatcgtnnnnnnnagtactatgggcgccataccgagtatggccaggtcccaggacctttcgcgaggttcctaagagaaaacggtattgttgctcagtattcaacacctggcgannnnnnnnnnnnnnnnnnnnnnnnnnnnnnnnnnnnnnnnnnnnnnnnnnnnnnnnnnnnnnnnnnaagttactctaacctgccattgggtctatggatggaggctttnnnnnccgctatgcatatactcaacagagttcctagtaaatcagtggctagaactccatatgagttgtggactggcagaaaacccacgctcaactacttccatatatggggttgtccagcagaagctagaatatttaatcctggacagggaaagctagatgagagaaccactagctgccattttattggctaccctgacagatcaaagggatacagattctactgccctgacagacaaaccaagttcatagaaaccagacatgccattttcttagaggatgacatgatcaaggggagtaaggtactcagagaggttgaccttcaggaaaagaggatatatgtcccgtttccgatggttgaagaaccacacttctcgatacccactgtggttacaccaacagtcacaccgactgtgggtgaaacacctgctgcaaatgtggcatcatctagtgcaactactacagagcaagtagcttcaccttctgcgcatattggccctgagccagttgcacaggacagttcagaagatgatgatagtgttgcgccaagtgatgcaccattgcaggagccccaggtagaatctgaaccagaaccaagtctcaggagatcacagagactcagaaaatctgcgattcctgatgactatgaagtctatgcagcagaaaacatagaatgtgatgagattcatatgagtgaggacattgatacagaaggtgatcccactnnnnnnnnnnnnnnnnnnnnnnnnnnnnnnnnnnnnnnnnnnnnnnnnnnnnnnnnnnnnnnnnnnnnnnnnnnnnnnnnnnnnnnnnnnnnnnnnnnnnnnnnnnnnnnnnnnnnnnnnnnnnnnnnnnnnnnnnnnnnnnnnnnnnnnnnnnnnnnnnnnnnnnnnnnnnnnnnnnnnnnnnnnnnnnnnnnnnnnnnnnnnnnnnnnnnnnnnnnnnnnnnnnnnnnnnnnnnnnnnnnnnnnnnnnnnnnnnnnnnnnnnnnnnnnnnnnnnnnnnnnnnnnnnnnnnnnnnnnnnnnnnnnnnnnnnnnnnnnnnnnnnnnnnnnnnnnnnnnnnnnnnnnnnnnnnnnnnnnnnnnnnnnnnnnnnnnnnnnnnnnnnnnnnnnnnnnnnnnnnnnnnnnnnnnnnnnnnnnnnnnnnnnnnnnnnnnnnnnnnnnnnnnnnnnnnnnnnnnnnnnnnnnnnnnnnnnnnnnnnnnnnnnnnnnnnnnnnnnnnnnnnnnnnnnnnnnnnnnnnnnnnnnnnnnnnnnnnnnnnnnnnnnnnnnnnnnnnnnnnnnnnnnnnnnnnnnnnnnnnnnnnnnnnnnnnnnnnnnnnnnnnnnnnnnnnnnnnnnnnnnnnnnnnnnnnnnnnnnnnnnnnnnnnnnnnnnnnnnnnnnnnnnnnnnnnnnnnnnnnnnnctcctatgttcttggaatagaaattcgcagagacagacaaaagggagtactaggactctcacagaagtcatatatagaaaatgtactaaagaggtataatatgcacaagtgtaatgcctcgcctggtccaatagtcaagggtgataagtttggggaatatcagtgtcccaagaatcagtatgagnnnnncaagatgaagtcagtaccatatgcttcagctatcggaagcattatgtatgctcaagtatgtactcgccctgacttagcttttaccaccgggatgcttggacgctatcagaagaatccaggcatagaacactggaaagcagtcaagaaggctctaaggtaccttcaaggtactaaaggtctcatgcttacgtacagaagatctaattccctacaaatagttggctatgcagatgccgactggggagggtgtagagatacactgaagtccacttcagggtatgtctttatgctctctnnnnnagctatttcttggaagagctgcaaacagacagcgagagcatcgtcgacaatgcacgctgagtttgtagctacgtatgaggcaactggacaggcgatatggataaagaaattcgtacccggattaagagtggttgatagcatagagcg

SEQ ID NO: 5149 - DNA, 664 bp, Zea mays
  Clone ID: TF_ZmC36654_4
gaatttgtagtgtttatgataatgaagtctctgcctaaggagtttgagacttttcacatacagtacaacaccagtgtcactgataagtggaatatagaccaactcttggcacagtgtgtccaggaggaagagaggttaaagcagactggagactctgtcaacctcgtcaaaggcaatatccccagacagaacaagaactcaaagaaaaagttcaagaagcaaggtaaacagaataaccaggcttcctcgagcaataataatcagccaagacaaggaggcagtttttcagttccccctgatacctgcctctattgcaagaagacaggtcattacaagagaaagtgccctgaattcctgcagtatctactagagagtgggactccgtacaagccaaaggctcccaaagggccgaagaacaattagagtggcaaatggagttgaagcagcagtcgaggccattggagatatacatcttaaattagttaatggttttgtactgttgttgagagacgtactttatgtaccttccttgcgaaggaaccttatttcggtttctagattagatgatcagcacattcattgccattttggtgatagacagtgtgtcattcagtttgataataaagatgttggtctcgccatccgacgagatatgctttttttt

SEQ ID NO: 5150 - DNA, 1470 bp, Zea mays
  Clone ID: TF_ZM4446.C1.o1.fg
atgagtagtgatagtgacttatttgttgatgctcatgatctttggactaaagttaagttgaaaatttttaagtccatatgcactacttctgctccctctattgctggtagtactaacttgtccaagggagaagaacaagaacgatggacaccaaacgatggatccacctcaccaacaggttcatctcccactagttatacatgtcttgttgctaacgatgagagtggagatgaaagcgatgatgaggaggaatatgaggatgaggagtctacatcatcacaaggtacattttcctgttttgcttccactgataataatgacagggaaaatgagaccgacgatgtggaagaagaggagattcgccatttctacacccatctcaacaaagaagacaaagcgctcttggttaagttgttgagaaggatcaaggaacaaagcgagacgcttctcaggctagaagagactctcatcaaaaccaacgacagtctggagaagatgaccaaagaacatgaggagctaaagtgctctcatgatgatttggtccaacagtatgattcagttttaattgagcaaagaaataatgatgatgatttatcttgtgttgctcaacttaaaatggaaaatgccatgcttgagaggcaagtagaattgctaaatttagaaaagcttgctctaggtgaaaagtatgatatgttgtcatattctcataataaattagttgatgaccatatcatgctcgatattgctcatgaggtagtaattactagtttaaacttatgtgaacctcattcttgtacatgtgcacatttagataatatatcaccatgtgctaacccctgttgctcaaaagaaagccaatgtttgaatgagcatcaagctacaggatcaaaagaaaagttgctcatcaataaagaaaggaacaagaaagcaaagcaactaaggagaagacgtcgtgctcaagatatttacaaacatgtggtgaataagcttgaggaagaaggaaccgcagcaagggtcaaactctgcgagaaagaagctcctaagaacaaaaagagaagaggaaaaaggaggtgcttcaagtgcaatgagtcaagccacctcattgcttcttgtccatacaaagacaaggatgaggggatgaggagatgttttggatgcaacgataaggaccatatgatcacttcatgtccgctcatgaagaatcaaagacgtacaccctccaagatgaccctcactaaggaaaaagacaaacaacaagtgtcatgtcaggttgagcgacacttttgctacatgtgtggtgagcgtggtcatctatccaagtctcaaggtggaaaagggaagatgagcaagaaatggaagaatcaggacttgggtacctccataagtcaagtatttggtatcttaagctcaacaagacaaggtcaggataaaggatcaggcacaagtgtgaaggagcttcctagagattaa

SEQ ID NO: 5151 - DNA, 775 bp, Zea mays
  unsure (1)..(775): unsure at all n locations
  Clone ID: TF_ZmC1239986_1
ctttctcaggctcttatcagagatgattcctgcaagcaagctcatgattcccaagacaagggcgtcccatttcatcaatcaaagcttcaatggtccgccgcagctggcgatggctcctatgcgacgacccgggtggatacaagatcaaaatccaaagcagatccgcgtccagtgcaggcagctcttggtgatcctcttcggcagacttcaatgccgcgtatcctggcgtctggaaaggccgaggtgggtgcagatcgcactccggatttccagctctcctgcaagccggaaggggatttgaattcgggcaacgtttggtcacatcggcgtgctgctggtctcgatgccgcgccgcgtttgaatggacagaggccataccctgctgcgtcggatggcattgaaggggactggtcggtggtcagaccgcggtactggtggcgcaagagctggacgtctactgagcgaacacggcaatatcatcaattcgacgtgaagggcactggtcttttcaaattgaagctaaagggcaaatgttacaattgcttctcaccagatcatctagctttttgctgccaggctccttcgcgctgctggctttgccttcaatccggacatcgagcgagatactgcagccggattagctatcaggggacattcactgctgctgggttttttcctaagccagtcgaacaaccatcaaggacccctacctaccatgaggcacgaccatggactgacgatctacataaganccttgagcattgcggtaggacca

SEQ ID NO: 5152 - DNA, 5094 bp, Zea mays
  Clone ID: TF_ZmC36592_163
tcagactggatttgggaaaagataagggtattccctcctcaagaagtcctcactctcccaggtggcttcctcttctccttctctgctccactgaactttacagagctttacttctgaggtgcgggtctttctgattgctgaatcaagaaccttcactggtttttcacgatactgaaggtctttctgaatctgcaccgtctcttcttcgaggtgactttctggtgcttgcaggcatttgcggagctgggatacgtggaacacattgtggatgtcagacatggattctggtagttccaggcggtatgctgcgggtcctaccctgccaatgatgggatagggacctacaaaacgtggggctagcttccctttgacttggaacctcctgacaccacgcattggagaaaccttgaggtagacgaagtctccttcctcaaatctgagttccctccgtctgttgtctgcgtaactcttctgccgactttgagcttcaagcaaccttctgcggatcagtgcaactttctcttccgcctctttgacaaaggcaggtccttctagtgcttttcccccacgttggaccacatgagaggggtatgctcttaacagatcttcaaggactttgttgactctctctgtctgcccatctgtctgagggtgataagcggtactgaaatctagcttggtgcccatagctttctgaaggcttgtccagaatttggatgtgaactgggttcctctgtctgatactatctttcttgggatgccatggagtctgactatctccttgaggtaaatccgggcaagggtggctcctccaaaggtagttttcactggaatgaaatgggctaccttggtgaggcggtctattattacccagatggaatcattccctttttgcgtctggggcaatccggtgacgaagtccatgcctatttcttcccacttccattcaggtattgggaggggttgtaataggcctgcaggtttttggtgttcggccttcgtccgttggcagatgtcacatcgggccacatactgagctatttctttcttcatccccttccaccagtatctggtcttgaggtccaggtacatcttggtagtcccggggtggatggagtaggccgagtcgtgagcttccttgagtaggacttctcgggcttccccttttggtacacacagacggtgtttgaaccaaaggactccttggtcatctgtcctgaggtccgggagttgttccttgcgggccttctccacaagccttgctgtctctgagtctagacgttgagctttgccgatgaggtcttctagcattggtttgacttcgagactgtcgttgattcccagacatgcatttagttgtgctgattctttcttccaatcttccagaaagttggttccctttattccgaatggttttcgactgagggcgtcggctaccacgttggccttcccggggtgatagtgaatttctaggtcataatccttgatcagttctaaccatcttcgctgacggaggttgagatcaggttgagtgaatatatacctcagactcttgtgatcggtgaaaatgtggcatttgtttccgattaggtaatgcctccatatcttcaaggcatgcactatggctgccaattccaaatcatgggtggggtaattctgttcgtgcggcttgagtaggcgtgatgcgtaagcaatgactttctcgttttgcattagcacacaccctaagccttgcctcgaggcatcacagaagacgacaaaatcttgatgaatatctggcagtgatagaacgggtgccgttgtaagtttctcctttatgatttggaaacttccttcacattttggggtccacacaaatttatggtctttcttgagaagttctgtcattggtcttgctatgctggagaatcctttgatgaagcggcggtaataccctgccattcctaggaagcttcgaacttcactgacgttggttggttgcctccattttgatactgcttctactttggaagggtccacttctatcccttctgcggttaagatatggccaaggaaggctatcttttccaaccagaattcacatttactgagtttagcataaagttggtgtgctctgagttttccaaggacgatccgaaggtgacgcttgtggtcttcacggttcttggagtaaataaggatgtcgtcgatgaagactacgacaaacttatctagctcttccataaacactttattcatgaggttcatgaaaaaggcgggtgcgtttgtcagtccgaacgacattactgtgaattcatattgcccgtaccgggtgacaaatgcagtcttttggatgtccgcttccttgatcctcaattggtggtaaccagaccttaggtctatcttggagaagtacttggctccttgaagctgatcgaagaggtcgtcaatccgaggaagtggatacttgttcttgatggtaacttcatttaacgatcggtaatcaatacacattctcatgcttccatccttcttagagacgaacaggactggcgctccccaaggtgatgagctgggacgaatgtaccctttttgctgaagatctgcgatttgaagcttcaattctgctaactcggttggagccatgcggtatggtctctttgcgatgggtgctgttccaggaatcagatctatgtagaactccacttctctttctggtggcattcctgacaattcttctggaaacacgtccatgaattcttctactactgatatactttccgttattagattgaacatcattaggtcactggcgggtggctgtgcctggcaagagactgactttccctgctggtcggtgaggaggactgtcttgtctgcgcaactgataatgcctttgtgtttagctagccaatccatccctaagattacatcaattcctttggatggcaagacggttaagtctgccaggaatactaccccacttaaaaggattctgacttgggagcattttagctggcatagaaggtcggaccctggggttcgggtgaccaagggaatctctagaggagtagagggaatgccatatttttccacaaagctagtggctatgaaagagtgggatgctccagaatcgaaaagtacggtagcgggagtaaattcaacaaggaactcaccgagtactactcccggagcctgctgagcttcctgggcatcgacgtgatttacacgtgcccttccttggtacggagtcttgttctgctggctgacgacggagggcgccttgggggcggatgccgaggtattcttggggccattcaccgagttggagtaggcgggtcccggtggcttcagctgcggacagttgttctttaagtgacttggatcaccgcagtgccaacatgcatttgccgggggttggttgcttgccactgagggggaatggaaagagctctgactctgctggctgaatcgcgacggagtgggtccagctggtctactgaagttgggccctttgggtggaaacccaaatgatcgagtcttctggtgccggtcctgctgctgtgcccggagaacctggaacttccttttgagatgtcctttttcttcctccttagccctttcaacttgcatggccttgttggaaaggtgagagaagttgaggaagtcttggctagccagaattgtcttgagttctggcctgagtcccttcaggaaacgggccatcttcttgctctcggtactgacatcatctggcgcgtagcgggctaactccatgaacagtccttggggcacatggtgctcccggaaggctgcttcaaattctgcccaggtagcatccctgatggtgacgttgaaggtgtcccaccaggctagggccatcccagaaagttggtgggcagctagttgaacacgctgattttctgggcaaccaatggcttccagtttccttttgatcgtgcgcatccaatcgtctgcatcgagggggttgcttgatccggcgaacgtgggaggtttaagtctcaggaagtcccccattttgtcttgcggtcttccaccattcggccgttgattttccagatttcgagtgaggacctcgatgagtcgggtctgattggctagaacttgggctaggtctaagggtaggggtggaggtgcggggaggtgggtttcactttcttctctaacgacttccccttcagctcttcgaggaaaacctgctccaatcccagaggcggtaggcgtggttttatccgaagccatgagagcgttcttcgaggtactagcgagttccttgtctaaggtgtccccaaatgccttgagaagatcatcgaggctggctagggatacatcttcttcgtcggaccagtcatctattctggggggaggtagggctagaggggccttcttcttcttcttctctgtctggcatccctggttagtggtcttcttctggatcttctttctgggggcgagtgtctttagcttcttgtcaaagtctatcttcaaggtccgataggcctcacgggtgttggcttcctcgccttctactatgctgagactctcctggagagatgccttctcttgcttaagctctttgacttgctgctctaggctttccactcgggagtttaggtgggtacagtgggaggagagctcatcgtagtggttgtcgagggtgtggaggtatccggccatgtagacgatagtgggatcatcttctatgggatctcctcctgacagagcctggagtcttttcttccaggtgggggtgtttttgttgctgggtgggaaatatcggaggggggtctcaaagatctcgcggctatagttttggcacagttgtttgagggcttttcgagcaacgctctggcatgtgtctgggaagcggtgcccgatgaaggtaatttggaagggagggtggtttgggtagttccggctttctcccaagtagaccgccatagagcacttttccattccattttcacggtactccttccagacatattcgggcttcttgcggatccccaagcgtagcgcgcaactccgaagaaggtgaggaaagccttcctcctctgagcaataggaagtcctaatcacccaagggttttccat

SEQ ID NO: 5153 - DNA, 4962 bp, Zea mays
  Clone ID: TF_ZM5033.C2.o1.fg
atggatcctaggggcaaggggatggtggtcaatgataaggagaaggagtccttcgtcaatgatccaaaggatgacaagcctactgactcagccttggcccacaaaagaaaagacgagaggaagaagaaaacaaggcgcatcaaggagatagtctactacaacagcgacgaatcttcctcttcccaaaaggatgacgacatcgactacgagaaaaaaaagacgttccaatgctcatttgctttccattcccctcggaaaaccccccactttgatggagaggactatggattttggagtcacaaaatgcgtagccacttgttctctatccatccaagtatatgggagatagtagaaaatggaatgcactttgatagtacggatagtcccatgttcattaatgagcaaattcacaaaaatgcacaagctactactgttcttctagcttcattgtgcaggaatgaatatcataaggtgagcggcttggacaacgccaagcagatttgggacaccctcaaaatctcacatgaggggaacgacgtcaccatgctcaccaagatggagttggtggaaggcgaacttgggagatttgcaatgatcaggggcgaggagccaacccaaacgtacaaccggctcaagaccctcgtcaacaaaataaggagctatggaagcacgcgatggacggaccacgacgtcgtccgcctaatgctaaggtctttcactgtccttgatcctcatcttgtgaacaatattcgtgagaatcctaggtacaccaagatgacacccgaggagatacttggaaagtttgtaagcgggcggatgatgatcaaggaggctagatatgttgatgatgcgttgaatggcccaatccaagagcctcaaaccattgctctcaaagcaacaaggagcaaggaggcgctacctagcaaggtggcacaagttgaggcggccggacttaataatgaagaaatggccctcatcatcaagcgcttcaagacggcgctaaggggtcgcaaggagcatcccaacaagactaagacaaaggggaagcgctcatgcttcaaatatggtaagattggtcattttatcgctaattgtcccgataatgatagtgaccaggaacaagggaacaagagggaaaagaagaaggcttacaagaaagctaagggcgaggcacaccttggaaaggagtgtgactcggattgttcgtcgtccgactccgacaacgaaggactcgctgccaccgccttcaacaagtcggccctcttccccaatgagcatcacacctgcctcatggcaagggaaaagaaggtaagcactcgtgatactagtacttacgcttcctcaagtgatgaagaatctagcgatgatgaaatagactattcatgtttattcaagggcctagatagaactaaggttgataaaattaatgaattaattgatgcattggatgataagaataggttattagagaagcaagaggatcttttgtatgaagaacatgataagtttgtagaggcacaaaaatcccttgctttagaaattaaaaggaatgaaatactttcttgtgaattgtcttcatgccatgactctatttctagcttaaagagcataaatgatgatttgaatgctaagttagaagtagctactaaatcaacatcttgtgtagaacatgttgcaatttgcaataggtgtaaagatttcaatattgatgcttgtagtgaacacctagtttgcatttctaaactaaatgatgaagtggctattcttaatgctcaacttaagactagcaaaaatgattttgacaaactaaaatttgcaagggatgcctacatgattggtagacacccctcaattaaggatggtcttggcttcaagagggaagtcaagaacttgacaagtcataaggctcccatctccatcaaggagaaagggaaggcccctatggcaaatagtattcaaaagaaccatgctttcttataccatgataggaaatattctacgaatgttcatcatgatagaagttgcaatgatgttgtttcacatgcttatgattcaaatgcaatgtttgcttcaagttcttctatgatgtatgatagaagtttggctaggaaaaatgtttatgcatccaggggctcaagctggattatcgacagtggatgcacaaaccacatgatggggaaaaagaggatgttctcttcctacgtcaagaacaaggattcccaagattcaatcatattcggtgatgggaaccaaagcaaggtgaaagggttaggaaaaattgctatttcatccgagcactctatttctaatgtgttcctagttgagtcgcttggatataacttgttgtctgtgagtcaactttgtaatatgggatataactgtttattcacaaatgtagatgtgtttgtctttagaagaagtgatggttcattagcttttaagggtgtattagacgacaaactttatttagttgattttgcaaaagaggaggccggtctagatgcatgcttaattgctaagactagcatgggctggctgtggcatcgccgtttagctcatgtagggatgaagaaccttcacaaacttctaaagggagaacacatagaccttgtgcagcttgtcaagcaggataaatctgaaacccaagggaccctcaagcgcttcctaaggagagcccaaaacgagtttgagctcaaagtgaagaagataaggagcgacaatgggtccgagttcaagaaccttcaagtggaggagtatcttgaggaggaaggaatcaaacacgaattctccgctccctacacaccacaacaaaatggtgtggtagagaggaagaacaggacgctactagacatggcgaggacgatgcttggtgaattcaagacgcccgaacggttttggacggaagccgtgagcacggcttgccacgccataaaccgggtctaccttcatcgccttctcaagaagacttcatatgagcttctaaccggtaacaaacccaatatgtcttactttcgtgtatttgggagcaaatgttatattctagtgaagaaaggtagaaattctaagtttgctcccaaagctgtagaagggtttttgttaggttatgactcaaatacaaaggcgtatagggtcttcaacaaatcatctggtttggttgaagtctctagcgacgttgtatttaatgagactaatggctctccaagagagcaagtttgtgatcttgatgatgcagatgaagaagacgttccaacgaccgcaatacgcaccatggcgattggagatgtgcggccacaggaacaaaatgagcgagatcaaccttcttcctcaacaatggtgcatcccccaactcaagacgatgaacaggttcatcaagaggaggcgtgtgatcaagggggagcacaagatgatcatgcaatggaggaagaagcgcaaccggcacctccaacccaagttcgagcaatgattcaaagggatcatcccgtcgaccagattttgggtgacattagcaagggagtaactactcgttctagattagttaatttttgtgagcattactcttttgtctcttctattgagcctttcagggaagagctcaacaacttcaaaagaaatgaagtttggacattggtgcctcgtcccaagcaaaatgttgtgggaaccaagtgggtgttccgcaacaaacaagacgagcacggggtggtgacaaggaacaaggctagacttgtggcaaaaggttatgcccaagtcgcaggtttggactttgaggagacttttgctcctgtggctaggctagagtcaattcgcatattgttagcctatgctactcaccattctttcaggttgttccaaatggatgtgaagagctctttcctcaacgggccaatcaaggaggaggtgtacgtggagcaaccccctggcttcgaggatgaacggtaccccgaccacgtgtgtaagctctttaaggcgctctatggacttaagcaagccccaagagcatggtatgaatgccttagagactttttagttgctaatgctttcaaggttgggaaagccgacccaactcttttcactaagacatgtgatggcgatttatttgtgtgccaaatttatgtcgatgacataatatttggttctactaaccaaaagtcttgtgaagagtttagcagggtgatgactcaaaagttcgagatgtcgatgatgggcgagttaagctatttccttgggttccaagtgaagcaactcaaagacggcaccttcatctcccaaacgaagtacacgcaagacttgatcaagcggtttgggatgaaggacgccaagcccgcaaagactccaatgggaaccgacggacacactgacctcaacaaaggaggtaagtccgttgatcaaaaggcataccggtctatgatagggtctttactttatttatgtgctagtagaccggatattatgcttagcgtatgcatgtgtgctagatttcaatctgatccaagggagtgtcacttagtgcccgtgaagcgaattcttagagatttagtcgctacgccttgcttcgggatctggtatccaaaggggtctacctttgacttgattggatattcagactccgattatgctggatgtaaggtcgataggaagagtacatcgggacagtgttgcgcgcaactactttggatgaggcaaaccctcagggactttggctacaatctgagcaaagtcccactcctatgtgataatgagagtgctatccgcatggcggataatcctgttgaacacagccgcacaaagcacagtgacatccggcatcactttttgagagaccaccagcaaaagggagatatcgaagtgttttatgttagcaccgagaaccagctagccgatatctttaccaagcctctagatgagtcgaccttttgcacgctgcgtagtgagctaaatgtcttagattcgcggaacttggagtga

SEQ ID NO: 5154 - DNA, 4083 bp, Zea mays
  Clone ID: TF_ZmC951_459
ctaggtgaagatatcggctaattgttctttggtgctaacataagcgatctcgagatcccccctttgttggtgatcccttagaaagtgataccgaatgtctatgtgcttagtgcggctgtgttcaacgggattatccgccatgcgggttgcactctcattatcacataggagagggactttgctcaatttgtagccatagtccctgagggtttgcctcatccaaagtaattgcgcacaacaatgtcccacggcaatatactcggcttcggtggtagaaaaagctactgagttttgtttctttgaagcccaagacatcagggatcttcctagaagctgacaagtccctgatgtgctcttcctatcaattttacaccctgcccaatcagcatctgaatatcctattaaatcaaaggtggatcccttggggtaccaaagtccaaacttaggagtataaactaaatatctcatgattgttttcacggccctaaggtgaacttccttaggatcggcttggaaccttgcacacatgcatacagaaagcataatatccggtcgagatgcacataaatagagtaaagatcctatcatcgaccagtataccttttgatctacggatttaccccccgtgtcgaggtcgagatgcccatttgttcccatgggtgtcttgatgggcttggcatccttcattccaaacttggtaagtatgtcttgaatgtacttggtttggctgatgaaggtgccttcctggagttgcttgacttgaaatattagaaaatacttcaactcccccatcatagacatctcaaatttctgaatcatgatcctactaaactcttcacaagtagatttgttagtagacccaaatatgatatcatcaacataaatttggcatacaaacaaatcttttgcaatagttttagttaagagtgtaggatcgactttaccgactttgaagccattagtgataaggaaatctcttaggcattcataccatgctcttggggcttgcttaagcccataaagcgcctttgagagtttatacacatggttagggtactcactatcttcaaagccgggaggttgctcaacatagacctcttccttgattggtccattgaggaaggcacttttcacatccatttgataaagcttaaagccatggtaagtagcatagggaagtaatattcgaattgactcaagcctagctacgggtgcataggtttcaccaaagtccaaaccttcgacttgtgaatatcctttggcaaccagtcgggctttgttccttgtcaccacaccatgctcatcttgcttgttgtggaatacccacttggttctcctcttgaggtggctcatattcttgatcttcattttcattgccttgagcccgatcctcatcttgagttggtggggatgcttgattggaagatgatggttgatcttgtgtatgagtgggtcttcggattccttaggacacacatccccaatggacatgttccttagcaagacgcacggagcctcttcatcatgtagctcatcaagatcaacttgctccacttgggagccattagtctcatcaaacacaatgtcacaagaaacctcaactaatccagtggatttgttgaagactctatatgcccttgtgtttgagtcataaccaagtaaaaagctttctacagccttaggagcaaatttggattttttacctcttttaacaagaataaaacatttgctaccaaagactctaaaatatgaaacattgggctttttaccggtgaggagttcatatgatgtcttcttgagaattcggtgaaggtagaaccggttgatggagtagcacgcggtgttaatcgcctcagcccaaaaccggtccggagtcttgtactcatcaagcatggtcctcgccatgttcagtagagttctattcttcctctccactacaccattttgttgaggtgtgtagggagaagagaactcatgcttgatgccctcctcctcaagaaagccttcaatttgagagttcttgaactccatccagttgtcgcttcttatctttttgattctcaatctgaactcattttgagctcgtttcaagaacccctttaaagtctcttgggtttgggatttttccctgtctttctcaaaataaacatttgttagtcccaaaatgtgctctccctttaaaagcttgtgaagattcttcatcccaacatgggctagttggcggtgccagagccaacccatattagtcttagcaattaagcaagtatcgagttcagctctattaaaatcaactaagtatagctgaccctctaatactcccttaaatgctactgaatcatcgcttcttctaaagacagtaacaccttgatttccatccccaaatgtgatagctctttggggatcttcatttttctcgtaggaggagaacatccttttctcccctgtcatgtggtttgtgcatccgctatcaataatccaacttgagcccccggatgcataaaccttgggtacccaaacacaagtcttggagcccttgtgtttgcccccaacatatttggcaactactttgcctgatttgttagtgagcacataagaagcatcaaaagtcttaaatgaaacattaggctcatttgatgcagtaggagttttctttttaggcattttaacatgagtaggatgcctagagctcgaagcctcattcttatacataaaagcatgatgggaaacagaatgatatttcttagcatgaattctcctaatcttgtgctcaagataaccagtaggatataaaatgtaaccctcgttatcttgagccatgggagccttgcccttaacatgcttcttattttccttaataaggaattcatcttgactatccaagagttcatccttctcatgaatagcacctattaattcattcaatttttctttttgatgcatgttaaggttgacaaaaaaggtaagtaaattatcctcatcttcactagagctaccttcatcactagatgttgtatatttagtggaggctctagattttaccttcttctttttgccgtcctttgccatgaagcacttgtggccgacgttggggaagaggagtcctttgttgacggcgatgttggtggcatcctcgtcggaggaggactcggtggagctcatgtcagagtcccattcccgacacacatgggcatcaccgcccttcttcttgtagtatttcttctctttcttcctccccttcttgtcgttgtccctgtcactatcactagacatagggcatttagcgataaaatgactggccttaccacacttgtagcacacccttttggagtggggtttgtagtccttccccctcctttgcttgaggatttgacggaagctcttgatgatgagcaccatctcctcattgtcgagcttggaggcgtcgatggggagcctacttgatgtagactcttctttcttctcctctgtcgccttgaatgcgatgggttgcacctcaggtgtggaggtgccgccttgctccaagttgactatttgtttggagccacgtattaattgaacttgagtaggattacgaaaaacgagtgatcttagaataaccttgaccatttcatggtcatcccatttggtactcccgaggttgcgcacttggttgaccatcgtcttgagccggttgtacatggtttgcggctcttctcctttgttgaggaagaaacgactgagctccccctcaatcgtcttgcgcttggtgatcttggtcacctcatccccttcgtgcgtggtttttagtacgtcccaaatctctttggaactttttagcctttgcaccttattatactccttaaacttcttgtgctcatggcgcttagaagtgatggacggagcatcggagctggaggtggagggcgacaaagagttggtctcatagtagaccactttcttcattttcttcttcttgtcgccactccagtgtgacttgacgcgaggaggagattcctcccttcttttggcgccggactcccttgatggagccttcccgtggcttgtgcccgtttcaatctccctcttggtggatcctcccgacat

SEQ ID NO: 5155 - DNA, 3669 bp, Zea mays
  Clone ID: TF_ZmC119_1382
atggatcctaagggaaaggggatggtggtcaacgacaatgagaaggagtccatcttcaacgagccaagggacgacaaagtcaatgactccagctcgagtcaaaagaagaaagatggaaagaagaagaggcgcatcaggaaggttgtctactacgacagcgatgaatcttcctcttctcaaaaggacgacgaatacgaggagaaaaagaaaatggttaactcgaacttttcttttgattactctcgtattctgcataattccaatgctcatttgctttctattccacttggtaaacctcctcactttgatggagaggactacggattttggagtcacaaaatgcgtagtcatttgttctctcttcatccaagtatatggaagatagtagaaaacagaatgcaatttgatagttcggataattctatgtttatcaatgaacaaatccataagaatgcacaagctactactgttcttctaacatccttgtgcagggaagaatacaataaggtgagcgacttggacaatgccaagcagatctgggacaccctcaagatctcacatgaggggaacgacgtcaccatgctcaccaagatggagttggtggaaggcgaactaggaaggttcgcaatgatcaggggggaggagccaacgcaaacatacaataggctcaagaccctcgtcaacaaaataaggagctatggaagcacgcgatggacggaccacgacgtcgtccgacttatgctaaggtctttcaccatccttgatcctcatcttgttaactctattcgtgagaatcctaggtacaccaagatgacgcccgaggaaatacttggaaagtttgtaagcgggcggatgatgatcaaggaggcaagatacgttgatgatgcgttgaatggcccaatccacgagcctcaaaccattgctctcaaagcaacaaggagcagggaggcgctacctagcaaggtggcgcaagttgaggcggccgggcttaacgaggaagaaatggccctcatcatcaagtgtttcaagacggcgctcaaaggtcgcaaggagcatcccaacaagagcaagacgaagggaaagcgctcctacttcaagtgtggtaaggttggtcactttattgctaattgtcccaataatgatagtgaccaggatcaagaaaagaagagggaaaagaagaagacctacaagaaggctaagggcgaggcacaccttggcaaggagtggaactcggattgttcatcgtccgactccgatgacgaaggactcgccgcctcggccttcaacaaatcgtccctcttccccaacgagcatcacacatgcctaatggcaaaggagaagaaggtaagtactcgaaataatactacgtatgcttcttcaagtgatgatgaatctagtgatgatgaaatagactatgcatgtttattcaaaggattagatagaactaaaattgataagatcaatgagttgattgatgctttgaatgagaaaaatcgacttttagaaaagcaagaagatctcttatatgaagagcatgataaatttgtaagtgtgcaaaattctcttgctttagaagttaaaagaaatgaaatgctttctcgtgaattgtctacatgccatgaatccatttctagcttaaagagtatcaatgatgacttgaatgctaagttagaaatagctaataaatcaacctcttatgaagaacatgttgtgatttgcaataggtgtaaggattttaatgttgatgcttgtagtgaacacctagttgccatttctaaattaagtaatgaagtgactagtcttaatgctcaacttaagactagcaaaaatgaattcgataaattaaaatttgtaagggatgcctacacgattggtagacacccctcaattaaggatgggcttggctttaagagagaagccaagaacttaacaagtcataaggctcccattcccgccaaggagaaagggaaggcccctatggctaatagtgctcaaaagaatcatgcatttatttatgataggaaattttctagaaatgttcatcatgataggagttgtaatgcttatgattcaaatgcaatgtttgcttcaagttcttcctatgtgcatggtagagatatgcctaagaaaaatgtcattcatcatatgcctaggagaaatgttgctcaggatcctaggaaaatagttaatgaaccttctacaatttatcatgcttgcaatgcttcctttgtaatttgtagaaaggataagaaggtttatgcatccgggggctcaagctggattatcgacagcggatgcacaaaccacatgacgggggagaaaaagatgttcacctcctacgtcaagaacaaagattcccaagattcaatcatattcggtgacgggaatcaaggcaaggttaaagggttaggaaagattgctatttcttccgagcactccatttctattgtgtttttagttgagtcgctcggttataacttgttgtccgttagtcaactttgtaatatgggttataattgcctattcacaaatgtagatgtgtctgtctttagaagaagtgatggttcattagcttttaagggtgtactagacgtcaaactttatttagttgattttgcaaaggaggaggccggtctagatgcatgcttaatagccaagactagcatgggctggctgtggcatcgccgtttagcacatgtggggatgaagaaccttcacaaacatctaaagggagaacatgtgttaggtctaacaaatgtgactttcgaaaaagatagaccttgtgcagcttgtcaagcaggtaaacaagtgggaaatgctcatcacagcaagaacgtgatgaccacatcaagacccctggagctgctacatatggacctcttcggacccgttgcctatcttagcatcgggggaagtaagtatggtttagtaattgttgatgatttttcccgcttcacttgggtattctttttgcaggataaatctaaaacccaagggaccctcaagcgcttcctaaggagagctcaaaatgagtatgagctcaaggtaaagaagataaggagcgacaatgggtacgagttcaagaaccttcaagcggaggagtattgtcacacccaggtttcgggggcaccaagacccgggcgcgaacataatcaccaggtgtgctgggaccaagtgtcacacatatgatgaatcatggcacagggtcaaatgtcacatctttactatataataggagttctatacaaaataaataattacattataaggagacaacggtccagcaacccaaagttgactgggagacgacgacctagaccactcacgaactcatcgcagcatcttccatgagcatcatcctgcagtacctggtcttgacctgggacttgagattctaggtaccaggatgatcttcagatgacacgtgtcctcactgcttggattatgcgcactggtgccctgaccacggcgcacggcggaatgccccagactacacgacgtcggcgagcaatccccatgctccacaagtcctcaataccgccatgtgaggtcgcgaacgtgttcggtgtgctctggagactctcctcgaccatcaaccaagcccagagtaaagctcctgacgggatgcccatgcgagcggacatacatctccccatggtgctttgaaac

SEQ ID NO: 5156 - DNA, 778 bp, Zea mays
  Clone ID: TF_ZmC173187_1
agaagacgacggtggaggtgtgggcgagcctcaagactcgtttcgtcggggcggattgggtcatgacggcgcgcctccccacgctcaagggggagttcgacaagctatgcatggaagatagagagcagttggacgactacgctgacaaaataagcggcatgtcgcgcgttacgtcgggcttggcacgatgctcgacgacgacgccatggtgaagaagctcctcaacaccatcctggatcggctcttcccagccgttgcgggcatcgagcagttctgcaacgtcgagatgatggcgctcgaggaggctcttaacgggctgaaggtgttcgacgaacgtttccggcggcgcactcgtgttggtggcaaacgacgtgaggaccaactcctcacggaaatcgagtggaaagctcggcaaaaacccaagtcatcgattaggaggtgcttcaattgcggcattcgcagccactttgcacgggactgccacaagccgaagaaggaggaggctttactcgccgatgatggtgaagaagcgacgctcctgtgagtgtgggaagcggctctttgtttaggggagattgttagaaaataaacccgacaccatgtagatgtgtggttgctaagtagacgtgtgtgtgtgtgcatgtgttgtgtccagggtgtgtggacagtcgtggagctacatgcaggtggtcgttgctcctacgtgtgccacgtggagtctattgaggagccgacgttgatatgttagaagggtggccacgtcgtgtgtgtttgaccc

SEQ ID NO: 5157 - DNA, 549 bp, Zea mays
  Clone ID: TF_ZM3652.C7.o2.fg
atggggatgatactcaagattaatctaatgggtgtgcccctgcaggtagatgatcttttctttaacattgatagaaaaaagcaaagaaagagaggatgctttgtatgcggggagaagggccactttagggacagctgtccaactatggtcgaacataaaaaggggaggggcaaaggcaaggcgctaacaagtgtcaaaacttgggatgattcttcaagcgaagaagaacctccaaggacacgcagccaccggtcctcatcacgctcatcacgcaagtgccttatggcaagaggtttgctagaaaaatttgaaacatttgcaaatttaaattgtgagctatcaactaaaattgcgcaattagaatctagtgctccatccactgctaccgatgatggccttattaaaaagaatgaaaaacttaaggctaagttatctagctcccaagaagctattgaaaatttgctaggaaaaatggaaattcttagcataaacaataatgagctaactattaagccagaaaacattggtagcacccaggggcatctttag

SEQ ID NO: 5158 - DNA, 1656 bp, Zea mays
  Clone ID: TF_ZM4328.C2.o1.fg
atgtcgggagatcatgccaagagggagatcgtgaccgacggcaacaagtccgcaagctcggagagaacccattcgagggagtccgaccacaagcataaggaggaatcctcttcctccatcaagtcacaacggagaggtgacaagaagaagaagatgaagaaagtggtctactacgagactgactcatcgtcaccctccacctccggctccgactcgtcgtccactacttctaagcgccatgagcgcaagaagtatagtaagatgtccctccgctactctcgcatctctaagcgcactccattactttctgttcccttaggcaaaccaccatcctttgatgtgcgcaacctcgggagcaccaaatgggatgaccatgaaatggtcaaggttattcttagatcacttgtatttcgtaatcctactcaagttcaattaatacatggtgatcctagatacaagctaatgtctcccaaggaggttataggaaagtttgtgagctttgaattgatgatcaaaggctccaaacaaatcatcaacttggagcaaggcggcacctccacacccgaggtgcaacccgtcgcattcaaagcgacgggggagaagaaagaagagtctacatcaagtaggctccccatcgacgcctccaagcttgacaacgaggaaatggcgctcatcatcaagagcttttgccaaatcctcaaggaaaggaaggggaaagattacaagccccgttccaaaaaggtgtgctacaagtgtggtaagtctggtcattttattgcaaaatgtcctttttctagtgacaggagcgacgacaagagagggaagaaaaaggagaagaagagatattacaagaagaagggcggtgatgcccacgtgtgtcaagaatgggactccgacgtgggctccaccgactcctccgacgaggatgccgccaacatcgccgtcaacaaaggtctcctcttccccaatgtcggccacaagtgcctcatggcaaaggacggcaaaaagaagaaggttgaaagattaaatgcttgtattgattcaattgtcaatcttaaaaatgataatgctagtttaattgctaagattgataaattgaatgaatcaatttctagccttaaaattgagagtgatagtttaatttccaaggctagagatttaaatgtttgcaacgattctatttcctgtcttagaaatgaaaatgctacattacatgctaagatagaagaattaaaatcttgcaaaccctctacatctacagttactcatgtctctatttgtactagatgtagagatattaatgttgatgctattcatgatcacctagctttaattaaagaacaaaatgatcatatagctcaattaactactaaaatcaatgagcatgagatacaaaatgaaaaatttaaatttgctagaagcatgctctataatgggagacgccctggcatcaaggatggcattggtttccaacagggaagcaatgtcaaacttaatgcccccacaagattgtctaattatgtaaagggcaaggctatcatggctcaggataatgaaggttacattttatatcctgatggttatcctgagcacaagattaggagaattcatgctaggaagtctcattctgtttcccatcatgattttatgtactaa

SEQ ID NO: 5159 - DNA, 1542 bp, Zea mays
  Clone ID: TF_ZmC24260_18
atgtcggggggactaagaaacgaaagtgcttctaagcttgaaaaagttgagattgcctcgacttcatcttttggtgcagatgttgatcctagggcaatagatcttgccatgagaatcgccgaaaggatgttcctcaaaatgaaggaagatgaggcgaagaacaaaattgaagaagaaaatgatcgatggagaccaaacgacgaatccacctcttcacaaggttcgtctttcaaatccacttctcatatgtgctttattgctaatgggagtgacagtgaaagcgaaagtgaggatgaggaggagcaagaaagtgatagtgaagatgaggatgatcttcaacaattcttcgctcagctaagcaagaaacatcggatgagcttgctcaaactcatgaaaagagcggaagaacaaaaagaaatgcttcataagcaagaagacttcctcatcagaaaaatcgaagacttagagaagttgaccaaagagcatgagaagctaaagtgctctcatgatgatttggtccaaaggtatgaagacatttcaattgagcaaattaaagttgttaatcattcatcatatattgctcaattagaaaataaaaatgctatgttcaagaacacgatagaaaggctaaatattgaaaatctagctttgcaagaaaaacatgatatgcttgtgtgctctcataataaatttatggattcacatatcatgttagaaatggctcatgaggttgtgttaactaatttgaaatcataccaacctcacatatgcacatgtactcaagtagaaactatattatcatgtgctaacaaatgttgctctcaagaaagccaatcttccattgagctagaaatttcaggaattagtgatatttctatcacacaagaaaataaagagctcaaggaagaagttggaaggctaagaaggagcttaactcttttgaagggaaagtgtcatgctcaaccttctcaagataaccgtgataatatggtgaaaaagcttgagaaggggacaaccgtagcatgcacaaaaccccttcaaaagaataccaagctttccaagaagggcatgagcaaaattcatggtgagaaaattaatgctcatattatttgctctaacaatgtacctatgtgcttcaacaaagaaagatcaaagagaagcgataggaggtgctatggatgcaaggagaagggtcatgaaattggttcatgcccccacatgaagaaccaagaccttgcacgatcaagaaagatgaccatcaagaaggatgaaagcaaaaggcaaatgcattgcaaggacaagcaccgcatttgctacaattgccgtgaaagaggtcatctattcaaggtttgtccaaagggtaaaactcctaagcctaacctgtcaatacattcaaatatgcttaggagacccaaatttgactcttgtgctagaaaggtgatgagttcaccacattctaggaccaaggctatttgggtgcctaagtccttattggctaaccttgatggacccatcatgagatgggtaccaaaatgtacttaa

SEQ ID NO: 5160 - DNA, 1365 bp, Zea mays
  Clone ID: TF_ZM4986.C1.o4.fg
atggatcctaagggaaagaggatggtggtcaacgacaaggagaaggagtccttcctcaacgagccaagggacgataagcccactgactctggctcaagtcataagaaggacgggaagaagaagaggcgcatcaagaagatcgtctactacgacagcgacgggtcttcttcttccccaagagacgacgactacgacgagaaaaagaaactgtacggatctgtattcattaacgaacaaattcataagaatgcacaagctaccactgttttgttagcatcattgtgcagggatgaatacaacaaggtgagtggcttggacaacgccaagcaaatatgggacaccctcaagatttcacatgaggggaacgacgccaccatgatcaccaaaatggagttggtggaaggcgagctaggaaggtttgccatgatcatgggagaggagccaacgcaaacatacaacaggctaaagaccctggtcaacaagatcaggagctatggaagcacgagatggacggaccacgacgtcgtccgacttatgctcaggtcttttactgtcattgaccctcatcttgtgaacctcatccgtgaaaatcccaggtacacaaagatgacacccgaggagatactcggaaagtttgtaagcgggcgtatgatggtcaaggaagctagatatgttgatggtgcattgaacggcacaatgcccatctatgagccccagcctgtcacactcaaggcaacaagcagtaacagggaggcgctacctagcaaggtggcacaagttgaggctaccgggctaaacgaagatgagatggccctcatcatcaagcgcttcaagaccgcgctaaaaggacgcaaggagcatcccaacaagagcaaagcaaagggaaagtgctcctgttttaaatgtggtaagactggtcattttatagcgaattgtctcgataatgctaatgaccaggaacaagaaaagagcaggaagagggagaagaagaaggcctacaagaaggcgaagggcgaggtgcaccttggcaaagaatgggattcagattgctcttcttccgactccgacgacgaaggactcgccgcctcggccttcaacaagtcgtctctcttcccccaacgagcgtcatacttgcctcatggcaaaggagaaaaagagcatgttgtcatttgtaataggtgcaaggattttgatgttgatgcatgtgttgaacaccttacttctattacaaaattaaatggtgaagtggcaagtcttaatgcccaacttaagacttgcaaaaatgactttgataagttaaaatttgctagggatacctacaccgttggtagacatccctcaattaaggatggacttggcttttga

SEQ ID NO: 5161 - DNA, 363 bp, Zea mays
  Clone ID: TF_ZM4874.C3.o1.fg
atggcactcatcatcaagcgattcaagacgacgctaaagggtcgcaaggagcatcccaacaagaacaagacgaaggggaagcgctcctgcttcaaatgtggtaagattggtcattttatcgctaactatcccgataatgatagtgaccaggaaaagaagagtggaaagtgggaaaagaagaagaactacaagaaggcgaagggcgaggcacatcttggaaaggagtgggattcagattgctcctcgtcagactccaacaacgaaggactcgccgccaccgccttcaacaagtcatccctcttccccaacgagcatcacacttgcctcatggcaagggaaaagaaggtgttaatgatgatttga

SEQ ID NO: 5162 - DNA, 4491 bp, Zea mays
  Clone ID: TF_ZM5039.C4.o3.fg
atggatcctaagggaaaagggatggtgatcaacgacaaggagaaggagtccttcatcaatgagccaaaagacgacaagcccactgactcgggctcaagtcataagaagaaggacgggaagaagaagagacgcatcaagaagatagtctactatgacagtgacgagtcctcttcttcccaaagagacgacgacgacaagaaaaagaaaacggtcaactcaaacttttcttttgattattctcgtattccgcaaaattccaatgctcatttgctttccattcctcttggtaaacctccacactttgatggagaggactacggattttggagtcacaaaatgcgtagccacttgttctctcttcatccaagtatatgggagatagtagaaaatggaatgcaatttgatagtacggataatcccatgtttatcaatgaacaaattcacaaaaatgcacaagctaccactgttcttttagcatccttgtgcagggaagagtatcataatatctcgcatgaggggaacgacgccaccatgatcaccaagatggagttggtggaaggcgaactaggaaggttcgcaatgattaggggggaggagccaactcaaacgtacaacaggctcaagaccctggtcaacaaaatcaagagctatggaagcacgagatggacggaccacgacgtcgtccggcttatgctaaggtccttcactgtccttgatcctcatcctgtaaactctattcgtgaaaatcctaggtacaccaagatgacgcccgaggaaatactcggaaagtttgtaagcgggcgaaagatgatcaaggaggcaagatatgttgatgaggcgttgaatggcccaatgccgatccacgagcctcaaaccgttgctctcaaagcaataagcagcagggaggggctacctagcaaggtggcgcaagttgaggcggccgggctaaatgaggatgaaatggccctcatcatcaagcgcttcaagacggtgctcaaaggtcgcaaggagcatcccaacaagagcaagacgaagggaaagcgctcctgcttcaagtgtggtaagattggtcactttattgctaactatcccgataataatagtgaccaggaacaaggaaagaatgggaagagagagaacaagaaggtttacaagaaggctaagggcgaagcacaccttggaaaagaatgggactcggattgttcttcgtccgactccaacgacgaaggactcgccgccacggccttcaacaaatcgtctctcttccccaacgatcatcacacctgcctcatggcaaaggagaagaaggtaagcactcgaaacactattgcatatgcttcttcaagtgatgacgaatctagtgatgatgaagtagactacgcaagtttattcaaaggcttagatagaactaaaattgataagatcaatgaattaattgatgcgttgaatgagaaaaatagattgctagaaaggcaagaggatcttttatatgaagagcatgataaatttgtttatgcatccgggggctcaagctggattatcgacagcggatgcacaaaccacatgacgagggagaagaagatgttcacctcctacatcaagaacaaagattcccaagattcaatcatattcggtgacgggaatcaaggaaaggttaaaggactagtaaagatagctatttcatccgagcattccatatctaatgtgtttttagttgaatcgctcgggtataacttgttgtccgttagtcaattatgtaatatggggtataattgcttatttacaaatgtagatgtgtctgtctttagaaggagtgatggttcattagcttttaagggtgtactttacgacaaactctatttagttgattttgcaaaggaggaggccggtctagatgcatgcttaattgctaagactagcatgggctggctgtggcatcgccgtctagcacatgttgggatgaagaaccttcataaacttctaaagagggaacatgtgttaggtctaacaaatgtaactttcgaaaaagatagaccttgtgcagcttgtcaagcaggtaaacaggtgggaagctctcatcatagcaaaaacgtgatgaccacatcaagacctttggagctacttcacatagacctcttcggacctgtcgcatacctcagcatcggaggaagtaagtatggtcttgttattgttgatgacttttcccgcttcacttgggtattctttttgcaggataaatctgaaacccaagggaccctcaagcgcttcctaaggagagctcaaaatgaatttgagctcaaggtgaagaagataaggagcgacaacgggtccgaattcaagaaccttcaagtggaggagtaccttgaggagaaaggaatcaagcacgagttcttcgctgtctacacaccacagcaaaatgatgtggtagagagaaagaacaggacgctcatagacatggcgaggacgatgcttggagagttcaaggcgctcgagcggttttggtcggaagccgtgaacacgacttgccacgccataaaccgggtctaccttcatcgcctcctcaagaagacgtcgtacgaactcctaaccggtaacaaacccaatgtttcatattttcgtgtatttgggagtaaatgctacattctagtgaagaaaggtaggaattctaaatttgctcccaaagctgtagaaggatttttgttaggttatgactcaaatacaaaggcgtatagagtcttcaacaaatcatcgggtttggttgaagtctctagcgacgttgtatttgatgagactaatggctctccaagtgagcaagttgatattgatgatgtagatgaagaagatgttccaacggccgcaatacgcaccatggcgattggagatgtgcgaccacaggaacaaaaggagcaagatcaaccttcttcctcaacaatggtgcaccctccaactcaagatgatggacaggctcatcaagaagaggcatgtgatcaagggggagcacaagatgatcatgttatggaggaagaagcaccacaggcccctccaactcaagtccgagcgacgattcaaaggaatcatcctgtcgaccagatattgggtgatataagcaagggagacgagcacggggtggtgacaaggaacaaggtgagacttgtggcaaaaggttatgcccaagtcgtaggtttggactttgaggagacttttgctcctgtggctaggctagaatctattcgtattttgttagcctatgccgctcaccattctttcaggttgtttcaaatagatgtgaagagcgctttcctcaacgggccaatcaaggaggaggtgtatgtagagcaaccccctggctttgaggatgaacggtaccccgaccacgtgtgtaagctctctaaggcgctctatggacttaagcaagccccaagagcatggtatgaatgccttagagactttctaattgcaaatgctttcaaggttgggaaagccgatccaactttattcactaagacttgtgatggtgacttatttgtgtgccaaatttatgtcgatgacataatatttggttctactaaccaaaagtcttgtgaagagtttagcagggtgatgactcaaaaatttgagatgtcgatgatgggtgagttgaactacttccttgggttccaagtgaagcaactcaaggacggcaccttcatctcccaaacgaagtacacacaagatttgatcaagcggtttgggatgaaggacgccaagcccgcaaagactccaatgggaaccgacggacacgtcgacctcaacaaaggaggtaagtccgttgatcaaaaggcataccggtcgatgataggttgcttgctttacttatgtgctagtagaccggatattatgctaagcgtatgcatgtgtcctagatttcaatccgatccaagggagtgccaccttgtggctgttaagcgaatacttagatatttagttgctacgccttgcttcgggatctggtatccaaaggggtctacctttgacttaattggatattcagattctgattatgctggatgcaaggttgataggaagagtacatcagggacgtgccaattcttaggaaggtccctggtgtcttggagttctaagaaacaaaattccgttgccctatccaccgctgaggccgagtatgttgtcgcaggacagtgttgcgcacaactactttggatgaggcaaaccctcagggactttggctacaatctgagcaaagtcccactcctatgtgacaatgagagtgcaatccgcatggcggataatcctgttgaacacagccgcacaaagcacatagacatccggcatcactttttgagagaccaccagcaaaagggagatatcgaagtgttttatgttagcaccgagaaccagctagccgatatctttaccaagcctctagatgagtcaaccttctgcaggctgcgtagtgagctaaatgtcttagattcgcgtaacttggattga

SEQ ID NO: 5163 - DNA, 625 bp, Zea mays
  Clone ID: TF_ZmC18109_16
cagcttcgcagcccgcgcccctaaaaccctagccccggcggatcggggggcgcctttggtgccagcgacgcggatcaaggacgggagcgctggcgcctcaggaatggtctcaaagagtggtggtaaggatgggagtaggcttaacggctgtagtagtcgagcctctttaacttccatgcctccaagtgtgaagactgaatgtgaaatcctgcaatccgccaatgttaagatcttcaccttcaataatctcaaggcagccatagggaattttgtttttgctagatttagggtgttacaaacatacccccttaacaagaatctcgtcctcgagattaagaaaggctagcacgaaagcaaaggagatacatggttatttgtaggttcttagttcacattgaactcctccaaacttaaggaacttccttacttctttgctccaaaatgtatactaatcaagcgaccttcatcatcatacttataaaatggttggtcttctgggttattgtttgggtcttgcttcaccgtcttcttctttagttggtctagacgcttcttggggcattcgcgaataatatgttcttcatttttgcagtagtagcaagcacctcttgctttgagttctttg

SEQ ID NO: 5164 - DNA, 1609 bp, Zea mays
  Clone ID: TF_ZmC824_1
gttctcatgatccatattgttatggatatatttgagatcatgatttctatgattaattatcttttatatgtcatcatcataatgttaatttatggaattaaaatgatatggaaaatgcctataattttaacacaccaaaaacctaatgttaggcatttttctgtcagtggttttgctgctgtgctaaagcctgatccatttgatggtaaaaacttcttgatttggaaagctaaaatggtattgtggcttactgtaatgtcttgttttcatgccgctgagggcaagcctgtcaacttacctcctgaggatgaggctaagtttaaggctgaagacaacctctttcgaggagcagtaattagcgcacttgatacaaaattccagaaaagctatatcatccttcctacagggaaagagctgtggaatgcacttattggaagtttggagtaactgatgctggtagcgagctgtatctcatgtagcagctgtatgactacaagatggttgagaaccgatctgtagtggaacaggctcatgagtttcaggcactagctaagcaactcaaactttttccgtgtcctttgcctcacaagtttgtggctggcggtataatcgccaagttgccaccttcttggaaggactttgctacctctctcaaacataagagacaagagttcaatgtggaggagctcattggtactcttgatgttgaggaaagggctagaacaaaggacagtggaaaaggtgtggagacctctactgctaatgtggtgcagaagagaaacttccgcaagtttaacaagaagaaaaaccagaacaaacaagagaacacaaataaacctgttcaaacagcacagtttaaaaagaagaagaacaataacaagggaaagggaggatgctttgtttgtggcagtgatcaacattgggctagagagtgccctgatcgcaagttcacacatgacaagaaatcagctaatgttgtaaccactgaaactggagatgaaacatctgggtatggtaattctttaccatttgttctttcagtttgtaattcacctgagtggtggatggacagtggtgcaaatattcatgtgtgtgctgatgcctctatgttctcctcctaccaggtcgggaggtctggcgccttgttaatgggaaatgggtcgcatgctcatgttcttggtgttggtacggtcattctgaagtttacttcgggaaagacggtgccattgaagagcgtgcagcatgtgccctttatcaagaagaatctcgttagtgcttccatgctatgtcgagatggatacaaagttgttcttgagtcaaataaatgtgttatgtcgaaacatggtacttttgttggtaaaggatatgactgcggaggcttgttccgcttatcactgcatgatgtgtgtaataaaatggtgaattctgttataagggatgtgccctttatcactcattcatggatggcaaagttcttattatgtcgaagtgttgtaaactccgcggcttgcttctatggtctgttttggacatgtgcgttcattgtttcatcggtctgtgcttagggttgatgcgctaagcttcgcactgcctgacttgtggctgtaaa

SEQ ID NO: 5165 - DNA, 852 bp, Zea mays
  Clone ID: TF_ZM4511.C1.o4.fg
atgagaaccatagactcacaattagaacaaatcttagacaagagtattataccttctagttatgataagaaaaatgcttccgaggaagatcaaagatgtatacgcttatactatcttgcttatgacatcttaagtaattctcttagcaaagaagattatcgtgccttcataatgagatatgatgaacctattcatgatgcgcatgatatttggactaaaattaaaagtaaatttaatgagtccaaacatgttagttcatatgatgcttctacttcctttagtccttgtgaaactaaccctttgaaggaaaaagaagaaaatgaacgttggagaccaaacgatgaatccacctctccaaaagcaagcaaatcctcctttgagctagaatttctaggaataaaagatgatacatgtcaagagctcaaggaagaaaatgaaaggcttagaacgagcttgacacaactaaaagggaagtgcactgcacaaccttctcaagataaccgtgattacatggtgaagaagtttgagataggaacaacagtggcatgcacaaaatcccttgaagaaaatgtcaaggacttgaggaatgtcaaggggaaggaacaaaagaagaaaatcaatacctctgccaaaaacctcaaccgtgcctccatgcaaggtaacatccaaggtaatgatcaagccacacttcacactaagaaaagtaagaagtgtagtgaatgctttgaaaaggggcactttattaggtcatgtccctatattaaagaaaatggcttaattcttaacaaggatgataaacgttgttttaaatgctctaagaagggacatttagttaagtcattccctatgtaa

SEQ ID NO: 5166 - DNA, 3480 bp, Zea mays
  Clone ID: TF_ZM5032.C3.o6.fg
atgccgccgcgcacaaggaaaaccgtgcgcaagtctaccggaccaattggcgtgcctcgccatcaactagctccaaggcatgaggacagtagtagtggtagcaatgatcccatcggagatctggaagctcaggtggagcaactgcgaacggaattatgtcatagaaacaatgtgtgggtcgaggatgacgagcttgccgaacgagatttggcactcgattgggctgttaactcacattccattgcttgggacaaggaggcaaaggctcgtgctcgtgtggccgagcttagcacggccgtcgacaacttgcagatcctgtcggaatgggagctggaccttctggtgcagcgggtgaagcccttggctgaagatccccttgaagcagatgagtggatccgggttatcgaacaaaagtttgggcttctccgatgcacggagactcagaagcccttatttgcggcgcagcagttacgaggccctgccagcacctggtggggaaattatgtggctatccagcctgctggtcatcaaattacttgggacaaatttaggttggcatttcgggagcactacattccagaaggggtgctccatatgaaacaggaagaatttatgaagcttaagcaaggtggcacagtatctcaacaagttcaaccatttgtcccacagaaaatggtcacctacctcgacctctcctacagtagagctgtcagcacggcgctggcagttgaagccaagtatgctggcccaggaaagtcaaagggctatggaggtgacaggcccaaccaggggcctgagaagcgacaaaggttggtgatccgaccttttaatcaaaattgttcttcaccacgtccaccctcctacccctttaaacaacctgtctttatctgtcctgccactacccccacctcaacaaatcagccgagtgcccctggtactcgtttccccgccctcccaagctcttcaacaggttgctttaattatgggaagtctggacattttatcaaggactgcccatatcccaagaagaacagatcaaatgatcagcagagttcagggagttccgctcaaggcaagggaaacccggcgaataatacatcgggcaaaaatatgaagaaaactgggcgaatttattatatgcaaatggccacgacgccggaaggagaaccggtcttgttgggtacgtttctcatggccaatcaccctgcagttattctttttgattctggcgcttcacacacattcataagcaagaagtttgtggagcaacattgcattccatacaatgaatcaagggaagggtttataattcattcgcctgggggacaaatattcactaaagaagtggatttccatgtgcccgtaacattggctgaacgggactttcccacaaatatgattgttctgaaaggccaagatatagatgtaattctgggcatgaattggttagcccaacataaagctatcctcaacactgatctgagatccatcaggttgagctatggccaagaagaggttctgttgtccattcccgtagctattccagctaaaccaattggcagagtatatgaagccatcataccagagatccaagatattccggtagtatgtgaattctcggacgtctttccggaagatctgcctggattgcctccagaaagagatgtagaatttgtgattgggttgaagcccgccatctttgtcaagaagaaggaccaaacacttcggatgtgcgtggattatagaccccttaatgaggtcacaatcaagaataagtaccctcttcctcggattgatatcttattcgatcaacttaccggagctcgggtattttccaagattgacctcaggttgggttaccatcagatccgtatccgacccgaagatatacccaagaccgcattcactacgcgatgtgatgaagcctttgagcagctgaaagtattattgaccactgctccggtattagctcaaccggacattgaaaagccctttgatgtgtattgtgatgcatcagatcataaaagtttgaagtacatctttacccagtcagaactgaatatgagacagaggagatggcttgagcttattaaggattatgaactggagattcactatcacccaggcaaggctaatgtagtggcagatgcgttaagtcgcaaggctttctatcattgtcttacaatgaagacttctgacattacgttatgccaagaaatggagaagttggacctgggaatgatacaacacgaaacttcaaatcacttgaagcttgagtctgtcctcctacaaaggataattgacgcacaaagaaaggatgaaggtatgaaacacattcatgagaaaatggaggccggtaaagccaactgcttcagaagagataatcaaggtgttgtatggtttaacaaccgcatagttgtgcctaaaaatgatgagatccgccagcaaattttagatgaagcacatcttagtcgctattttattcatcccggaagtactaagatgtatcatgatctaaagcagcattattggtggacgaaaatgaagattgaaattgcacgctatgtggcaaaatgcaacacttgccgacgtgtcaaggccatacatatgaagactgctggcccattacagtctttacctataccaacatggaaatgggaggatattagtatggactttattatggggttacccaggacagcaaaagggtatgattccgtctgggttatcattgatcgacttaccaagatcgcccactttctcccagtcaaagtaaagtatccagtaatcgcatatgcggaactgtacattgctcgcattctcagtctgcacggtgttccgaagaccatagtgtcggatcgtggacctcaattcttatccaaattcattgaagaacttcacaaatccttgggtgaaagatgtttcttcaggtctgatatggaaaaggaaacagaagaaaaggttcgacgaataattcataatttgaaagaagcccaagctcgccaaaagagttatgcagacaagcgacgtcaacccttgcactttaaagttgaagaccatgtttacctgaaagtttcaccaatgaagggtgtatcacgtttcggggtaaaggggaagctcgcaccccggtacattggtcattttcctatccttgaaagatatggaccagtggcatatcgactccagttacccgaaacattgtctgctgtacataatgtgttccacgtatctcaattgaagaagtgtcttcgggttccagatcgaactattgaagtaacagatgttgccttagaactagacttgacctattcaaaacatcctgttcaagttttggatcaaaaggatcggatttcccaaaggaaaactctcaagttttacaagatacagtggaaccaacacacggaagatgaagctacttgggaaactcaagactttttagataagaatttcccaggctttatagcttcatgtaaattgtaa

SEQ ID NO: 5167 - DNA, 1068 bp, Zea mays
  Clone ID: TF_ZmC1324486_2
atgtcaaccaaagagttcgaggaactcgcccttgatggccataactacccaacttgggcttcagatattgaaataacttttgcttctcgtggaatcattgatgcaattgcagcacccatcactggtactgatccagtgaatgaggttaaaaagaacacagcacttttccttttgaggctttacatccataaggaccttaagcaagagtaccttatggagagatgccctcataacttgtggaaagctctcaaagagcgctatgaacagcagaaggagctcatatggccgtcagccaaccatgagtggaaccaccttcgtctacaagattttaaatctgttgcagaatataaccatgctcttcatagcatttgttctaaattgaaattttgcgagaaagagccctctgaagcagacaagatagagaagactctatctaccatgcttccagaggataggatattgcatcagcagtatcgctctagcaatttccagagatattctcaactcatgcacacattgacccaagcagaaaagcatcatgagcttcttctaaagaatgctcagcagcgccctcctgggtctgcccctctgcctgaggtacatttcaatgtgcataagactgagaataagaaaggattcaagaaaaacttcaagaatcctcctggatctcgcaaattcaagaagaacaaattccacaagaaaggtaaaggaaaaggaaaaggaaatgacaagcctctaccatctaagggcaacagagcttgccttaaatgtggtactgagggccattttgctagggactgcacttgccctaagcaccttgttcttttgtatcaacaatccctaaagaagccaaagtctgataagcctggttttgaggctcatttcaattctactgaagcaccaattgaggttggaagttcttcactggcttctggtgatctgaagaacactcttgctaaagagcacctcaatgtggttgacaacaagcctccacttctgcaagaagatgaatctgatgatatgatcattgagtatatgtcaaaggatccatttggagatttggcataa

SEQ ID NO: 5168 - DNA, 1644 bp, Zea mays
  Clone ID: TF_ZM4353.C2.o2.fg
atgtctggagatcacgctaagagggagatagtcaccggcgataaggctaaaagctcgggaaggaagaatgaatggactccatcaagagagtctagcgacaaatacaaggaggaatctgcttcctccatcaagtcacataggaagggcaaaccaccatattttgatggtaaagattactgtatgtggagtgataaaatgaggcaccatctaacctcactccacgaaagcatttgggatattgttgagtttgaagtgcaggcaccacaggtgggcgacgaggactacgactcggatgaggccatccaaattaggcactttaattcccaggaaacttctatactcctcgcctccttgtgtcgagaggagtataataagatgcaagggttgaaaaatgctaaagaaatttgggatgtcctcaaaatggcgcacgaaggggacaaggtgaccaaggtccccaagcgcgagacgatcgagggagaactcagtcgattcatcctcaacaaaggagaggagccgcaagcgaagtacaaccggctcaaaacaatggtcaaccaagtgcgcaacctcgggagcaccaaatgggacgactatgaaatggtcaaggttattctaagatctcttgtttttctcaatcctactcaagttcaattaatctatggagatcctagatataaacagatgtcccccgaggaggtaattggcaggtttgtgagctttgaacttatgatcaaagactccaaacatattgtcaacttggagcaaggcgccacctccacacttgaggtgcaacccgttgcattcaaagcaacagaagagaataaggaagagtctacacgaagtagactcccaatcgacgcctccaagctcgataacgaggagataactcttatcattaagtgctttcgaccaatcctcaaacaaaagaaggggaaggactacaagccccgttccaaaaggttgtgttataggtgtggtaagtccggtcacttcattgctaaatgtccatatactactgacagtgacagggacgatgacaagaaagggaagaagaagatggagaagaagagatactacaagaagaagggtggcgaggcacacattgggcgggaatgggactctgacgagagctccaccgactcctccgacgacaaggacgccaccaacatcgccatcaacaagggccttctcttcccaaacatcagccacaagtgcttaatggctaagaacgacaaaaggaaaaaggtagaaaaatgtgagaatttatctaaagagcttaacatttgcaatgattcaatttcctgtcttagagatgaaaatgctagtttaaatgctaagatagaagaattgaatgcttgcaatatttctacatctactgttgagcatatcaccatttgcactagatgtagagatgttaatattgatgctatagatgatcaccttaccataattaaagaacaaaatgatcacatagcaaaattaaatgctaaaattgccgagcatgagcttgagaatgaaaattttaaatttgattgtagcatgctctataatgggagacaccctggcattaaggatggcattagcttccaacaagggagccaaagcaacaccaaacttaatgcccccaagaatagactgtctaattga

SEQ ID NO: 5169 - DNA, 1476 bp, Zea mays
  Clone ID: TF_ZM4678.C6.o4.fg
atggacgtcgatttggaggcaccgccgccgcctccacccactgcagcagcagttactcgtcgttcaccatctccgtcggcacccatggtcgtcgggaccattgctgctcgtcgtggagagccccacgcgccgtcgatgctccgcgcggacgcatcatcctcactggccatcgcccaaatggggtggccccatcttcctcctccaatgggaggacctaatggccctcgatccggccgccacgacggccgtttggggggagggggtggggaagaggctcggcccctgcgcgggcagtggaggagcgcgctcagcgcggcgctgctcctcgacgtggagcagtgggcgggcggcggctcagcaaggcccgaggtcgggcctggcgcggcgtgtccggccgagcgcaggcgacggcaccggccggcggtgcgtggccgcggtggcctggccgagtcggccacatcctcccccagcgcggatggggagggcggctccactggcacgcgcgccatggcggctctcggcgctggcaaggaccggcacgacggccacgcgggccctcttcctccaaggcgcggcaggctccatggtggagccacgggcgcgcaggaaaggagcctggcggcggctggagctggccgctcccttctggcgcctcctcctggagggaacatgtcaaccaaagagttcgaggaactcgcccttgatgggcataactacccaacttgggcttcagatattgaaataacttttgcttctcgtgggatcattgatgccattgcagcacccatcactggtactgatccagtgaatgagccctctgaagcagacaagatagagaagactctatctaccatgcttccagaggacaggatattgcatcagcagtatcgctctagtaatttccagagatattctcaacttatgcacacattgacccaagcagaaaagcatcatgagcttcttctaaagaatgctcagcagcgccctccagggtctgcccctctgcctgaggtacatttcaatgtgcataagactgagaataagaaaggattcaagaaaaacttcaagaatcctcctggacctcgcaaattcaataagaacaaattccataagaaaggtaaaggtaaaggaaatggcaagcctctaccatctaagggcaatagagcttgccttaaatgtggtactgagggccattttgctagggattgcacttgccctaagcaccttgttcttttgtatcagcaatccctaaataagccaaagtcaaataagcctggttttgaggctcatttcaattctactgaagcaccaattgaggttggaagttcttcactggcttctggtgatctgaagaacactcttgctaaagagcacctcaatgtggttgacaacaagcctccacttctacaagaagatgaatctgatgatatgatcattgagtatatgtcaaaggatccatttggagatttggcataa

SEQ ID NO: 5170 - DNA, 436 bp, Zea mays
  Clone ID: TF_LIB3068-010-Q1-K1-C8
gcggtagcggcgagtccttcattgtcggagtcggaagaggagcaatccgaggcccactcgttgcctagatgcgcctggccctttgccttcttgtaatgcttcttcttttccctcttgttttccttttcctggtcactatcattatcaggccagttagcgataaaatgaccaatcttaccgcacttgaagcatgagcgcttccccttcgtcttggtcttgcttggctgccccttgtgaccctttagcaccgtcttgaagcgtttgatgatgagagccatctcttcttcattaagtccgaccgcctcaatttgtgccaccttgctaggtagcgcctccttgcttcttgttgctttgagagcaaaaggttgtggttcgttgatcggtccattcaaggcgtcgtccacgtaccttgcctccttgatcatcattcgcccgc

SEQ ID NO: 5171 - DNA, 5533 bp, Zea mays
  Clone ID: TF_ZmC36592_178
caagagcagagagagagagagggggggggcgctgacgggcggggtcgggctgtcagcgggcgggagtggcgcgcggtttgggccgcctgggccgaaaggagaggggagggtggctggtgcgcgcgagctgggctggaagccggcccagccgagggagggaaggattttccttttctttttcttattctatttccttttctttttcttttctccttttgtgtctttttgctcctttttctcttaaccaaaaattctctaaatgaacttggtgataaatatggtctatgtgaggtgcttcaaatcattttaagtatatgcaaatgattgggtgacctaggggtagggttagggaggagaataaaacaaaagggggggaaattagggggggttagggtttcaaacctgggttgggaatttgggatgttacaaacctacccacttaaaggaatctcgccctcgagatttagactggatttgggaaaaggtaagggtattccctcctcaagaagtcctcactctcccaggtggcttcctcttctccttctctgctccactgaactttacagagctttacttctgaggtgcgggtctttctaactgctaaatcaagaatctttactggtttctcatgatattgaaggtctttctgaatctgcactgtctcttcttcgaggtgactttctggtgcttgcaggcatttgcggagctgggacacgtggaacacattgtggatgtcggacatggattctggtagttccaggcggtatgcggcgggtcctaccttgccaatgatgggatagggacctacaaaacatggggctagcttccctttgacttggaacctcctgacaccacgcattggagaaaccttaaggtagacgaagtctccttcctcaaatcggagttccctccgcctgttgtccgcgtaactcttctgtcgactctgagcttcaagcaaccttctgcggatcagtgcaactttctcttctgcctctttgacaaaggcaggtccttctagtgctttttcccccacgttggaccacatgagaggggtcctttctgtctgcccatctgtctgagggtggtacgcggtgctgaaatctagcttggtgcccatagctttctgcaggcttgtccagaatttggatgtgaactgggttcctctgtctgacactatcttccttgggatgccgtggagtttgactatctctttgaggtagatccgggcaagggtggctcctccaaaggtagttttcactgggatgaaatgggctaccttggtgaggcggtctattattacccagatggaatcattccctttttgcgtccggggtagtccggttacgaaatccatgcctatctcttcccatttccattcaggtatcgggaggggttgtaataggccagcaggtttttggtgttcgacttttgttcgttggcagatatcacatcgggccacatactgagctatttctttcttcatccccttccaccagtatctggtcttgaggtccaggtacatcttggtagttccggggtggatggagtaggccgagtcgtgagcttccttgagtaggacttctcgggcctccccttttggtacacacagacggtgtttgaaccaaacgactccttggttatctgtcctgaggtccgggagttgttccttgcgggctttctccacaagccttgccgtctctgggtctagatgttgagctttgcggatgaggttttctagcattggcttgacttcgatactgtcgttgtttcctagacatgcatttagttgtgctgattcttccttccagtcttctagaaagttggtcccttttattccgaatggttttcgactgagggcgtcggctaccacgttggccttcccggggtgatagtgaatttcgaggtcataatccttgatcagctctaaccatcttcgctgacggaggttgagatccggttgagtgaatatgtacctcagactcttgtgatcggtgaaaatatggcatttgtttccgattaggtaatgcctccatatctttaaggcatgcactatggctgccaattccagatcatgggtggggtaattctgctcgtgcggcttgagtaggcgtgatgcgtaagcaatgactttctcgttctgcattagcacacaccctaagccttgccttgaggcatcacagaagacgacaaaatcttgatgaatatctggcagtgatagaacgggtgccgttgtgagtttctcttttatgatttggaaactttcttcacattttggggtccacacaaatttatggtctttcttgagaagttctgtcattggcctcgcgatgctggagaatcctttgatgaagcggcggtaataccctaccattcctaggaagcttcgaacttcactgacgttggttggttgcctccattttgacactgcttctactttggaggggtccacttctattccttctgcggttaagatatgcccaaggaaggctatcttttccaaccagaattcacatttactgagtttggcataaagttggtgtgctctgagttttccaaggacgatccgaaggtgacgcttatggtcttcgcggttcttggagtaaataaggatgtcgtcgatgaagactacgacaaacttatctagctcttccataaacactttattcatgaggttcatgaagaaggcgggtgcgtttgtcagtccgaacagcattactgtgaattcatattgcccgtaccgggtgacaaatgcagtcttttggatgtccgcttccttgatcctcaattggtggtaaccagacctcaggtctatcttggagaagtacttggctccttgaagctgatcgaagaggtcgtcaatccgaggaagtgggtacttgttcttgatggtaacctcatttaacgatcggtaatcaatacacattctcatgcttccatctttcttggagacaaacaggactggtgccccccaaggtgatgagctgggacgaatgtaccccttttgctgaagatctgagatttgaagttttagttctgctaactcagttggagccatgcggtatggtctctttgcgatgggtgctgttccaggaatcagatctatgtaaaactccacttctctttctggtggcattcctggcaattcttctggaaatacgtccatgaattcttccactactgatatatttccctgctggtcggtgaggaggactgtctcatctgcgcaactgatgatgcctttgtgtttagttagccaatccatccctaggattacatcaattcccttggatggcaagacggttaagtctgccaggaatactaccccacttaaaaggattctgacttgggaacattttagctggcataggaggtcgaaccccggggttcgggtgaccaaaggaatctctaggggagtagagggaatgccatgcttttccacaaagctagtggctatgaaagagtgggatgctccagaatcaaaaagtacggtagcgggagtaaattcaacaaggaactcaccgagtactactcccggagcctgctgagcttcctgggcatcgacgtgatttacacgtgcccttccttggtacggagtcttgttctgctggctgacggcggagggcgccttgggggcgggtgccgaggtattcttggggccattcatcgagttggagtaggcgggtccctgtggcttcagctgcggacagttgttcttgaagtgacttggatcaccgcagtgccaacatgcatttaccggaggttggttgcttgccactgagggagaatggaaagagctctgactctgctggctgaatcttgacggagtgggtccagctggtctactgaagttgggccccttgggtggaaacccaaatgatcgagtcttctggtgccggtcctgttgctgagctcggaggacttggaatttcctctttaggtgacccttttcttcttcccttgccctttccacttgtatggctttgtttgagaggtgcgagaagctgaggaagtcttggctagctaggatggtcttgagttctggtctgagccatttcaagaagcgggccatcttcttggcctctgagatgacatcatctggcgcgtagcgggataattctgtgaatttgtgcacgtactcgctgatggatcttccgtcttgagtcaattctcggaactcgtcctccttaagctgtaccaatccttggggcacatggtgctcccggaaagctgcttcaaattccgcccaggtagcatctctgatggtgatgttgaaagtgtcccaccaggctaaggccatcccagagagttggtgggcagccagttgaacacgctgattttctgggcaactgatggcttccagcttccttttgatcgtgcgcatccaatcgtctgcatcgagggggttgcttgatccggcgaacgtgggaggtttgagtctcaggaagtcccccattctgtcttgcggtcttccaccatttggccgttgattttccagattttgagtgaggacctcgatgagtcgggtctgattggctagaacttgggctatgtctaagggtaggggtggaggtgcggggaggtgggtttcactttcctctctatcgacttccccttcagctcttcgggggaaaccctgctccaatccctggggcggtaggcttggttttatccgaagccatgagggcgttcttcgaggtgctagcgagttccttgtctaaggtgtccccaaatgccttgagaagatcatcgaggctggctagggatacatcttgttcgtcggaccagtcatcgattctggggggaggtagggctagaggggccttcttcttcttcttctctgtctggcacccttggttagtggtcttgttctggatcttctttttgggggcgagtgcctttagcttcttgtcaaagtctgtcttcaaggtccgataggcctcacgggtgttggcttcatcgccttccactatgctgagactctcctggagagatgccttctcttgcttaagctctttgacttgctgctctaggctttccactcgggagtttaggtgggtacaatgggaggagagctcatcgtagtggttgtcgagggtgtggaggtatccggccatgtagacgatagtgggatcatcttctatgggatctcctccctgacagagcctggagtcttttcttccaggttggggtgtttttgttgctgggtggaaaatatcggaggggggtctcaaagatctctcggctatagttttggcacagttgtttgagggcttttcgagcaacgctctggcatgtgtctgggaagcggtacccgatgaaggtaatttggaaaggagggtggtttgggtagttccggctttctcccaagtagatcgccatagagcactttttcattccattctcacggtactctttccagacatattcgggcttcttgcggatccccaagcgcagtgcgcagcttcgcaagaaggtgaggaaagccttcctcctctgagcaataggaagtcctaatcacccagaggttttccat

SEQ ID NO: 5172 - DNA, 4647 bp, Zea mays
  Clone ID: TF_ZM3657.C15.o1.fg
atggaagactctctggccattaggacatcctactgctcagaggtggaagggttcccgcatctcttgcgaagctgcgcgcttcgcatgggaatccgcaaaaagccggaatacgtctggacggagcatatcgaaggcggaatggagaaatgctctatggcagtctacctgggagaaagccgaaactatccaaaccatccttccttccaagtcactattaccggataccgtttccacgatacttgccaaaatgttgcccgaaaagccctccgacaactgtgtcagaactacaacaaagtgatctttgaaaccccccttcactactttccacccagcaacaagaacacccccacctggaggaaaagacttcaggccctatcaggaggagatcctattgagaatgatcccaccattgtctacatggccggataccttcacacccttgacaaccaatatgatgacctcgccctccactgcacctccctaacctcccgggtggaaagcctggagcaaaaaagcctcttaatggctgaaggcgaagaggccaatacccgtgaagcctaccgcaccctaaaattggactatgacaagaaactgaagaagctcgcccccgcaaggaaaatccgcaagaagaccaaaagtcaaggatgtcagactgagcagaaggaagaaaaccctccaaggaacccatccgacaccgaagagatgtccctggccagccttgatgaccttctcaaggaatttggggacaccttagagaaggagttcgggagtactctagatagcacccgtatggcttcggatagaaccacgcctaccgcctccgggattggagcaagacttcctctaggagctgaaggagaggctggcagagaagggggtgagacccacctccccgcacctccggagctaccattagacctagcccaagttctggccaatcaaacccgactcattgaagtcctcactcgaagtctggaaaaccagcgcccaggcggtggaaggccacaggacaagatgggggaatttttgagactcaagcctcccacattcgcggggtctagcaatcccctcgatgcaaatgactggcttcgcacgatcaagaggaagttagaagccatcgcttgccccgagaatcagcgtgttcaactggcagctcatcagctttcaggaatggctttagcatggtgggacactttcagtgaagccgtcagagatgctacctgggcagaattcgaagcagctttccgtgaacaccacttcacagaactggcccgctacgcgcccgaggatgtcagcaccgaggccagaaaaatggcccgttttctgagaggattaagacccgagcttaagaccatcctcgccagccaagacttccacagcttctctcacctctccaacaaagctatccaagtggaaagggcaaaagaggaagaaaaagggcacatcaagaggaaattccaagtcctccgagcacaacagcaagagcgtcaccagagagctcgaccccttggacttccacccaggggtccaagcttcaataaacaatctggacccactccatcacgctacagtcagcagagtcagagctcccttcaggcaccctccgttgcgagcaaccagccgccagcaaacgcctgttggcactgcggagaccccagtcacttcaagaacaattgccctcagttgaaggcatctggaccaacttactccaactcagtgaatggccccaagattccatcggcacctacccccaaggcacttccttcaagcagccagcagagcaggactcagtatcagggcagagcccgggtcaaccacgtcgacgctcaagaagctcagcaagccccgggagtagtgctcggagcatcccattcttttatagccgctaagtttgtggaaaagcatggcatcccctctacacccctagctatccctttggtcacccgaaccccgagatcagacctcctgtgcaagctcaggtgctcccaagtcagaattctcttaagtggggtagtgttcctagcagacttaaccatcttgccatcccaaggaattgatgtaatcctagggatggattggctagccaagcacaagggtatcatcagctgcgcaagcaagacggttctcctcacagatcaccaaggaaaagcagtttcctgtcaagcccaaccgcccgcaaacgatccaatgatgtttaatctaatagcagagagcatgtctgtaatcaaggagtttgaggatgtatttccggaagagttgcccggaatgccaccagaaagaggagtggagttctatatagatctcattcctggcactgcgcccatcgcgaagagaccataccgcatggcccccactgaattggcagaattaaaacttcagatttcagaactacaggaaaaagggtacatccgtcccagttcgtctccctggggagcacccgttcttttcgttaccaaaaaggatggaagtatgaggatgtgtattgattatcgatccttgaacgaagttacaatcaagaataagtaccctctccctcgaatcgatgacctcttcgaccagctacagggagccaaatacttctccaaaatagacctcaggtcagggtatcaccaactaaggattaaggaggcagacattcagaaaactgcattcaacaccagatacgggcaatatgaattcacagtgatgccatttgggctcacaaacgcacccgcctttttcatgaacctcatgaataaggtatttatggaagagttggataagtttgtcgtggtctttatcgacgacatcctcatatattccaagagtcgcaaggaccatgagcatcaccttcgaatcgtcctcggaagactcagagcacatcaactttatgctaaactcagcaagtgtgagttctggttagagaagatagctttcctggggcatatcttgactgcagaagggatagaagtggacccatctaaggtagaagctgtttcaaattggaagcaaccatccaacgtcagtgaagtacgaagctttctgggaatggcagggtattaccgccgttttatcaagggattctccagcatagcaaaacccatgaccgaacttctcaaaaaggacaataagttcatgtggactcccaaatgtgaagaaagtttccaaatcatcaaagagaagcttacaaccgcaccagttttgaccctaccagacatacaccaggattttgtcatcttctgtgatgcttccaagcaaggcttagggtgtgtcctaatgcaaaatgagaaagccattgcttatgcatcccgcttactcaagccgcacgaacagaactaccctacccacgatctggaattggcagccatagtgcacgccctaaaaatatggaggcattatctgatcgggaacaaatgccacatcttcactgatcacaagagtctcaagtacatcttcacgcaaccggacctcaacctccgtcaaagaaggtggctcgaattgatcaaggattatgacctcgaaatccactaccaccccggaaaggccaacgtagtagcagacgccctcagccgaaaacctttcggggttaaaggaacaaactttctggaagattggaagagagaatcagctcagctgaatgcatgtctgggagacaacggtggcctggaagtcaagccaaacctagaagatctcatatgcaaggctcaacgcctggacgcagagacagccaggcttatggggagagcacgcaaggagcaacttccgggccttaggacagacgagcaaggagtcctctggttcaaaaaccgcctgtgtgtgccagtgggagaggcacgaggaaccctactcaatgaagcccacaactcagcttactctatccacccaggaaccaccaagatgtacctagacctcaaggccagatattggtggaaagggatgaagaaggaaatagcacagtatgtggcccgatgtgacacctgtcagcgaacaaaggccgaacatcagaagcctgcaggcctacttcaacccctcccaatacccgaatggaagtgggaagaaataggcatggatttcgtaaccggactgccccgatcacagagaggaaatgattccatatgggtaataatcgatcgtctcaccaaggtggcccactttgttccagtaaagaccactttcggaggagcagcccttgcccgaatataccttaaagagatagtcaggctacatggcattccacggaagatagtatcagatagaggaacgcagttcacttcaaaattttggaagggccttcagcaagcaatgggcaccaagctagatttcagcaccgcttatcatccccagtcagatggtcaaaccgaaagagtcaacaaggtcctcgaagatttactcagagcctgcgtattaaccttcgacagagattgggagtccagtttgccgtacgccgaattctcgtacaacaacagccatcaggccagcatcaagatgtcaccatttgaagcactgtacggaagaaaatgccagactcctctaatgtggtccaatgtgggggaaaggacgcttgaaggacccgactttgttaaagaggccgaagagaaagtcgctttaatccgcaggaggttactggaagctcagagccgacagaagagttacgcagacaataggtga

SEQ ID NO: 5173 - DNA, 4809 bp, Zea mays
  Clone ID: TF_ZM4489.C3.o4.fg
atggaagcctctctggccattaagtcatcctactgctcggaagtggaagggttcccacgcctcttgcgaagctgtgcgctccgcatgggaatccgtaagaagccggaatacgtctggacggaacatctcgagggcggaatgataagatgctctatggcagtctacctgggggagagccaaagctatcccaaccaacgttccttccaagtcacttttaccgaagcccatttcctagatgcttgccaaaatgtcgcccgaaaagccctccgacagctttgtcagaactacaacaaagtaatcattgaaaccccccttcgctactttccacccagcaacaagaatacccccacctggaggaaaagacttcaggccctatcaggaggagatcctattgagaatgatcccaccattgtctacatggcaggataccttcatacccttgataaccaatatgatgacctcgccctccactgcacctccctaacctcccaggtggaaagcctggagcagaaagtcagggaactttcagaagaaaaagcgtcccttcaagagaacctctcgctagctgaaggcgaagaggccaatacccgtgaagcttaccgcaccctcaaattggactacgacaagaaactgaagaagctcgcccccgcaagaaaaacccgcaagaagaccaaaagccaaggatgtcagactgagcagcaggaagagaaccctcccaggaaccagtccgaccccgaggacatgtccctggccagtcttgatgaccttctcttggaatttggtgacaccttagagaaagagttcgggggtaccctagcaactctcttcccatggcatatggcttcggatagaaccacgcctaccgcctccgggattggagcaagacttcctctaggagctgagggagaggctggcggagaagggggtgagacccacctccccgcacctccagaactaccactagacctagcccaaattctggccaatcaaaccagactcattgaagtcctcactcgaagcctggagaaccagcgcccaggcggtggaaggccccaggacaggatgggagaattcctgagactgaagccgcccacgttcgcggggtccagcaatcccctcgatgcagatgactggcttcgcacaatcaagaggaagttggaagccatcgcttgtcctgagaatcaacgtgttcagctggcagctcatcagctttcaggaatggctttagcatggtgggacactttcagtgaagccatcagagacgctacttgggcagaatttgaagcagccttccgtgagcaccacgtaccccaggggatagtgcaactcaaggaagatgagttccgggagctaacccaaggcggaagaacagtcagtgaatatgtgcacaagttcacagagttggcccgctacgcgcccgaggatgtcagcaccgaggccagaaagatggctcgttttctgagagggttaagacccgagcttaagaccatcctcgccagccaggacttccacagcttctctcacctttccaacaaagctattcaagtggagagagcaaaagaggaagaaaaagggcacatcaagagaaagttccaggtcctccgagcacaacagcaagaacgtcaccagagagctcgaccctttgggctcccacccaggggtccaagctttcataaacaatctgggccctctccatcacgcttcagtcagcagagtcagagctcccatcaggcaccttccgttgcaagcaaccagccgccagcaaacgcctgttggcactgcggggaccccagtcatttcaaaaacaactgcccccagttgaaggcaccagggccaacctactccaactcggtgaatggccccaaggttccatcagcacccacccccaaggcgctcccctccaacagccagcagagcaggactcagtaccagggcagggcccgggaatttgaagatgtatttccagaagagctgcccgggatgccaccagaaagagaagtagagttctatatagatctcattcccggcactgcacccattgcaaagagaccataccgcatggcccccactgagttggcagaattgaagcttcagatttcggaactacaacaaaaagggtacatccgtcccagttcgtctccctggggagcacccgttcttttcgttaccaaaaaggatgggagtatgaggatgtgtattgattatcgatccttgaacgaggttacaatcaagaataagtaccctcttcctcggatcgatgacctcttcgaccaactacaaggagccaaatacttctccaagatagacctcaggtcagggtatcaccaactgagaatcaaagaggcagacattcagaaaactgcattcgtcaccagatatgggcaatatgagttcacagtgatgccatttggactaaccaacgcacccgcctttttcatgaacctcatgaataaggtgtttatggaagaattggataagtttgtcgtggtcttcatcgacgacatcattatttattcaaagaatcgcaaggaccatgagcatcaccttcgaatcgtcctcggaagactcagagcgcatcaactttatgcgaagctcagcaagtgtgagttttggttggagaagatagctttcctagggcatatcttgactgcagaagggatagaagtggacccatccaaggtggaagctgtctcaaattggaagcaaccatccaatgtcagcgaagtacgaagctttctgggaatggcagggtattaccgccgttttatcaagggattctccagcatagcaaagcccttgaccgaacttctcaaaaaggacaataagtttgtgtggactcccaagcgtgaagaaagtttccaaatcatcaaggagaaacttacaactgcaccagtcctgactctgccagacatacaccaggatttcgtcatcttttgtgatgcttccaagcaaggcttagggtgtgtcttaatgcaaaatgagaaagtcattgcttatgcatctcgcttactcaagccgcacgaacagaactaccctacccacgatctggaattggcagccatagtgcacgccctaaaaatttggaggcattatctgattgggaacaaatgccacatcttcactgatcacaagagtctaaagtacattttcacgcagccggacctcaacctccgtcaaagaaggtggctcgaattgatcaaagattatgacctcgaaatccactaccaccccggaaaggccaacgtggtagctgacgccctcagcagaaaaccctttgggattaagggagcaaactttctggaagattggaagaaagaatctgctcagctaaatgcatgtctgggagacaacggtagcctggaagtcaagcccaatctagaagatctcatatgcaaggcccaacgcatggacgcagaaacaaccaagcttatggaaagagcacgaaaggagcaacttccggacctcagggcagataatcaaggaaccctctggttcagggatcgcctgtgcgtaccagtgggagaaacacgagaaaccctgctcaacgaagcccacaactcagcttactctatccacccagggaccaccaagatgtacttagaccttaaggccagatattggtggaaagggatgaagagggaaatagcacagtatgtggcccgatgtgacacctgccagcgaacaaaggccgaacatcagaagcctgcaggcctacttcaacccctcccaatacccgaatggaagtgggaagaaataggcatggatttcgtaaccggactacccagatcacaaagaggaaatgattccatatgggtaatcatcgatcgtctcaccaaggtggcccatttcattccagtaaagaccacttttggaggagcagcccttgcccgattataccttaaagagatagtcaggctacatggcattccacggaagatagtatcagatcgaggaacgcagttcacttcaaaattttggaagggccttcagcaagcaatgggcaccaagttagatttcagcactgcttatcacccccagtcagatggtcaaacagaaagagtcaacaaagtcctcgaagatttactcagggcctgcgtgttagccttcgacagagattgggagtctagtttaccgtacgccgaattctcatacaacaacagccatcaagccagcatcaaaatgtcaccattcgaagcactgtatggaagaaaatgccagactcccctaatgtggtccaatgtaggggagaggacactagaaggacccgactttgttaaagaagccgaagaaaaagttgctttgatccgcagaaggttacttgaagctcagagtcgacagaagagttacgcagacaataggcgaagggaactcagatttgaggaaggagattttgtttatctcaaggtttccccaatgcgtggtgtcaagaggtttcagatgaaaggaaagctagcaccccgtttcgtcggtccttaccctatcatttcccgaataggacccgtggcataccgtcttgagctaccagaatccatgtcagatattcacaatgtgttccatgtgtcccaactccgcaaatgcctaaaagtaccagaaacccgtatcaaggcagaagcaattcagattcaaaaagatctccagtaccgggaaaagccagtgaagattctcgactcagcagtcagaaggacccgcaatttagaagtgaagctctgtaaggttcagtggagcagagatggggaggaggaagccacctgggagagtgaggacttcttgaggagggaatacccttaccttttcccaaatacagtctaa

SEQ ID NO: 5174 - DNA, 4443 bp, Zea mays
  Clone ID: TF_ZM4715.C4.o1.fg
atggaaaacccctggttgattaggatctcctattgctcagaggaggaaggcttccctcaccttcttcggagttgcgcgctacgcttggggatccgcaagaagcccgaatatgtctggaaggagtaccgtgaaaatggaatagaaaagtgctctatggcggtctacttaggagagagccagaactacccaaaccaccctcccttccaaattaccttcatcgggcacagtttcccagacacttgccagagcgttgctcgaaaagccctcaaacaactgtgccaaaactatagccgagagatctctgagacccccctccgatatttcccacccagcaacaaaaacacccccacctggaggaaaaggctccagtctctgtcaggaggagatcccacagaagatgaccccactatcgtatacatggccggatacctccacaccctcgacaaccactacgacgagctctcctcccactgcacccacctaaactcccgagtggaaagcctagagcagcaagtcaaagagcttaagcaagaaaaggcatccctccaggagagtctcaacatagcagaaggcgaggaagccaacactcgtgaggcctatcggaccttgaaaatggactatgacaagaagctaaagaaactcgcccccaagaagaaaatccagaagaagaccaccaaccaaggatgccagacagagaagaagaagaagaaggcccctctagccctacctccccccagaatagatgattggtctgacgacgaggatgtatccctagcaagcctcgatgatcttctcaaggcatttggggacaccctagataaggaattcgctacctggtgggacaccttcaacgtcaccatcagagatgctacctgggcggaatttgaagcagctttccgggagcaccatgtgccccaaggacttgtacaacttaaggaggacgagttccgagaattgactcaagacggaagatctgtcagcgaatatgtgcacaagttcacagaattagcccgctacgcgccagatgatgtcagtaccgagagcaagaagatggcccgtttcctgaaaggactcaggcctgaactcaagacaattctggctagccaagacttcctcaacttctctcacctttccaacaaggccatgcaagttgaaagggcaaaggaggaagaaaaagggcatcttaaaaggaagttccaggttctccgggcacagcagcaggaccggcaccagaagactcgatcatttgggtttccacccaaggggccaaacttcagtaggccagctggacccactccgtcgcgattcagccagcagagtcagagctcttttcattccccctcagtggcaagcaaccaacccccggcaaatgcatgttggcactgtggtgatcccagtcacttcaagaacaactgtccacagctgaaggtaccagtacccgcctactccaactcggtgaatggccccaagaatacctcgacatccacccccaaggcgccctccgccgtcagccagcagaacaaggctccgtaccaaggaagggcacgtgtaaatcacgtcgatgcccaggaagctcagcaggctccgggagtagtactcgaagaattaccaggaatgccaccagaaagagaagtggagttctacatagatctgatccctggaacagcacccatcgcaaaaagaccataccgcatggctccaaccgagttagcagaactgaagcttcaaatcgtagatcttcagcaaaaagggtacattcgtcccagctcatcaccttggggagcactagtcctgttcgtctctaagaaggatggaagcatgagaatgtgtattgattaccgatcgttaaatgaagttaccatcaagaacaagaatccacttcctcggattgacgacctcttcgatcagcttcaaggagccaagtatttctccaagatagacctaaggtctggttaccaccaattgaggatcaaggaagcagacatccaaaagacggcatttgtcacccgatacgggcaatatgaattcacagtgatgtcgttcggactgacaaacgcacccacctttttcatgaacctcatgaataaagtgtttatggaagagctagataagtttgtcgtagtcttcatcgacgacatccttatctactccaagagccgcgaagaccataagcgtcaccttcggatcgtccttggaaaactcagagcacaccaactttatgctaaactcagtaaatgtgaattctggttggaaaagatagccttccttgggcatatcttaaccgcagaagggatagaagtggacccttccaaggtggaagcagtatcaaaatggaggcagccaaccaacgtcagtgaagttcgaagcttcctaggaatggcagggtattaccgccgcttcatcaaaggattctccagcatagcaagaccgatgatagaacttctcaagaaagaccataaatttgcgtggacccaaaaatgtgaagggagtttccaggtcataaaggagaaacttacaacagcactcgttctatcactgccagatattcatcaagattttgtcgtcttctgtgatgcctcgaggcaaggcttagggtgcgtgctaatgcaaaacgagaaggtcattgcttacgcatcacgcctactcaagtcgcacgaacataattaccccacccatgatttggaattagcagccatagtgcatgccttgaagatatggaggcattacctaatcggaaacaaatgccacattttcaccgatcacaagagtctgaggtatatattcactcaaccagatctcaacctccgtcagcgaagatggttagagctgatcaaggattatgacctagaaattcactaccaccccgggaaggccaacgtggtagccgacgccctcagccgaaaaccattcggaataaaaggaaccaactttctagaagattggaagaaagaatcagcacaactaaatgcatgtctgggaaacaacgacagtctcgaagtcaaaccaatgctagaagacctcatctgcaaagctcaacgtctagactcagagacagcaaggcttgtggagaaagcccgcaaggaacaactcccggacctcaggacagatgaccaaggagtcctttggttcaaacaccgtctgtgtgtaccaaaaggggaggcccgagaagtcctactcaaggaagctcacgactcggcctactccatccacccaggaactaccaagatgtacctggacctcaaaaccagatactggtggaaagggatgaagaacgaaatagctcagtatgtggcccgatgtgacatctgccaacggacgaaggccgaacaccaaaaacctgcaggcctattacaaccccttctgatacctgaatggaagtgggaagaaataggcatggacttcgtaaccggactgccccggacgcaaaaagggaatgactccatctgggtaataatagatcgcctcaccaaggtagcccatttcatcccagtgaaaactacctttggaggagccacccttgcccggatttatctcaaggagatagtcagaccccatggcatcccaaggaagatagtgtcagacaggggaacccagttcacatccaaattctggacaagccttcagaaagctatgggcaccaaactagatttcagtaccgcttatcaccctcagacagatgggcagacagagagagtcaacaaagtccttgaagatctgttaagagcatgtgtgttagcttttgatagaagttgggaatccagtctaccctacgcagagttctcgtacaacaatagctatcaggccagcatcaagatgtcgccattcgaagcactgtatggacggaaatgccagacccctctcatgtggtccaacgtggggggaaaagcactggaaggacctgcctttgtcaaagaggcggaagagaaagttgcactgatccgcagaaggttacttgaagctcagagtcggcagaagagttacacagacaacaggcggagggaactccgatttgaggaaggagacttcgtctacctcaaggtttctccaatgcatggtgtcaggaggttccaagtaaaagggaagctagccccacgtttcgtaggtccctatcccatcattggcagggtaggacccgcagcataccgcctggaactaccagaatccatgtccgacatccacaatgtgtttcacgtatcccagctccgcaaatgcctgcaagcaccagaaagtcacctcgaagaagagacagtgcagattcagaaagaccttcagtaccgtgaaaaaccagtgaagattcttgattcagcagtcagaaagacccgcacctcagaagtaaagctctgtaaagttcagtggagcagagaaggagaagaggaagctacctgggagagtgaggacttcttgaggagggaatacccttatcttttcccaaatccagtctaa

SEQ ID NO: 5175 - DNA, 2793 bp, Zea mays
  Clone ID: TF_ZM4912.C1.o17.fg
atgggggacttcctaagactcaaacctcccacgttcgccggatcaagcaaccccctcgatgcagacgattggatgcacacgatcaaaaggaaactggaagccattggttgcccagaaaatcagcgtgttcaactggctgcccaccaactttctgggatggccttagcctggtgggacaccttcaacgtcaccatcagggatgctacctgggcggagtttgaagcagctttccgggagcaccatgtgccccaaggactggtacagcttaaggaggacaagttccgagaattgactcaagacggaaggtctgtcagcaattatgtgcacaagttcacaaagttagcccgctacgcgccagatgatgtcaatactgagagcaaaaagatggcccgtttcctgaagggactcaggccagaactcaaaacaattctggctagccaagacttcctcaacttctctcacctttccaacaaggccatgcaagttgaaagagctaaggaggaagaaaaaggacatctcaaaaggaagttccaggttctccgggcacagcagcaggaccgtcaccagaagactcgatcatttgggtttccacccaaggggcccaacttcggtagaccagctggacccactccatcacgattcagccagcagagtcagagctctttccattcttccttagtggcaagcaaccaacctctggcgaatgcatgttggcactgcggtgatccaagtcatttcaaaaacaactgtccgcagctgaagccaccaggaccctcctactccaactcggtgaatggccccaagaatacatcggcaaccgcccccaaggcgccctccgccgtcagccagcagaacaagactccgtaccaagggagggcacgtgtaaatcacgtcgatgcccaggaagctcagcaggctccgggagtagtactcggtgagtttcttgttgaatttactcccgctaccgtacttttcgattctggagcatcccactccttcatagccactagctttgtagaaaaatatggcattccctctactcctctagagattcctttggtcacccgaaccccagggtccgacctcctatgccagctaaaatgctcccaagtcagaatccttttaagtggggtagtttacctggcagacttaaccgtcttgccatccaaaggaattgatgtaatcctagggatagattggctaactaaacacaaaagcattatcagctgcgcagacaagacagtcctcctcaccgaccagcagggaaagtcagtctcttgccaggcacagccacccgccagtgacccaatgatgttctatctaacaacggaaagtatatcagtagtagaggaattcatggacgtatttccagaagaattgctaggaatgccaccagaaagagaagtggagttctacatagatctgattcctggaacagcacccatcgcgaagagaccataccgcatggctcctaccgagttagcagaactgaagcttcaaatctcagatcttcagcaaaaagggtacattcgtcccagctcatcaccttggggagcaccagtcttgttcgtctccaagaaggatggaagcatgagaatgtgtattgattaccgatcgttaaatgaagttaccatcaagaacaagtacccacttcctcggattgacgatctcttcgatcagcttcaaggagccaagtacttctccaagatagacctaaggtctggttaccaccaattgaggatcaaggaggcagacatccaaaagactgcattcgtcacccggtacgagcaatatgaattcacggtaatgtcgttcggactgacaaacgcacccgcctttttcatgaacctcatgaataaagtgtttatggaagagctagataagtttgtcgtagtcttcatcgacgacatccttatttactccaggaaccgtgaagaccataagcgtcaccttcggatcgtccttggaaaactcagagcacaccaactttatgctaaactcagtaaatatcacctcaccaaggtagcccatttcattcccgtgaaagctacctttggaggagccacccttgcccggatttacctcaaggagatagtcagactccatggcatcccaaggaagatagtgtcagacagaggaacccagttcacatccaaattctggacaagccttcagaaagccatgggcaccaagctagatttcagtaccgcttaccaccctcagacggatgggcagacagaaagggtcaacaaagtccttgaagatctattgagagcatacccctctcatgtggtccaacgtgggggaaaagcactagagggacctgcctttgtcaaagaggcggaagagaaagttgcactgatccgcagaaggttgcttgaagctcaaagtcggcagaagagttacgcagacaacaggcggagggaactccgatttgaggaaggagacttcgtctacctcaaggtttctccaatgcgtggtgtcaggaggttccaagtcaaagggaagctagccccacgttttgtaggtccctatcccatcattggcaagcttcgcaaatgcctgcaagcaccagaaagtcacctcgaagaagagacagtgcagattcagaaagatcttcaatatcgtgagaaaccagtgaagattcttgattcagcagtcagaaagacccgcacctcagaagtaaagctctgtaaagttcaatggagcagagaaggagaagaggaagccacctgggagagtgaggacttcttgaggaaggaatacccttatcttttcccaaatccagtctaa

SEQ ID NO: 5176 - DNA, 3786 bp, Zea mays
  Clone ID: TF_ZM4948.C2.o9.fg
atggccttagcctggtgggacaccttcaacgtcaccatcagagatgctacctgggcggaatttgaagcagctttccgggagcaccatgtgccccaaggattggtacagcttaaggaggacaagttccgagaattgactcaagacggaagatctgtcagcgaatatgtgcacaagttcacggagttagcccgctacgcgccagatgatgttaatactgagagcaagaagatggcccgtttcctcaagggactcaggccagaactcaagacgattctggctagccaagacttcctcaacttctctcacctttccaacaaggccgtgcaagttgaaagagctaaggaggaagaaaaaggacacctcaaaaggaagttccaggttctccgggcacaacagcaggaccggcaccagaagactcgatcatttgggtttccacccaaggggcccaacttcagtaggccagttggacccactccgtcacgattcagccagcagagtcagagctctttccattctccctcagtggcaagcaaccaaccaccggcaaatgcatgttggcactgcggtgatccaagtcacttcaagaacaactgtccgcagctgaagccacagggacccgcctactccaactcggtgaatggccccaagaatacctcggcacccgcccccaaggcgctctccgccgtcagccagcagaacaagactccgtaccaaggaagggcacgtgtaaatcacgtcgatgcccaggaagctcagcaggctccgggagtagtactcggtgagttccttgttgaatttactcccgctaccgtacttttcgattctggagcatcccactctttcatagccactagctttgtggaaaaatatggcattccctctactcccctagagattcctttggtcacccgaaccccggggtccgacctcttatgccagctaaaatgttcccaagttagaatccttttaagtggggtagtattcctggcagacttaaccgtcttgccatccaaggtaattgatgtaatcctagggatggattggctaactaaacacaaaggcatcatcagttgcacagacaagacagtcctcctcaccgaccagcagggaaagtcagtctcttgccaggcacagccacccgctagtgacccaatgatgttcagtataacaacggaaaatatatcagtagtagaagaattcatggatgtgtttcccgaagaattgccaggaatgccaccagaaagagaagtggagttctacatagatctgattcctggaacagcacccatcgcaaagagaccataccgcatggctccaactgagttagcagaactgaagcttcaaatctcagatcttcagcaaaaagggtacattcgtcccagctcatcaccttggggagcaccagtcctgtttgtctccaagaaggatggaagtatgagaatgtgtattgattaccgatcgttaaatgaagttaccatcaagaacaagtacccacttccacggattgacgacctcttcgatcagcttcaaggagccaagtacttctccaagatagacctaaggtctggttaccaccaattgaggatcaaggaagcggacattcaaaagactgcatttgtcacccggtacgggcaatatgaattcacagtaatgccgttcggacttacaaacgcacccgcctttttcatgaacctcatgaataaagtgtttatggatgagctagataagtttgtcgtagtcttcatcgacgacatccttatttactccaagaaccgcgaagaccataagcgtcacctttggatcgtccttgggaaactcagagcacaccaactttatgccaaactcagtaaatgtgaattctggttggaaaagatagccttccttgggcatatcttaaccgcagaaggaatagaagtggacccttccaaagtagaagcagtgtcaaaatggaggcaaccaaccaacgttagtgaagttcgaagcttcctaggaatggcagggtattaccgccgcttcatcaaaggattctccagcatcgcaaggccaatgacagaacttctcaagaaagaccataaatttgtgtggactccaaaatgtgaagaaagtttccaaatcataaaagagaaactcacaacggcacccgttctatcactgccagatattcatcaagattttgtcgtcttctgtgatgcctcgaggcaaggcttagggtgtgtgctaatgcagaacgagaaagtcattgcttacgcatcacgcctactcaagccgcacgagcagaattaccccacccatgatctggaattggcagccatagtgcatgccttaaagatatggaggcattacctaatcggaaacaaatgccatattttcaccgatcacaagagtctgaggtacatattcactcaacctgatctcaacctccgtcagcgaagatggttagaactgatcaaggattatgacctcgaaattcactatcaccctgggaagtccaatgtggtagctgacgctctcagtcgaaaaccattcggaataaaagggaccaaccttctagaagactggaagggagaatcagcacaactaaatgcatgtctgggaaacaacgacagtctcgaagtcaagccaacgctagaagacctcatctgcaaagctcaacatctagacccagagacggcaaggcttgtggggaaagcccgcaaggaacaactcccggacctcaggacagatgaccaaggagtcctttggttcaaacaccgtctgtgtgtaccaaaaggggaggcccgagagaaagggaatgactccatctgggtaataatagatcgcctcaccaaggtagcccatttcattccagtaaaaactacctttggaggagccacccttgcccgaatttacctcaaggagatagtcagactccatggcatcccaaggaagatagtatcagacagaggaacccagttcacatccaaattctggacaagccttcagaaagctatgggcaccaagctagatttcagtaccgcttatcaccctcagacagatgggcagacagagagagtcaacaaagtccttgaagatctcttaagagcatgtgtgttagcttttgatagaagttgggagtccagtctaccctacgcagagttctcctacaacaatagctatcagtccagcatcaagatgtcaccattcgaagcactgtatggacgaaaatgccagacccctctcatgtggtccaacgtgggggaaaaagcactagaaggacctgcctttgtcaaggaggcagaggagaaagttgcactgatccgcagaaggttgcttgaagctcagagtcgacagaagagttacgcagacaacaggcggagggaactccgatttgaggaaggagacttcgtctaccttaaggtttctccaatgcgtggtgtcaggaggttccaagtcaaagggaagctagccccacgttttgtaggtccctatcccatcattggcaaggtaggacccgccgcataccgcctggaactaccagaatccatgtccgacatccacaatgtgttccacgtgtcccagctccgcaaatgcctgcaagcatcagaaagtcacctcgaagaagagacagtgcagattcagaaagaccttcaatatcgtgagaaaccagtgaagattcttgactcggcagtcagaaagacctgcacctcggaagtaaagctctgtaaagttcagtggggcagagaaggagaagaggaagccacctgggagagtgaggacttcttgaggagggaatatgagagcacctag

SEQ ID NO: 5177 - DNA, 2826 bp, Zea mays
  Clone ID: TF_ZM5108.C7.o8.fg
atgtcgcccgaaaagccctccgacagctatgtcagaactacaacaaacaacaagaatatccccacctggaggaaaagacttcaggccctatcaggaggagatcctattgagaatgatcccaccattgtctacatggctggataccttcatacccttgataaccaatatgatgacctcgccctccactgcacctccctaacctcccgggtggaaagcctggagcagaaagtcagggaactttcagaagaaaaagcgtccctccaagagagcctctcgttagctgaaggcgaagagaccaacacccgtgaagcttaccgcaccctcaaaatggactacgacaaggtactgaagaagctcgcccccgcaaggaaaatccgcaagaagaccagaagccaaggatgccagactgagcagcaggaagagaaccctcccagaaaccagtccgacaccgaggacatgtccctggccagccttgatgaccttctcaaggaatttggggacactttagagaaagagttcggggcgactctcttcccatggcagatggcttcggatagaaccacgcctaccgcctctgggattggagcaagacttcctctaggagctgagggagaggctggcggagaagggggtgagacccacctccccgcacctccagaactaccactagacctagcccaaattctggccaatcaaaccagactcattgaagtcctcactcgaagtctggagaaccagcgcccaggcggtgaaaggccccaggacaggatgggagaattcctgagactgaagccgcccacgttcgcggggtccagcaatcccctcgatgcagatgactggcttcgcacaatcaagaggaagttggaagccatcgcttgtcctgagaatcagcgtattcagctggcagctcatcatctttcaggaatggctttagcatggtgggacactttcagtgaagccatcagagacgccacatgggcagaatttgaagcagccttccgtgagcaccacgtaccccaggggatagttcaactcaaggaggatgagttccgagagctaactcaaggcgggaggacaatcagtgagtatgtgcacaagttcacagagctggcccgctacgctcccgaggatgtcagcaccgaggccagaaagatggctcgttttctgagagggttaagacccgagcttaagaccatcctcgccagccaggacttccacagcttctctcacctttccaacaaagctattcaagtggaaagagcaaaagaggaagaaaaagggcacatcaagagaaagttccaggtcctccgagcacaacagcaagaacgtcaccagagagctcgaccctttgggctcccacccagaggtccaagcttccataaacaatctggaccctctccatcgcgctacagtcagcagagtcagagctcccatcaggcaccctccgttgcaagcaaccagccgccagcaaacgcctgttggcactgcggggaccccagtcacttcaagaacaactgcccccagttgaaggcaccaggaccaacctactccaactcggtgaatggccccaagattccatcagcacctacccccaaggcgtttccttccagcagccagcagagcagggctcagtaccagggcagggcccgggtcaaccacgtcgacgctcaggaagcccagcaagccccgggagtagtgctcggtgagttcctcgttgaatttactcccgcttctgtgctttttgattcaggagcatcccattcatttatagccgctaagtttgtggaaaagcatggcataccctctacacctctagctatccctttggtcacccgaaccccgggatcagacctcctgtgcaaactcaggtgttcccaggtcagaattcttttaagtggggtagtgttcctggcagacttaaccatcttgccatcccaaggaattgatgtaatcctaggaatggattggctagctaagcacaagggtgttatcagctgcgcaagcaagactgttcttctcatagatcaccaaggaaaggcagtttcctgtcaagcccaaccgcccgcaaatgacccaatgatatttaatctggcagtagaaagcatgtctgtaatcaaggaatttgaagatgtatttccagaagagttgcccgggatgccaccagaaagagaaggcctccagcaagcaatgggcaccaagctagatttcagcactgcttatcacccccagtcagatggggaaagaacactagaaggacccgactttgttaaagaagccgaagaaaaagttgctttgatccgcagaaggttacttgaagctcagagtcgacagaagagttacgcagacaataggcaaagggaactcagatttgaggaaggagattttgtttatctcaaggtttccccaatgcgtggtgtcaaaaggttccagatgaaaggaaagctagcaccccgtttcgtcggtccttaccctgtcatttcccgaataggacccgtggcataccgtcttgagctaccagaatccatgtcagatattcacaatgtgttccatgtgtctcaactccgcaaatgcctagaagtaccagaaacccgtatcgaggcagaagcaattcagattcaaaaagatctccagtaccgggaaaagccagaaaagattctcgactcagcagtcagaaggacccgcaattcagaggtgaagctctgtaaggttcagtggagcagagatggagaagaggaagccacctgggaaagtgaggactctctgaggaaggaatacccttaccttttctcaagccccgtcagaatctcgagggcgagattcctttaa

SEQ ID NO: 5178 - DNA, 1656 bp, Zea mays
  Clone ID: TF_ZmC10872_15
atgatcaccggcgacaagcccgaagcttcgggaaggaagaacaatgaacggactatgtcaaaggaggtcggcgacaagcacaagggtgataagaagaaaaagaaaaggaagaaatcggcttcctccatcaagtcacaaaggaagggtgataagaagaaaaagaaaatgaagaaagtggtctactacgagaccgactcttcatcgccttccacatccagcgtcgagtctacaactttgaaacgccaagagcgtaagaagtataaagaggagccacaagcgatgtacaaccggctcaaagcaatggtcaaccaagtgcgcaacctcgggagtacaaaatgggatgaccatgaaatgatcaagatgtcccccgaggagattattagcaagtttgtgagctttgaacttatgatcaaaaactccaaacacattgtcaacttggatcaatgtgccacctctacacccgaggtgcaacccgttgcattcaaagtaatggaagagaagaaagaagagtctacaccaagtagacttccaattgacgtctccaagcttgacaacgaggagatggctcttatcattaagggctttcgacaaatcctcaaacaaaggaaggggaaggactacaagccatgttccaagagggtgtgttataggtgtggtaagtctggtcactatattgcaaaatgtccatatacaagtgacagtgacagggacgacgacaagaaagggaagaagaagatggagaataagagatattataagagaaagggtggagaggcgcatatggggcgggaatgggactctgatgagagctccaccaactcctcctccgacaaggacgctgccaacatcgccatcaacaagggtcttcttttccccaacgtcggccacaaatgcctaatggctaaggatggcaaaagaagaagcgggtgcacaaaccacatgaaagaggagaaaagaatgttctcctcatatgagaaaaatgaagatccccaaagagctatcacattcggggatggaaatcaaggtttggtcaaagattccttagattacaacttgctttcagtttctcaattatgcaaaatgggttacagctgtctctttactgatgttggtgttactgtctttagaaaaaataatgactcaatagcttttaagggagtgttagatggtcagctatacttagttgattttgatgataacaatgttgaactagacacttgcttaattgctaagactaacatgggttggctctggcatcgccgacttgcccatgttgggatgaagaatcttcacaaacttctaaagggagaacacattttaggactaacgaatgaaaaatctcaaacccaagataccttaaagagattcttgagatgggctcaaaatgagttcggattgaggatcaagaagattagaagcaacaatggaacggagttcaagaactctcaaattgaaggatttcttgaggatgaaggcatcaagcatgagttctcttctccctacacacctcaacaaaatggtgtagtgaagaggaagaatagaactctattggacatggcaaggaccatgcttgatgagtacaagacactggatcggttttgggcggaggcgattaacacagcttgctactccatcaaccgactctatcttcactga

SEQ ID NO: 5179 - DNA, 5151 bp, Zea mays
  Clone ID: TF_ZmC36592_123
tcagacggggctcgagaaaaggtaagggtattccttcctcagagagtcctcactttcccaggtggcttcctcttccccatctctgctccactgaaccttacagagcttcacttctgaattgcgggttcttctgactgctgagtcgagaatcttcactggcttttcccggtactggagatctttttgaatctgaattgtttctgcctcgatacgggtttctggtacttttagacatttgcggagttgagacacatggaacacactgtgaatatctgacatggatcctggtagctcaagacggtatgccacaggtcctattcgggaaatgacagggtaaggaccgacgaaacggggtgctagctttcctttcatctggaaccttctgcggatcaaagcaactttttcttcggcttctttaacaaagtcgggtccttctagtgttctttcccctacattggaccacattaggggagtctggcattttattccatatagtgcttcgaatggtgacattttgatgctggcctgatggctgttgttgtatgagaattcggcgtacggtaaactagactcccaatctctgtcgaaagccaatacgcaggctctgagtaaatcttcaaggaccttgttgactctttctgtttgaccatctaactgggggtgataagcagtgctgaaatctagcttggtgcccattgcttgctgaaggcccttccaaaattttgaagtgaactgcgttcctctatctgatactatctttcgtgggatgccatgtagcctgactatctctttaaggtataatcgggcaagggctgctcctccaaaagtggtctttactggaatgaaatgggccaccttggtgagacgatcgatgattacccatatggagtcatttcctctttgtgatctgggcagtccggtgacgaaatccatgcctatttcttcccacttccattcgggtattgggaggggttgaagcaggcctgcaggcttctgatgttcggcctttgttcgctggcaggtgtcacatcgggccacatactgtgctatttccctcttcatccctttccaccaatatctggtcttaaggtctaagtacatcttggtggtccctgggtggatagagtaagctgagttgtgggcttcatcgagcagggtttctcgtgtttctcccattggcacgcacaggcgatccttgaaccagagggctccttgattatctgtcctgaggtccggaagttgctcctttcgtgctctttctatcagcttggttgtttctgcgtccaggcgttgggccttgcatatgagatcttctagatttggcttgacttccaggctaccgttgtctcccagacatgcatttagctgagctgattctttcttccaatcttccaaaaagtttgctcctttaaccccgaagggttttctgctgagggcgtctgctaccacgttggcctttccggggtggtagtggatttcgaggtcataatctttgatcaattcgagccaccttctttgacggaggttgaggtccggttgcgtgaagatgtactttagactcttgtgatcagtgaagatgtggcatttgtttccaatcagataatgcctccaaatttttagggcgtgcactatggctgccaattccagatcgtgggtgggatagttctgctcgtgcggcttgagcaaacgggatgcataagcaatgactttctcattttgcattaagacacaccctaagccttgcttggaagcatcacaaaagatgacgaaatcctggtgtatgtctggtagggtcaggactggtgcagttgtaagtttctccttgatgatttggaaactttcttcacatttgggagtccatacaaacttattgtcctttttgagaagttccgtcatgggctttgctatgctggagaatcccttgataaagcggcgataatactctgccattcccagaaagcttcgaacttcactgacgttggatggttgcttccaatttgaaacagcttctaccttagatgggtccacttctatcccttcagcagtcaagatatgccctaggaaggctatcttctctaaccagaactcacacttgctgatcttagcataaagttgatgtgccctgagtcttccgaggacggttcgaaggtgctgctcatggtccttgcgactcttggaatagatgaggatgtcgtcgataaaaactacgacaaacttatccaattcttccataaataccttattcatgaggttcatgaaaaaggcgggtgcgttggttagtccaaatggcatcactgtgaattcatattgcccgtatctggtgacgaatgcagttttctgaatgtctgcttccttaatcctgagttggtgataccctgaccggaggtctatcttggagaagtacttggctccttgcagttggtcgaataggtcatcgatccggggaagagggtacttattcttgattgtaacctcgttcaaggatcgataatcaatacacatcctcatactcccatcctttttggtaacgaaaagaacgggtgctccccagggagacgaactgggacggatgtaccctttttgttgtagttccgaaatctgaagcttcaattctgccaactcagtgggggccatgcggtatggtctctttgcgatgggtgcggtgccgggaatgagatctatatagaactctacttctctttccggtggcatcccgggcaactcttctgggaatacatcttcaaactccttgattacagacatgctttctactgccagattaaatatcattggatcatttgcgggcggttgggcttgacaggaaactgcctttccttggtgatctatgagaagaacagtcttgcttgcgcagctgataacacccttgtgcctagctagccaatccattcctagaattacatcaattccttgggatggcaagatggttaagtctgccaggaacactaccccacttaaaagaattctgacttgggaacacctgagtttgcacaggaggtctgatcccggggttcgggtgaccaaggggatagctagaggtgtagagggtatgccatgcttttccacaaacttagcggctataaatgaatgggatgctcctgaatcaaaaagcacagaagcgggagtaaattcaactaggaactcaccgagcactactcccggggcttgctgggcttcctgagcgtcgacgtggttgacccgggccctgccctggtactgagccctgctctgctggctgctggaaggaaacgccttgggggtgggtgctgatggaaccttggggacattcaccgagttggagtaggttggtcctggtgccttcaactgggggcagttgttcttgaagtgattggggtccccgcagtgccaacaggcgtttgctagcggctggttgcttgcaacggagggtgcctgatgggagctctgactctgttgactgtagcgcgatggagagggtctagattgtttatggaagcttggacccctgggtgggagcccaaagggtcgagctctctggtgacgttcttgctgttgtgctcggaggacctggaactttctcttgatgtgccccttttcttcctcttttgctctttccacttgaatagctttgttggaaaggtgagagaagctgtgaaagtcctggctggcgaggatggtcttaagctcgggtcttaaccctctcagaaaacgagccatctttctggcctcggtgctgacatcctcgggcgcgtagcgggccaactctgtgaacttgtgcacatattcactgactgttcttccgccttgggttagctcccggaactcatcctccttgagttgaactatcccctggggtacgtggtgctcacggaaggctgcttcaaattctgcccatgtagcgtctctgatggcttcactgaaagtgtcccaccatgctaaagccattcctgaaagctgatgagctgccagctgaatacgttgattctcaggacaagcgatggcgtccaacttcctcttgattgtgcgaagccagtcatctgcatcgaggggattactggatcccgcgaacgtgggtggcttcagtctcaggaattctcccatcctgtcctgggcccttccaccgcctgggcgctggttctccagacttcgagtgaggacttcaatgagtctggtttgattggccagaatttgggctaggtctagtggtagttctggaggtgcggggaggtgggtctcacccccttctccgccagcctctccctcagctcctagaggaagtcttgctccaatcccggaggcggtaggcgtggttctatccgaagccatctgccatgggaagagagtcgccccgaactctttctctaaagtgtccccaaattccttaagaaggtcatcaaggctggccagggacatgtcctcggtgtcggactggttcctgggagggttttcttcctgccgctcagtctgacatccttggctcttggtcttcttacggattttccttgcgggggcgagcttcttcagtaccttgtcgtagtccgttttgagggtgcggtaggcttcacgggtgttggcctcttcgccttcagctaacgagaggctctcttggagggacgccttttcttctgaaagttccctgactttctgctccaggctttccacctgggaggttagggaggtgcagtggagggcgaggtcatcatattggttatcaagggtatgaaggtatccagccatgtagacaatggtgggatcattctcaataggatctcctcctgatagggcctgaagtcttttcctccaggtgggggtattcttgttgctgggtggaaagtagcgaaggggggtttcgatgattactttgttgtagttctggcatagctgtcggagggcttttcgggcgacattttggcaagcatctaggaaatggactccggtaaaagtgacttggaaggaacgttggttgggatagctttggctttcccccaggtagactgccatagagcatcttatcattccaccctcgaaatgttccgtccagacgtattccggcttcttgcggattcccatgcggagcgcacagcttcgcaagaggcgggggaacccttccacttctgagcagtaggatgacttaatggccagagagtcttccat

SEQ ID NO: 5180 - DNA, 4329 bp, Zea mays
  Clone ID: TF_ZM4158.C1.o1.fg
atggcttcggatagaaccacgcctaccgcctccgggattggagcaagacttcccctaggagctgagggagaggctggcggagaagggggtgagacccacctccccgcacctccagaactaccactagacctagcccaaattctggccaatcaaaccagactcattgaagtcctcactcgaagtctggagaaccagcgcccaggcggtggaaggccccaggacaggatgggagaattcctgagactgaagccgcccacgttcgcggggtccagcaatcccctcgatgcagatgactggcttcgcacgatcaagaggaagttggaagccatcgcttgccctgagaatcaacgtgtgcagctggcagctcatcagctttcaggaatggctttagcatggtgggacactttcagtgaagccatcagagacgctacatgggcagaatttgaagcagccttccgtgagcaccacgtaccccaggggatagttcaactcaaggaggatgagttccgggagctaacccaaggcggaagaacagtcagtgaatatgtgcacaagttcacagagttggcccgctacgcgcccgaggatgtcagcaccgaggccagaaagatggctcgtttcctgagggggttaagacccgagcttaagaccatcctcgccagccaagacttccacagcttctctcacctttccaacaaagctattcaagtggagagagcaaaagaggaagaaaaagggcacatcaagagaaagttccagtcagcagagtcagagctcccatcaggcaccctccgttgcaagcaaccagccgccagcaaatgcctgttggcactgcggggaccccaatcacttcaagaacaactgcccccagttgaaggcaccaggaccaacttacaccaactcggtgaatggccccaaggttccatccgcacccaccccaaggcgtttccttccagcagccagcagagcagggctcagtaccagggcagggcccgggtcaaccacgtcgacgctcaggaagcccagcaagccccgggagtagtgctcggtgagttcctcgttgaatttactcccgcttctgtgctttttgattcgggagcatcccattcatttatagccgctaagtttgtggaagagcatggcataccctctacacctctagctatccctttggtcacccgaaccccgggatcagacctcctatgcaagctcaggtgttcccaggtcagaattcttttaagtggggtagtgttcctggcagacttaaccatcttgccatcccaaggaattgatgtaattctaggaatggattggctagctaggcacaagggtgttatcagctgcgcaagcaagactgttcttctcatagatcaccaaggaaaggcagtttcctgtcaagcccaaccgcccgcaaatgatccaatgatatttaatctggcagtagaaagcatgtctgtaatcaaggagtttgaagatgtattcccagaagagttgcccgggatgccaccagaaagagaagtagagttctatatagatctcattcccggcaccgcacccatcgcaaagagaccataccgcatggcccccactgagttggcagaattgaagcttcagatttcagaactacaacaaaaagggtacatccgtcccagttcatctccctggggagcacccgttcttttcgttaccaaaaaggatgggagtatgaggatgtgtattgattatcggtccttgaacgaggttacaatcaagaataagtaccctcttccccggatcgatgacctattcgaccaactgcaaggagccaagtacttttccaagatagatctcaggtcaggatatcaccaactcaggataaaggaagcagacattcagaaaactgcattcgtcaccagatacgggcaatatgaattcacagtaatgccttttgggcttaccaacgcacccgcctttttcatgaacctcatgaataaggtatttatggaagaattggataagttcgtcgtggtttttatcgacgacatcctcatctattccaagagtcgcaaggaccatgagcagcaccttcgaaccgtcctcggaagactcagagcacatcaactttatgctaagctcagcaaatgtgagttctggttagaaaagatagccttcctagggcatatcttgactgctgaagggatagaagtggacccgtctaaggtagaagctgtttcaaactggaagcaaccatccaatgtcagtgaagttcgaagctttctgggaatggcagggtattatcgccgcttcatcaagggattctccagcatagcaaagcccatgacggaacttctcaaaaaggacaataagtttgtatggactcccaaatgtgaagaaagtttccaaatcatcaaggagaaacttacaactgcaccagtcctgaccctaccagacatacaccaggattttgtcatcttctgtgatgcttccaagcaaggcttaggatgtgtcttaatgcaaaatgagaaagtcattgcttatgcatcccgattactcaagccgcacgagcagaactatcctacccacgatctggaattggcagccatagtgcacgccctaaaaatttggaggcattatctgattgggaacaaatgccacatcttcactgatcacaagagcctaaagtacatcttcacgcaaccggacctcaacctccgtcagagaaggtggctcgaattgatcaaagattatgacctcgaaatccactaccaccccggaaaggccaacgtggtagcagacgccctcagcagaaaacccttcggggttaagggagcaaactttctggaagattggaagaaagaatcagctcagctaaatgcatgtctgggagacaacgatggcctggaagtcaagccaaatctagaagatctcatacgcaaggcccaacgcctggacgcagaaacaaccaagcttttggaaagagcacgaaaggagcaacttccggacctcaggacggataatcaaggagccctctggttcaaggatcgcctgtgcgtgccagtgggagaaacacgagaaaccctgctcgatgaagcccacaactcagcttactctatccacccagggaccaccaagatgtacttagaccttaagaccaggtattggtggaaagggatgaaaagggagatagcacagtatgtggcccgatgtgacacctgccagcgaacaaagaccgaacatcagaagcctgcaggcctgcttcaacccctcccaatacccgaatggaagtgggaagaaataggcatggatttcgtcaccggactgcccagatcgcaaagaggaaatgactccatatgggtaatcatcgaccgtctcaccaaggtggcccatttcattccagtaaagaccacttttggaggagcagccctcgcccgattataccttaaggagatagtcaggctacatggcattccacggaagatagtatcagatagaggaacgcagttcacttcaaaattttggaagggccttcagcaagcaatgggcaccaagctagatttcagcactgcttatcacccccagtcagatggtcaaacagaaagagtcaacaaggtccttgaagatttactcagagcctgcgtattggctttcgacagagattgggagtctagtttaccgtacgccgaattctcatacaacaacagccatcaggccagcatcaaaatgtcaccgttcgaagcactgtatggaagaaaatgccagactcccctaatgtggtccaatgtaggggaaagaacactagaaggacccgactttgttaaagaagccgaagaaaaagttgctttgatccgcagaaggttacttgaagctcagagtcgacagaagagttacgcagacaataggcgaagggaactcagatttgaggaaggagattttgtttatctcaaggtttccccaatgcgtggtgtcaagaggtttcagatgaaaggaaagctagcaccccgtttcgtcggtccttaccctatcatttcccgaataggacccgtggcataccgtcttgagctaccagaatccatgtcagatattcacaatgtgttccatgtgtcccaactccgcaaatgcctaaaagtaccagaaacccgtatcgaggcagaagcaattcagattcaaaaagatctccagtaccgggaaaagccagtgaagattctcgactcagcagtcagaagaacccgcaattcagaagtgaagctctgtaaggttcagcggagcagagatggagaagaggaagccacctgggaaagtgaggactctctgaggaaggaatacccttaccttttctcgaaccccgtctga

SEQ ID NO: 5181 - DNA, 3141 bp, Zea mays
  Clone ID: TF_ZM4163.C12.o4.fg
atggctcgttttctgagggggttaagacccgagcttaagaccatcctcgccagccaggactttcatagcttctctcacctttccaacaaagctattcaagtggaaagagcaaaagaggaagaaaaggggcacatcaagagaaagttccaggtcctccgagcacaacagcaagaacgtcaccagagagctcgaccctttgggctcccacccaggggcccaagcttccataaacaatctggaccctctccatcgcgctacagtcaacagagtcagagctcccatcaggcaccctccgttgcaagcaaccagccgccagcaaacgcctgttggcactgcggggaccccaatcacttcaaaaacaactgcccccagttgaaggcaccaggaccaacctactccaactcggtgaatggccccaaggttccatcagcacccacccccaaggcgtttccttccagcagccagcagagcagggctcagtaccagggcagggcccgggtcaaccacgtcgacgctcaggaagcccagcaagccccgggagtagtgctcggagcatcccattcatttatagccgctaagtttgtggaaaagcatggcataccctctacacctctagctatccccttggtcacccgaaccccgggatcagacctcctgtgcaaactcaggtgttcccaagtcagaattcttttaagtggggtagtgttcctggcagacttaaccatcttgccatcccaaggaattgatgtaattctaggaatggattggctagctaggcacaagggtgtcatcagctgcgcaagcaagactgttctcctcatagatcaccaaggaaaggcagtttcctgtcaagcccaaccgcccgcaaatgatccaatgatatttaatctggcagtagaaagcaggtctgtaatcaaggagtttgaagatgtattcccagaagagttgcccgggatgccaccggaaagagaagtagagttctatatagatctcattcccggcaccgcacccatcgcaaagagaccataccgcatggcccccactgagttggcagaattgaagcttcagatttcggaactacaacaaaaagggtacatccgtcccagttcgtctccctggggagcacccgttcttttcgttaccaaaaaggatgggagtatgaggatgtgtatcgattatcgatccttgaacgaggttacaatcaagaataagtaccctcttccccggatcgatgacctattcgaccaactgcaaggagccaagtacttctccaagatagatctcaggtcagggtatcaccaactcaggattaaggaagcagacattcagaaaactgcattcgtcaccagatacgggcaatatgaattcacagtgatgccttttggactaaccaacgcacccgcctttttcatgaacctcatgaataaggtatttatggaagaattggataagtttgtcgtggtttttatcgacgacatcctcatctattccaagagtcgcagggaccatgagcagcaccttcgaaccgtcctcggaagactcagagcccatcaactttatgctaaactcagcaagtgtgagttttggttagaaaagatagccttcctagggcatatcttgactgctgaagggatagaagtggacccatctaaggtagaagctgtttcaaattggaagcaaccatccaacgtcagtgaagttcgaagctttctggggatggcagggtattatcgccgctttatcaagggattctccagcatagcaaagcccatgacggaacttctcaaaaaagacaataagtttgtatggactcccaaatgtgaagaaagtttccaaatcatcaaggagaaacttacaactgcaccagtcctgaccctaccagacatacaccaggatttcgtcatcttttgtgatgcttccaagcaaggcttagggtgtgtcttaatgcaaaatgagaaagtcattgcttatgcatcccgtttgctcaagccgcacgagcagaactatcctacccacgatctggaattggcagccatagtacacgccctaaaaatttggaggcattatctgattgggaacaaatgccacatcttcactgatcacaagagtctaaagtacatcttcacgcaaccagacctcaacctccgtcaaaaaaggtggctcgaattgatcaaggattatgacctcgaaatccactaccaccccggaaaggccaacgtggtagcagacgccctcagcagaaaacccttcggggttaaaggagcaaactttttggaagattggaagaaagaatcagctcagctaaatgcatgtctgggagacaacggtagcctggaagtcaagccaaatctagaagatctcatatgcaaggcccaacgcctggacgcagaaacaaccaagctgatagaaagagcacgaaaggggcaacttccggacctcaggacagataatcaaggagccctctggttcaaggatcgcctgtgcgtgccaatgggagaaacacgagaaaccctgctcgatgaagcccacaactcagcttactctatccacccagggaccaccaagatgtacttagaccttaagaccagatattggtggaaagggatgaagagggaaatagcacagtatgtggcccaatgtgacacctgccagcgaacaaaggccgaacatcagaagcctgcaggcctgcttcaacccctcccaatacccgaatggaagtgggaagaaataggcatggatttcgtcaccggactgcccagatcacaaagaggaaatgactccatatgggtaatcatcgatcgtctcaccaaggtggcccatttcattccagtaaagaccacttttggaggagcagcccttgcccgattataccttaaagagatagtcaggctacatggcatcccacgaaagatagtatcagatagaggaacacagttcacttcaaaattttggaagggccttcagcaagcaatgggcaccaagctagatttcagcactgcttatcacccccagtcagatggtcaaacggaaagagtcaacaaggtccttgaagatttactcagagcctgcgttttggctttcgacagagattgggagtctagcttacctgttggagacttgttctcaaatgctatgaattaa

SEQ ID NO: 5182 - DNA, 771 bp, Zea mays
  Clone ID: TF_ZM4181.C3.o3.fg
atggcttgttacctagaggtcgttgatctaggtgtttggagagtcactcatgacgggatgaaaccacctaaaaatcctgagaagctcaccacgaataatgagcttgttagatacatgtattctcgtttaaatctaatcatcaatgagctcaattatattggaattaaaaagctaggtgatgcggacattatgggtcaagaggagcaaacttcttcaatgccatatgcttttgcatgtgatgaaaagaaagacaagaagaaggctgccactccaagctcctcaagtgaagaagaggaagaaaaagaacgtgatgatgatgatcaaccctcaacatcatccttgaaggacaaagaaacaatccaatgcgtcgggaaggtcgaggatcttctccttaacattaacaggaaaaagcaaaaaagatatgatgcttcgtatgcgaggagaagggccacttcaagaacaactgtccaaatatggtcgaacccacaaagaggaggagcaaaggggtacccagattatcaccctaaaacgtgcttaacactcaaggacgtcatcagggcacattccctgaggatgaaaggatcgggctccgcctcgcccgaggtccccctaaggggtcttccaaaaaactccgcctcgctcgagcccaatctcggagagggtgtgagctcaggaggatctttgcctcactcgaggccttctcactcaagggcagccatgttcacctcacccgagcccgtctcgggcgataaggacaagacctgcgaatag

SEQ ID NO: 5183 - DNA, 1236 bp, Zea mays
  Clone ID: TF_ZM5106.C1.o3.fg
atgtcgcccgaaaagccctccgacagctgtgccagaactacaacaaacaacaagaatacccccacctggaggaaaagacttcaggccctatcaggaggagatcctattgagaatgatcccaccattgtctacatggctggatatcttcatacccttgataaccaatatgatgacctcgccctccactgcacctccctaacctcccaggtggaaagcctggagcagaaagtcagggaactttcagaagaaaaagcgtccctccaagagagcctctcgttagctgaaggcgaagagaccaacacccgtgaagcctaccgcaccctcaaaatggactacgacaagatggcttcggatagaaccacgcctaccgcctctgggattggagcaagacttcctctaggagctgagggagaggctggcggagaagggggaatggctttagcatggtgggatactttcagtgaggccatcagagacgctacatgggcagaatttgaagcagccttccgtgagcaccacgtaccccaggggatagttcaactcaaggaggatgagttccgggagctaaaccaaggcggaagaacggtcagtgaatatgtgcacaagttcacagagttggcccgctacgcgcccgaggatgtcagcaccgaggccagaaagatggctcgttttctgagagggttaagacccgagcttaagaccatcctcgccagccaggactttcacagcttctctcacctttccaacaaagctattcaagtggaaagagcgaaagaggaagaaaaggggcacatcaagagaaagttccaggtcctccgagcacaacagcaagaacgtcaccagagagctcgaccctttgggctcccacccaggggcccaagcttccataaacaatctggaccctctccatcgcgcttcagtcaacaaagtcagagctcccatcaggcaccctccgttgcaagcaaccagccgccagcaaacgcctgttggcactgcggggaccccaatcacttcaaaaacaactgcccccagttgaaggcaccaggaccaacctactccaactcggtgaatggccccaaggttccatcagcacccacccccaaggcgtttccttccagcagccagcagagcagggctcagtaccagggcagggcccgggtcaaccacgtcgacgctcaggaagcccagcaagccccgggagtagtgctcggtgttcccaagtcagaattcttttaa

SEQ ID NO: 5184 - DNA, 4092 bp, Zea mays
  Clone ID: TF_ZmC951_452
cggacgcgtgggatggcatgtacttagggcgctagctctcctccgctagacacgtagcactctgctacaccccccattgtacacctggatcctctccttacgcctataaaaggaaggatcagggccctcttagagagggttggccgcgcggggacggggacgagacaggcgctcgcttgaagccgctcgctccctctcccgcgtggacgcttgtaaccccctactgcaagcgcacccgacctgggcgcgggacgaacacgaaggccgcgggatttccacctctctcacgcctgtctccgaccacctcacttccccccttcgcgctcggcctcgcgtcgacccatctgggctagggcacgcggcgacattcactcgtcggcttagggaccccccggtctcgaaacaccgacaccagtggacttgttaaagactctatatgcccttgtgtttgaatcataaccaagtaaaaagccttctacaaccttaggagcaaatttagattttctacctcttttaacaagaataaagcatttgctaccaaagacactaaaatatgaaacattgggctttttaccggttaggagttcatacgatgtcttcttaaggattcggtgtagatataaccggtttatggcgtggcaagcagtgttgaccgcctcggcccaaaaccgatccgaagtcttgtactcatcaagcatggtccttgccatgtccaatagagttctattcttcctctccactacaccattttgttgaggtgtgtagggagaagagaactcatgcttgatgccctcctcctcaagaaatcctttaatttgtgagttcttgaactccattccattgtcgcttctaatctttttgattctcaatccaaactcattttgagcccgtctcaagaatctctttaaggtctctagggtttgagatttttcctacaaaaagaatttggtgaaggtagagccggttgatggagtagcaagcagtgttgattgcttcctcccaaaaccggtctggtgtcttatactcatcaagcatggttcttgccatgtccagtagagttctattcttcctctccactacaccattttgttgaggtgtgtagggagaggagaactcatgcttgatgccctcctcctcaagaaagccttcaatttgtgagttcttgaactccgtccaattatcgcttctaatctttttgattctcaatccgaactcattttgagcccgtctcaagaatccctttagggtctcttgggtttgtgatttttgttgcaaaaagaatacccaagtgaagcgagaataatcatccacaattacaagacaatacttactcccgccgatgcttatgtaagcaatcgagccgaataaatccatgtggagtagctcaagtggcctgtcggtcgtcgtgatgttcttgtgtggatgatgggagccaactttctttcctgcttgacatgcgctacaaaccctgtctttctcaaattgaacatttgttagtcccaaaatgtgttctccttttagaagcttgtgaagattctgcatcccaacatgggctagtcggcgatgccagagccaacccatattagtcttagcaattaagcaagtatcgagttcagctctattaaaataaactaagtatagctgaccctctaatactcccttaaatgctactgaatcattacttcttctaaagaaagtaacaccttgatttccatccccgaatgtgatagttcttttgggatcttcgtttatctcgtaggaggagaacatctttttctcccctgtcatgtggtttgtgcatccgctatcaattatccaacttgagcccccggatgcgtaaaccttgggtacccaaacacaagtctttgaccccttgtgtttgcccccggcatatttggcaactactttgtctgatttgtttattaaaacataggaagcatcaaaagtcttaaatgaaatgttatgatcatttgatgcagtagaagatttctttttaggcattttaacatgggtagaatgactagagctagatgtctcattcttgtacataaaagcatgatgggaaacagaatgagacttcctagcatgaattctcctaatcttgtgctcaggataaccaacaggatataaaatgtatccctcgttatcctgagccatgggagccttgccctttacaaagttagacaatattttgggggcattaagtttgacatttcttccctgttggaaaccaatgccatccttaataccagggtgtctcccattatagagcatgcttctagcaaatttaaatttttcgttttcaattttatgctcattaattttactagttagttgtgctatatgatcattttgttgtttaattaaagctaggcgatcatgaatagcatcaacattaatgtctctacatctagtacaaatagtaacatgatcaacattagatgtagatggtttgcaagcatttaattcttctatcttagcatgtaatatggcattctcatttctaagacaggaaatagaatcattgcaaccatttaaatctttagtctcagttttaaggttctcaaccttagcaaataaattggcgttctcagttctaaggttggaaatagtgtcatggcaaatgctaagctccttagtcaaatttttatttttctctacttcctgagcataagcattctttaccttaacatgctttttattttccttaatgaggaattcctcttggctatccaagagttcatccttctcatgaatagcacctatcaattcattcaatttttctttctgttgcatgttaaggttggcaaaaagggcaagcaaattatcctcatcttcactagagctaccctcatcacttttccttttgccgtccttttccatgaggcacttgtggccgacgttggggaagagaagacctttgttgacggcgatgtttgtggcatcctcgtcggaggaggagtcggtggagctctcgtcggagtcccattccctacacacgtgggcatcgccgcccttcttcttgtagtacttcttcttttccttcctctttcccctcttgtcatcacccctgtcactatcactagacatcagacaatttgcaataaaatgactgggcttaccacacttgtagcacacccttttggagcggagcttgtagtccttccccttcctttgcttgaggatttgacgaaagctcttgatgatgagtgtcatctcctcattgtcgagcttggagacgtcgatgggaattctacttggcgtagattccttcttttcttcctccgctgccttgaatgtgacgggttgcacctcgggtgtggaggtgccgccttgctccaagttgacaatatgtttggagcctttgatcatcaactcaaagctcacaaactttcctattacttcttcgggagacattagcttgtatctaggatcaccacgtattagttgaacttgagtaggattatgaaatacgagtgatctaagaataaccttgaccatttcatggtcatcccatttggtgctcccgaggttgcgcacttggttgaccaaggtcatgagccggttgtacattgattgtggctcctcttcttggttgaggatgaatcgactgagctccccctcgatcgtctcccgtttggtgatcttggtcacctcatctccttcgtgcgtcgtcttgaggacatcccaaatttctttggctgtctttaacccttgcaccttattatactcctctcgacacaaggaggcgaggagtatagttgtggcttgggagttaaagtgccgaatttggtcggcctcatccgaatcgtagtccttgtcccttacctttggtactatacttcttacgctcatggcgcttagaagtgacggacgatgattcgaagccggaggtggagggtgacgaagagtcggtctcgtagtagaccactttttcatcttcttcttcttgtcacctctccgttgtgacttgatggaggaagcagattcctccttatgcttgtggtcagactccctcgaatgggttctccctgagcttgcggacttgtcgccgccggtcacgatctccctcttggcgtgatctcccgacat

SEQ ID NO: 5185 - DNA, 4641 bp, Zea mays
  Clone ID: TF_ZM5028.C2.o1.fg
atgtcgggagatcacgccaagagggagatcgtgaccggcggtgacaagtccgcaagctcggggaaaactcattcgagggagttcggccacaagcataaggaggaatccgcttcctccatcaagtcacaacggaggggtgagaagaagaagaaaatgaagaaggttgtctactacgagaccgattcttcgtcaccctctacatttgggtccgaattgtcgtccgtcacttctaaacgccatgagcgtaagaagtatatgcgcaacctcgggagcacaaaatgggatgaccatgaaatggtcaaggttattctaagatcactcatttttcataatcctacgcaagttcaattaatacatggtgatcctagatacaagctaatgtctcctgagaaagttatagtaaagtttgtgagctttgagttgatgatcaaaggctccaaacaaattgtcgagcaaggtggcacctccacacccgagatgcaacccgtcgtattcaaagcgacggaggagaagaaagaagagtctacatcaagtaggctccccatcgacgcctccaagcttgacaatgagaaaatggcgctcatcataaagagtttttgccaaatcctcaagcaaaggaaggggaaagactacaagccccgttccaaaaaggtgtgctacaagtgtggtaagtccgatcactttattgcaaaatgtcctatttctagtgatagtgacaggggcgccgacaagagagggaagaagaaggagaagaagagatactacaagaagaaaggcggcgatgcccatgtttgttgggaatgggactccgacatgagctccaccgactcctcctctgacgaggatgccgccaacatcgccgtcaacaagggacttctcttccccaacgtcggccacaagcgcctcatggaaaatgacgacaagaaaaagaagaaagaaaaattaaatgaattgataagtgctattcatgagaaggatgaacttttggatagccaagaggaattccttattaaggaaaataagaagcatgttaaggtaaagaatgcttatgctcaggaagtagagaaaaatgaaaacttgactaaggagcttagcattcgccatgacaccatttccaaccttagagatgagaacactagtttaattgctaaggttgagaaatcaaaagtttgccatgattcaattgacaatcttagaaatgaaaatgctagtttatttgctaagattgataaattgaatgaatcaattgctagccttaaaactgagaatgataagttaatttctaaggctaaagatttgaatgtttgtaatgtttctatttccaatcttagaaatgagaatgccatgttacatgctaagattgatgaattaaatgcttgcaaaccctctacatctaatgttaatcatgttactatttgtactagatgtagagacattaatgttgatgctattcatgatcacctagctttaattaaacaacaaaatgatcacatagctcaactaactgctaaaatcaatgagcatgaaatagaaaatgaaaattttaaatttgctagaagcatgctttataatgggagacgccctgacattaaggatggcattggctttcaacagggagacaatgtcaagcttaatgcccccaagaaattgtctaattttgttaagggtaaggctcccatggctcaggataacgagggttacattttatatcctgctggttatcctgagcacaagattaggagaattcatgctaggaagtctcattctgttttccatcatgtttttatgtacaagaatgaggcatctagctctaggcattctacccatgctaaaatgcctaaaaagaaaactcctattgcatcaaatgatcctaatgtttcatttaagacttttgatgcatcatatgttttaactaacaaatcaggcaaagtagttgccaaatatgttgggggcaaacacaagggctccaagacttgtgtttgggtacccaaggtttatgcatccgggggctcgagttggattattgatagtggatgcacaaaccacatgacaggggagaaaaagatgttctcctcctacgagaaaaacgaagatccccaaagagctatcacattcggggatggaaatcaagattctttagattacaatttgctttttgtatctcaattatgcaaaatgggttacaactatctttttacggatataggtgttactgtctttagaagaagtgatgattcattagcttttaagggagtattagagggtcagctatacttagttaattttaatagagctaaactcgatacttgcttaattgctaagactaatatgggttggctctggcatcgccgactagcccatgttgggatgaataatcttcacaagcttctaaagggagaacacattttgggactaaccaatgttcatttcgaaaaagacagggaaaaatctcaaacccaagagactttaaagggattcttgagacgggctcaaaatgagttcgaattgaggatcaagaaaataagaagcgataatgggacagagttcaagaactcacaaactgaaggctttcttgaggaagagggcatcaagcatgagttctcttctccctacacacctcaacaaaatggtgtagtggagaggaagaatagaactctactggacatggcgaggaccatgcttgatgagtacaagactccggaccggttttgggctgaggcgattaacaccgcttgctactccatcaaccggctctaccttcaccgaatcctcaagaaaacatcgtatgaactcctcactggtaaaaagcccaatgtttcatattttagagtctttggtagcaaatgctttattcttgttaaaagaggtagaaaatctaaatttgctcctaaggttgtagaaggctttttactaggatatgactcaaacacaagggcatatagagtcttcaacaaatccactggattagttgaagtttcttatgacattgtatttgatgagaataatggctctcaagtagagcaagttgatcttgatgaattagatgatgaagaagctccatgcgtcgtgctaaggaacatgtccattggggatgtgtgtcctaaggaatccgaagagcccacacaagcacaagatcaaccatcatcttccatgcaagcatctccaccaactcaagatgaggatcaagctcaagatgatgaaaatgaagatcaagaggatgagccacctcaagaggaggacaatgatcaagggggagatgaagctaataaagacaaagaagatgatcaggaacaaagaccgccacacccaagagtccaccaagcaatacaacgagatcaccccgtgaactccatcctcggcgatattcataagggggtaaccactcgatctcaagtcactcatttttgtcaacattactcttttgttttctctattgagccatacaaggtagaggatgcactaagagattcggattgggtgctggcaatgcaagaggagctcaataacttcacgaggaatgaggtatggcacttagttccacgtcctaaccaaaatgttgtaggaaccaagtgggtattccgcaataagcaagatgagcatggtgtgatgacaaggaacaaagcccgacttgtggccaagggttattcacacgtcgaaggtttggatttcggtgaaacctatgcacccgtagctaggcttgaatcaattcgtatattatttgcctatgctacttaccatggcttcaagctttatcaaatggacgtgaaaagtgccttcctcaatggaccaatcaaggaaggggatttcaagtcaagcaactccaagagggcaccttcatcaaccaaactaaatacatttcaagacatacttacaaagtttggaatgaaggatgccaagcccatcaagacacccatgggaactaatgggcatctcgacctcgacacgggaggtaaatccgtagatcaaaaggtataccggtcgatgataggatctttactctatttatgtgcatctcgaccgtatattatgctttctgtatgcatgtgtgcaaggttccaagccgatcctaaggaagttcactttaaggccgtaaaaagaatcatgagatatttagtttatacacctaagtttggtctttggtaccccgagggatccacctttgatttaataggatattcagatgctgattgggcagggtgtaaaattgataggaagagcacatcaaggacttgtcagtttctaggaagatccctggtgtcttgggcttcaaagaaacaaaactcagtagctctttctaccgccaaagccaagtatattgtcgcaggccattgttgtgcacaattactttggatgaggcaaaccctcagggactacagctacaaattgagcaacgtccctctcctatgtgataatgagagtgcaattcacatggcggataatcctgttgaacacagtcgcactaagcacatagacattcggtatcactttttgagggatcgccaacaaaggggggatatcgagatcgcttatgttagcaccaaagaacaattagctgatatctttaccaaaccactagatgagaaaacctttaccaaacttaggaatgagctaaacattcttgattctcagaattttgattga

SEQ ID NO: 5186 - DNA, 1722 bp, Zea mays
  Clone ID: TF_ZmC119_782
ttagacaagtatattagtacacaaaaccaatgtactaagacttagaaacatacctttgatcttgatttgcactttgttcatccattgcataaattcacattttaagcacttgagttggcactcaatcaccaaaatacttagaaatggcccaagggcacatttccctttcaataggacaggggcggcccaaggcgaggtgcttggctggatgtaacctttctctgacagctcatcaatctgcttcttaagttcaaccaactctggcccagatattctgtaagctctcttaaagatgggggcggttccagaaagaagctctatggcaaattcaactttccgctctgggggcatacccggtaagtccttgggaaacacatctggaaactcagacacaatcttgatcctctcaattgggtctgcttcacggctatcgacaaccatctgataacaacttgctttctttggctcaggcgggactaattcggtcaccacttcctctcctagtggggacaccaacttgattgtccttgtatcacaactgatgactgcctggtacttatctagccaattcatccctaggatgacatctattccctgagtacccattactatgaggttggcgggaaacgctactatcatgtcgggggtctcctgaactgcttcagcctccaagtggttcagtcttccatgattataacgcggctgagagcggttgcctgctccaggctgagacacgttctgcttcgctggggcattggggcctaactgctgctgggttgccttcttcggacattgcatcacccaatggccttgctctccacagtggaaacatgctctgtttccaacttgagctggtgctgcctgattgttctgctggtttgctcctcctgactgattgttctggcgattctgatactggtgatgaggatactgcctttggaactgctgatgttgctgaggtggacgttggttctgcctgaactgctgaggttgattgcctgagaaacgaggacggttgctgcttccaggctggggtccactgatcttgcgcttacgatcctccatctccttacgcttcctctttgtcatgattgctctgtcaatcaagtgctggaacgtcggaaaggtatgattcatcatctgatagtgcagagggtcaaccaagcctttcaggaaacggtattgtctcttggcgtcgatgttgacatcttcaggagcatagcgagacaattgcagaaacctgtctcgatactcactgactgacatcgacccttgcttaagggccaggaactcctccttcttcactgtcatcagacctgcaggaacatggtactgacgaaagctacctctgaactcttcccaggtgatggcgtcggggttggcatgggtggcgagataagactcccaccatgactgagctgctcctctcaacagacggggaccatacaagactttctccctgtcgtcacacggagcggtatgcaactcccgctccacagtgtgcagccagtcttcagcatccatggggtcagaagaatgagcgaacgttgggggatgacctctcatgaattcagcacacttgtctctgggcatctgaggcatctgaggctgaggtggtgcctgctgctgttgttgttgttgctgctgctgaatggcggctagagtctgaccgatggcttgaactgcctgagtctgcatcagaaacatctgctcgatggacat

SEQ ID NO: 5187 - DNA, 5764 bp, Zea mays
  Clone ID: TF_ZmC12418_1
atggtagtaatttggggtaatatatttccactattgcaggaactccttacaccaagaaatcatacaaggggcccaccaccaacgagcacgccgctttcctcccgagtggacagagcggaagccgatggacgagacccaggatacgctccggacctctgccttccccagctcacacgtcagagagacatgggccaagagcctctacatcgattcgatatgcgacgggcggaccgtgctctgatggcgcgcacgtgggaaatggaagtcgaagcgcctcgcatcaagagccgcgagatggcgcgtcaagtcgaaaccagtactaataataggatcagtttacctttgaagctaccgttgggtttcccccccccgcacacccccctcgtcctcccgctcgcgcgcgccccgccctcgccccccgcgctcgcgcggcgcacgaggcgacgaccccgacctcctcctccgcgcccgtccctgccaccggtcgccgatattggaaggagctgggaaggctggggcgctgacctgaattttaaggagagaggatgccagagctgcgaaaattaccaagcatacccatggtcgaagaagcttgaggatctgcagccaggagaggcgcctgcgaaaccggtgtcaccttctccagcgggggcaagagatcgtcacaaatatgaaatttgatgaagagccaaattatgccatgcttatctctattttcgctgggttgattgaagcacctgcatcgagacaattcagaattgatggggcactcaaggttggacagaaacgtggaagattggttgcaaatctagaagaagatgaacaacctaaaaagaaggttatatctagggagcagagcggcccaatggattagagtttagaaaccctagggtactcggccgctccccgttaacctggcaaaggcaaaagtcggaggaatgcctactgagcttaggattgctacggtcgatccgtgtgcaggatcaacgaagtgtgaggtggccccaatgactgagtgccgggccttgggtcaggagcttggaaccgttcgaggctccttcaatttccataaggcgtaatgaggaaaaagttactaaatgagaacaaacggtatgagatccaactgtgaccctatagcaaggtttgacctaaagaacaccttgaatccttgaaatctcacaaggtgagcgagtcgtttccttacaagtggatcaataagaagtggaaagaagggttccatgtgacatccatggccaccgctgggaatcgctggggcgtagtcatgtcaaggaattcagggttctctactcaggttgtagagttggatttcctgtaccccagcgagggcatccaccggcgctgggagagcggctacaggataacttccacggcagccaccaacgaccaagccgctttcatcctgagcatgccgaaacggaagccgatggacgagacacaggaaacgctgcggacctccgccttccccagctcacacgtcaaggagaaatgggccaagaacctctacatcgcttcgatttgcttcgggcggaccgtgtgctgatcgcgcgcgcctgggaaatggaagtcgaagcgagggccaccgatccggtacggtggcgcctcgcatcaagagatgcgagatggggcgtcaagtcgaaaccagttctaatgataggatcagtgtatctctgaagatacggtatgggttaccctaccgtatttgtaaagtaatgatgccggccgaacgacctttcctaacgcgtttgggcagaaattcgttgctgtcgccatattttgacgggagtttctcccgtgttgtcggtacatcttcaacggcgcgacatacatctacgaggcgcacgtccggcgctacttcaagatcggcagctacgtgagccccagctacagcgagcaccaccgtcgggtgctgcagatgacgagcttcaacgcgtgcagtgcagacatgatgtcagagaacaggcgcagaggaggaaggcgtgctcagcaggagcgagccgctcagcaggaggaggtgccccagcaacagcacctgccgcccccacccccgatgtcgatcgagcagatgtttctgatgcagactcaggcagttcaagccatcggtcagactctggccgccattcagcagcagcagcaacaacagcagcaagcaacacctcagcctcagatgcctcagatgcccagagacaagcgtgctgaattcatgagaggtcatccaccaacgtttgctcattcttccgaccccatggatgctgaagactggctgcgcactgtggagcgggagttgcacaccgctcagtgcgatgatagagagaaagtcttgtatggtccccgtctgttgagaggagcagctcggtcatggtgggagtcttacctcgccacccatgcccatcccgacgccatcacttgggaagagttcagaggtagctttcgtcagtatcatgttcctgcaggtctgatgacagtgaagaaggatgagttcctggccctcaagcaagggtcatcatctatcagtgagtaccgggacaggtttctgcagttgtctcgctatgctcctgaagatgtcaacaccgacgccaagcgacaataccgtttcctgagaggcttggttgaccctcttcagtaccaactgatgaatcataccttcccgacattccaacacctgattgacagagcaatcatgacagagaggaagcgtaaggagatggaggatccagcccagcagaacagccaggcagcaccagctcaggttggaaacagagcatgtttccactgtggagagcaaggccattgggtgatgcaatgtccgaagaaggcagcccagcagcagtcaggccccaatgccccagcaaagcagaacgtgtctcagcctggagcaggcaaccgccctcagccgcgctacaatcatagaagactgaaccacttggaggctgaagcagttcaggagacccccagcatgatagtaggtatgttcccagtcgactcccatattgcagaagtgttatttgatactggagcaacacattctttcattactgcatcatgggtagaagcacataatcttccaattactaccatgtcaacccccattcaaattgactcagccggtggtagaattcgagccgatagcatttgtttgaatgtgagtgtggaaataagggggatagcgtttcccgccaacctcatagtaatgggtactcagggaatagatgtcatcctagggatgaattggctagataagtttcaggcagttatcagttgtgataaaaggaccatcaagttggtgtccccactaggagaggaagtggtgaccgagttagtcccgcctgagccaaagaaaggaagttgttatcagatagctattgatagcagtgaggcagacccgatcgagagtatcaaggttgtgtccgagttcccagatgtgtttccaaaggacttaccgggtatgccaccagagcggaaagttgagtttgccatagcgcttcttcctggaacctcccctatctttaagagagcttacagaatatctggaccagagttggttgaacttaaggagcagatttatgagctgtcagagaaaggttacatccggccaagcacctcgccttgggccgctcctgtcttgtttgtggaaaagaaagatggcaccaaaaggatgtgtatcgattatcgagctctgaatgaagtcacgatcaagaacaagtaccctttgcccagaatagaagatttgttcgaccagttgagaggagctagtgtgttctccaagattgatctgaggtcagcctttttcatgaatctgatgaatagtgtattcatggactatctcgataagtttgtggtggtattcattaatgacattctgatttattctcaaagcgaaaaagagcatgcaagtcatttgaggatggtattgcagagattgcgagagcaccaattgtatgcaaagttaagcaagtgtgaattctggatcaatgaagttctatttttgggtcacataatcaacaaagagggattggctgtggatctgaagaaagtggcagacattctgaactggaaagcgccaacagatgcccgaggaatcaagagtttcattggaatggctggatattatcggcgattcattgaagggttttcgaagattgcgaaaccaatgacagtgttgctaggcaacaaggttgagctcaagtggacccagaaatgtcaagaggcctttgaagcgctgaaagggaagttgacaacagcgcctgtcctagtcttgcctgatgtgcacaagcccttcttggtgtattgtgatgcttgttacacaggtttgggatgtgtgttgatgcaagagggaagagttgtggcttactcgtcccgacagttgaaggttcatgagaagaactacccaatccatgatctagagttggcagcagtggttcacgcactgaagacatggaggcactacttgtgtggacagaaatgcgatgtttacacagaccacaagagtctaaagtacatattcacccagtcagagttgaatatgaggcagcgaaggtggttagagttgatcaaagactatgagttggagatccattaccatccaggcaaagcaaacgtagtggcagatgctttgagcaggaagagtcaagtcaatctgatggtcgctcggccgatgccttacgagttggccaaggagtttgacaggttgagtctcggatttctgaacaattcgcgaggagtcacagttgaattggaacctaccttggagcgcgaaatcaaagaagcgcagaagaatgatgagaagatcagtgagatccggcgactgattctagaaggcaaaggcaaagattttcgagaagatgcaaaaggtgtgatatggttcaaagactgcttgtgtgttcctaatgtccagtctattcgtgagttgattcttaaggaagctcatgagacagcctatttcgattcaccctggcattcagcttatcatccgcagacagatggtcagaccggaagaaccaatcaaattcttgaagacatgttgagagcctgtgcgttgcaagatcagtccggatgggacaagagattgccttatgcagagttttcctataacaacagttatcaggacagtttgaagatgtcaccatttcaggcactctatggaaggagttgtagaactcctttgcaatgggatcagcctggagaaaagcaagtgtttgggccagacattttgcttgaagccgaagagaacatcaggatggttcgagagaatctgaagatatcgcaatcgaggcagcgaagctatgcagacacaagaagaagagagctgagtttcgaagtcggagactttgtctatctgaaagtgtcaccgatcagaggagtcagaaggttcggagtcaaaggcaagctagcaccccgctacattggtccgtaccaaattctctcaaggcgtggagaagtggcctatcagctcagtctgccagagaatttgtccgctgtgcatgatgtctttcatgtgtctcagttgaagaagtgcttgcgtgtgccagaagagcagttgccagtggaaggtcttgaagtccagaaggacttgacctacgttgagaagccagtgcagatccttgaggttgcagacagagtcactcgaaggaagaccatcagaatgtgcaaagtcaaatggaatcaccactctgaggaagaagcaacctgggagcgtgaagatgatctattggctaaatacccagagctctttgctagccaaccctga

SEQ ID NO: 5188 - DNA, 1135 bp, Zea mays
  Clone ID: TF_ZmC3792_100
ttagaaaggaagcgtaaggagatggaggatcgtaagcgcaagatcagtggaccccagcctggaagcagcagccgtcctcgtttttcaagcaatcaaccccagcagttcaggcagaaccagcgtccacctcagcagcatcagcagcgtcagcagtatcagcagtttcaaaggcagtatcctcagcatcagtaccagaatcgtcagagcaatcagtcaggaggaggtcagtttcagaagcagaatcagcaagcaccccatcttcctgccccagcaaatcagcagaacagtcaggcagcaccagctcaggttggaaacagagcatgtttccactgtggagagcaaggccactgggtgatgcaatgtccgaagaaggcagcccagcatcagtcaggccccaatgccccagcaaagcagaatgtgtctcatggcgacgacagctcgagccacgacaccgacttctctgctaaccctgagccggaaggatgggttgctcgacccatcactcgcgacgctgctacaggggaccgggaaagggggataccccgaaagggatccttctccgcgaaggaaccgggctccgagccccccattactgatcaggggttcgaaggctggccccccgagggttcaacagtcgcctcagatcgcgtgggcccgacacccactactggtcaggggttcgaaggccagccccccgaagggctccatggccgcctcaggctactcgggctccgcgcccattactgatcaggggttcgaaggctggcccccgaagggttcacagtcgcctcagacaccgagcgagggatgaccaggggtacgttagataaataaccaaggctcgggctgcgctcccaaggtaccttaggacatttcccagaccaacgggaccgatcttgtaacagaataccatcggaggaaggcatcgagccctcggacccagtcgctaggggactgggtccggcaaatcaatcgcaggtacttttgggcgtgccgctgggcccctatccgacccccaacgaacggggcagggacgtccactcggattaaccgcttgcagctcaccggagacaccagttcggtgcccacaagggtaacatggcgcactcccccctcctgcctggggaaagacgac

SEQ ID NO: 5189 - DNA, 4470 bp, Zea mays
  Clone ID: TF_ZmC3792_18
atgtcgatcgagcagatgtttctgatgcagactcaggcagttcaggccatcggtcagactttggccgccattcagcagcagcagcagcaacagcagcaagcaccaccccagcctcagatgcctcagatgcccagagacaagcgtgctgaattcatgagaggtcatccaccaacgttcgctcattcttctgaccctatggatgctgaagattggctgcgcactgtggagcgggagttgcataccgctcagtgcgatgacagggagaaagttctgtatggtccccgtctgttgagaggagcagcccagtcatggtgggagtcttacctcgccacccatgcccaccctgacgccatcacctgggaagaattcagaggtagctttcgtcagtaccatgttcctgcaggtctgatgacagtgaagaaggaggagttcctggctctcaagcaagggccattgtctgtcagtgagtaccgggacaagtttctgcagttgtctcgctatgctcctgaagatgtcaacactgacgccaaacgacagtaccgttttctgagaggcttggttgaccctttgcagtaccaactgatgaatcacaccttcccgacattccaacacctgattgacagagcaatcatgacagaaaggaagcgtaaggagatggaagatcgtaaacgcaagatcagtggaccccagcctggaagcagcaaccgtcctcgtttctcaagcaatcaaccccagcagttcaggcagaaccagcgtccacctcagcagcgtcagcagcatcagcagtttcaaaggcagtaccctcagaaccagtatcagaaccgtcagagcaaccagtcaggaggtcagtttcaaaggcagaatcagcaggtacctcgtcttcctgccccagcaaatcagcagaacaatcaggtagcaccagctcaggttggaaacagagcatgtttccactgtggagagcaaggccactgggtgatgcaatgtccgaagaaggcagcccagcagcagtcaggccccaatgccccagcgaagcagaatgtgcctcagcctggagcaggcaatcgctcccagccgcgctataatcatggaaggctgaaccacttggaggctgaagcagttcaggagacccccggcatgatagtaggtatgttcccagttgattcccatattgcagaagtgttatttgatactggagcaacacattctttcattactgcatcatgggtagaagcacataatcttccaactactaccatgtcaacccccattcaaattgactcagccggtggtagaattcgagccgatagcatttgtttgaatataagtgtgaaaataagggggatagcatttcccgccaaccttatagtaatgggtactcagggaatagatgtcatcctagggatgaattggctagataagtatcaggcagttatcagttgtgataaaaggacaatcaagttggtgtccccactaggaaaggaagtggtgaccgagttagtcccacctgagccgaagaaaggaagttgttatcagatggctgtcgatagcagtgaagcagatccaattgagagtatcaaggttgtgtctgaattcccagatgtgtttccaaaggatttaccgggtatgccaccagagcggaaagttgagtttgccatagagcttcttcctggaaccgcccccatctttaagagagcctacagaatatctggaccagagttggatgaacttaagaagcaaattgatgagctgtcagagaaaggttacatccggccaagcacctcgccttgggccgcccctgtcctatttgtggagaagaaagatggcaccaagaggatgtgtatcgattatcgggctttgaatgaggtcacgatcaagaacaagtatcccttgcccagaatagaagatctgttcgaccagttgagaggagccagtgtgttctccaagattgatctgaggtcaggttatcatcagctcagaatccgaccttcggatattccgaagacggcattcatttccaagtatggtttgtatgagttcacagtgatgtcttttggtttgaccaatgcgccagcattcttcatgaacttgatgaacagtgtattcatggattaccttgataagtttgtggtggtattcattgatgacattctgatttattctcaaagcgaagaagagcacgcagatcatttgaggatggtgttgcagagattgcgagagcaccagttgtatgcaaagttgagcaagtgtgagttctggatcagtgaagtcctgttcttgggtcacataatcaacaaagaaggattggctgtggatccgaagaaagtggcagacattttgaactggaaagcgccaacagatgctagaggaatcaagagcttcattggaatggccggatattatcggcgattcattgaagggttttcgaagattgcgaaaccaatgacagcgttgctaggcaacaaagttgagttcaagtggacccagaaatgccaagaggcctttgaagcgctgaaagagaagttgactacagcgcctgtcctagtcttgcctgatgtgcacaagcccttctcggtgtattgcgatgcttgttacacaggtttgggatgtgtgttgatgcaagagggaagagttgtggcttactcgtcccgacagttgaaggttcatgagaagaattacccaatccatgatctagagttggcagcagtggttcacgcactgaagacatggaggcactatttgtatgggcagaaatgcgatgtttacacagatcacaagagtctgaagtacatattcactcagtcagagttgaacatgaggcaacaaagatggttagagttgatcaaagactatgagttggagattcattaccatccaggcaaagcaaacgtagtggcagacgctttgagcagaaagagtcaagtcaatctgatggtcgctcgtccgatgccttatgagttggccaaagagtttgacaggttgagtctcggatttctgaacaattcgcgaggagtcacagttgagttggaacctaccttggagcgcgaaatcaaagaagcgcagaagaatgatgagaaaatcagtgagatccggcgactgattctagatggcaaaggcaaagattttcgagaagatgcagaaggcgtgatatggttcaaagaccgcttgtgtgttcccaatgtccagtccattcgggagttgattctcaaggaagctcatgagacagcctattcgattcaccctggcagtgagaagatgtatcaggatctgaagaagaaattctggtggtacggaatgaagagggaaatcgcagagcatgtggctatgtgcgatagttgccgaagaattaaggcagaacaccagagacctgctggattgttgcaaccgttgcagatccctcagtggaaatgggatgaaattggtatggatttcatagtcggattgcctcgcactcgagccggctacgattccatctgggtagtagtggaccgtttgaccaagtcagcccacttcatacctgtcaagaccagctacaacagtgcagtattggcagagttgtatatgtctcgaatcgtttgtcttcatggtgtgccaaagaagatagtgtcagacagaggaacacagttcacctctcatttctggcagcagttgcatgaagccttgggcacacatctgaatttcagttcagcttatcatccgcagacagatggccagaccgaaagaaccaaccaaattcttgaagatatgttgagagcatgtgcgttgcaagatcagtccggatgggataagagattgccttatgcagagttttcctataacaacagttaccaggccagtttgaagatgtcaccatttcaggcgctctatggaaggagttgtagaactccgttgcaatgggatcagcctggagaaaagcaagtgtttgggccagacattttgcttgaagccgaagagaacatcaagatggttcgagagaatctgaagatagcgcaatcgaggcagcgaagctatgcagacacaagaagaagagagctgagtttcgaagtcggagactttgtctatctgaaagtgtcaccgatcagaggagtcagaagattcggagtgaaaggcaagctagcaccccgttacattggtccgtatcagattcttgcaagacgtggagaagtggcctatcagctcagtttgcccgagaatttgtctgctgtgcataatgtctttcatgtgtctcagttgaagaagtgcttgcgtgtgccggaagagcagttgccagtggaaggtctggaagtccaggaggacttgacctatgttgagaagccagctcagatccttgcgattgcagacagagtcacccgaaggaagaccatcagaatgtgcaaagtcagatggagtcaccactctgaggaagaagcaacctgggagcgtgaagatgatctagtggccaagtacccagagctctttgctagccagccctga

SEQ ID NO: 5190 - DNA, 4584 bp, Zea mays
  Clone ID: TF_ZmC3792_19
atgtcagagaacaggcgtagaggaggaaggcgtgctcaacaggagcgagccgctccgcaggatgaggtgccccagcagcagcacctgccgcccccgcccccgatgtcgattgagcagatgtttctgatgcagactcaggcagttcaagccatcggtcagactttggccgccattcagcagcagcagcagcagcaacagcagcaagcaccaccccagcctcagatgcctcagatgcctagagataagcgtgctgaattcatgagaggtcatccaccaacgttcgctcactcttctgaccccatggatgctgaagattggctgcgcactgtggagcgggagttgcataccgctcagtgcgatgacagggagaaagttctgtatggtccccgtctgttgagaggagcagcccagtcatggtgggattcttacctcgccacccatgccaaccccgacaccatcacctgggaagaattcaggggtagctttcgtcagtaccacgtgcctgcaggtctgatgacagtgaagaaggaggagttcctggcccttaagcaagggtcatcgtctgtcagtgagtatcgagacaggtttctgcaattgtctcgctacgctcccgaagatgtcaacaccgatgccaagcgacagtaccgtttcctgagaggcttggttgaccctctgcagtatcagctgatgaaccacaccttcccgacattccagcacctgattgacagagcaatcatgacagaaaggaagcgcaaggagatggaagatcgtaagcgcaagatcagtggaccccagcctggaagcagcagccgtccccgtttctcaggcaatcaacctcagcagttcaggcagaaccagcgtccacctcagcagcatcagcagcgtcagcagtatcagcagtttcaaaggcagtaccctcagaatcagtaccagaaccgtcagagcaatcagtcaggaggtcagtttcagaagcagaatcagcaagcacctcgtcttcctgccccaacaaatcagcagagcagtcaggcagcaccagctcaggttggaaacagggcatgtttccactgtggagagcaaggccattgggtgatgcaatgtccgaagaaggcagcccagcagcagtcaggccccaatgccccagcaaagcagaatgtgtctcagcctggagcaggcaatcgctctcagcagcgctataatcatggaagactgaaccacttggaagctgaagcagttcaggagacccccgacatgacagtaggtatgttcccagtcgattcccatattgcagaagtgttatttgatactggagcaacgcattctttcattactgcatcatgggtagaagcacataatcttccaactactaccatgtcaacccccattcaaattgactcagccggtggtagaattcgagctgatagcatttgtttaaatgtaagtgtggaaataagggggatagcgtttcccgccaaccttatagtaatgggtactcagggaatagatgtcatcctagggatgaattggttagataagtatcaggcagttatcagttgtgataaaaggacaatcaagttggtgtccccactaggagaggaagtggtgaccgagttagtcccgcctgagccgaagaaaggaagttgttatcagatggctgtggatagcagtggagcagacccaattgagagtatcaaggttgtgtctgaattcccagatgtgtttccaaaggatttaccgggtatgccaccagagcggaaagttgaatttgctatagagcttcttcctggaaccgcccctatcttcaagagagcttacagaatatctggaccagagttggatgaacttaagaagcagattgatgagctgtcagagaaaggttacatccggccaagcacctcgccttgggccgcccctgtcctatttgtggaaaagaaagatggcaccaagaggatgtgcatcgattatcgagctttgaatgaggtcacgatcaagaacaagtatccgttgcccagaatagaagatctgttcgaccagttgagaggagccagtgtgttctccaagatcgatctgaggtcaggttatcatcagctcaggatccgaccttcggacattccgaagacggcattcattaccaagtatggtttatatgagttcacagtgatgtcttttggtttgaccaatgcgccagcattcttcatgaacttgatgaacagtgtattcatggattatcttgataagtttgtggtggtattcattgatgacattctggtttattctcaaagcgaagaagagcatgcagatcatttgaagatggtgttgcagagattgcgagagcaccagttgtatgcaaagttgagcaagtgtgagttctggatcagtgaagtcctgttcttgggtcacataatcaacaaagaaggattggctgtggatccgaagaaagtggcagacattctaaactggaaagcgccaacagatgctcgaggaatcaagagcttcattggaatggccggatattatcggcgattcattgaagggttttcgaagattgcgaaaccaatgacagcgttgctaggcaacaaggttgagttcaagtggacccagaaatgccaagaggcctttgaagcgctgaaagagaagttgacaacagcgcctgtcctagtcttgcctgatgtgcacaagcccttctcggtgtattgcgatgcttgttacacaggtttgggatgtgtgttgatgcaagagggaagagttgtggcttactcgtcccgacagttgaaggttcatgagaagaattacccaatccatgatctagagttggcagcagtggttcacgcactgaagacatggaggcactatctgtatggacagaaatgcgatgtttacacagaccacaagagtctgaagtacatattcactcagtcagaattgaacatgaggcaacgaagatggttagaattgatcaaagactatgagttggagattcattaccatccaggcaaagcaaacgtagtggcagatgctttgagcagaaagagtcaagtcaatctgatggttgctcgtccgatgccttatgagttggccaaggagtttgacaggttgagtctcgggtttctgaacaattcgcgaggagtcacagttgaattggaacctaccttggagcgcgaaatcaaagaagcgcagaaaaatgatgagaagatcagtgagattcggcgattgattctagatggcaaaggcaaagactttcgagaagatgcagaaggagtggtatggttcaaagaccgcttgtgtgttcccaatgtccagtctattcgggagttgattcttaaggaagctcatgagacagcttattcgattcaccctggcagtgagaagatgtatcaggatctgaagaagaaattctggtggtacggaatgaaaagagaaatcgcagagcatgtggctatgtgcgatagttgtcgaagaattaaggcagaacaccagagaccagctggattgttgcaaccgttgcagatccctcagtggaaatgggatgaaattggcatggatttcatagtcggattgcctcgcactcgagccggctacgattccatttgggtagtagtggaccgcttgaccaagtcagcccacttcatacctgtcaagaccaactacaacagtgcagtattggcagaattgtatatgtctcggatcgtttgtcttcatggtgtgccaaagaagatagtgtcagacagaggaacgcagttcacctctcatttctggcagccgttgcatgaagccttgggcacgcatctgaatttcagttcagcttatcatccgcagacggatggtcagaccgaaaggaccaatcaaattcttgaagacatgttgagagcctgtgcgttgcaagatcagtccggatgggacaagagattgccttatgcagagttttcctataacaacagttatcaggccagtttgaagatgtcaccgtttcaagcgctgtatggaaggagttgcagaactccgttgcaatgggatcagcctggagagaagcaggtgtttgggccagatattttgcttgaagccgaagagaacatcaagatggtccgagagaatctgaagatagcgcaatcaaggcagcgaagctatgcagacacaagaagaagagagctgagtttcgaagtcggagactttgtctatctgaaagtgtcaccgatcagaggagtcagaagattcggagtgaaaggcaagctggcaccccgctacattggtccgtatcagattcttgcaagacgtggagaagtggcttatcagctcagtttgccagagaatttgtctgctgtgcatgatgtctttcatgtgtctcagttgaagaagtgcttgcgtatgccagaagagcagttgccagtggaaggtcttgaagtccaggaggacttgacctacgttgagaagccagctcagatccttgaggttgcagatagagtcacccgaaggaagaccgtcagaatgtgcaaagtcagatggagtcaccactctgaagaagaagcaacctgggagcgtgaagatgatctgatggccaaatacccggagctctttgctagccagccctga

SEQ ID NO: 5191 - DNA, 4041 bp, Zea mays
  Clone ID: TF_ZmC3792_32
atggatgctgaagactggctgcgcactgtggagcgggagttgcataccgctcagtgcgatgacagggagaaagttttgtatggtccccgtctgttgagaggagcagcccagtcatggtgggagtcttacctcgccactcatgcccaccctaacgccatcacctgggaagagttcagaggtagctttcgtcagtaccatgtacctgcaggtctgatgacagtgaagaaggaggagttcctggccctcaagcaagggtcatcgtctgtcagtgagtatcgggacaggttcctgcaattgtctcgctatgctcctgaagatgtcaacaccgacgccaagcgacagtaccgtttcctgagaggcttggttgaccctctacattatcaactgatgaaccataccttcccgacgttccagcacctgattgacagagcgatcatgacagaaaggaagcgcaaggagatggaagatccaaaccagcagaacagtcaggcagcgccagctcaggttggaaacagggcatgtttccactgtggagagcaaggccactgggtgatgcaatgtccgaagaaggcagcccagcagcagtcaggccccaatgccccagcgaagcagaatgtgcctcagcctggagcaggcaatcgccctcagccgcgctataatcatggaagactgaatcacttagaggcggaagcagttcaggagacccccggcatgatagtaggtatgttcccagtcgactcccatatcgcagaagtgttatttgatactggagcaacgcattctttcattactgcatcatgggtagaagcacataatcttccaattactaccatgtcaacccccattcaaattgactcagccggtggtaggattcgagccgatagcatttgtttgaatataagtgtggaaataagggggatagcgtttcccgccaaccttatagtaatgggtactcagggaatagatgtcatcctagggatgaattggctagataagtaccaggcagttatcagttgtgataaaaggacaatcaagttggtgtccccactaggagaggaagtggtgaccgagttagtcccgcctgagccaaagaaaggaagttgttatcagatagctgttgatagcaatgaagcagacccgatcgagagtatcaaggttgtgtccgaattcccggatgtgtttccaaaggacttaccgggtatgccaccagagcggaaagttgagttcgctatagagcttcttcctggaaccgcccctatctttaagagagcttacagaatatctggaccagagttggttgaacttaaggagcagattgatgagctgtcagagaaaggttacattcgaccaagcacctcgccttgggccgcccctgtcttgttcgtggaaaagaaggatggcaccaagaggatgtgtatcgattaccgagctctgaatgaagtcacgatcaagaacaagtatcccttacccagaatagaagatctgttcgaccagttgagaggagccagtgtgttttccaagattgatctgaggtcaggttatcaccagctcaggatccgaccttcagacattccgaagacggctttcattaccaagtatgggttgtatgagttcacagtgatgtcttttggtttgaccaatgcgccagcgttcttcatgaacttgatgaatagtgtattcatggattatctcgacaagtttgtggtggtattcattgatgatattctgatttattctcaaagcgaagaagagcacgcagatcatttgaggatggtattgcaaagattgcgagagcaccagttgtatgcaaagttgagcaagtgtgagttctggatcagtgaagtcctgttcttgggtcacataatcaacaaagaaggattggttgtggatccgaagaaagtggcaaccattttgaactgggaagcgccaacagatgctagaggaatcaagagcttcattggaatggccggatactatcggcgattcattgaagggttttcgaagattgcgaaaccaatgacagcgttgctaggcaacaaagttgagtttaagtggacccagaaatgccaagaggcctttgaagcgctgaaagagaagttgactacagcgcctgtcctagtcttgcctgatgtgcacaagcccttctcggtgtattgtgatgcttgttacacaggtttgggatgtgtgttgatgcaagagggaagagttgtggcttactcgtcccgacagttgaaggttcatgagaagaattacccaatccatgacctagagttggcggcggtggttcatgcactgaagtcatggaggcactacctgtatggacagaaatgcgatgtttacacagatcacaagagtctgaagtacatattcacccagtcagagttgaacatgaggcagcgaagatggttagagttgatcaaagattatgagttggaaattcattaccatccaggcaaagcaaacgtagtggcagatgctttgagcagaaagagtcaagtcaatctgatggtcgctcgtccgatgccttatgagttggccaaggagtttgacaggttgagtctcggatttctgaacaattcacgaggggtcacagttgagttggaacctaccttggagcgcgaaatcaaagaagcgcaaaagaatgatgagaaaatcagtgagattcggcgactgattctagatggcagagacaaagactttcgagtggatgcagaaagcgtgatatggttcaaagaccgcttgtgtgttcccaatgtccagtctattcgggagttgattctcaaggaagctcatgagacgacctattcgattcaccctggcagtgagaagatgtatcaggatctgaaaaagaaattctggtggtacggaatgaagagggagatcgcagagcatgtggctaggtgcgatagttgccgaagaattaaggcagagcaccagagacccgctggattgttgcaaccgttgcagatccctcagtggaaatgggacgaaatcggtatggatttcatagtcggattgcctcgcactcgagccggctacgattccatctgggtagtagtggaccgtttgaccaagtcagcccacttcatacctgtcaagaccaactacaacagtgcagtattggcagaattgtatatgtctcagatcgtttgtcttcatggtgtgccaaagaagatagtgtcagacagaggaacgcagttcacctctcatttctggtggcagttgcatgaagctttgggcacgcatctgaatttcagttcagcttatcatccgcagacagatggccagaccgaaaggaccaaccaaattcttgaagacatgttgagagcctgtgcgttgcaagatcagtccggatgggataagagattgccttatgcagaattttcctataacaacagttaccaggccagcttgaagatgtcaccatttcaggcgctctatggaaggagttgcagaactccgttgcaatgggatcagcctggagagaagcaagtgtttgggccagacattctacttgaagctgaagagaacatcaagatggtccgagagaatctgaagatagcgcaatcgaggcagcaaagctatgcagacacaagaagaagagagctgagtttcgaggtcggagactttgtctatctgaaagtgtcaccgatcagaggagtcagaagatttggagtgaaaggcaagctagcaccccgctacattggtccgtatcagattcttgcaagacgtggagaagtggcctatcagctcagtctgccagagaatttgtccgctgtgcataatgtctttcatgtgtctcagttgaagaagtgcttgcgtgtgccagaagagcagttgccggtggaaggtcttgaagtccaagaggacttgacctatgttgagaagccagtgcaaatccttgagattgcagaccgagtcacccggagaaagaccatcagaatgtgcaaagtcagatggaatcatcactctgaggaagaagcaacctgggagcgtgaagatgatctgatggctaaataccctgagctctttgctagctaa

SEQ ID NO: 5192 - DNA, 5568 bp, Zea mays
  Clone ID: TF_ZmC3792_4
atggctcgacttagacacactgcacgaaagtcagtcatccccttcttaccctcccgtcttgctgagcgtccgcttcgccgtcccgtggccggacagtccagccacttggagagactacaccaccgcctgcgtgaggagcaggaacgtcgacgacaggagcagcggagctcttccctctcgctccaccaggagatagagtctgtgaggagctgctctcctgtgcttcctctggagccgccccctgcaccaccactgggcgccccagcttctggagtagctgctggaggagacccagacaacggaggaggcgacgacagctcgagccacgacaccgacttctctgctaatcctgagccggaaggatgggttgctcgacccatcactcgcgacgctgctcgcgggtgtcacttccatgatgcgctcgacaccctgctacgtcgggcatttgaccggcatacttggtccgtcgagtatcgctgtgtggtctaccagcacagtcgcggggtctacccggaccgctgggaggcaacttgcttggtgcgctgcccggagaacagtctccagggtgcagaggcctgttcagagcactattctatctctgagcgggactcagctgaggcagccatgcaagatgctgcacggcgtgcgctttcgcactactgctcggttttcggtggggcagctgacggtcttgacctgaagtattacccccgccgttcatctggcagcacaggaggcgtgattgtctcacctgtcggtgagggcaatcctaggttgagcagcacagtcaacctagccgccgtgctaaacacggagctggaccatgcattagacgagctgagtagggctcgtgctgagatcgccctgctgcgggctgagcgcgcggaacgtcgttacctggacggtggttcccccgctcccgttgggactcagcacccagtgtgggtatcccctgcattttggtttacatactatgtcaataaaatgtcagagaacaggcgtagaggaggaaggcgtgctcagcaggagcgagccgctccgcaggatgaggtgccccagcagcagcacctgccgcccccgcccccgatgtccatcgagcagatgtttctgatgcagactcaggcagttcaagccatcggtcagactctggccgccattcagcagcagcagcagcagcaacagcagcaggctccaccccagcctcagatgcctcagatgcctagagataagcgtgctgaattcatgagaggtcatccaccaacgttcgctcactcttctgaccccatggatgctgaagattggctgcgcactgtggagcgggagttgcataccgctcagtgcgatgacagggagaaagttctgtatggtccccgtctgttgagaggagcagcccagtcatggtgggagtcttacctcgccacccatgccaaccccgacaccatcacctgggaagaattccgaggtagctttcgtcagtaccatgtgcctgcaggtctgatgacagtgaagaaggaggagttcctggcccttaagcaagggtcatcgtctgtcagtgagtatcgggacaggtttctgcagttgtctcgctatgctcctgaagatgtcaacaccgacgccaagcgacagtaccgtttcctgagaggcttggttgaccctctgcagtatcagctgatgaatcacaccttcccgacattccagcacctgattgacagagcaatcatgacagaaaggaagcgcaaggagatggaagatcgtaagcgcaagatcagtggaccgcagtctggaagcagcagtcgccctcgcttttcaggcaatcaacctcagcagttcaggcagaaccagcgtccacctcagcagcatcagcagcgtcagcagtatcagcagtttcaaaggcagtaccctcagaatcagtaccagaaccgtcagagcaatcagtcaggaggtcagtttcagaggcagaatcagcaaacacctcgtcttcctgccccagcaaatcagcagaacagtcaggcagcaccagctcaggttggaaacagggcatgtttccactgtggagagcaaggccattgggtgatgcaatgtccgaagaaggcagcccagcagcagtcaggccccaatgccccagcaaagcagaatgtgcctcagcctggagcaggcaatcgctctcagcagcgctataatcatggaagattgaatcacttggaagctgaagcagttcaggagacccccggcatgacaataggtatgttcccagtcgattcccatattgcagaagtgttatttgatactggagcaacacattctttcattactgcatcatgggtagaagcacataatcttccaataactaccatgtcaccccccattcaaattgattcagccggtggtagaattcgagccgatagcatttgtttgaatataagtgtgaaaataagggggatagcgtttcccgccaaccttatagtaatgggtactcagggaatagatgtcatcctagggatgaattggctagataagtatcaggcagttatcagttgtgataaaaggacaatcaagttagtgtccccactaggagaggaagtggtgaccgagttagtcccgcctgagccaaagaaaggaagttgttatcagatgactgtcgatagcagtgaagcagacccaattgagagtatcaaggttgtgtctgaattcccagatgtgtttccaaaggatttaccgggtatgccaccagagcggaaagttgaatttgccatagagcttcttcctggaaccgcccctatcttcaagagagcttacagaatatctggaccagagttggatgagcttaagaagcagattgatgagctgtcagaaaaaggttacatccggccaagcacctcgccttgggccgcccctgtcttgttcgtggagaagaaagatggcaccaagaggatgtgcatcgattatcgagctttgaatgaggtcacgatcaagaacaagtatcccttgcccagaatagaagatctgttcgaccagttgagaggagccagtgtgttctccaagatcgatctgaggtcaggttatcatcagctcaggatccgaccttcggacattccgaagacggcattcattaccaagtatggtttatatgagttcacagtgatgtcttttggtttgaccaatgcgccagcattcttcatgaacttgatgaacagtgtattcatggattatcttgataagtttgtggtggtattcattgatgacattctggtttattctcaaagtgaagaagagcatgcagatcatttgaggatggtattgcagagattgcgagagcaccagttgtatgcaaagttgagcaagtgtgagttctggatcagtgaagtcctgttcttgggtcacataatcaacaaagaaggattggctgtggatccgaagaaagtggcagacattctgaactggaaagcgccaacggatgctcgaggaatcaagagcttcattggaatggccggatattatcggcgattcattgaagggttttcgaagattgcgaagccaatgacagcgttgctaggcaacaaggttgagttcaagtggacccagaaatgccaagaggcctttgaagcgctgaaagagaagttgactacagcgcctgtcctagtcttgcctgatgtgcacaagcccttctcggtgtattgtgatgcttgttacacaggtttgggatgtgtgttgatgcaagagggaagagttgtggcttactcgtcccgacagctgaaggttcatgagaagaactaccccatccatgatctagagttggcagcagtggttcacgcactgaagacatggaggcactatctgtatggacagaaatgcgatgtttacacagaccacaagagtctaattcacatattcgctcagtcagaattgaacatgaggcaacgaagatggttagaattgatcaaagactatgagttggagattcattaccatccaggcaaagcaaacgtagtggcagatgctttgagcagaaagagtcaagtcaatctgatggtcgctcgtccgatgccttatgagttggccaaggaatttgacaggttgagtctcggatttctgaacaattcgcgaggagtcacagttgaattggaacctaccttggagcgcgaaatcaaagaagcgcagaagaatgatgagaagatcagtgagattcggcgattgattctagaaggcaaaggcaaagattttcgagaggatgcagaaggtgtggtatggttcaaagaccgcttgtgtgttcccaatgtccagtctattcgggagttgattcttaaggaagctcatgagacagcctattcgattcaccctggcagtgagaagatgtatcaggatctgaagaagaaattctggtggtacggaatgaaaagagaaatcgcagagcatgtggctatgtgcgatagttgtcgaagaattaaagcagaacaccagagaccagctggattgttgcaaccgttgcagatccctcagtggaaatgggatgaaattggtatggatttcatagtcggattgcctcgcactcgagccggctacgattccatttgggtagtagtggaccgcttgaccaagtcagcccacttcatacctgtcaagaccaactacaacagtgcagtattggcagaattgtatatgtctcggatcgtttgtcttcatggtgtgccaaagaagatagtgtcagacagaggaacgcagttcacctctcatttctggcagcagttgcatgaagccttgggcacgcatctgaatttcagttcagcttatcacccgcagacagatggtcagactgaaagaaccaatcaaattcttgaagatatgttgagagcctgtgcgttgcaagatcagtccggatgggacaagcgattgccttatgcagagttttcctataacaacagttatcaggccagtttgaagatgtcaccgtttcaagcgctgtatggaaggagttgcagaactccgttgcaatgggatcagcctggggaaaagcaagtgtttgggccagacattttgctcgaagccgaagagaacgtcaagatggttcgagagaatctgaagatagcgcaatcaaggcagcgaagctatgcagacacaagaagaagagagctgagtttcgaagtcggagactttgtttatctgaaagtgtcaccgatcagaggagtcagaagattcggagtgaaaggcaagctggcaccccgctacattggtccgtatcagattcttgcaagacgtggagaagtggcttatcagctcagtttgccagagaatttgtctgctgtgcatgatgtctttcatgtgtctcagttgaagaagtgcttgcgtatgccagaagagcagttgccagtggaaggtcttgaagtccaggaggacttgacctacgttgagaagccagctcagatccttgagattgcagatagagtcacccgaaggaagaccgtcaggatgtgcaaagtcagatggagtcaccactctgaggaagaagcaacctgggagcgtgaagatgatctgatggccaagtacccggagctctttgctagccagccctga

SEQ ID NO: 5193 - DNA, 4350 bp, Zea mays
  Clone ID: TF_ZmC3792_46
atgcctcagatgcccagggacaagcgtgctgaattcatgagaggtcatcccccagcgttcgctcactcttctgaccccatggatgctgaagattggctgcgcactgtggagcgggagttgcacaccgctcagtgcgacgacagggagaaggtcttgtatggtccccgtctgttgagaggagcagcccagtcttggtgggagtcttacctcgccacccatgccaaccccgacgccatcacctgggaagaattcagaggtagcttccgtcagtaccacgtgcctgcaggtctgatgacagtgaaggaggagttcctggccctcaagcaagggccttcgtccgtcagtgagtaccgagacaggtttctgcagctgtcccgctatgctcctgaggatgtcaacactgacgccaagcggcagtaccgtttcctgagaggcttggtcgaccccctgcagtatcaactgatgaatcacaccttccccacattccagcacctgattgacagagcgatcatgacagagaggaagcgcaaggagatggaggatcgcaagcgcaagatcagtggaccccagcctggaagcagcagccgccctcgtttctcaggcaacccacctcagcagttcaggcagaaccagcgcccacctcagcagcggcagctccatcggcagttccctcggcaccagccgcagcatcgctaccagaaccgtcagagcaatcagtcaggaggtcagtttcaaaggcagaatcagcaagcaccccgtcttcctaccccagcaaaccagcagaacagtcaggcagcaccagctcaggttggaaacagggcatgtttccactgtggagagcagggccattgggtgatgcaatgtccgaagaaggcagcccagcagcagtcaggccccaatgccccagcaaagcagaatgtgtctcagcctggagcaggcaaccgccctcaacagcgctataatcatggaagattgaatcacttggaggctgaagcagttcaggagacccccggcatgatagtaggtatgttcccagtcgactcccatattgcagaagtgttatttgatactggagcaacgcattctttcattactgcatcatgggtaaaagcacataatcttccaactactaccatgtcaacccccattcaaattgactcagctggtggtagaattcgagctgatagcatttgtttaaatataactgtggaaataagggggatagcgtttcccgccaaccttatagtaatgggtactcagggaatagatgtcatcctaggggtgaattggttagataagtatcaggcagttatcagttgtgataaaaggacaatcaagttggtgtccccactaggaaaggaagtggtgaccgagttagtcccacctgagccgaagaaaggaagttgttatcagatggctgtcgatagcagtgaagcagatccagttgagagtatcaaggttgtgtctgaattcccagatgtgtttccaaaggatttaccgggtatgccaccagagcggaaagttgagtttgccatagagcttcttcctggaaccgcccccatctttaagagagcttacagaatatccggaccagagttggttgagcttaagaagcagattgatgagctgtcagagaaaggttacacccggccaagcacctcgccttgggccgcccctgtcttatttgtggaaaagaaagatggcaccaagaggatgtgcatcgattatcgagctttgaatgaggtcacgatcaagaacaagtatcccttgcccagaatagaagatctgttcgaccagttgagaggagccagtgtgttctccaagattgatctgaggtcaggttatcatcagctcaggatccgaccttcggacattccgaagacggcattcattaccaagtatggtttgtatgagttcacagtgatgtcttttggtttgaccaatgcaccagcgttctttatgaatctgatgaacagtgtattcatggattaccttgataagtttgtggtggtattcattgatgacattctgatttattcccaaagcgaagaagagcacgcagatcatttgaggatggtattgcagagattgcgagagcaccagttgtacgcaaagttgagcaagtgtgagttctggatcagcgaagtcctgttcttgggtcacataatcaacaaggaaggattggctgtggatccgaagaaagtggcagacattctgaactggaaagcgccaacggatgctcgaggaatcaagagcttcattggaatggccggatactatcggcgattcattgaagggttttcgaagattgcgaagccaatgacagcgttgctaggcaacaaggttgagttcaaatggacccagaaatgtcaagaggcctttgaagcgctgaaagagaagttgactacctcgcctgtcctaatcttgcctgatgtgcacaagcccttctcggtgtattgcgatgcttgttacacaggtttgggatgcgtattgatgcaagagggaagagttgtggcttactcgtcccgacagttgaaggttcatgagaagaactacccaatccatgatctagagttggcagcagtggttcacgcactgaagacatggaggcactatctgtatggacagaaatgcgatgtttacacagatcacaagagtctgaagtacatattcactcagacagagctgaacatgaggcaacgaagatggttagagctgatcaaagactatgagttggagattcattaccatccaggcaaagcaaacgtagtggcagatgctttgagcagaaagagtcaagtcaatctgatggtcgctcgcccgatgccttatgagttggccaaggagttcgacaggttgagtctcgggtttctgaacaattcgcgaggagtcacagttgaattggaacctaccttggagcgagaaatcaaagaagcgcagaagaatgatgaaaagatcagtgagattcggcgattgattctagatggcagaggcaaagattttcgagaagatgctgaaggcgtgatatggttcaaagaccgcttatgtgttcccaatgtccagtctattcgggagttgattctcaaggaagctcatgagacagcctattcgattcaccctggtagtgagaagatgtatcaggatctgaggaagaaattctggtggtacggaatgaagaggaaaatcgcagagcatgtggctaagtgcgatagttgtcgaagaattaaggcagagcaccagagaccagctggattgttgcaaccgttgcagatccctcagtggaaatgggatgaaattggtatggatttcatagtcggattgcctcgcactcgagccggctacgattctatttgggtagtggtggaccgtttgaccaagtcagcccacttcatacctgtcaagaccagctacaacagtgcagtattggcagagttgtatatgtctcggatcgtttgtcttcatggtgtgccaaagaagatagtgtcagacagaggaacgcagttcacctctcatttctggcagcagttgcatgaagccttgggcacacatctgaatttcagttcagcttatcacccgcagacagatggccagactgaaaggaccaatcaaattctcgaagatatgttgagagcctgtgcgttgcaagatcagtccggatgggacaagcgattgccttatgcagagttttcctataacaacagttaccaggccagtttgaagatgtcaccgtttcaggcgctttatggaaggagttgtagaactccgttgcaatgggatcagcctggagagaagcaagtgtttgggccagacattctgcttgaagccgaagagaacatcaagatggtccgagagaatctgaagatagcgcaatcgaggcagcaaagctatgcagacacaagaagaagagagctgagttttgaagtcggagactttgtctatctgaaagtgtcaccgatcagaggagtcagaagattcggagtgaagggcaagctagcaccccgctacattggtccgtaccagatcctctcaaagcgtggagaagtggcttatcagctcagcctgccagagaatttgtctgttgtgcatgatgtctttcatgtgtctcagttgaagaagtgcttgcgtgtgccagaagagcagttgccagtggaaggtcttgaggtccaggaggacttgacctatgttgagaagccagctcagatccttgagattgcagacagagtcacccgaaggaagaccatcagaatgtgcaaagtcagatggaatcaccactctgaggaagaagcaacctgggagcgtgaagatgatctagtggccaagtacccagagctctttgctagccagccctga

SEQ ID NO: 5194 - DNA, 4473 bp, Zea mays
  Clone ID: TF_ZmC3792_6
atgtcgatcgagcagatgtttctgatgcagactcaggcagttcaagccatcggtcagactctggccgccattcagcagcagcagcagcagcaggctccaccccagcctcagatgcctcagatgcccagagacaagcgtgctgaattcatgagaggtcatccaccaacgttcgctcactcttccgaccccatggatgctgaagattggctgcgcactgtggagcgggagttgcataccgctcagtgcgatgacagggagaaagttctgtatggtccccgtctgttgagaggagcagcccagtcatggtgggagtcttacctcgccacccatgccaaccccgacgccatcacctgggaagagttcagaggtagctttcgtcagtaccacgtgcctgcaggtctgatgacagtgaagaaggaggagttcctggccctcaagcaagggtcatcgtctgtcagcgagtatcgggacaggtttctgcagttgtctcgctacgctcccgaagatgtcaacaccgacgccaagcggcagtaccgtttcctgagaggcttggttgaccctctgcagtatcagctgatgaatcacaccttcccgacattccagcacctgattgacagagcaatcatgacagaaaggaagcgtaaggagatggaagatcgtaagcgcaagatcagtggaccccagcctggaagcagcagccgtccccgtttctcaggcaatcaacctcagcagttcaggcagaaccagcgtccacctcagcagcatcagcagcgtcagcagtatcagcagttccaaaggcagtatcctcagcatcagtaccagaaccgtcagagcaatcagtcaggaggtcagtttcagaagcagaatcagcaagcacctcgtcttcctgccccagcgaatcagcagaacagtcaggcagcaccagctcaggttggaaacagggcatgtttccactgtggagagcaaggccactgggtgatgcaatgtccgaagaaggcagcccagcagcagtcaggccccaatgccccagcaaagcagaatgtgtctcagcctggagcaggcaatcgccctcagccgcgctataatcatggaaggctgaaccacttggaggctgaagcagttcaggagacccccggcatgacagtaggtatgttcccagtcgactcccatattgcagaagtgttatttgatactggagcaacacattctttcattactgcatcatgggtagaagcacataatcttccaattactaccatgtcaacccccattcaaattgactcagctggtggtagaattcgagctgatagcatttgtttaaatgtaagtgtggaaataagggggatagcgtttcccgccaaccttatagtaatgggtactcagggaatagatgtcatcctagggatgaattggttagataagtatcaggcagttatcagttgtgataaaaggacaatcaagttggtgtccccactaggagaggaagtggtgaccgagttagtcccgcctgagccaaagaaaggaagttgttatcagatggccgtcgatagcagtgaagcagacccaattgagagtatcaaggttgtgtccgaattcccagatgtgtttccaaaggacttaccgggtatgccaccagagcggaaagttgaatttgctatagagcttcttcctggaaccgcccccatctctaagagagcttacagaatatctggaccagagttggttgagcttaagaagcagattgatgagctgtcagagaaaggttacatccggccaagcacctcgccttgggccgcccctgccttgtttgtggagaagaaagatggcaccaagaggatgtgtatcgattatcgagctttgaatgaggtcacgatcaagaacaagtatcctttgcccagaatagaagatctgttcgaccagttgagaggagccagtgtgttctccaagatcgatctgaggtcaggttatcatcagctcaggatccgaccttcggacattccgaagacggcattcattaccaagtatggtttatatgagttcacagtgatgtcttttggtttgaccaatgcgccagcgttctttatgaacttgatgaacagtgtattcatggattatcttgataagttcgtggtggtattcattgatgacattctggtttattctcaaagtgaagaagagcatgcagatcatttgaggatggtgttgcagagattgcgagagcaccagttgtatgcaaagttgagcaagtgtgagttctggatcagtgaagtcctgttcttgggtcacataatcaacaaagaaggattggctgtggatccgaagaaagtggcagacattctaaactggaaagcgccaacggatgctcgaggaatcaagagcttcattggaatggccggatattatcggcgattcattgaagggttttcgaagattgcgaagccaatgacagcgttgctaggcaacaaggttgagttcaagtggacccagaaatgccaagaggcctttgaagcgctgaaagagaagttgacaacagcgcctgtcctagtcttgcctgatgtgcacaagcccttctcggtgtattgcgatgcttgttacacaggtttgggatgtgtgttgatgcaagagggaagagttgtggcttactcgtcccgacagctgaaggttcatgagaagaactacccaatccatgatctagagttggcagcagtggttcacgcactgaagacatggaggcactatctgtatggacagaaatgcgatgtttacacagaccacaagagtctgaagtacatattcactcagtcggagttgaacatgaggcaacgaagatggttagagttgatcaaagactatgagttggagatccattaccatccaggaaaagcgaacgtagtggcagatgctttgagcagaaagagtcaagtcaatctgatggtcgctcgtccgatgccttatgagttggccaaagagtttgacaggttgagtctcgggtttctgaacaattcgcgaggagtcacagttgaattggaacctaccttggagcgcgaaatcaaagaagcgcagaaaaatgatgagaagatcagtgagattcggcgattgattctagatggcagaggcaaagactttcgagaagatgcagaaggtgtggtatggttcaaagaccgcttgtgtgttcccaatgtccagtctattcgggagttgattcttaaggaagctcatgagacagcttattcgattcaccctggcagtgagaagatgtatcaggatctgaagaagaaattctggtggtacggaatgaaaagagaaatcgcagagcatgtggctatgtgcgatagttgtcgaagaattaaggcagaacaccagagaccagctggattgttgcaaccgttgcagatccctcagtggaaatgggatgaaattggtatggatttcatagtcggattgcctcgcactcgagccggctacgattccatttgggtagtagtggaccgcttgaccaagtcagcccacttcatacctgtcaagaccaactacaacagtgcagtattggcagaattgtatatgtctcggatcgtttgtcttcatggtgtgccaaagaagatagtgtcagacagaggaacgcagttcacctctcatttctggcagcagttgcatgaagccttgggcacgcatctgaatttcagttcagcttatcacccgcagacagatggtcagactgaaagaaccaatcaaatccttgaagatatgttgagagcctgtgcgttgcaagatcagtccggatgggacaagcgattgccttatgcggagttttcctataacaacagttaccaggccagtttgaagatgtcaccgtttcaagcgctgtatggaaggagttgcagaactccgttgcaatgggatcagcctggagagaagcaggtgtttgggccagacattttgcttgaagccgaagagaacatcaagatggtccgagagaatctgaagatagcgcaatcgaggcagcgaagctatgcagacacaagaagaagagagctgagtttcgaagtcggagactttgtctatctgaaagtgtcaccgatcagaggagtcagaagattcggagtcaaaggcaagctggcaccccgctacattggtccgtatcagattctcgcaaggcgtggagaagtggcctatcagctcagcctgccagagaatttgtctgctgtgcatgatgtctttcatgtgtctcagttgaagaagtgcttgcgtgtgccagaagagcagctgccagtggaaggtcttgaggtccaggaggacttgacctacgttgagaagccagctcagatccttgaggttgcagatagagtcacccgaaggaagaccgtcagaatgtgcaaagtcagatggagtcaccactctgaggaagaagcaacctgggagcgtgaagatgatctgatggccaagtacccggagctctttgctagccagccctga

SEQ ID NO: 5195 - DNA, 4482 bp, Zea mays
  Clone ID: TF_ZmC3792_8
atgtcgattgagcagatgtttctgatgcagactcaggcagttcaagccatcggtcagactctggccgccattcagcagcagcagcagcagcaacagcagcaagcaccaccccagcctcagatgcctcagatgcctagagacaagcgtgctgaattcatgagaggtcatccaccaacgttcgctcactcttctgaccccatggatgctgaagattggctgcgcactgtggagcgggagttgcataccgctcagtgcgatgacagggagaaagttctgtatggtccccgtctgttgagaggagcagcccagtcatggtgggagtcttacctcgccacccatgccaaccccgacaccatcacctgggaagaattccgaggtagctttcgtcagtaccatgtgcctgcaggtctgatgacagtgaagaaggaggagttcctggcccttaagcaagggtcatcgtctgtcagtgagtatcgagacaggtttctgcaattgtctcgctatgctcctgaagatgtcaacactgacgccaagcgacagtaccgtttcctgagaggcttggttgaccctctgcagtatcagctgatgaatcacaccttcccgacattccagcacctgattgacagagcaatcatgacagaaaggaagcgcaaggagatggaagatcgtaagcgcaagatcagtggaccccagcctggaagcagcagccgtccccgtttctcaggcaatcaacctcagcagttcaggcagaaccagcgtccacctcagcagcatcagcagcgtcagcagtatcagcagttccaaaggcagtaccctcagaatcagtaccagaaccgtcagagcaatcagtcaggaggtcagtttcagaagcagaatcagcaagcacctcgtcttcctgccccagcaaatcagcagaacagtcaggcagcaccagctcaggttggaaacagggcatgtttccactgtggagagcaaggccactgggtgatgcaatgtccgaagaaggcagcccagcagcagtcaggccccaatgccccagcaaagcagaatgtgtctcagcctggagcaggcaatcgccctcagccgcgctataatcatggaagactgaatcacttggaggctgaagcagttcaggagacccccgacatgacagtaggtatgttcccagtcgattcccatattgcagaagtgttatttgatactggagcaacacattctttcattactgcatcatgggtagaagcacataatcttccaactactaccatgtcaacccccattcaaattgactcagccggtggtagaattcgagctgatagcatttgtttaaatgtaagtgtggaaataagggggatagcgtttcccgccaaccttatagtaatgggtactcagggaatagatgtcatcctagggatgaattggctagataagtatcaggcagttatcagttgtgataaaaggacaatcaagttggtgtccccactaggagaggaagtggtgaccgagttagtcccgcctgagccaaagaaaggaagttgttatcagatggctgtcgatagcagtgaagcagacccaattgagagtatcaaggttgtgtctgaattcccagatgtgtttccaaaggatttaccgggtatgccaccagagcggaaagttgagtttgctatagagcttcttcctggaaccgcccccatctctaagagagcttacagaatatctggaccagagttggttgagcttaagaagcagattgatgagctgtcagagaaaggttacatccggccaagcacctcgccttgggccgcccctgtcttgtttgtggagaagaaagatggcaccaagaggatgtgtatcgattatcgagctttgaatgaagtcacgatcaagaacaagtatcctttgcccagaatagaagatctgttcgaccagttgagaggagccagtgtgttctccaagatcgatctgaggtcaggttatcatcagctcaggatccgaccttcggacattccgaagacggcattcattaccaagtatggtttatatgagttcacagtgatgtcttttggtttgaccaatgcgccagcgttcttcatgaacttgatgaacagtgtattcatggattatcttgataagttcgtggtggtattcattgatgacattctggtttattctcaaagtgaagaagagcatgcagatcatttgaggatggtattgcagagattgcgagagcaccagttgtatgcaaagttgagcaagtgtgagttctggatcagtgaagtcctgttcttgggtcacataatcaacaaagaaggattggctgtggatccgaagaaagtggcagacattctaaactggaaagcgccaacggatgctagaggaatcaagagcttcattggaatggccggatattatcggcgattcattgaagggttttcgaagattgcgaaaccaatgacagcgttgctaggcaacaaggttgagttcaagtggacccagaaatgccaagaggcctttgaagcgctgaaagagaagttgactacagcgcctgtcctagtcttgcctgatgtgcacaagcccttctcggtgtattgcgatgcttgttacacaggtttgggatgtgtgttgatgcaagagggaagagttgtggcttactcgtcccgacagttgaaggttcatgagaagaactacccaatccatgatctagagttggcagcagtggttcacgcactgaagacatggaggcactatctgtatggacagaaatgcgatgtttacacagaccacaagagtctgaagtacatattcactcagtcagaattgaacatgaggcaacgaagatggttagagttgatcaaagactatgagttggagattcattaccatccaggcaaagcaaacgtagtggcagatgctttgagcagaaagagtcaagtcaatctgatggtcgctcgcccgatgccttatgagttggccaaggagtttgacaggttgagtctcggatttctgaacaattcgcgaggagtcacagttgaattggaacctaccttggagcgcgaaatcaaagaagcgcagaaaaatgatgagaagatcagtgagatccggcgattgattctagatggcagaggcaaagactttcgagaagatgcagaaggcgtggtatggttcaaagaccgcttgtgtgttcccaatgtccagtctattcgggagttgattcttaaggaagctcatgagacagcttattcgattcaccctggcagtgagaagatgtatcaggatctgaagaagaaattctggtggtacggaatgaaaagagaaatcgcagagcatgtggctatgtgcgatagttgtcgaagaattaaggcagaacaccagagaccagctggattgttgcaaccgttgcagatccctcagtggaaatgggatgaaattggtatggatttcatagtcggattgcctcgcactcgagccggctacgattccatttgggtagtagtggaccgcttgaccaagtcagcccacttcatacctgtcaagaccaactacaacagtgcagtattggcagaattgtatatgtctcggatcgtttgtcttcatggtgtgccaaagaagatagtgtcagacagaggaacgcagttcacctctcatttctggcagcagttgcatgaagccttgggcacgcatctgaatttcagttcagcttatcacccgcagacagatggtcagactgaaagaaccaatcaaattcttgaagatatgttgagagcctgtgcgttgcaagatcagtccggatgggacaagcgattgccttatgcagagttttcctataacaacagttatcaggccagtttgaagatgtcaccgtttcaagcgctgtatggaaggagttgcagaactccgttgcaatgggatcagcctggagagaagcaagtgtttgggccagatattttgcttgaagccgaagagaacatcaagatggtccgagagaatctgaagatagcgcaatcgaggcagcgaagctatgcagacacaagaagaagagagctgagtttcgaagtcggagactttgtttatctgaaagtgtcaccgatcagaggagtcagaagattcggagtgaaaggcaagctagcaccccgctacattggtccgtatcagattcttgcaagacgaggagaagtggcttatcagctcagtttgccagagaatttgtctgctgtgcatgatgtctttcatgtgtctcagttgaagaagtgcttgcgtgtgccggaagagcagttgccagtggaaggtctggaagtccaggaggacttgacctatgttgagaagccagctcagatccttgaggttgcagatagagtcacccgaaggaagaccgtcagaatgtgcaaagtcagatggagtcaccactctgaggaagaagcaacctgggagcgtgaagatgatctgatggccaagtacccggagctctttgctagccagccctga

SEQ ID NO: 5196 - DNA, 5658 bp, Zea mays
  Clone ID: TF_ZM3392.C2.o1.fg
atgaggctggttatgattatgcttatggtaatgatggctcgacttagacacactgcacgaaagtctgtcatccccttcttaccctcccgccttgctgagcgtccgcttcgccgtcccgtggccggacagtccagccacttggagagactgcaccaccgcctgcatgaggagcaggaacgtcgacgacaggggcagcagggctcttctttctcgctccagcaggagatagagtctgtgaggagctgctctcctgtgcttcccctggaggcgccccctgcaccaccactgggcgccccagcttctggagtagctgctggaggagacctagacgacggagatgacgacgacagcctgagccacgacactgacttccctgctgaccatgagccggaaggatgggttgctcgacccatcactcgcgacgctgctcgcgggtgtcacttccatgatgcgctcgataccctgctacgtcgggcacttgaccgacgtacttggtccatcgagtatcgctgtgtggtctaccagcatagtcgcggggtctacccgtaccgttgggaggcgacctgtttggtgcgccgtccggagaacagtctccagggcgcggaggcttgctcagagcactattctatctctgagcgggactcagctgaggcagccatgcaagatgctgcacgacgtgcgctttcgcactactgcttggttttcggtggggtagctgacggtcttgacctgaagtattacccccgccgtccatctggcagcacaggaggcgtgattgtctcacctgtcggtgagggcaatcctaggttgagcagcacagtcaacctagccgtcgtgctaaacacggagctggaccatgcactagacgagctgagtagggctcgtgctgagatcgccctgctgcgggctgagcgcgcggaacgtcgtcacctggatgatggttcccccgctcccgttgggactcagcacccgtaccgctcacctcggcgtggacgccagtcttatgacaatcccgacttgctgttgaagaattctatactcttttcttatgctgcaagagttgccagatcagttctgatgtgtggttgcgttctgcagatgtcagagaacagacgcagaggaggaaggcgtgctcagcaggagcgagccgctccgcaggatgaggtgccccaacagcagcacctgccgcccccgcccccgatgtccatcgagcaaatgtttctgatgcagactcaggcagttcaagccatcggtcggaccttggccgccattcagcagcagcagcaacagcagcaggcaccacctcagcctcagatgcctcagatgcccagagataagcgtgctgaattcatgagaggtcatccaccaacgttcgctcattcttctgaccccatggatgctgaagactggctgcgcactgtggagcgggagttgcataccgctcagtgcgatgacagggagaaagttctgtatggtccccgtctgttgagaggagcagcccaatcatggtgggagtcttacctcgccacccatgccaatcctgacgccatcacttgggaagagttcaaaggaagcttccgtcagtaccatgttcctgcaggtctgatgacagtgaagaaagaggagttcctggctctcaagcaagggtcatcgtctgtcagtgaataccgggacatatttctgcagctgtctcgttatgctcctgaagatgtcaacaccgacgccaagcgacagtaccgtttcctgagaggcttggttgaccctctgcactatcagctgatgaatcacaccttcccgacattccagcacctgattgacagagcaatcatgacagagaggaagcgtaaggagatggaggatcgtaagcgcaagatcagtggaccccagcctggaagcagcagccgccctcgtttctcaggcaatcaacctcagcagtccaggcagaaccagcgtccacctcagcagcatcagcagtcccaaaggcagtaccctcagcatcagtaccagaaccgtcagaacaatcagtcaggaggtcagtttcagaggcagaatcagcaggcacctcgtcttcctgccccagcaagccagcagaacaatcaggcagcaccagctcaggttggaaacagagcatgttttcactgtggagagcaaggccactgggtgatgcaatgtccgaagaaggcagcccagcagcagtcaggccctaatgccccagcaaagcagaatgtgcctcagcctggagcaggcaatcgctctcagtcgcgttataatcatgggagactgaaccacttggaggctgaagcagttcaggagacccccggcatgatagtaggtatgttcccagtcaactcccgtattgcagaagtgttatttgatactggagcaacgcattctttcattactgcatcatgggtagaagcacataatcttccaattactaccatgtcaacccccattcaaattgactcagccggtggtagaattcgaaccgatagcatttgtttgaatataagcgtggaaataagggggatagcgtttcccgccaaccttatagtaatgggtactcagggaatagatgtcatcctagggatgaattggctagataagtatcaggcagttatcagttgtgataaaaggacaatcaagttggtgtccccactaggagaggaagtggtgaccgagttagtcccgcctgagccaaagaagggaagttgttatcagatggctgtcgatagcagtgaagcagatccaattgagagtatcaaggttgtgtccgagttcccggatgtgtttcaaaaggacttaccgggtatgccaccagagcggaaagttgaatttgccatagagcttcttcctggaaccgcccctatctttaagagagcttacagaatacctggaccagagttggttgaacttaagaagcaaatcgatgagttgtcagagaaaggttacatccggccaagcacctcgccttgggccgcccctgtcttgttcgtggaaaagaaagatggcaccaaaaggatgtgtatcgattatcgagctttgaatgaagtcacgatcaagaacaagtatcccttgcccagaatagaagatctgttcgaccagttgagaggagccagtgtgttctccaagattgacctgaggtcaggttatcatcagctcaggatccgaccttcggacattccgaagacgacattcattaccaagtatggtttgtatgagttcacagtgatgtcttttggtttgaccaatgcaccagcgtttttcatgaacttgatgaatagtgtattcatggattatcttgataagttcgtggtggtattcattgatgacattctggtttattctcaaagcgaagaaaaacatgcagatcatttgaggatggtattgcagagattgcgagagcaccagttgtatgcaaagttgagcaaatgtgagttctggatcagtgaagtcctattcttgggtcacataatcaacaaagaaggattggcggtggatccgaagaaagtggcagacattctgaactggaaagcgccaacggatgctcgaggaatcaagagcttcattggaatggccggatattatcgtcgattcattgaagggttttcgaagattgcgaaacctatgacagcgttgctaggcaacaaagttgagttcaagtggaccaagaaatgccaggaggccttcgaagcgctgaaagagaagttgactacagcgcctgtcctagtcttgcctgatgtgcacaagcccttctcggtgtattgtgatgcttgttacacaggtttgggatgtgtgttgacgcaagagggaagagttgtggcctactcgtcccgacagctgaaggttcatgagcagaattacccaatccatgatctagagttggcagcagtggttcacgcactgaagacatggaggcactatctgtatggacagaaatgcgatgtttacacagaccacaagagtctgaagtacatattcactcagtcagagttgaacatgaggcagcgaagatggttagagttgatcaaagactatgagttggagatccattaccatccaggcaaagcaaacgtagtggcagatgctttgagcaggaagagtcaagtcaatctgatggtcgctcgtctgatgccttatgagttggccaaggagttcgacaggttgagtctcggatttctgaacaattcgcgaggagtcacagttgagttggaacctaccttggagcgagaaatcaaagaagcgcagaagaatgatgagaagatcagtgagatccggcgactgattctagatggcagaggcaaagattttcgagaagatgcagaaggcgtgatatggttcaaagaccgcttttgtgttcccaatgtccagtctattcgggagttgatccttaaggaagctcatgagacagcttattcgattcaccctggtagtgagaagatgtatcaggatctgaagaagaaattctggtggtacggaatgaagagggaaatcgcagagtatgtggctatgtgtgatagttgtcgacggatcaaggcagagcaccaaagatcagctggattgttgcaaccgttgcagatccctcagtggaaatgggatgaaattggtatggatttcatagtcggattgcctcgcactcgagccggctacgattccatttgggtagtagtggaccgtttaaccaagtcagcccacttcatacctgtcaagaccaactacagcagtgtagtattggcagaactgtatatgtctcggatcgtttgtcttcatggtgtgccaaagaaaatagtgtcagacagaggaacgcagttcacctctcatttctggcagcagttgcatgaagctttgggcacacatctgaatttcagttcagcttatcatccgcagacagatggtcagactgaaaggaccaatcaaattcttgaagatatgttgagagcctgtgcgttgcaagatcagtccggatgggataagagattgccttatgcagagttttcctataacaacagttaccaggccagtttgaagatgtcaccatttcaggcgctttatggaaggagttgtaggactccgttgcactgggatcagcctggagaaaagcaagtgtttgggccagacattctacttgaagccgaagagaacatcaagatggttcgagagaatctgaagatagcgcaatcgagacagcgaagctatgcagacacaagaagaagagagctgagttttgaagtcagagactttgtctatctgaaagtgtcaccgatcagaggagtcagaagattcggagtcaaaggcaagttagcaccccgctacattggtccgtatcagattcttgcaagacgtggagaagtggcctatcagctcagtctgccagagaacttgtccgcagtgcatgatttttttcatgtgtctcagttgaagaagtgcttgcgtgtgccagaagagcagttgctagtggaaggtcttgaagtccaggaggacttgacctacgttgagaagccagcgcaaatccttgaggttgcagacagagtcacccaaaggaagaccatcagaatgtgcaaggttaaatggaagcatcactctgaggaagaagcaacctgggagcgtgaagatgatctgatggctaaataccctgagctctttgctagccaaccctga

SEQ ID NO: 5197 - DNA, 4077 bp, Zea mays
  Clone ID: TF_ZM3641.C5.o1.fg
atgtccatcgagcagatgtttctgatgcagactcaggcagttcaagccatcggtcagactttggccgccattcagcagcagcagcagcaacagcagcaggcaccacctcagcctcagatgcctcagatgcccagagacaagcgtgctgaattcatgagaggtcatccaccaacgtttgctcactcttctgaccccatggatgctgaagattggctgcgcactgtggagcgggagttgcataccgctcagtgcgatgacagggagaaagttctgtatggtccccggctgttgagaggagcagcccaatcatggtgggagtcttacctcgccacccatgcccatcctgacgccatcacttgggaaaagttcagaggtagctttcgtcagtaccatgtacctgcaggtctgatgacagtgaagaaggaggagttcctggccctcaagcaagggccattgtctgtcagtgagtaccgagacaagtttctgcaattgtctcgctatgctcctgaagatgtcaacaccgacgccaagcgacagtaccgtttcctgagaggcttggttgaccctcttcagtatcagctgatgaatcacaccttcccgacattccagcacctgattgacagagcaatcatgacagagaggaagcgcaaggagatggaagatccaaaccagcagagcagtcaggcagcaccagctcaggttggaaacagggcatgtttccactgtggagagcaaggacactgggtgatgcaatgtccgaagaaggcagcccagcagcagtcaggccccaatgccccagcaaagcagaatgtgcctcagcctggagcaggcaatcgctctcagccgcgctataatcatggaagactgaaccacttggaggctgaagcagttcaggagacccccggcatgatagtaggtatgttcccagtcgactcccatattgcagaagtgttatttgatactggagcaacgcattctttcattactgcatcatgggtagaagcacataatcttctaattactaccatgtcaacccccattcaaatcgactcagccggtggtagaattcgagccgatagcatttgtttgaatataagtgtggaaataagggggatagcgtttcccgccaaccttatagtaatgggtactcagggaatagatgtcatcctagggatgaattggctagataagtatcaggcagttatcagttgtgataaaaggacaatcaagttggtgtccccactaggaggagaagtggtgaccgagttagtcccgcctgagccaaagaaaggaagttgttatcagatagctgttgatagcagtgaagcagacccgatcgagagtatcaaggttgtgtccgagttcccagatgtgtttccaaaggacttaccgggtatgccaccagagcggaaagttgagtttgctatagagcttcttcctggaaccgcccctatcttcaagagagcttacagaatatctggaccagagttggatgaacttaagaagcaaattgatgagctgtcagagaaaggttacattcggccaagcacctcgccttgggccgcccctgtcctgtttgtggagaagaaagatggcacgaagaggatgtgtatcgattatcgagctttgaatgaagtcacgatcaagaacaagtatcccttgcccagaatcgaagatctgttcgaccagttgagaggagccagtgtgttctccaagattgatctgaggtcaggttatcatcagctcaggatccgaccttcggacattccgaaaacggcattcatttccaagtatggtttgtatgagttcacagtgatgtctttcggtttgaccaatgcgccagcattcttcatgaacttgatgaacagtgtattcatggattaccttgataagtttgtggtggtattcattgatgacattctggtttattctcaaagcgaagaagagcatgcaaatcatttgaggatggtattgcagagattgcgagagcaccagttgtatgcaaagttgagtaagtgtgagttctggatcagtgaagtcctgttcttgggtcacataatcaacaaggaaggattggctgtggatccgaagaaagtggcagacgttttgaactggaaagcgccaacagatgccagaggaatcaagagtttcattagaatggccggatattatcggcgattcattgaagggttttcgaagatcgcgaaaccaatgacagcgttgctaggcaacaaagttgagttcaagtggacccagaaatgccaagaggcctttgaagcgctgaaagagaagttgactacagcacctgtcctagtcttgcctgatgtgcacaagcccttctcggtgtattgtgatgcttgctacacaggtttgggatgtgtgttgatgcaagagggaagagttgtggcttactcgtcccgacagttgaaggttcatgagaaaaattacccaatccatgacctagagttgtcagcagtggttcatgcgctgaagtcatggaggcactatctgtatggacagaaatgcgatgtttacacagatcataagagtctgaagtacatattcactcagtcagagttgaacatgaggcaacgaagatggttagagttgatcaaagattacgagttggagattcattaccatccaggcaaagcaaacgtagtggcagatgctttgagcagaaagagtcaagtcaatctgatggtcgctcgtccgatgccttatgagttggccaaggagtttgacaggttgagtctcggatttctgaacaattcgcgaggagtcacagttgagttggaacctactttggagcgcgaaatcaaagaagcgcagaagaatgatgagaaaatcagtgagatccggcgactgattctagaagacaaaggcaaagattttcgaaaagacgcagaaggcgtgatatggttcagagaccgcttgtgtgttcccaatgtccagtccattcgggagttgattctcaaggaagctcatgagaccgcttattcgattcaccctagcagtgagaagatgtatcaggatctgaagaagaaattctggtggtacggaatgaagagggaaatcgcagagcatgtggctatgtgcgatagttgccgaagaattaaggcagagcaccagagacctgctggattgttgcaaccgttgcagatccctcagtggaaatgggatgaaattggtatggatttcatagtcggattgcctcgcactcgagccggctacgattccatttgggtagtagtggaccgtttgaccaagtcagcccacttcatacctgtcaagaccaactatagcagtgccgtattggcagagttgtatatgtctcggatcgtttgtcttcatggtgtgccaaagaagatagtgtcagatagaggaacgcagttcacctctcatttctggcagcagttgcatgaagctttgggcacgcatctgaatttcagttcagcttatcacccgcagacagatggccagaccgaaagaaccaaccaaattcttgaagacatgttgagagcctgtgcattgcaagatcagtccggatgggataagagattgccttatgcagagttttcctataacaacagttaccaggccagtttgaagatgtcaccatttcaggcgctttatggaaggagttgtagaactccgttgcaatgggatcagcctggagaaagcaaaggagtcagaagattcggagtgaaaggcaagctagcaccccgctacattggtccgtatcaggttcttgcaagacgtggagaagtggcctatcagctcagtttgcccgagaatttgtcagttgtgcatgatgtctttcatgtgtctcagttgaagaagtgcttgcgtgtgccagaagagcagttgccagtggaaggtcttgaagtccaggaggacttgacctacgttgagaagccagtgcaaatccttgagattgcagacagagtcacccgaaggaagaccatcagaatgtgcaaagtcagatggaatcaccactctgaggaagaagcaacctgggagcgtgaagatgatctgatggctaaataccctgagctctttgctagccaaccctga

SEQ ID NO: 5198 - DNA, 3192 bp, Zea mays
  Clone ID: TF_ZM3651.C4.o2.fg
atgtcgattgagcagatgtttctgatgcagactcaggcagttcaagccatcggtcagactttggccgccattcagcagcagcagcagcagcagcagcaagcaccaccccagcctcagatgcctcaggtgcctagagataagcgtgctgaattcatgagaggtcatccaccaacgttcgctcattcttctgaccccatggatgctgaagattggctgcgcactgtggagcgggagttgcataccgctcagtgcgatgacagggagaaagttctgtatggtccccgtctgttgagaggagcaacccagtcatggtgggagtcttacctcgccacccatgccaaccccgacaccatcacctgggaagaattcagaggtagctttcgtcagtaccatgtgcctgcaggtctgatgacagtgaagaaggaggagttcctggcccttaagcaagggtcatcgtctgtcagtgagtatcgagacaggtttctgcaattgtctcgctatgctcctgaagatgtcaacaccgacgccaagcgacagtaccgtttcctgagaggcttggttgaccctctgcagtatcagctgatgaatcacaccttcccgacattccagcacctgattgacagagcaatcatgacagaaaggaagcgcaaggagatggaagatcgtaagcgcaagatcagtggaccgcagtctggaagcagcagtcgccctcgcttttcaggcaatcaacctcagcagttcaggcagaaccagcgtccacctcagcagcatcagcagcgtcagcagtatcagcagttccaaaggcagtaccctcagaatcagtaccagaaccgtcagagcaatcagtcaggaggtcagtttcagaagcagaatcagcaagcacctcgtcttcctgccccagcaaatcagcagaacagtcaggcagcaccagctccggttggaaacagggcatgtttccactgtggagagcaaggccattgggtgatgcaatgtccaaagaaggcagcccagcagcagtcaggccccaatgccccagcaaagcagaatgtgtctcagcctggagcaggcaatcgctctcagcagcgctataatcatggaagattgaaccacttggaagctgaagcagttcaggagacccccgacatgacagtaggtatgttcccagtcgattcccatattgcagaagtgttatttgatactggagcaacacattctttcattactgcatcatgggtagaagcacataatcttccaactactaccatgtcaacccccattcaaattgattcagccggtggtagaattcgagctgatagcatttgtttgaatataagtgtgaaaataagggggatagcgtttcccgccaaccttatagtaatgggtactcagggaatagatgtcatcctagggatgaattggctagataagtatcaggcagttatcagttgtgataaaaggaccatcaagttggtgtccccactaggagaggaagtggtgactgagttagtcccgcctgagccaaagaaaggaagttgttatcagatgactgtcgatagcagtgaagcagacccgattgagagtatcaaggttgtgtccgaattcccagatgtgtttccaaaggatttaccgggtatgccaccagagcggaaagttgaatttgccatagagcttcttcctggaaccgcccctatcttcaagagagcttacagaatatctggaccagagttggatgagcttaagaagcagattgatgaactgtcagaaaaaggttacatccggccaagcacctcgccttgggccgcccctgtcttgtttgtggagaagaaagatggtactaagaggatgtgtattgattaccgagctttgaataaggtcacgatcaagaacaagtatcctttgcccagaatagaagatctgttcgaccagttgagaggagccagtgtgttctccaagatcgatctgaggtcaggttatcatcagctcaggatccgaccttcggacattccgaagacggcattcattaccaagtatggtttatatgagttcacagtgatgtcttttggtttgaccaatgcgccagcattctttatgaacttgatgaacagtgtattcatggattatcttgataagttcgcagtggtattcattgatgacattctgatttattctcaaagcgaagaagagcatgcagatcatttgaggatggtgttgcagagattgcgagagcaccagttgtatgcaaagttgagcaagtgtgagttctggatcagtgaagtcctgttcttgggtcacataatcaacaaagaaggattggctgtggatccgaagaaagtggcagacattctgaactggaaagcaccaacagatgctagaggaatcaagagcttcattggaatggccggatattatcggcgattcattgaagggttttcgaagattgcgaaaccaatgacagcgttgctaggcaacaaggttgagttcaagtggacccagaaatgccaagaggcctttgaagcgctgaaagagaagttgacaacagcgcctgtcctagtcttgcctgatgtgcacaagcccttctcggtgtattgtgatgcttgttacacagaaatgcgatgtttacacagaccacaagagtctgaagtacatattcactcaatcagaattgaacatgaggcaacgaagatggtccgagagaatctgaagatagcgcaatcaaggcagcgaagctatgcagacacaagaagaagagagctgagtttcgaagtcggagactttgtctatctgaaagtgtcaccgatcagaggagtcagaagattcggagtgaaaggcaagctagcaccccgctacattggtccgtatcagattcttgcaagacgtggagaagtggcctatcagctcagcctgccagagaatttgtctgctgtgcatgatgtctttcatgtgtctcagttgaagaagtgcttgcgtgtgccggaagagcagttgccagtggaaggtctggaagtccaggaggacttgacctacgttgagaagccagctcagatccttgaggttgcagatagagtcacccgaaggaagaccgtcaggatgtgcaaagtcagatggagtcaccactctgaggaagaagcaacctgggagcgtgaagatgatctgaaggccaagtacccggagctctttgctagccagccctga

SEQ ID NO: 5199 - DNA, 4371 bp, Zea mays
  Clone ID: TF_ZM4166.C3.o1.fg
atggagagtcatgatctccgggcagaaagggaatcacggcttgtgggtggcaatgagattgatggttttggttatgactatggtactggtaagtggtattctttccgtttggaaaggatggctcgtcttaggcacactgcacgaaagtctgtcatccccttcttaccctcccgccttgctgagcgtccgcttcgccgtcccgtggccggtcagtccagtcgcttggagaggctgcaccactgcctgcatgaggagcaggagcgtcgacgacaggagcagcaaggatcttctttctccctccaacaggagatagagtccgtgaggagctgctcccctgtgcttcccctggaggcgccccttgcaccaccactggacgccccagcctctggagtagctgctggaggagactcagacgacggaggtggcgacgacagctcgagccacgacaccgacttctctgctgaccaggagccggaaggatgggttgctcgacccatcactcgcgacgctgcacgcgggtgtcacttccacgatgcgctcggcaccctgctacgttgggcacttaaacgatgtacttggtctatcgagtatcgctgtgtggtctaccagcatagtcgcggggtctacccggaccgctgggaggcgacctgcttgatgtcagagaacaggcgcagaggaggaaggcgtgctcagcaggagcaagccgctcaacaggaagaggtgccccagcaacagcagctgccacccccgcccccgatgtccatcgagcagatgtttctgatgcagactcaggcagtccaagccatcggtcagactctggccgccatccagcagcagcagcaggcaccacctcagcctcagatgcctcagatgcccagggacaagcgtgctgaattcatgagaggtctgatgacagtgaagaaggaggagttcctggccctcaagcaagggtcatcgtctgttagcgagtaccgggataggtttctgcagctgtctcgctatgctcctaaggatgtcaacaccgacgccaagcgacagtaccgtttcctgagaggcttggtcgaccctctgcagtaccaactgatgaatcataccttcccgacatttcagcacctgattgacagagcaatcatgacagagaggaagcgtaaggagatggaggatcgtaagcgcaagatcagtggacccccgcctggaagcagcaatcgtcctcgtttctcaggcaatcaacctcagcagttcaggcagaaccagcatccacctcagtatcagcagttccaaaggcagtatcctcagcaccagtatcagaatcgtcagaacaatcagtcaggaggaggtcagtttcagaggcagaatcagcagacacctcgtcttcctgccccagcagcccagcagaacagtcaggcagcaccagctcagattgggaacagagcatgtttccactgtggagagcaaggccactgggtgatgcaatgtccgaagaaggcagcccagcagcaatcaggccccaatgccccagcaaagcagaatgtgtctcagcctggagcaggcaaccgctctcagccacgttataaccaagggagactgaatcacttggaggctgaagcagttcagaagacccccggcatgatagtaggtatattcccagtcgactcccatatagcagaagtgttatttgatactggagcaacgcattctttcattactgcatcatgggtagaagcacataatcttccaattactaccatgtcaacccccattcaaattgactcagccggtggtacaattcgagctgatagcatttgtttgaatgtaagtgtggaaataagggggatagcgttttccgctaatctcatagtaatgggtactcagggaatatatgtcatcctagggatgaattggctagataagtatcaggcagttatcagttgtgataagaggacaatcaagttggtgtccccactaggagaggaagtggtgaccgagttagtcccgcctgagccgaagaaaggaagttgttatcagatggttgtcgatagcagtgaagcagacccaattgagagtatcaaggttgtgtccgagttcccagatgtgtttccaaaggacctaccgggtatgccaccagagcggaaagttgagtttgccatagagcttcttcctggaaccgcccccatctttaagagagcttacagagtatcaggaccagagttggttgaacttaaaaagcagatcgatgaattgtcagagaaaggttacattcggccaagcacctcgccttgggccgcccctgtcctattcgtggagaagaaagatggcaccaaaaggatgtgtatcgattatcgagctctgaatgaagtcacaatcaagaacaagtatcctttgcccagaatagaagatctattcgaccagttgagaggagccagtgtgttctccaagattgatctgaggtcaggttatcatcagctcaggatccgaccttcgaacattccgaagacggcattcgttaccaagtatggtttgtatgagttcactgtgatgtcttttggtttgaccaatgcaccagcctttttcatgaatcttatgaacagtgtattcatggattatcttgataagtttatggtggtattcattgatgacattctgatttattctcaaagcgaagaagagcatgcagatcatttgaggatggtattgcagagattgcgagagcaccagttgtatccaaagttgagcaagtgcgagttctggatcagtgaagtcctgttcttggggttttcgaagattgcgaaaccaatgacagcgttgctaggcaacaaggttgagttcaagtggacccagagatgtcaagaggccttcgaagcactgaaagagaagttgactacagcgcctgttttagtcttgcctgatgtgcacaagcccttctcagtgtattgcgatgcttgttacactggtttgggatgcaaagcgaacgtagtggcagatgctttgagcagaaagagtcaagtcaatctgatggtcgctcgtccgatgccttatgagttggccaaggagtttgacaggttgagtcttgggtttttgaacaattcgcgaggagtcacagttgagttggaacctaccctggagcgggaattcaaagaagcgcagaagaatgatgagaagatcagtgagatccggcgactgattctagatggcagaggcaaagatttttgggaagatgcagaaggtgtggtatggttcaaagaccgtttgtgtgttcccaacgtccagtctattcgggagttgatcctcaaggaagctcatgagacagcctattcgattcaccctggcagtgagaagatgtatcaagatctgaagaagaaattctggtggtacggaatgaagagggagatcgcagagcatgtggctatgtgtgatagttgccggcggatcaaggcagagcaccagagaccgactggattgttgcaaccgttgcaaatccctcagtggaaatgggatgaaatcggtatggatttcatagtcggattgcctcacactcgagccggctacgattctatttgggtagtagtggaccgtttgaccaagtcagcccacttcataccagtcaagaccaactacagcagtgtagtattggtagagttgtacatgtctcggatcgtttgtcttcatggtgtgccaaagaagatagtgtcagacagaggaacacagttcacctctcatttctggcagcagttgcatgaagccttgggcacacatctgaatttcagttcagcttatcatccgcagacagatggtcagaccgaaagaaccaatcaaatccttgaagacatgttgagagcctgtgcgttgcaagatcagtccggatgggacaagcgattgccctatgcagagttctcctataacaacagttaccaggccagtttgaagatgtcaccttttcaggcgctttatggaaggagttgtagaactccgttgcaatgggatcagcctggagaaaagcaggtgtttggaccagacattctgcttgaagccaaagagaacatcaagatggtccgagagaatctgaagatagcgcaatcaaggcagcggagttatgcagacacaagaagaagagagctgagtttcgaagtcggagactttgtctatctgaaagtgtcaccgatcagaggagtcagaaggttcggagtcaaaggcaagctagcaccccgctacattggcccgtatcagattctcgcaaggcgtggagaggtggcctatcagctcagtctgccagaaaatttgtctgctgtgcatgatgtctttcatgtgtctcagttgaagaagtgcttgcgtgtgccagaagagcagttgccagtggaaggtctggaggtttag

SEQ ID NO: 5200 - DNA, 4269 bp, Zea mays
  Clone ID: TF_ZM4276.C3.o1.fg
atgtcgatcgagcaaatgtttctgatgcagactcagacagttcaagccatcggtcagactttggccgccattcagcagcagcagcagcaacagcagcaggcaccacctcagcctcagcctcagatgcctagagacaagcgtgctgaattcatgagaggtcatccaccaacgttcgctcattcttctgaccccatggatgctgaagactggctgcgcactgtggagcgggagttgcataccgctcagtgcgatgacagggagaaagtcctgtatggtccccgtctgttgagaggagcagcccagtcatggtgggagtcttacctcgccacccatgcccaccctgacgccatcacctgggaagagttcagaggaagctttcgtcagtaccatgtccttgcaggtctgatgactgtgaagaaggaggagttcctggctctcaagcaagggccatcgtctgtcagtgagtaccgagacagatttctgcagttgtctcgctatgctcctgaagatgtcaacaccgacgccaagcgacagtaccgtttcttgagaggcttggttgaccctcttcagtatcagctgatgaatcacaccttcccgacatttcagcacctgattgatagagcaatcatgacagagaggaagcgtaaggagatggaggatcgtaagcgcaagatcagtggaccccagcctggaagcagcaatcgtcctcgtttctcaggcagtcaacctcagcagttcaggcagaaccagcgtccacctcagcagcatcagcagttccaatggcagtatcctcagcaccagtaccagaaccgtcagagcaatcagtcaggaggtcagtttcagaggcagaatcagcaggcacctcgtcttcctgccccagcagcccagcagaacagtcaggcagcaccagctcaggttggaaatagagcatgtttccactgtggagagcaaggccactgggtgatgcaatgtccgaagaaggcaacccagcagcagtcaggccccaatgccccagcaaagcagaatgtgcctcagcctggagcaggcaatcgctctcatacgcgctataatcatggaaggctgaaccacttggaggctgaagcagttcaggagacccccggcatgatagtaggtatgttcccagtcgactcccatattgcagaagtgttatttgatactggagcaacgcattctttcattactgcatcatgggtagaagcacataatcttccaattactaccatgtcaacccccattcaaattgactcagccggtggtagaattcgagccgatagcatttgtttgaatataagtgtggaaataagggggatagcgtttcccgctaaccttatagtaatgggtactcagggaatagatgtcatcctagggatgaattggctagataagtatcaggcagttatcagttgtgatgaaaggacaatcaagttggtgtctccactaggagaggaagtggtgaccaagttagtcccgcctgggccaaagaaaggaagttgttatcagatggccgttgatagcagtgaagcagacccaattgagagtatcaaggttgtgtctgagttcccaaatgtgtttccaaaggacttaccgggtatgccaccagagcggaaagttgagtttgccatagagcttcttcctggaaccgcccctatctttaagagagcttacagaatatctggaccagagttggttgagcttaaggagcagattgatgagctgtcggagaaaggttacatccggccaagcacctcgccttgggccgcccctgtcttgtttgtggagaagaaagatggcaccaagaggatgtgtatcgattatcgagctttgaatgaggtcacgatcaagaacaagtatcccttgcccagaatagaagatctgttcgaccagttgagaggagccagtgtgttctccaagattgatctgaggtcaggttatcatcagctcaggatccgaccttcggacattccgaagacggcattcatttccaagtatggtttgtatgagttcactatgatgtcttttggtttgaccaatgcgccagcgttcttcatgaacttgatgaacagtgtattcatggattatctcgataagtttgtgggggtattcattgatgacattctgatttattcccaaagcgaagaagagcacgcagatcatttgaggatggtattgcagagattgcgagagcaccagttgtacacaaagttgagcaagtgtgagttctggatcagtgaagtcctgttcttgggtcatataatcaacaaagaaggattggctgtggatccgaagaaagtggcagacattttgaactggaaagcgccaacagatgctagaggaatcaagagtttcattggaatggccggatattatcggcgattcattgaagggttttcgaagattgcgaaaccgatgacagcgttgctaggcaacaaagttgagttcaagtggacccagaaatgccaagaggcctttgaagcgctgaaagagaagttgacaacagtgcctgtcctagtcttgcctgatgtgcacaagcccttctcggtgtattgtgatgcttgttacacaggtttgggatgtgtgttgatgcaagagggaagagttgtggcttactcgtcccgacagctgaaggttcatgagaagaactacccaatccatgatctagagttggcagcagtggttcacgcactgaagacatggaggcactatctgtatggacagaaatgcgatgtttacacagatcacaagagtctgaagtacatatttactcagtcagagttgaacatgaggcaacgaagatggttagagttgatcaaagactatgagttggagattcattaccatccaggcaaagcaaacgtagtggcagatgctttgagcagaaagagtcaagtcaatctgatggttgctcgtccgatgccttatgagttggccaaggagtttgacaggttgagtctcggatttctgaataattcacgaggagtcacagttgagttggagcctaccctggagcgcgaaattaaagaagcgcagaagaatgatgagaagatcagtgagatccggcgactgattctagatggcagaggcaaagattttcgagaagatgcagaaggcgtgatatggttcaaggtccgcttgtgtgttcccaatgtccagtccattcgggagttgattctcaaggaagctcatgagacagcttattcgattcaccctggcagtgagaagatgtatcaggatctgaagaagaaattctggtggtacggaatgaaaagggaaatcgcagagcatgtggctatgtgcggtagttgtcgaagaattaaggcagagcaccagagacctgctggattgttgcaaccgttgcagatccctcagtggaaatgggatgaaattggtatggatttcatagtcggattgcctcgcactcgagccggctacgattccatttgggtagtagtggaccgcttgaccaagtcagcccacttcataccagtcaagaccaactatagcagtgccgtattggcagaattgtatatgtctcggatcgtttgtcttcatggtgtgccaaagacgatagtgtcagacagaggaacgcagttcacctctcatttctggcagcagttgcatgaagccttgggcacgcatctgaatttcagttcagcttatcatccgcagacagatggtcagaccgaaaggaccaaccaaattcttgaagacatgttgagagcctccgaagagaacatcaagatggtccgagagaatctgaagatagcgcaatcgaggcagcgaagctatgcagacacaagaagaagagagctgagtttcgaagtcggagactttgtctatctgaaagtgtcaccgatcagaggagtcagaagattcggagtgaaaggcaagctagcaccccgctacattggtccgtatcagattcttgcaagacgtggagaagtggcctatcagctcagtttgccagagaatttgtctgctgtgcatgatgtctttcatatgtctcagttgaagaagtgcttgcgtgtgccagaagagcagttgccagtggaaggtcttgaagtccaggaggacttgacctacgttgagaagccagtgcagatccttgaggttgcagaccgagtcacccgaaggaagaccatcagaatgtgcaaagtcagatggaatcaccactctgaggaagaagcaacctgggagcgtgaagatgatctgatggctaagtaccctgagctctttgctagcccaccctaa

SEQ ID NO: 5201 - DNA, 4329 bp, Zea mays
  Clone ID: TF_ZM4452.C4.o1.fg
atgtcgatcgagcagatgtttctgatgcaaactcaggcagttcaagccatcggtcagactttggccgccattcagcagcagcagcagcaacaacagcaggccccacctcaacctcagatgcctcagatgcctagagacaagcgtgctgaattcatgagaggtcatccaccaacgttcgctcattcttctgaccccatggatgctgaagattggctgcgcactgtggagtgggagttgcataccgctcagtgcgatgacagggagaaaattctgtatggtccccgtctgttgagaggggcagcccaatcatggtgggagtcttacctcgccacccatgcccaccctgacgccatcacctgggaagagttcagaggtagctttcgtcagtaccatgtacctgtaggtctgatgacagtgaagaaggaggagttcctggccctcaagcaagggtcattgtctgtcagcgagtaccgggacaagtttctgcaattgtctcgctatgctcctgaagatgtcaacaccgacgccaagcggcagtaccgtttcctgagaggcttggttgaccctctgcagtaccaactgatgaatcacaccttcccgacattccagcacctgattgacagagcaatcatgacagagaggaagcgtaaggagatggaggatcgtaagcgcaagatcagtggaccccagcctggaagcagcaatcgtcctcgtttctcaggcaatcaacctcagcagttcaggcagaaccagcgtccacctcagcagcatcagcagttccaaaggcagtatcctcagcaccagtaccagaaccgtcagagcaatcagtcaggaggtcagtttcaaaggcagaatcagcaggcacctcgccttcctgccccagcaaaccagcagaacagtcaggcagcgccagctcaggttggaaacagggcatgtttccactgtggagagcaaggccactgggtgatgcaatgtccgaagaaggcagcccagcagcagtcaggccccaatgccccagcaaagcagaatgtgtctcagcctggatcaggcaaccgctctcagccgcgctataatcatggaagactgaaccacttggaagctgaagcagttcaggagacccccagcatgatagtaggtatgttcccagtcgactcccatattgcagaagtgttatttgatactggagcaacacattctttcattactgcatcatgggtagaagcacataatcttccaattactaccatgtcaacccccattcaaattgactcagccggtggtagaattcgagccgatagcatttgtttgaatataagtgtgaaaataagggggatagcatttcccgccaaccttatagtaatgggtactcagggaatagatgtcatcctagggatgaattggctagataagtaccaggcaattatcagttgtgataaaaggacaatcaagttggtgtccccactaggagaggaagtggtaaccgagttagtcccgcctgagccaaagaaaggaagttgttatcagctagctgttgatagcagtgaagcagacccgattgagagtatcaaggttgtgtccgagttcccagatgtgtttccaaaggacttaccgggtatgccaccagagcggaaagttgagtttgccatagagcttcttcccggaaccgcccctatcttcaagagagcttacagaatatctggaccagagttggttgagcttaaggagcagattgatgagttgttagagaaaggttacatccggccaagcacctcgccttgggccgcccctgtcctatttgtggagaagaaagatggcaccaagaggatgtgcatcgattatcgagctttgaatgaggccacgatcaagaacaagtatcccttgcccagaatagaagatctgttcgaccagttgagaggagccagtgtgttctccaagattgatctgaggtcaggttatcatcagctcaggatccgaccttcggacattccgaagacggcattcatttccaagtatgggttgtatgagttcacagtgatgtcttttggtttgaccaatgcaccagcgttcttcatgaacttgatgaacagtgtattcatggattaccttgataagtttgtggtggtattcattgatgacattctgatttattctcaaagcgaagaagagcacgcagatcatttgaggatggtattgcagagattgcgagagcaccagttgtatgcaaagttgagcaagtgtgagttttggatcaatgaagtcctgttcttgggtcacataatcaataaagaaggattggctgtggatccgaagaaagtggcagacattttgaactggaaagcgccaacagatgctagaggaatcaagagtttcattgggatggccggatattatcggcgattcattgaagggttttcgaagattgcgaaaccaatgacagcgttgctaggcaacaaagttgagttcaagtggacccagaaatgccaagaggcctttgaagcgctgaaagagaagttgactacagcgcctgtcctagtcttgcctgatgtgcacaagcccttctcggtgtattgtgatgcttgttacacaggtttgggatgcgtattgatgcaagagggaagagttgtggcttactcgtcccgacagttgaaggttcatgagaggaattacccaatccatgatctagagttggcagcagtggttcacgcgctgaagtcatggaggcattatctgtatggacagaaatgtgatgtttacacagatcacaagagtctgaagtacatattcactcagtcagagttgaacatgaggcaacgaagatggttagagttgatcaaagattatgagttggagatccattaccatccaggcaaagcaaacgtagtggcagatgctttgagcagaaagagtcaagtcaatctgatggttgctcgtccgatgccttatgagttggccaaggagttcgacaggttgagtctcgaatttttgaacaattcgcgaggagtcacagttgagttggaacctaccttggagcgcgaaatcaaagaagcgcagaagaatgatgagaaaatcagtgagatccggcgactgattctagaaggcaaaggcaaagattttcgaaaagacgcagaaggcgtgatatggttcagagaccgcttgtgtgttcccaatgtccagtccattcgggagttgattctcaaggaagctcatgagacagcttattcgattcaccctggcagtgagaagatgtatcaggatctgaagaagaaattctggtggtacggaatgaagagggaaatcgcagagcatgtggctatgtgcgatagttgccgaagaattaaggcagagcaccagagacctgtcggattgttgcaaccgttgcagatccctcagtggaaatgggatgaaattgagttgtatatgtctcggatcgtttgtcttcatggtgtgccaaagaagatagtgtcagacagaggaacgcagttcacctctcatttctggcagcagttgcatgaagccttgggcacgcatctgaatttcagttcagcttatcatccgcagacagatggccagaccgaaagaaccaatcaaattcttgaagacatgttgagagcctgtgcattgcaagatcagtccggatgggacaagcgattgccctatgcagagttttcctataacaacagttaccaggccagtttgaagatgtcaccatttcaggcgctttatggaaggagttgtagaactccgttgcaatgggatcagcctggagagaagcaagtgtttgggccagacattttgcttgaagccgaagagaacatcaagatgatccgagagaatctgaagatagcgcaatcgaggcagcgaagctatgcagacacaagaagaagagagctgagtttcgaagtcggagactttgtctatctgaaagtgtcaccaatcagaggagtcagaaggttcggagtgaaaggcaagctagcaccccgctacattggtccgtatcaggttcttgcaagacgtggagaagtggcttatcagctcagtttgcccgagaatttgtcagctgtgcatgatgtctttcatgtgtctcagttgaagaagtgcttgcgtgtgccagaagagcagttgccagtggaaggtcttgaagtccaggaggacttgacctacgttgagaagccagtgcagatccttgaggttgcagacagagtcacccgaaggaagaccatcagaatgtgcaaagtcagatgggaccatcactcagaggaagaagcaacctgggagcgtgaagatgatctgatggccaaataccctgagctctttgctagccaaccctga

SEQ ID NO: 5202 - DNA, 1860 bp, Zea mays
  Clone ID: TF_ZM4455.C2.o1.fg
atggggctcggtgtatgcggctcgctctgccaaggtggtgacgaggatgatggttttggttatgactatggtactagtaagtggtattctttccgtttggaaaggatggctcgtcttagacacactgcacggaagtcagtcattcctttcttgccttctcgtctcgcgaagcgtccgcttcgccgtccagtgactggtcagtctagccacttggagaggctgcaccaccgcctgcaagaggagcaggagggtcgacgacaggagctggagcagcaggactcttccttctcgcttcagcaggagatagagtctgtgaggagctgctcccctgtgctcccgctgggggcgccccctgcaccaccactgagcgccccagccgctggagtagctgctggaggagacccagatgacgaaggtggcgacagcagctcgagccacaacaccgacctttcagaggagcaggagctggaaggatgggttgcccgacccatcacccgtgacgtcgctcgcgggtgccacttccacgacgcgctcgacaccctgctacaccgggcacttgaccgacgtacttggtctatcgagtatcgatgtgttgtcttccagcacagtcgcggggtttacccggaccgctgggaggcgacctgcttggtgccccgtccggagaacagtctccagggtgcgggggtctgctcagagcactattccatctctgagcgggactcaactaaggcggacatgcaagaagccgcacggcgtgcgctttcgcactactgctcagtgctcggtggggtagccgatggtctcaacctaaactgtgggctaagcgcgcggagcatcatcacctggaggatggctcccccgctcccgtcgggactcagcactcgtaccgctcacctcagcgtggacaccatgcttaagatgtcagacaacaggcgcagaggaggaaggcgtgctcagcaggagcaggcagccccacaggatgaggcaccccatcagcagctgccacccccgcccctgatgatgatcgagcggatgttcttaatgcagactcaggtagttcaagctatcggtcagactctggccgccattcagcagcagcagccaccacctcagcctcagatgcccagagacaagcgtgctgaattcatgagaggtctgatgacagtaaagaaggaggagttcctagcgctcaagcaagggcccatgtctgtcagtgagtaccgagacaagtttctacaactgtctcgctatgctcctgaggatgtcaacacagatgccaagagagcatgtttccattgtggagagcagggccattgggtgatgcaatgtccgaagaaggcagcccagcagcagtcaggccctagtgccccagcaaagcagaatgtgtctcagcctggaccaggcaaccgctctcagccgcactataaccatgggagactgaatcacttggaggctgaagcagttcaggaaacccccggaggagaagtggtagccgagttaatctcacctgagccaaggaaaggaagttgtcatcagatggctactgatagcaaggagccagattcacttgagattatcaaagtggtgtccgaattctcagatgtgtttccagaagacttaccaggcatgccacctgagcgaaaagttgagtttgctatagagcttctttctggcaccgcccccatttctaaaagagcctacagagtgtctggaccagagttggttgaacttaagaagcagattaatgagctgtcagagaaaggttatataagaccaagcacctcgccttgggttgccctgtcctgttcgtggagaagaaagatggcaccagaaggatgtgcatcgattatcgagctctga

SEQ ID NO: 5203 - DNA, 4566 bp, Zea mays
  Clone ID: TF_ZM4455.C2.o4.fg
atgctcatctgttcagtgctgttgaagaattctattctctttccttatgctgcaagatttgccagatcagttctgatgtgtggttgcattctgcagatgtcagagaacaggcgcagaggaggaaggcgtgctcagcaggagcgagccgctcaacaggatgaggtgcctcagcagcagcacctgccgcccccgcccccgatatcgatcgagcagatgtttctgatgcagactcaggcagttcaggccatcggtcagaccttggccgccattcagcagcagcagcagcagcagcaggccccacctcagcctcagatgcctcagatgcccagagacaagcgtgctgaattcatgagaggtcatcccccaacgtttgctcactcttctgaccccatggatgctgaagattggctgcgcactgtggagcgggagttgcataccgctcagtgtgatgacagggagaaagtcttgtatggtccccgtctgttgagaggagcagcccaatcatggtgggagtcttacctcgccacccatgccaaccccgacaccatcacctgggaagaattcagaggtagctttcgtcagtaccacgtgcctgcaggtctgatgacagtgaagaaggaggagttcctggctctcaagcaagggccattgtctgtcagtgagtatcgggacaagtttctgcaattgtctcgctatgctcctgaagatgtcaacactgacgccaagcgacagtatcgttttctgagaggcttggtcgaccctctgcagtatcagctgatgaatcacaccttcccgacattccagcacctgattgacagggcaatcatgacagagagaaagcgtaaggagatggaagatcgtaagcgcaagatcagtggaccccagcctggaagcagcaatcgtcctcgtttctcaggcaatcaacctcagcagttcaggcagaaccagcgtccacctcagcagcatcagcagtttcaaaggcagtatcctcagcatcagtaccagaaccgtcagagcaatcagtcaggaggtcagtttcaaaggcagaatcagcaggcacctcgccttcctgccccagcaaatcagcagaacagtcaggcagcaccagctcaggttggaaacagggcgtgtttccactgtggagagcaaggccactgggtgatgcaatgtccgaagaaggcagcccagcagcagtcaggccccaatgccccagcaaagcagaatgtgcctcagcctggagcaggcaaccgccctcaacagcgctataatcatggaagattgaatcacttggaggctgaagcagttcaggagacccccggcatgatagtaggtatgttcccagtcgactcccgtattgcagaagtgttatttgatactggagcaacacattctttcattactgcatcatgggtagaagcacataatcttccaattactaccatgtcaacccccattcaaattgactcagccggtggtagaattcgagccgatagcatttgtttgaatataagtgtggaaataagggggatagcgtttcctgccaaccttatagtaatgggtactcagggaatagatgtcatcctagggatgaattggttagataagtatcaggcagttatcagttgtgataaaaggacaatcaagttggtatccccactaggaaaggaagtggtgaccgagttagtcccgcctgagccaaagaaaggaagttgttatcagatggctgtcgatagcagtgaagcagatccaattgagagtatcaaggttgtgtctgaattcccagatgtgtttccaaaggatttaccgggtatgccaccagagcggaaagttgagtttgccatagagcttcttcctggaaccgcccccatctttaagagagcttacagaatatccggaccagagttggttgaacttaagaagcagattgatgagctgtcagagaaaggttacatccggccaagcacctcgccttgggccgcccctgtcctgtttgtggagaagaaagatggcaccaagaggatgtgtatcgattatcgagctttgaatgaggtcacgatcaagaataagtatcatttgcccagaattgaagatctgttcgaccagttgagaggagcgattgatctgaggtcaggttatcatcagctcaggatccgaccttcggacattccgaagacggcattcattaccaagtatgggttgtatgagttcacagtgatgtcttttggtttgaccaatgcgccagcattcttcatgaacttgatgaatagtgtattcatggattaccttgataagtttgtggtggtattcattgatgatattctggtttattctcaaagcgaagaggagcatgcagatcatttgaggatggtattgcagagattgcgagagcaccagttgtatgcaaagttgagtaagtgtgagttctggatcagtgaagtcctgtttttgggtcacataatcaacaaggaaggattggctgtggatccgaagaaagtggcagacattctgaactggaaagcgccaacagatgctaggggaatcaagagtttcattggaatggccggatactatcggcgattcattgaagggttttcgaagattgcgaaaccaatgacagcgttgctaggcaacaaagttgagttcaagtggacccagaaatgccaagaggcctttgaagcgctgaaagagaagttgactacaacgcctgtcctagtcttgcctgatgtgcacaagcccttctcggtgtattgcgatgcttgttacacaggtttgggatgtgtgttgatgcaagagggaagagttgtggcttactcgtcccgacagttgaaggttcatgagaagaattacccaatccatgatctagagttggcagcagtggttcacgcactgaagacatggaggcactatctgtatggacagaaatgcgatgtttacacagatcacaagagtctgaagtacatattcactcagtcagagttgaacatgaggcaacgaagatggttagagttgatcaaagactatgagttggaaattcattaccatccaggcaaagcaaacgtagtggcagatgctttgagcagaaagagccaagtcaatttgatggtcgctcgtccgatgccttatgagttggccaaagagtttgacaggttgagtctcggatttttgaacaattcgcgaggagtcacagttgaattggaacctaccttggagcgcgaaatcaaagaagcgcagaagaatgatgagaaaatcagtgagatccggcgactgattctagaaggcaaaggcaaagattttcgagaagatgcagaaggcgtgatatggttcaaagaccgcttatgtgttcccaatgtccagtctattcgagagttgatcctcaaggaagctcatgagacagcctattcgattcaccctggtagtgagaagatgtatcaggatctgaagaagaaattctggtggtacggaatgaagagggaaatcgcagagcatatccctcagtggaaatgggatgaaattggtatggatttcatagtcggattgcctcgcactcgagccggctacgattctatttgggtagtggtggaccgtttgaccaagtcagcccacttcatacctgtcaagaccagctacaacagtgcagtattggcagagttgtatatgtctcagatcgtttgtcttcatggtgtgccaaagaagatagtgtcagacagaggaacgcagttcacctctcatttctggcagcagttgcatgaagccttgggcacgcatctgaatttcagttcagcttatcacccgcagacagatggccagactgaaaggaccaatcaaattctcgaagatatgttgagagcctgtgtgttgcaagatcagtccggatgggacaagcgattgccttatgcagagttttcctataacaacagttaccaggccagtttgaagatgtcaccatttcaggcgctttatggaagaagttgcagaactccgttgcaatgggatcagcctggagaaaagcaagtgtttgggccagacattttgcttgaagccgaagagaacatcaagatggtccgagagaatctaaagatagcgcaatcgaggcagcgaagctatgcagacacaagaagaagagagctgagttttgaagtcggagattttgtctatctgaaagtgtcaccgatcagaggagtcagaagattcggagtgaaaggcaagctagcaccccgctacattggtccgtatcagattcttgcaagacgtggagaagtggcctatcagctcagtttgccagagaaattgtctgctgtgcatgatgtctttcatgtgtctcagttgaagaagtgcttgcgtgtgccagaagagcagttgccagtggaaggtcttgaagtccaggaggacttgacctatgttgagaagccagctcagatccttgagattgcagacagagtcacccgaaggaagaccatcagaatgtgcaaagtcagatggaatcaccattcagaggaagaagcaacctgggagcgtgaagatgatctgatggctaagtacccagagctctttgctagccagccctga

SEQ ID NO: 5204 - DNA, 2163 bp, Zea mays
  Clone ID: TF_ZM4545.C13.o2.fg
atgtcgatcgagcagatgtttctgatgcagactcaggcagttcaagccatcggtcagactttggccgccattcagcagcagcagcagcaacagcagcaggccccacctcagcctcagatgcccagagacaagcgtgctgaattcatgagaggtcatccaccaacgttcgctcattcttctgaccccatggatgctgaagactggctgcgcactgtggagcgggagttgcataccgctcagtgcgatgacagggagaaagtcctgtatggtccccgtctgttgagaggagcagcccagtcatggtgggagtcttacctcgccacccatgcccaccctgacgccatcacctgggaagagttcagaggtagtttccgccagtaccatgttcctgcaggtctgatgacagtgaagaaggaggagttcctggccctcaagcaagggccatcgtctatcagtgagtaccgggacaagtttctgcaattgtctcgctatgctcctgaagatgtcaacaccgacgccaagcgacagtaccgttttctgagaggcttggttgaccctctgcagtaccaactgatgaatcataccttcccgacattccagcacctgattgatagagcaatcatgacagagaggaagcgtaaggagatggaggatcgtaagcgcaagatcagtggaccccagcctggaagcagcaatcgtcctcgtttctcaggcaatcaacctcagcagttcaggcagaaccagcgtccacctcagcagcatcagcagtttcaaaggcagtatcctcagcaccagtaccagaatcgtcagagcaatcagtcaggaggtcagtttcagaggcagaatcagcaggcacctcgtcttcctgccccaacagcccagcagaacaatcaggcagcaccagctcaggttggaaacagagcatgtttccactgtggagagcaaggccattgggtgatgcaatgtccgaagaaggcagcccagcagcagtcaggccccaatgctccagcgaagcagaatgtgcctcagccgggagcaggcaatcgctctcagccgcgctataatcatgggagactgaaccacttggaggctgaagcagttcaggagacccccgacatgatagtagtcggattgcctcgcactcgagccggctatgattccatttgggtagtagtggaccgcttgaccaagtcagcccacttcatacctgtcaagaccaactatagcagtgcagtattggcagaattgtacatgtctcggatcgtttgtcttcatggtgtgccaaagaagatagtgtcagacagaggaacgcagttcacctctcatttctggcagcagttgcatgaagccttgggcacacatctgaatttcagttcagcttatcatccacagacagatggccagaccgaaagaaccaatcaaattctcgaagacatgttgagagcctatgcgttgcaggatcagtccggatgggacaagcgattgccttatgcagagttttcctataacaatagttaccaggccagtttgaagatgtcaccatttcaggcgctctatggaaggagttgcagaactccgttgcaatgggatcagcctggagagaagcaagtgtttgggccagacattttgcttgaagccgaagagaacatcaagatggtccgagagaacctgaagatagcgcaatcgaggcagcgaagctatgcagacacaagaagaagagagctgagtttcgaagtcggagactttgtctatctgaaagtgtcaccgatcagaggagtcagaaggttcggagtcaaaggcaagctagcaccccgctacattggtccgtatcagattcttgcaagacgtggagaagtggcctatcagctcagtttgccagaaaatttgtctgctgtgcatgacgtctttcatgtgtctcagttgaagaagtgcttgcgtgtgccagaagagcagttgccagtggaaggtcttgaagtccaggaggacttgacctacgttgagaagccagtgcaggtccttgaggttgcagacagagtcacccgaaggaagaccatcagaatgtgcaaagttagatggaatcaccactctgaggaagaagcaacctgggagcgtgaagatgatctgatggctaaatatcctgagctctttgctagccaaccctga

SEQ ID NO: 5205 - DNA, 4305 bp, Zea mays
  Clone ID: TF_ZM4578.C2.o10.fg
atgtccatcgagcagatgtttctgatgcagactcaggcagttcaagccatcggtcagactttggccgccattcagcagcagcagcagcaacagcagcaggccccacctcagcctcagatgcctcagatgcccagagacaagcgtgctgaattcatgagaggtcatccaccaacgttcgctcactcttctgaccccatggatgctgaagactggctgcgcactgtggagcgggagttgcataccgctcagtgcgatgatagggagaaggttctgtatggtccccgtctgttgagaggagcagcccaatcatggtgggagtcttacctcgccacccatgcccaccctgacgccatcacctgggaagagttcagaggtagctttcgtcagtaccatgttcccgcaggtctgatgactgtgaagaaggaggagttcctggccctcaagcaagggtcattgtctgtcagtgagtaccgggacaggtttctgcagttgtctcgctatgctcctgaagatgtcaacaccgacgccaagcggcagtaccgttttctgagaggcttggttgaccctctgcagtaccaactgatgaatcacaccttccctacattccagcacctgattgacagagcaatcatgacagagaggaagcgtaaggagatggaggatcgtaaacgcaagatcagtggaccccagcctggaagcagcaatcgtcctcgtttctcaggcaatcaacctcagcagttcaggcagaaccagcgtccacctcagcagcatcagcagttccaaaggcagtatcctcagcaccagtaccagaaccgtcagagcaatcagtcaggaggtcagtttcagaggcagaatcagcaggcacctcgtcttcctgccccagcaagccagcagaacagtcaggcagcaccagctcaggttggaaacagagcatgtttccactgtggagagcaaggccactgggtgatgcaatgtccgaagaaggcagcccagcagcagtcaggccccaatgcccccgcaaagcagaatgtgcctcagcctggagcaggcaatcgctctcagtcgcgctataatcatggaagactgaaccacttggaggctgaaggagtgcaggagacccccggcatgatagtaggtatgttcccagtcgactcccatattgcagaagtgttatttgatactagagcaacacattctttcattactgcatcatgggtagaagcacataatcttccaattactaccatgtcaacccccattcaaattgactcagccggtggtagaattcgagccgatagcatttgtttgaatataagtgtggaaataagggggatagcgttttccgccaaccttatagtaatgggtactcagggaatagatgtcatcctagggatgaattggctagataagtatcaggcagttatcagttgtgataaaaggaccatcaagttggtgtccccactaggagaggaagtggtgaccgagttagtcccgcctgagccaaagaaaggaagttgttatcagatagctgttgatagcagtgaagcagacccaattgagaggatcaaggttgtgtccgagttcccagatgtgtttccaaaggacttaccgggtatgccaccagagcggaaagttgagtttgctatagagcttcttcccggaaccgcccctatctttaagagagcttacagaatatccggaccagagttggttgagcttaagaagcaaattgatgagctatcagagaaaggttacattcggccaagcacctcgccttgggccgcccctgtcttgttcgtggaaaagaaagatggcaccaagaggatgtgtatcgattaccgagctttgaatgaggtcacgatcaagaacaagtatcctttgcccagaatagaagatctgttcgaccagttgagaggagccagtgtgttctccaagattgatctgaggtcaggttatcatcagctcaggatccgaccttcggacattccgaagacggcattcatttccaagtatggtttgtatgagttcactgtgatgtcttttggtttgaccaatgtgccagcgttcttcatgaacttgatgaacagtgtattcatggattaccttgataagtttgtggtggtattcattgatgatattctggtttattatcaaagcgaagaagagcacgcagatcatttgaggatggtattgcagagattgcgagagcaccagttgtatgcaaagttgagcaagtgtgagttctggatcagtgaagtcctgttcttgggtcacataatcaacaaagaaggattggctgtggatccgaagaaagtggcagacattttgaactggaaagcgccaacagatgcccgaggaatcaagagcttcattggaatggccggatactatcggcgattcattgaagggttttcgaggattgcgaaaccaatgacagcgttgctaggcaaccaagttgagttcaagtggacccagaaatgtcaagaggcctttgaagcgctgaaagagaagttgactacaacgcctgtcctagtcttgcctgatgtgcacaagcccttctcggtgtattatgatgcttgttacacagagttggcagcagtggttcacgcacttaagacatggaggcactacctgtatggacagaaatgcgatgtttacacagaccacaagagtctgaagtacatattcactcagtcagagttgaacatgaggcaacgaagatggttagagttgatcaaagattatgagttggagattcattaccatccaggcaaagcaaacgtagtggcagatgctttgagcagaaagagtcaagtcaatctgatggtcactcgtccgatgccttatgagttggccaaagagtttgacaggttgagtctcggatttctaaataattcgcgaggagtcacagtcgagttggaacctaccttggagcgcgaaatcaaagaagcgcagaagaatgatgagaaaatcagtgagatccggcgactgattctagatggcagaggcaaagattttcgagaagatgcagaaggtgtgatatggttcaaagaccgcttgtgtgttcccaatgtccagtccattcgggagttgattctcaaggaagctcatgagacagcctattcgattcaccctggcagtgagaagatgtatcaggatctgaagaagaaattctggtggtacggaatgaagagggaaatcgcagagcatgtggctatgtgcgatagttgccgaagaattaaggcagagcaccagagaccggccggattgttgcaaccgttgcagatccctcagtggaaatgggatgaaattgtagtggaccgcttgaccaagtcagcccacttcatacctgtcaagaccaactacagcagtgcagtattggcaaaattgtatatgtctcggatcgtctgtcttcatggtgtgccaaagaagatagtgtcagacagaggaacgcagttcacctctcatttctggcagcagttgcatgaagctttgggcacgcatctgaatttcagttcagcttatcatccgcagacagatggccagaccgaaaggaccaatcaaattcttgaagatatgttgagagcctgtgcgttgcaagatcagtccggatgggataagagattgccttatgtggagttttcctataacaacagttaccaggccagtttgaagatgtcaccatttcaggcgctttatggaaggagttgtagaactccgttgcaatgggatcagcctaaagaaaagcaagtgtttgggccagaaattttgcttgaagccgaagagaacatcaagatggtccgagagaatctgaagatagcgcaatcgaggcagcgaagctatgcagacacaagaagaagagagctgagttttgaagtcggagactttgtctatctgaaagtgtcaccgatcagaggagtcagaagattcggagtgaaaggcaagctagcaccccgctacattggtccgtatcagattcttgcaagacgtggagaagtggcctatcagctcagtttgcccgagaatttgtctgttgtgcatgatgtctttcatgtgtctcagttgaagaagtgcttgcgtgtgccagaagagcagttgctagtggaaggtcttgaagtccaggaggacttgacctacgttgagaaaccagtgcaaatccttgaggttgcagacagagtcacccgaaggaagaccatcagaatgtgcaaagtcagatggaatcatcactctgaggaagaagcaacctgggagcgtgaagatgatctgatggctaaataccctgagctctttgctagccaaccctga

SEQ ID NO: 5206 - DNA, 5541 bp, Zea mays
  Clone ID: TF_ZM4581.C2.o8.fg
atgatggctcgtcttagacacactgcacgaaagtctgtcatccccttcttaccctctcgtctcgcggagcgtccgcttcgccgtcccgtggccggtcagtccagtcacttggagcggctgcaccatcacctgcatgaggagcaggagcatcgacgacaggagcagcagggctcttctttctcgctccagcaggagatagagtctgtgaggagctgctcccccgtgcttcctctggaggcgccccctgcaccacctctgggcgccccagcccctggagtagctgctggaggagacccagatgacggaggtggtgacgacagctcgagccacgacactgacttttctgctgaccaggagccggaaggatgggttgctcgacccatcactcgcgacgctgctcgcgggtgtcacttccacgatgcgctcgacaccctgctacgtcgggcacttgaccggcgtacttggtctatcgagtatcgctgtgtggtctaccagcatagtcgcggggtctacccggaccactgggaggcgacctgcttggtgcgtcgtccggataacattctccagggtgctaaggtctgctcggagcactattccatctctgagcgggactcagctgaggcagccatgcaagatgctgcacggcgtgcgctttcgcactactgctcagtgctcggtgggatgtcagaaaacaggcgcagaggaggaaggcgtgctcagcaggagcaagccgctcagcaggaagaggtaccccagcaacagcaactgccgcccccgcccccgatgtccatcgagcagatgttcttgatgcagactcaggcagtccaagccatcggtcagactctggccgccattcagcagcagcagcaacagccaccacctcaacctcagatgcctcagatgcccagagacaagtgtgctgaattcatgagaggtcatcccccaacgtttgctcattcttctgaccccatggatgctgaagactggctgcgcatgtggaacgggaattgcataccgctcagtgcgatgacagggagaaagttctgtctgatgacagtgaagaaggaggagttcctggccctcaaacaagggtcatcgtctctcagtgagtaccgggacaggtttctgcagttgccttgctatgctcctgaagatgtcaacaccgatgccaagcgacagtaccgtttcctgagaggcttggtcgaccctctacagcagaaccagcgtccacctcagcatcagcagttccaaaggcagtatcctcagcaccagtatcagaatcgtcagaacaatcagtcaggaggaggtcagtttcagaggcaaaatcagcaggcacctcgtcttcctgcccccgcaactcagcagaacagtcaagtagccccagctcaggttggaaacagagcatgtttccactgtggagagcaaggccattgggtgatgcaatgtccgaagaaggcagcccaacagcagtcaggccccaatgccccagcaaagcagaatgtgtctcagcctggagcaggcaaccgttctcaaccgcgctataaccatgggagattgaaccacttggaggctgaagcagttcaggagacccccgacatgataatatgtatgttcccagtcgactcccatattgcagaagtgttatttgatactggagcaacacattctttcattactgcatcatgggtagaagcacatagtcttccgataactaccatgtcaacccccattcaaattgactcagccggtggtagaattcgagccgacagcatttgtttgaatgtaagtgtggaaataagggggatagcgtttcccgctaacctcatagtaatgggtactcagggaatagacgtcatcctagggatgaattggctagataagtatcaggcatttatcagttgtgacaagaggacaatcaagttggtgtccccactaggagaggaagtggtgaccgaattagttccgcctaagccgaagaaaggaagttgttatcagatggctgttgatagcagtgaagcagacccaattgagagtatcaaggttgtgtccgagttcccagacgtgtttccaaaggacttaccgggtatgccaccagagcggaaagttgagtttgctatagagcttcttcctggcaccgcccccatcttgaagagagcttacagagtatcaggaccagagttggttgaacttaagaagcagatttatgagctgtcagagaaaggttacatccgaccaagcacctcgccttgggccgcccctgtcctatttgtggagaagaaagatggcaccagaaggatgtgtatcgattatcgagctctgaatgaggtcaccatcaagaacaggtaccccttgcccagaatagaagacttgttcgaccagttgagaggagccagtgtgttctccaagatagatctgaggtcaggttatcatcagctcatgattcgaccttcagacattccgaagatggcattcattaccaagtatgggttgtatgagttcactgtgatgtctttcggtctaacaaatgcaccagccttctttatgaacttgatgaacagtgtattcatggattatcttgataagtttgtggtggtattttatgatgacattctgatatactctcaaggcgaagaagaacatgctgatcatttgaggatggtattacagatattgcgagagcaccagttgtatgcaaatttgagcaagtgcgagttctggatcagtgaagtcatgttcttgggtcacataatcaacaaagaaggattggccgtggattcgaagaaagtggcagacattctgaactggaaagcgccaacggatgctcgaggaatcaagagtttcgttggaatggccggatattatcggcgattcattgaagggttttcgaaggttgcaaaaccaatgacagctttgctaggcaacaagctgaaagttcatgagaagaattacccaatccatgacctagagttggcagcagtggttcacgcattgaagacatggaggcactatctgtatggacagaaatgtgatgtttacacagaccacaagagtctgaagtacatattcactcagtcagagctgaatatgaggcaacgaagatggttagagctgatcaaagactacgagttggagattcattaccatccaggcaaagcgaacgtggtggcagatgctttgagcaggaagagtcaggtcaatctgatggtcgcttgtccaatgccttatgagttggccaaagagtttcacaggttgagtctcggatttctgaacaacacgcgaggagtcacaattgagttggaacctaccctagagcgggaaatcaaagaagcgcagaagaatgatgagaagatcagtgagatccggcgactgattctagacggcaagggcaaagattttcgggaagacgcagaaggtgtgatatggttcaaagaccgcttgtgtgttcccaatgtccaatccattcgagagttgatcctcaaggaagctcatgagacagcctattcgattcaccatggtagtgagaagatgtatcaggatctgaagaagaaattctggtggattctgccagggcctctgctgtgtgcacattttatatgcttaagggccaacataagaaggtaccctggtgactggtgcaggactggaggtggttctcaaatctcaagcccatccatggcgcctacaagtggatccggctccgggacgcaagctaatcgtccaccattgtcttcacgtggtgctgcaacgaggagggggagggtgacctcaaaccggtcaactatcaatcgtgctgatgctgctggtacacctacatcgacgccgacaccgagtgcagacccatcaagtgccggcgatgctactgctagtggcacaccaacaccatcatcaagtactaatgctccacctgcagcagcacaaccacaatcaggtatagacaatgtcattgtggaagatgatgatactgttattgttgggacgaagaggaagctgaaatctgatgtttggctagagtttgaacaagtaactgttggtggtaaattaaaagctcaatgtaattggtgtaaaaagcaattagttggagatagtaaagccggtacaactcatttgcatagtcatcttggaagttgtcaatcacggcaagttagaaaaggattaaagcaagcaaccttgaagttgagtaaggatgagcatggagcaataatagttgataagtatgtttttgatcaacaagttgctaggaaagaactcgcaataatgatatgtgtccacgagtatccactttcaatggttgatcatgttggttttaggagattttgtgcagctctacaaccacttttcaaaacaatgtctaggaacactattaaaaaggacattttagatatgttcatatatgtgcccgctccacatacaggagaaattataagtgatgttctttacgaagtcttacaagattggcaaattgagaagaaagtctcgacagtgactcttgacaactgcaccactaatgataatttgatgtgctgcatgcaagataagttgcctctttcctctctcatgctagatggaaaattgtatttggaagagccaacacttccaagaactcaagagcttgacattatttcttggtggcaacatgcgggaattaaatacccaactcttagaaaaattgctcgggatatcatggcaattccggttacaacagtggcatcagaatctgtttttagtactggagggaggtgcactgctctatgtgttgctgtccaacagtccaagaccaagacatgtgttgctgacttgctgttgctgtccaaagaaaaacatgtgttgctgtccaagttgctgtccaaactccaaagaaaatccttgctgtccaaagagatgaagcctaaaatatcattgttttcagcttatcatccacagacagatggtcagaccaaaaggaccaatcaaatcctcgaagacatgttgagagcctgtgcgttgcaagatcagtccggatgggacaagcgattgccttatgcagagttctcctataacaacatttaccaggctagcttgaagatgtcaccatttcaggcgctttatggaaggagttgtagaactccgttgcaatgggatcagcctggagaaaagcaagtgtttgggccagacattttgcttgaagctgaagagaacatcaagatggtccgagagaatctgaagatagcgcaatcaaggcagcgaagctatgcagacacaagaagaagagagctaagttttgaggttggagactttgtctatctgaaagtgtcaccgatcagaggagtcagaagatttggagtcaaaggcaagctagcaccccgctacatcggtctgtatcagattctcgcaaggcgtggagaagtggcctatcagctcagcctgccagaaaatttgtctgctgtgcatgatgtttttcatgtgtctcagttgaagaagtgtctgcgtgtgccagaagagcagttgccagttgaaggtctggaggtccaggaggacttgacctacatagagaaaccagcgtaa

SEQ ID NO: 5207 - DNA, 4455 bp, Zea mays
  Clone ID: TF_ZM4632.C2.o2.fg
atgtccatcgagcagatgtttctgatgcagactcaggcagttcaagccatcggtcagactttggccgccattcagcagcagcagcagcagcaagcaccaccccagcctcagatgcctcagatgcccaaagacaagcgtgctgaattcatgagaggtcatccaccaacgttcgctcattcttctgaccctatggatgctgaagattggctgcgcactgtggagcgggagttgcataccgctcagtgcgatgacagggagaaagttctgtatggtccccgtctgttgagaggagcagcccagtcatggtgggagtcttacctcgccacccatgcccaccctgacgccatcacctgggaagagttcagaggtagttttcgtcagtaccatgttcccgcaggtctgatgactgtgaagaaggaggagttcctggccctcaagcaagggccattgtctgtcagtgagtaccgggacaggtttctgcaattgtctcgctatgctcctgaagatgtcaacaccgacgccaagcgacagtaccgtttcctgagaggcttggttgaccctctgcagtatcaactgatgaatcacaccttcccgacattccagcacctgattgacagagcaatcatgacggagagaaagcgcaaggagatggaagatcgtaagcgcaagatcagtggaccccagcctggaagcagcagccgccctcgtttttcaggcaatcaaccccagcagttcaggcagaaccagcgtccacctcagcagcatcagcagtttcaaaggcagtaccctcagaaccagtatcagaaccgtcagagcaatcagtcaggaggtcagtttccgaagcagaatcagcaggcaccccgtcttcctgccccagcaaatcagcagaacagtcaggcagcaccagttcaggttggaaacagagcatgtttccactgtggagagcaaggccactgggtgatgcaatgtccgaagaaggcagcccagcagcagtcaggccccaatgccccagcgaagcagaatgtgtctcagcctggagcaggcaatcgctctcagccgcgctataatcatggaagattgaatcatttggaggctgaagcagttcaggagacccccggcatgatagtaggtatgttcccagtcgactcccatattgcagaagtgttatttgatactggagcaacgcattctttcattactgcatcatgggtagaagcacataatcttccaattactaccatgtcaacccccattcaaattgactcagccggtggtagaattcgagccgatagcatttgtttgaatataagtgtgaaaataagggggatagcatttcccgccaaccttatagtaatgggtactcagggaatagatgtcatcctagggatgaattggctagataagtatcaggcagttatcagttgtgataaaaggacaatcaagttggtgtccccactaggaaaggaagtggtgaccgagttagtcccacctgagccgaagaaaggaagttgttatcagatggttgtcgatagcagtgaagcagacccaatcgagagtatcaaggttgtgtccgaattctcagatgtgtttccaaaggacttaccgggtatgccaccagagcggaaagttgagtttgctatagagcttcttcctggaaccgcccctatctttaagagagcttacagaatatccggaccagagttggatgaacttaagaagcaaattgatgagctgtcagagaaaggttacatccggccaagcacctcgccttgggccgcccctgtcttatttgtggagaagaaagatggcaccaagaggatgtgtatcgattaccgagctttgaatgaggtcacgatcaagaacaagtatcctttgcccagaatagaagatctgttcgaccagttgagaggagccagcgtgttctccaagatagatctgaggtcaggttatcatcagctcaggatccgaccttcggacattccgaagacggcattcatttccaagtatggtttgtatgagttcacagtgatgtcttttggtttgaccaatgcgccagcattctttatgaacttgatgaacagtgtattcatggattatcttgataagtttgtggtggtattcattgatgacattctggtttattctcaaagcgaagaagagcacgcagatcatttgaggatggtgttgcagagattgcgagagcaccagttgtatgcaaagttgagtaagtgtgagttctggatcagtgaagtcctgttcttgggtcacataatcaacaaggaaggattggctgtggatccgaagaaagtggcagacattctgaactggaaagcgccaacagatgctaaaggaatcaagagcttcattggaatggccggatattatcggcgattcattgaaggattttcgaagattgcgaaaccaatgacagcgttgctaggcaacaaagttgagttcaagtggacccagaaatgccaagaggcctttgaagcgctgaaagagaagttgactacagcgcctgtcctagtcttgcctgatgtgcacaagcccttctcggtgtattgtgatgcttgttacacaggtttgggatgtgtgttgatgcaagagggaagagttgtggcttactcgtcccgacagttgaaggttcatgagaagaattacccaatccatgatctagagttggcagcagtggttcacgcactgaagacatggaggcactatttgtatgggcagaaatgtgatgtttacacagaccacaagagtcttaagtacatattcacccagtcagagttgaacatgaggcaacgaagatggttagagttgatcaaagactatgagttggagattcattaccatccaggcaaagcaaacgtagtggcagatgctttgagcagaaagagtcaaatcaatctgatggtcgctcgtccgatgccttatgagttggccaaggagtttgacaggttgagtctcggatttctgaacaattcgcgaggagtcacagttgaattggaacctaccctggagcgcgaaatcaaagaagcgcagaagaatgatgagaaaatcagtgagatccggcgactgattctagatggcaaaggcaaggattttcgagaagatgcagaaggcgtgatatggttcaaagaccgcttgtgtgttcccaatgtccagtccattcgggagttgattctcaaggaagctcatgagaccgcttattcgattcaccctggcagtgagaagatgtatcaggatctgaagaagaaattctggtggtacggaatgaagagggaaatcgcagagcatgtggctatgtgcgatagttgccgaagaattaaggcagagcaccagagacctgctggattgttgcaaccgttgcagacccctcagtggaaatgggatgaaattggtatggatttcatagtcggattgcctcgcactcgagccggctacgattccatttgggtagtagtggaccgtttgaccaagtcagcccacttcatacctgtcaagaccaactacaacagtgcagtattggcagaattgtatatgtctcggatcgtttgtcttcatggtgtgccaaagaagatagtgtcagatagaggaacgcagttcacctctcatttctggcagcagttgcatgaagctttgggcacacatctgaattttagttcagcttatcacccgcagacagatggccagaccgaaagaaccaatcaaattcttgaagatatgttgagagcctgtgcgttgcaagatcagtccggatgggacaagagattgccttatgcagagttttcctacaacaacagttaccaggccagtttgaagatgtcaccgtttcaagcgctttatggaaggagttgtagaactccgttgcaatgggatcagcctggagaaaagcaagtgtttgggccagacattttgcttgaagccgaagagaacatcaagatggtccgagagaacctgaagatagcgcaatcgaggcagcgaagctatgcagacacaagaagaagagagctgagtttcgaagtcggagactttgtttatctgaaagtgtcaccgatcagaggagtcagaagattcggagtgaaaggcaagttagcaccccgctacatcggtccgtatcagattcttgcaaagcgtggagaagtggcctatcagctcagtttgcccgagaatttgtctgctgtgcataatgtctttcatgtgtctcagttgaagaagtgcttgcgtgtgccagaagagcagttgccagtggaaggtcttgaggtccaggaggacttgacctatgttgagaagccagctcagatccttgagattgcagacagagtcacccgaaggaagaccatcagaatgtgcaaagtcagatggaatcaccactctgaggaagaagcaacctgggagcgtgaagatgatctagtggccaagtacccagagctctttgctagccagccctga

SEQ ID NO: 5208 - DNA, 5472 bp, Zea mays
  Clone ID: TF_ZM4640.C7.o1.fg
atgaagctgtggaaggagacttccaggagttccaagattacgacgagttctaggtgtgggttagcggcaacccccagtcggctgcctgtgaaggccgcgatggctcgacttagacacactgcacgaaagtccgtcatccccttcttaccctctcgccttgctgagcgtccgcttcgccgtcccgtggccggacagtccagccacttggagagactacaccaccgcctgcgtgaggagcaggaacgtcgacgacaggagcagcagggctcttctttctcgctccaccaggagatagagtctgtgaggagctgctcccctgtgcttcctctggaggcgccccctgcaccaccattgggcgccccagcttctggagtagctgctggaggagacccagacgatggagatggcgacgacagctcgagccacgacaccgacttctctgctaaccctgagccggaaggatgggttgctcgacccatcactcgcgacgctgctcgcgggtgtcacttccatgatgcgctcgacaccctgctacgtcgggcatttgaccgacatacttgtcgcggggtctacccggaccgctgggaggcaacctgcttggtgcgctgcccggagaacagtctccagggtgcagaggcctgttcagagcactattctatctctgagcgggactcagctgaggcagccatgcaagatgctgcacggcgtgcgctttcgcactactgctcggttttcggtggggcagctgacggtcttgacctgaagtattacccccgccgtccatctggcagcacaggaggcgtgattgtctcacctgtcggtgagggcaatcctaggttgagcagcacagtcaacctagccgccgtgctaaacacggagctggaccatgcattagacgagctgagtagggctcgtgctgagatcgccctgcttcgggctgagcgcgcagaacgtcatcacctggatggtggttcccccgctcccatgtcagagaacaggcgcagaggaggaaggcgtgctcagcaggagcgagccgctcaacaggatgaggtgccccagcagcagcacctaccgcccccgcccccgatgtccatcgagcagatgtttctgatgcagactcaggcagttcaagccatcggtcagactttggccaccattcagcagcagcagcagcaacagcagcaggcaccacctcaacctcagatgcctcagatacccagagacaagcgtgctgaattcatgagaggtcatccaccaacgttcgctcattcttctgaccccatggatgctgaagactggctgcgcactgtggagcgggagttgcataccgctcagtgcgatgacagggagaaagttctgtatggtccccgtctattgagaggagcagcccagtcatggtgggagtcttacctcgccacccatgcccatcctgacgccatcacttgggaagagttcagaggtagctttcgtcagtaccatgttcctgcaggtctgatgactgtgaagaaggaggagttcctggccctcaagcaagggtcatcgtctgtcagtgagtaccgggacaggtttctgcaattgtcccgctatgctcctgaagatgtcaacaccgacgccaagcggcagtaccgtttcctgagaggcttggttgaccctctgcagtaccaactgatgaatcacaccttcccgacattccagcacctgattgacagagcaatcatgacagaaaggaagcgtaaggagatggaagatcgtaagcgcaagatcagtggaccccagcctggaagcagcaatcgtcctcgtttctcaggcaatcaatctcagcagttcaggcagaaccagcgtccacctcagcagcatcagcagttccaaaggcagtaccctccgcaccagtaccagaaccgtcagagcaatcagtcaggaggtcagtttcagaggcagaatcagcaggcacctcgtcttcctgccccagcaaaccagcagaacagtcaggcagcaccagctcaggttggaaacagagcatgtttccactgtggagagcaaggccactgggtgatgcaatgtccgaagaaggcagcccagcagcagtcaggccccagtgcccctgcaaagcagaatgtgcctcagcatggagtaggcaatcgctctcagccgcgctataatcatgggagactgaaccacttggaggctgaagcagttcaagatacccccggcatgatagtaggtatgttcccagtcgactcccatattgcagaagtgttatttgatactggagcaacgcattctttcattactgcatcatgggtagaagcacataatcttccaattactgccatgtcaacccccattcaaattgactcagccggtggtagaattcgagccgatagcatttgtttgaatataagtgtggaaataagggggatagcgtttcccgccaaccttatagtaatgggtactcagggaatagatgtcatcctagggatgaattggctagataagtatcaggcagttatcagttgtgataagaggacaatcaagttggtgtctccactaggaaaggaagtggtgaccgagttagtcccgcctgagccaaagaaaggaagttgttatcagatagctgttgatagcagtgaagcagacccaattgagagcatcaaggttgtgtccgagttcccagatgtgtttccaaaggacttaccgggtatgccaccagagcggaaagttgagtttgccatagagcttcttcctggaaccgcccctatcttcaagagagcttacagaatatctggaccagagttggatgagcttaagaagcaaattgatgagctgtcagagaaaggttacattcggccaagcacctcgccttgggccgcccctgtcttgttcgtggaaaagaaagatggcaccaagaggatgtgtattgattaccgagctttgaatgaggtcacgatcaagaacaagtaccctttgcccagaatagaggatctgttcgatcagttgagaggagccagtgtgttctccaagattgatctgaggtcaggttatcatcagctcaggatccgaccttcggacattccgaagacggcattcatttccaaatatggtttgtatgagttcacagtgatgtcttttggtttgaccaatgcgccagcgttcttcatgaacttaatgaacagtgtattcatggattaccttgataagtttgtggtggtattcattgatgacattctggtttattctcaaagcgaagaagagcatgaagatcatttgaggatggtattgcagagattgcgagagcaccagttgtatgcaaagttgagcaagtgtgaattctggatcagtgaagtcttgttcttgggtcacataatcaacaaggaaggattggctgtggatccgaagaaagtggcagacattttgaactggaaagcgccaacagatgcccgaggaatcaagagcttcattggaatggccggatactatcgacgattcattgaagggttttcgaagattgcgaaaccaatgacagcgttgctaggcaacaaagttgagttcaagtggacccagaaatgccaagaggcctttgaagcgctgaaagagaagttgactacagcgcctgtcctagtcttgcctgatgtgcacaagcccttctcggtgtattgtgatgcttgttacacaggtttgggatgcgtgttgatgcaagagggaagagttgtggcttactcgtcccgacagctgaaggttcatgagaagaattacccaatccatgatctagagttggcagcagtggttcacgcactgaagacatggaggcactatctgtatggacagaaatgcgatgtttacacagaccacaagagtctgaagtacatattcactcagtcagagttgaacatgaggcaacgaagatggttagagttgatcaaagactatgagttggagatccattaccatccaggcaaagcaaatgtagtggcggatgctttgagcagaaagagtcaagtcaatctgatggtcgctcgtccgatgccttatgagttggctaaggagtttgacaggttgagtctcggatttctgaataattcgcgaggagtcacagttgagttggaacctaccttggagcgcgaaatcaaagaagcgcagaagaatgatgagaagataagtgagatccggcgactgattctagatggcagaggcaaagattttcgagaagatgcagaaggcgtgatatggttcaaagaccgcttgtgtgttcccaatgtccagtccattcgggaattgattcttaaggaagctcatgagacagcctattcgattcaccctggcagtgagaagatgtatcaggatctgaaaaagaaattatggtggtacggaataaaaagggaaatcgcagagcatatccctcagtggaaatgggatgaaattggtatggatttcatagtcggattgcctcgcactcgagccggctacgattccatttgggtagtagtggaccgtctgaccaagtcagcccacttcatacctgtcaagaccaactacagcagtgcagtattggcagaattgtatatgtcttggatcgtttgtcttcatggtgtgccaaagaagatagtgtcagacagaggaacgcagttcacctctcatttctggcagcagttgcatgaagctttgggcacgcatctgaatttcagttcagcttatcatccgcagacggatggccagaccgaaaggaccaatcaaattcttgaagatatgttgagagcctgtgcgttgcaagatcagtccggatgggacaagcgattgccttatgcagagttttcctataacaacagttaccaggccagtttgaagatgtcaccatttcaggcgctttatggaaggagttgtagaactccgttgcaatgggatcagcctggagaaaagcaagtgtttgggccagacattttgcttgaagccgaagagaacatcaagatggtccgagagaatctgaagatagcgcaatcaagacagcgaagctatgcagacacaagaagaagagagctgagtttcgaggttggagactttgtctatctgaaagtgtcaccgatcagaggagtcagaaaattcggagtgaaagacaagctagcaccccgctacattggtccgtatcagattcttgcaagacgtggagaagtggcctatcagctcagtttgcccgagaatttgtctgctgtgcataatgtctttcatgtgtctcagttgaagaagtgcttgcgtgtgccagaagagcagttgccagtggaaggtcttgaagtccaggaggacttgacctacgttgagaagccagtgcaaatccttgaggttgcagacagagtcacccgaaggaagaccatcagaatgtgcaaagtcagatggaatcaccactctgaggaagaagcaacctgggagcgtgaagatgatctgatggccaaataccctgagctctttgctagccaaccctga

SEQ ID NO: 5209 - DNA, 4473 bp, Zea mays
  Clone ID: TF_ZM4679.C3.o2.fg
atgtcgatcgagcagatgtttctgatgcagactcaggcagttcaggccatcggtcagactctggccgccattcagcagcagcagcagcagcaacagcagcaagcaccaccccagcctcagatgcctcagatgcccagagacaagcgtgctgaattcatgagaggtcatcccccaacgttcgctcactcttctgaccccatggatgctgaagattggctgcgcactgtggagcgggagttgcataccgctcagtgtgatgacatggagaaggtcttgtatggtccccgtctgttgagaggagcagcccaatcatggtgggagtcttacctcgccacccatgccaaccccgacaccatcacctgggaagaattcagaggtagctttcgtcagtaccacgtgcctgcaggtctgatgacagtgaagaaggaggagttcctggcccttaagcaagggtcatcatctgtcagtgagtatcgagacaggtttctgcaattgtctcgctatgctcctgaggatgtcaacactgacgccaagcgacaataccgttttctgagaggcttggtcgaccccctgcagtatcaactgatgaatcacaccttcccgacattccagcacctgattgatagagcgatcatgacagaaaggaagcgtaaggagatggaagatcgtaagcgcaagatcagtggaccccagcctggaagcagcagccgccctcgtttttcaggcaatcaacctcagcagttcaggcagaaccagcgtccacctcagcagcgtcagcagcatcagcagttccaaaggcagtatcctcagcatcagtaccagaaccgtcagagcaatcagtcaggaggtcagtttcaaaggcagaatcagcaagcaccccgtcttcctgccccagcaaaccagcagaacagtcaggcagcaccagctcaggttggaaacagggcatgtttccactgtggagagcagggccattgggtgatgcaatgtccgaagaaggcagcccagcagcagtcaggccccaatgccccagcaaagcagaatgtgtctcagcctggagcaggcaatcgccctcaacagcgctataatcatggaagattgaatcacttggaggctgaagcagttcaggagacccccggcatgatagtaggtatgttcccagtcgactcccatattgcagaagtgttatttgatactggagcaacgcattctttcattactgcatcatgggtagaagcacataatcttccaactactaccatgtcaacccccattcaaattgactcagctggtggtagaattcgagctgatagcatttgtttaaatataagtgtggaaataagggggatagcgtttcccgccaaccttatagtaatgggtactcagggaatagatgtcatcctagggatgaattggttagataagtatcaggcagttatcagttgtgataaaaggacaatcaagttggtgtccccactaggaaaggaagtggtgaccgagttagtcccgcctgagccgaagagaggaagttgttatcagatggctgtcgatagcagtgaagcagatccagttgagagtatcaaggttgtgtctgaattcccagatgtgtttccaaaggatttaccgggtatgccaccagagcggaaagttgaattcgctatagagcttcttcctggaaccgcccccatctttaagagagcttacagaatatctggaccagagttggttgagcttaagaagcagattgatgagctgtcagagaaaggttacatccggccaagcacctcgccttgggccgcccctgtcttatttgtggaaaagaaagatggcaccaagaggatgtgcatcgattatcgagctttgaatgaggtcacgatcaagaacaagtatcccttgcccagaatagaagatctgttcgaccagttgagaggagccagtgtgttctccaagattgatctgaggtcaggttatcatcagctcaggatccgaccttcggacattccgaagacgacattcattaccaagtatggtttgtatgagttcacagtgatgtcttttggtttgaccaatgcaccagcgttcttcatgaatctgatgaacagtgtattcatggattaccttgataagtttgtggtggtattcattgatgacattctgatttattcccaaagcgaagaagagcacgcagatcatttgaggatggtattgcagagattgcgagagcaccagttgtacgcaaagttgagcaagtgtgagttctggatcagcgaagtcctgttcttgggtcacataatcaacaaggaaggattggctgtggatccgaagaaagtggcagacattctgaactggaaagcgccaacagatgctagaggaatcaagagcttcattggaatggccggatattatcggcgattcattgaagggttttcaaagattgcgaaaccaatgacagcgttgctaggcaacaaagttgagttcaagtggacccagaaatgtcaagaggcctttgaagcgctgaaagagaagttgactacatcgcctgtcctagtcttgcctgatgtgcacaagcccttctcggtgtattgtgatgcttgttacacaggtttgggatgtgtgttgatgcaagagggaagagttgtggcttactcgtcccgacagttgaaggttcatgagaagaattacccaatccatgatctagagttggcagcagtggttcacgcactgaagacatggaggcactatctgtatggacagaaatgcgatgtttacacagatcacaagagtctgaagtacatattcactcagacagagctgaacatgaggcaacgaagatggttagagctgatcaaagactatgagttggagattcattaccatccaggcaaagcaaacgtagtggcagatgctttgagcagaaagagtcaagtcaatctgatggtcgctcgcccgatgccttatgagttggccaaggagttcgacaggttgagtctcgggtttctgaacaattcgcgaggagtcacagttgaattggaacctaccttggagcgagaaatcaaagaagcacagaagaatgatgaaaagatcagtgagattcggcgattgattccagatggcagaggcaaagattttcgagaagatgctgaaggcgtgatatggttcaaagaccgcttatgtgttcccaatgtccagtctattcgagagttgatcctcaaggaagctcatgagacagcctattcgattcaccctggtagtgagaagatgtatcaggatctgaagaagaaattctggtggtacggaatgaagagggaaatcgcagagcatgtggctaagtgcgatagttgccgaagaattaaggcagagcaccagagaccagctggattgttgctaccgttgcagatccctcagtggaaatgggatgaaattggtatggatttcatagtcggattgcctcgcactcgagccggctacgattctatttgggtagtggtggaccgtttgaccaagtcagcccacttcatacctgtcaagaccagctacaacagtgcagtattgacagagttgtatatgtctcggatcgtttgtcttcatggtgtgccaaagaagatagtgtcagacagaggaacgcagttcacctctcatttctggcagcagttgcatgaagccttgggcacacatctggatttcagttcagcttatcacccgcagacagatggccagactaaaaggaccaatcaaattctcgaagatatgttgagagcctgtgcgttgcaagatcagtccggatgggacaagcgattgccttatgcagagttttcctataacaacagttaccaggccagtttgaagatgtcaccgtttcaggcgctttatggaaggagttgtagaactccgttgcaatgggatcagcctggagagaagcaagtgtttgggccagacattctgcttgaagccgaagagaacatcaagatggtccgagagaatctgaagatagcgcaatcgaggcagcgaagctatgcagacacaagaagaagagagctgagttttgaagtcggagactttgtctatctgaaagtgtcaccgatcagaggagtcagaagattcggagtgaaaggcaagctagcaccccgctacattggtccgtaccagatcctctcaaagcgtggagaagtggcttatcagctcagcctgccagagaatttgtctgctgtgcatgatgtctttcatgtgtctcagttgaagaagtgcttgcgtgtgccagaagagcagttgccagtggaaggtcttgaggtccaggaggacttgacctatgttgagaagccagctcagatccttgagattgcagacagagtcacccgaaggaagaccatcagaatgtgcaaagtcagatggaatcaccactctgaggaagaagcaacctgggagcgtgaagatgatctagtggccaagtacccagagctctttgctagccagccctga

SEQ ID NO: 5210 - DNA, 4200 bp, Zea mays
  Clone ID: TF_ZM4716.C1.o4.fg
atgtcgatcgagcagatgtttctgatgcagactcaggcagttcaagccatcggtcagactctggcaggcattcagcagcagcagcaacagcagcaggccccacctcagcctcagatgcctcagatgctcagagacaagcgtggtctgatgacagtgaagaaggaggagttcttggcccttaagcaagggtcatcatctgtcaacgagtaccgagacaggtttctgcagttgtctcgctatgctcctgaagatgtcaacaccgacgccaagcggcagtaccgtttcctgagaggcttggttgaccctctgcagtaccaactgatgaatcacaccttcccgacatttcagcacctgattgacagagtaatcatgacggagaggaagcgtaaggagatggaggatcgtaagcgcaagatcagtggaccccagcctagaagcaacagccgccctcgcttctcaggcaatcaacctcagcagttcaggcagaaccagcgtccacctcagcagcatcagcagtttcaaaggcagtatcctcagcatcagtaccagaaccgtcagagcaatcagtcaggaggtcagtttcagaggcagaatcagcaagcacctcatcttcctgccccagcaaaccagcaaaacaatcaggcagcaccagctcaggttggaaacagagcatgtttccactgtggagagcaaggccactgggtgatgcaatgtccgaagaaggcagcccagcagcagtcaggccccaatgccccagcaaagcagaatgtgcctcagcctggagcaggcaaccgctctcagccgcgttacaatcatggaagactgaaccacttggaggctgaagcagctcaggagacccccggcatgatagtaggtatgttcccagtcgactcccatattgcagaagtgttatttgatactggagcaatgcattctttcattactgcattatgggtagaagcacataatcttccaattactaccatgtcaacccccattcaaattgactcggccggtggtagaattcgagctgatagcatctgtttgaatgtaagtgtggaaataagggggatagcgtttcccgctaaccttataataatgggtactcagggaatagatgtcatcctagggatgaattggctagataagtaccaggcggttatcagttgtgataaaaggaccatcaagttggtgtccccactaggagaggaagtggtgaccgagttagtcccgcctgagccaaagaaaggaagttgttatcagatggctgtcgatagcagtgaagcagacccaattgagaggatcaaggttgtgtctgagttcccagatgtgtttccaaaggacttaccgggtatgccaccagagcggaaagttgagtttgccatagagcttcttcctggaaccgcccccatctttaagagagcctacagaatatctggaccagagttggttgaacttaagaagcaaattgatgagctgtcagagaaaggttacatccggccaagcacctcgccttgggccgcccctgtcctatttgtggagaagaaagatggcaccaaaaggatgtgtatagattatcgagctttgaatgaagtcacgatcaagaacaagtatcccttgcccagaatagaagatctgttcgaccagttgagaggagccagtgtgttctccaagattgatctgaggtcaggttatcatcagctcaggatccgaccgtcggacattccgaaaacggcattcattaccaagtatggtttgtatgagttcacagtgatgtcttttggtttgaccaatgcgccagcattcttcatgaacttgatgaatagtgtattcatggattaccttgataagtttgtggtggtattcattgacgacattctgatttattctcaaagcgaagaagagcatgcagatcatttgaggatggtattgcagagattgcgagagcaccagttgtatgcaaagttgagcaaatgtgaattttggatcaatgaagtcctgttcttgggtcacataatcaacaaagaaggattggctgtggatccgaagaaagtggcagacattctgaactggaaagcgccaacagatgctcgaggaatcaagagcttcattggaatggccggatactatcggcgattcattgaagggttttcgaagattgcgaaaccaatgacagcgttgctaggcaacaaggttgagttcaagtggacccagaaatgtcaacaggccttcgaagcgctgaaagagaagttgacaacagcgcctgtcctagtcttgcctgatgtgcacaagcccttctctgtgtactgtgatgcttgttacacaggtttgggatgcgtattgatgcaagagggaagagttgtggcttactcgtcccgacagttaaaggttcatgagaagaattacccaatccatgacctagagttgacagcagtggttcacgcactgaagacatggaggcactatctgtatggacagaaatgcgatgtttacacagatcacaagagtctgaagtatatattcactcagtcagagttgaacatgaggcaacgaagatggttagagctgatcaaagattatgagttggagattcattaccatccaggcaaagcaaacatagtggcagatgctttaagcagagatagtcaagtcaatctgatggtcgctcgtccgatgccttatgagttggccaaggagttcgacaggttgagtctcgaatttctgaacaattcgcgaggagtcacagttgagttggaacccaccttagagcaggaaatcaaagaagcacagaagaatgatgagaagatcagtgagatccgacgactgattctagatggcagaggcaaagattttcgagaagatgcagaaggtgtgatatggttcaaagaccgcttatgtgttcctaatgtccagtccattcgggagttgatcctcaaggaagctcatgagacagcttattcgattcaccctggtagtgagaagatgtatcaggatctgaagaataaaatctggtggtacggaatgaagagggaaattgcagagcatgtggctatgtgcgatagttgtcgaagaattaaggcagagcaccagagaccagctggattgttgcaaccgttgcaaattcctcaatggaaatgggatgaaatcggtatggatttcatagtcggattgcctcgcactcgagccggctacgattccatttgggtagtagtggaccgcttgaccaagtcagcccacttcatacctgtcaagaccaactacagcagtgcagtattggcagagttgtatatgtctcggatcgtttgtcttcatggcgtgccaaagaagatagtgtcagacagaggaacgcagttcacctctcatttctggcagcagttgcatgaagccttgggcacacatctgaatttcagttcagcttatcatccgcagacagatggccagactgaaaggaccaatcaaattcttgaatacatgttgagagcctgtgcgttgcaagatcagtccggatgggacaagcgattgccttatgcagagttctcctataacaacagttaccaggccagtttgaagatgtcaccatttcaagcactctatgggaggagttgtagaactctattgcaatgggatcagcctggggaaaagcaagtgttcgggccagacattttgcttgaagccgaagagaacatcaagatggtccgagagaatatgaagatagcgcagtcgaggcagcgaagctacgcagacacaagaagaagagagctgagtttcgaagtcggagactttgtctatctgaaagtgtcaccgatcagaggagtcagaaggttcggagtcaaaggcaagttagcaccccgctacattggtccgtaccaaattatctcaaggcgtggagaagtggcctatcagctcagtatgccagagaatttgtctgctgtgcatgatgtctttcatgtgtctcagttgaagaagtgcttgcgtgtgccagaagagcagttgccagtggaaggtcttgaagtccaggaggacttaacctacgttgagaagccagtgcaaatccttgaggttgcagacagagtcactcgaaggaagaccatcagaatgtgcaaagtcaaatggaatcaccactccgaggaagaagcaacctgggagcgtgaagatgatctgatggctaaataccctgagctctttgctagccaaccctga

SEQ ID NO: 5211 - DNA, 4446 bp, Zea mays
  Clone ID: TF_ZM4786.C2.o2.fg
atgtcgattgagcagatgtttctgatgcagactcaggcagttcaagccatcggtcagactctggccgccattcagcagcagcagcagcagcaacagcagcaagcaccaccccagcctcagatgcctcagatgcctagagacaagcgtgctgaattcatgagaggccatcccccaacgttcgctcactcttctgaccccatggatgctgaagattggctgcgcactgtggagcgggagttgcataccgctcagtgcgatgacagggagaaagttctgtatggtccccgtctgttgagaggagcagcccagtcatggtgggagtcttacctcgccacccatgccaaccccgacaccatcacctgggaagaattcagaggtagctttcgtcagtaccatgtgcctgcaggtctgatgacagtgaagaaggaggagttcctggcccttaagcaagggtcatcgtctgtcagtgagtatcgggacaggtttctgcagttgtctcgctatgctcctgaagatgtcaacactgacgccaagcgacaataccgttttctgagaggcttggttgaccctctgcagtatcagctgatgaatcacaccttcccgacattccagcacctgattgacagagcaatcatgacagaaaggaagcgtaaggagatggaagatcgtaagcgcaagatcagtggaccccagcctggaagcagcagccgccctcgtttctcaggcaatcaacctcagcagttcaggcagaaccagcgtccacctcagcagcatcagcagcgtcagcagtaccagcagtttcaaaggcagtaccctcagaatcagtaccagaaccgtcagagcaatcagtcaggaggtcagtttcagaagcagaatcagcaagcacctcgtcttcctgccccagcaaatcagcaaaacagtcaggcagcaccagctcaggttggaaacagggcgtgtttccactgtggagagcaaggccattgggtgatgcaatgtccgaagaaggcagcccagcagcagttaggccccaatgccccaggaaagcagaatcgctataatcatggaagattgaatcacttggaggctgaagcagttcaggagacccccggcatgatagtaggtatgttcccagtcgactcccatattgcagaagtgttatttgatactggagcaacacattctttcattactgcatcatgggtagaagcacataatcttccaactactaccatgttaacccccattcaaattgactcagccggtggtagaattcgagctgatagcatttgtttaaatgtaagtgtggaaataagggggatagcgtttcccgccaaccttatagtaatgggtactcagggaatagatgtcatcctagggatgaattggttagataagtatcaggctgttatcagttgtgataaaaggacaatcaagttggtgtccccactaggagaggaagtggtgaccgagttagtcccacctgagccaaagaaaggaagttgttatcagatggctgttgatagcagtgaagcagacccaattgagagtatcaaggttgtgtctgaattcccagatgtgtttccaaaggatttaccgggtatgccaccagagcggaaagttgagtttgctatagagcttcttcctggaaccgcccccatctctaagagagcttacagaatatctggaccagagttggttgagcttaagaagcagattgatgagctgtcagagaaaggttacatccggccaagcacctcgccttgggccgcccctgtcttgtttgtggagaagaaagatggtactaaaaggatgtgtatcgattatcgagctttgaatgaagtcacgatcaagaacaagtatcctttgcccagaatagaagatctgttcgaccagttgagaggagccagtgtgttctccaagatcgatctaaggtcaggttatcatcagctcaggatccgaccttcggacattccgaagacggcattcattaccaagtatggtttatatgagttcacagtgatgtcttttggtttgaccaatgcgccagcgttctttatgaacttgatgaatagtgtattcatggattaccttgataagtttgtggtggtattcattgatgacattctggtttattctcaaagcgaagaagagcacgcagatcatttgaggatggtgttgcagagattgcgagagcaccagttgtatgcaaagttgagcaaatgtgagttctggatcagtgaagtcctgttcttgggtcacataatcaacaaagaaggattggctgtggatccgaagaaagtggcagacattctaaactggaaagcgccaacggatgctcgaggaatcaagagcttcattggaatggccggatattatcggcgattcattgaagggttttcgaagattgcgaaaccaatgacagcgttgctaggcaacaaagttgagttcaagtggacccagaaatgtcaagaggcctttgaagcgctgaaagagaagttgacaacagcgcctgtcctagtcttgcctgatgtgcacaagcccttctcggtgtattgcgatgcttgttacacaggtttgggatgtgtgttgatgcaagagggaagagttgtggcttactcgtcccgacagctgaaggttcatgagaagaattacccaatccatgatctagagttggcagcagtggttcacgcactgaagacatggaggcactatctgtatggacagaaatgcgatgtttacacagatcacaagagtctgaagtacatattcactcagtcagagttgaacatgaggcaacgaagatggttagaattgatcaaagactatgagttggagattcattaccatccaggaaaagcaaacgtagtggcagatgctctgagcagaaagagtcaagtcaatctgatggttgctcgcccgatgccttatgagttggccaaggagtttgacaggttgagtctcgggtttctgaacaattcgcgaggagtcacagttgaattggaacctaccttggagcgcgaaatcaaagaagcgcagaaaaatgatgaaaagatcagtgagattcggcgattgattctagatggcagaggcaaagattttcgagaagatgcagaaggtgtggtatggttcaaagaccgcttgtgtgttcccaatgtccagtctattcgggagttgattcttaaggaagctcatgagacagcttattcgattcaccctggcagtgagaagatgtatcaggatctgaagaagaaattctggtggtacggaatgaaaagagaaatcgcagagcatgtggctatgtgcgatagttgtcgaagaattaaggcagaacaccagagacctgctggattgttgcaaccgttgcagatccctcagtggaaatgggatgaaattggtatggatttcatagtcggattgcctcgcactcgagccggctacgattccatttgggtagtagtggaccgtttgaccaaatcagcccacttcatacctgtcaagaccaactacaacagtgcagtattggcagaattgtatatgtctcggatcgtctgtcttcatggtgtgccaaagaagatagtgtcagacagaggaacgcagttcacctctcatttctggcagcagttgcatgaagccttgggcacgcatctgaatttcagttcagcttatcacccgcagacagatggtcagactgaaagaaccaatcaaattcttgaagatatgttgagagcctgtgcgttgcaagatcagtccggatgggacaagcgattgccttatgcagagttttcctataacaacagttatcaggccagtttgaagatgtcaccgtttcaagcgctgtatggaaggagttgcagaactccgttgcaatgggatcagcctggagagaagcaggtgtttgggccagatattttgcttgaagccgaagagaacatcaagatggtccgagagaatctgaagatagcgcaatcgaggcagcgaagctatgcagacacaagaagaagagagctgagttttgaagtcggagattttgtctatctgaaagtgtcaccgatcagaggagtcagaagattcggagtgaaaggcaagctggcaccccgctacattggtccgtatcaaattctctcaaagcgtggagaagtggcttatcagctcagcctgccagagaatttgtctgctgtgcatgatgtctttcatgtgtctcaattgaagaagtgtttgcgtgtgccagaagagcagttgccagtggaaggtcttgaagtccaggaggacttgacctatattgagaagccagctcagatccttgaggttgcagatagagtcacccgaaggaagaccatcagaatgtgcaaagtcagatggaatcaccactctgaagaagaagcaacctgggagcgtgaagatgatctgatggccaagtacccggagctctttgctagccagccctga

SEQ ID NO: 5212 - DNA, 4479 bp, Zea mays
  Clone ID: TF_ZM4888.C3.o2.fg
atgtcgattgagcagatgtttctgatgcagactcaggcagttcaagccatcggtcagactttggccgccattcagcagcagcagcagcagcagcagcaagcaccaccccagcctcagatgcctcaggtgcctagagataagcgtgctgaattcatgagaggtcatccaccaacgttcgctcattcttctgaccccatggatgctgaagattggctgcgcactgtggagcgggagttgcataccgctcagtgcgatgacagggagaaagttctgtatggtccccgtctgttgagaggagcagcccagtcatggtgggagtcttacctcgccacccatgccaaccccgacaccatcacctgggaagaattcaggggtagctttcgtcagtaccatgtgcctgcaggtctgatgacagtgaagaaggaggagttcctggcccttaagcaagggtcatcgtctgtcagtgagtatcgagacaggtttctgcaattgtctcgctatgctcctgaagatgtcaacaccgacgccaagcgacagtaccgtttcctgagaggcttggttgaccctctgcagtatcagctgatgaatcacaccttcccgacattccagcacctgattgacagagcaatcatgacagaaaggaagcgcaaggagatggaagatcgtaagcgcaagatcagtggaccgcagtctggaagcagcagtcgccctcgcttttcaggcaatcaacctcagcagttcaggcagaaccagcgtccacctcagcagcatcagcagcgtcagcagtatcagcagttccaaaggcagtaccctcagaatcagtaccagaaccgtcagagcaatcagtcaggaggtcagtttcagaagcagaatcagcaagcacctcgtcttcctgccccagcaaatcagcagaacagtcaggcagcaccagctcaggttggaaacagggcatgtttccactgtggagagcaaggccattgggtgatgcaatgtccaaagaaggcagcccagcagcagtcaggccccaatgccccagcaaagcagaatgtgcctcagcctggagcaggcaatcgctctcagcagcgctataatcatggaagattgaatcacttggaagctgaagcagttcaggagacccccgacatgacagtaggtatgttcccagttgactcccatattgcagaagtgttatttgatactggagcaacacattctttcattactgcatcatgggtagaagcacataaacttccaataactaccatgtcaacccccattcaaattgattcagccggtggtagaattcgagccgatagcatttgtttgaatataagtgtgaaaataagggggatagcgtttcccgccaaccttatagtaatgggtactcagggaatagatgtcatcctagggatgaattggctagataagtaccaggcagttatcagttgtgataaaaggacaatcaagttagtgtccccactaggagaggaagtggtgactgagttagtcccgcctgagccaaagaaaggaagttgttatcagatgactgtcgatagcagtgaagcagacccgattgagagtatcaaggttgtgtccgaattcccagatgtgtttccaaaggatttaccgggtatgccaccagagcggaaagttgaatttgccatagagcttcttcctggaaccgcccctatcttcaagagagcttacagaatatctggaccagagttggatgagcttaagaagcagattgatgaactgtcagaaaaaggttacatccggccaagcacctcgccttgggccgcccctgtcttgtttgtggagaagaaagatggtactaagaggatgtgcatcgattaccgagctttgaatgaagtcacgatcaagaacaagtatcctttgcccagaatagaagatctgttcgaccggttgagaggagccagtgtgttctccaagatcgatctgaggtcaggttatcatcagctcaggatccgaccttcggacattccgaagacggcattcattaccaagtatggtttatatgagttcacagtgatgtcttttggtttgaccaatgcgccagcattctttatgaacttgatgaacagtgtattcatggattaccttgataagtttgtggtggtattcattgatgatattctggtttattctcaaagtgaagaagagcatgcagatcatttgaggatggtattgcagagattgcgagagcaccagttgtatgcaaagttgagcaagtgtgagttctggatcagtgaagtcctgttcttgggtcacataatcaacaaggaaggattggctgtggatccgaagaaagtggcagacattctgaactggaaagcaccaacagatgctagaggaatcaagagcttcattggaatggccggatattatcggcgattcattgaagggttttcgaagattgcgaagccaatgacagcgttgctaggcaacaaggttgagttcaagtggacccagaaatgccaagaggcctttgaagcgctgaaagagaagttgacaacagcgcctgtcctagtcttgcctgatgtgcacaagcccttctcggtgtattgtgatgcttgttacacaggtttgggatgtgtgttgatgcaagagggaagagttgtggcttactcgtcccgacagctgaaggttcatgagaagaactacccaatccatgatctagagttggcagcagtggttcacgcactgaagacatggaggcactatctgtatggacagaaatgcgatgtttacacggaccacaagagtctgaagtacatattcactcagtcagaattgaacatgaggcaacgaagatggttagaattgatcaaagactatgagttggagattcattaccatccaggcaaagcaaacgtagtggcagatgctttgagcagaaagagtcaagtcaatctgatggtcgctcgtccgatgccttatgagttggccaaggaatttgacaggttgagtctcggatttctgaacaattcgcgaggagtcacagttgaattggaacctaccttggagcgcgaaatcaaagaagcgcagaaaaatgatgagaagatcagtgagattcggcgattgattctagatggcagaggcaaagactttcgagaagatgcagaaggtgtggtgtggttcaaagaccgcttgtgtgttcccaatgtccagtctattcgggagttgattcttaaggaagctcatgagacagcctattcgattcaccctggcagtgagaagatgtatcaggatctgaagaagaaattctggtggtacggaatgaaaagagaaatcgcagagcatgtggctatgtgcgatagttgtcgaagaattaaggcagaacaccagagaccagctggattgttgcaaccgttgcagatccctcagtggaaatgggatgaaattggtatggatttcatagtcggattgcctcgcactcgagccggctacgattccatttgggtagtagtggaccgcttgaccaagtcagcccacttcatacctgtcaagaccaactacaacagtgcagtattggcagaattgtatatgtctcggatcgtttgtcttcatggtgtgccaaagaagatagtgtcagacagaggaacgcagttcacctctcatttctggcagcagttgcatgaagccttgggcacgcatctgaatttcagttcagcttatcacccgcagacagatggccagaccgaaagaaccaatcaaattcttgaagatatgttgagagcatgtgcgttgcaagatcagtccggatgggacaagcgattgccttatgcggagttttcctataacaacagttaccaggccagtttgaagatgtcaccgtttcaagcgctgtatggaaggagttgcagaactccgttgcaatgggatcagcctggggaaaagcaagtgtttgggccagacattttgcttgaagccgaagagaacatcaagatggtccgagagaatctgaagatagcgcaatcaaggcagcgaagctatgcagacacaagaagaagagagctgagtttcgaagtcggagactttgtctatctgaaagtgtcaccgatcagaggagtcagaagattcggagtgaaaggcaagctagcaccccgctacattggtccgtatcagattcttgcaagacgtggagaagtggcctatcagctcagtctgccagagaatttgtctgctgtgcatgatgtctttcatgtgtctcagttgaagaagtgcttgcgtgtgccggaagagcagttgccagtggaaggtctggaagtccaggaggacttgacctacgttgagaagccagctcagatccttgagattgcagacagagtcacccgaaggaagaccgtcagaatgtgcaaagtcagatggagtcaccactctgaggaagaagcaacctgggagcgtgaagatgatctgaaggccaagtacccggagctctttgctagccagccctga

SEQ ID NO: 5213 - DNA, 4461 bp, Zea mays
  Clone ID: TF_ZM4897.C1.o18.fg
atgcaagatgctgcacggcgtgcgcttttgcactactgcttggttctcggtggggtagctgacggtcttgacctgaagtattacccccgctgtccatctggcagcataggaggcgtgattgtctcacctgtcggtgaggacaaccctaggttgaacagcacagtcaacctagccgctgtgctaaacacggagctggaccatgcattagacgagctgagtagggctcgtgctgagatcgccctgctgcgggctgagcgcgcggaacgtcgtcacctggacgatggttcccccgctcccgtcgggactcagcacccgtaccgctcacctcgatgtcagagaacaggcgcagaggaggaaggcgtgctcagcaggagcgagccgctcagcaggaagaggtgtcccagcaacagcatctgccgccccccgcccccgatgtcgatcgagcagatgtttctgatgcagactcaggcagtgcaagccatcggtcagactctggccgccattcagcagcagcagcagcaacagcagcaggccccacctcagcctcagatgcctcagatgcccacagacaagcgtgctgaattcatgagaggtcacccaccaacgtttgctcactcttctgaccccatggatgctgaagactggctgcgcactgtggagcgggagttgcacaccgctcagtgtgatgatagggagaaagtcttgtatggtccccgtctgttgagagaagcagctcagtcatggtgggagtcttaccttgccacccatgcccacctcgacgccatcacctgggaagagttcagaggtagctttcgtcagtaccatgttccggcaggtctgatgacagtgaagaaggaggagttcctggccctcaagcaagggccgttgtctgtcagtgagtaccgggacaggtttctgcagttgtctcgctatgctcctgaagatgtcaacaccgacgccaagcggcagtaccgtttcctgagaggcttggttgaccctctacaagcaatcatgacagagaggaagcgtaaggagatggaagatcgtaagcgcaagatcagtggaccccagcctggaagcaccaatcgtcctcgtttctcaggcaatcaacctcagcagttcaggcagaaccagcgtccacctcagcagcatcagcagttccaaaggcagtatcctcagcatcagtaccagaaccatcagagcaatcagtcaggaggtcagcttcagaggcagaatcagcaggcacctcgtctcccttccccagcaaaccagcagaacaatcaggcagcaccagctcaggttggaaatagagcatgtttccactgtggagagcaaggccactgggtgatgcaatgtccgaagaaggcagcccagcagcagtcaggcccaatgcccagcaaagcagaatgtgtctcagcctggaaagtgttatttgatactggagcaacgcattctttcattactgcatcatgggtacaagcacataatcttccaattactaccatgtcaacccccattcaaattgactcagccggtggtagaatccgagccgatagcatttgtttgaatataagcgtggaaataagggggatagcgtttcccgccaaccttatagtaatgggtactcagggaatagatgtcatcctagggatgaattggctagataagtatcaggcagttatcagttgtgataagaggacaatcaagttggtgtccccactaggagaggaagtggtgaccgagttagtcccgtctgagccaaagaaaggaagttgttatcaaatagctgtcgatagcagtgaagcagacccaattgagagtatcgaggttgtgtccgagttcccagatgtgtttccaaaggacttaccgggtatgccaccagagcggaaagttgagtttgccatagagcttcttcctggaaccgcccccatctttaagagagcttacagaatatccggaccagagttggttgaacttaaggagcagattgatgagctgtcagagaaaggttacatccggccaagcacctcgccttgggccgcccctgtcctatttgtggagaagaaagatggcactaagaggatgtgtatcgattatcgagctctgaatgaagtcacgatcaagaacaagtaccctttgcccagaatagaggatctgttcaaccagttgagaggagccagtgtgttctccaagattgatctgaggtcaggttatcatcagctcaggattcgaccttcagacattccgaagacagcattcattaccaagtatggtttgtatgagttcactgtgatgtcttttggtttgaccaatgcgccagcctttttcatgaatctgatgaacagtgtattcatggactatctcgataagtttgtggtggtattcattgatgacattttgatttattctcaaagcgaagaagagcacgcagatcatttgaagatggtgttgcagagattgcgagagcaccagctgtatgcaaagttgagcaaatgcgaattctggatcaatgaagtcctgttcttgggtcacataatcaacaaggaaggattggctgtggatccgaagaaagtggcagacattctgaactggaaagcgccaacagatgctcgaggaataaagagtttcattggaatggccggatattatcggcgattcattgaaggggttttcgaagattgcgaaaccaacaacaaggttgagttcaagtggacccagaaatgtcaagaggccttcgaagcactgaaagagaagttgacaacagcgcctgtcctagtcttgcctgatgtgcacaagcccttctcggtgtattgcgatgcttgttacacaggtttgggatgtgtgttgatgcaagagggaagagttgtggcttactcgtcccgacagctgaaggttcatgagaagaattacccaatccacgatctagagttggcagtagtggttcatgcactgaagacatggaggcactacatgtatggacagaaatgcgatgtttacacagaccacaagagtctgaagtacatattcactcagtcagagttgaatatgaggcagcgaagatggttagagttgatcaaagattatgagttggagattcattaccatccgggcaaagcgaatgtagtggcagatgctttgagcaggaagagtcaagtcaatctgatggtcgctcgtccgatgccttatgagttggccaaagagttcgacaagttaagtctcggatttctgaacaattcgcgaggagtcacagttgagttggaacctaccttggagcgagaaatcaaagaagcgcagaagaatgatgagaagatcagtgagatccggcgactgattctagatggcagaggcaaagattttcgagaagatgcagagggtgtgatatggttcaaagaccgcttgtgtgttcccaatgtccaatccattcgggagttgattctcaaggaagctcatgagacagcttattcgattcaccctggtagtgagaagatgtatcaggatctgaagaagaaattctggtggtacggactgaagagggaaatcgccgagcatgtggctatgtgcgatagttgtcgaagaattaaggcagagcaccagagaccagctggattgttgcaaccgttgcagatccctcagtggaaatgggacgaaatcggtatggatttcatagtcggattgcctcgcactcgagccggctacgattccatttgggtggtagtggaccgcttgaccaagtcagcccacttcatacctgtcaagaccaactatagcagtgcagtattggcagagttgtatatgtctcggatcgtttgccttcatggtgtgccaaagaagatagtgtcagacagaggaacacagttcacctctcatttctggcagcagttgcatgaagccttgggcacacatctaaattttagttcagcttatcatccgcagatagatggccagaccgaaagaaccaatcaaattcttgaagatatgttgagagcctgtgcgttgcaagatcagtccggatgggacaagagattgccttatgcagagttttcctataacaacagctaccaggccagtttgaagatgtcaccatttcaggcgctctatgggaggagttgtagaactccgttgcaatgggatcagcctggagagaagcaagtgtttgggctagacattctacttgaagctgaagagaacatcaagatggtccgagagaatctgaagatagtgcaatcgagacagcgaagctatgcagacacaagaagaagagagctgagtttcgaagtcggagactttgtctatctgaaagtgtcaccgatcagaggagtcaggaggttcggagtcaaaggcaagctagcaccccgctacattggtccgtaccaaattctctcaaggcgtggagaagtggcctatcagctcagtctgccagagaatctgtccgcagtgcatgatgtttttcatgtgtcttag

SEQ ID NO: 5214 - DNA, 4116 bp, Zea mays
  Clone ID: TF_ZM4906.C4.o1.fg
atgtcagagaacaggcgcagaggaggaaggcgtgctcagcaggagcaagccgctcaacaggaagaggtgcctcagcaacaacaactgccgcccctgcccccgatgtccatcgagcagatgtttctgatgcagactcaggcagtccaagccatcggtcagactctggccaccattcagcagcagcagcagcaggcaccacctcagcctcagatgcccagggataagcgtgctgaattcatgagaggtctgatgacagtgaagaaggaggagttcttggccctcaagcaagggtcatcgtctgtcagtgagtaccgagacaggtttctgcagttgtctcgctatgctcttgaagatgtcaacaccgacgccaagcgacagtaccgtttcctgagaggcttggttgatcctctgcagtatcaactgatgaatcataccttctcgacattccagcacttgattgacagggcaatcatgacagagaggaagcgtaaggagatggaggatcgcaagcgcaagatcagtggaccccagcctggaagcagcattcgtcctcgtttctcaggcaatcaatctcagcagttcaggcagaaccagcgtccacctcagcagcatcagcagttccaaaggcagtatcctcagcaccagtatcagaatcgtcagaacaaccagtcaagaggaggccagtttcagaggcagaatcagcagacacttcgtcttcctgccctagcagcccagcagaacagtcaggcagcaccagctcaggttggaaatagagcatgtttccactgtggagagcaaggccactgggtgatgcaatgtccgaagaagacggcccagcagcagtcaggccccaatgccccagcaaagcagaatgtgtctcagccaggagcaggcaaccgctctcagccacgctataatcatggaagactgaatcacttggaggctgaagcaattcaggagacccccgacatgatagtaggtatgttcccagtcgactcccatattgcagaagtgttatttgatgctggagcaacacattctttcattactgcatcatgggtagaagcacataatcttccaattactaccatgtcaacccccattcaaattgactcagccggtggtagaattcgagccaatagcatttgtttgaatgtatgtgtggaaataagggggatagcgtttcccgccaacctcatagtaatgggtactcagggaatagatgtcatcctagggatgaattggctagataagtatcaggcagttatcagttgtgataagaggacaatcaagttggtgtccccactaggagacgaagtggtgaccgagttagtcccgcctgagccaaagaaaggaagttgttatcagatggttgtcgatagcagtgaagcagacccaattgagagcatcaagattgtgtctgagtttccagatgtgtttccaaaggacttaccaggtatgccaccagagcggaaagttgaatttgctatagagcttcttcctggaaccgcccccatctttaagagagctttcagaatatccgtaccagagttggttgaacttaagaagccgattgatgagctatcagagaaaggttacattcggccaagcacctcgccttgggccgcccctgtcctatttgtggaaaagaaagatggcaccaaaaggatgtgtatcgattatcgagctctgaatgaagtcacgatcaagaacaagtaccctttgcccagaatagaagatctgttcgaccagttgagaggagccagtgtgttctccaagattgatctgaggtcaggttatcatcagctcaggatccgaccttcggacattccgaagacggcattcattaccaagtatggtttgtatgagttcactgtgatgtcttttggtttaaccaatgcaccagccttcttcatgaatctgatgaacagcgtattcatggattatcttgacaagtttgtggtggtattcattgatgacatcctgatatactctcaaagcgaagaagagcatgcaagtcatttgaggatgaaagtggcagacattctgaactggaaagcgccaacagatgctcaaggaatcaagagtttcattggaatggccggatattatcggcgattcattgaagggttttcgaagattgcaaaaccaatgacagcgttgctaggcaacaaagttgagtttaagtggacccggaaatgtcaagaggcctttgaagcgctgaaagaaaagttgactacaacgcccatcttagtcttgcctgatgtgcacaagcccttctcggtgtattgcgatgcttgttacactggtttgggatgcgtgttgatgcaagagggaagagttgtggcttactcgtcccgacagctgaaagttcatgagaagaattacccaatccatgacctagagttggcagcagtggttcacgcactgaagacatggaggcactacctgtatggacagaaatgtgatgtttacatagaccacaagagtctgaagtacatattcactcagtcagagttgaatatgaggcaacgaagatggttagagttaattaaagactatgagttggagattcactaccatccaggtaaagcgaacgtagtggcagatgcgttgagcaggaagagtcagatcaatctgatggtcgctcgtccgatgccttatgagttggccaaggagttcgacaggttgagtctcggatttcttaacaacacgcgtggagtcacagttgagttggaacctaccctagagtgggaaatcaaagaagcgcagaagaacgatgagaagatcagtgagatccggcgactgattctagacggcagaggcaaagactttcgagaagatgcagaaggtgtgatatggttcaaagaccgcctatgtgttcccaatgtccagtctattcgggagttgatcctcaaggaagctcatgagacagcttattcgattcaccccggaagtgagaagatgtatcaggatctgaagaagaaattctggtggtacggaatgaagagggaaatcgcagagcatgtggctatgtgcgatagttgtcgaaggatcaaggcagagcaccagagaccagctggattgttgcagccgttgcaaatccctcagtggaaatgggatgaaatcggtatggatttcatagtcggattgcctcgcattcgagccggctacgattctatttgggtagtggtggaccgcttgaccaagtcagcccacttcatacctgtcaagaccaattacagcagtgcagtattggcagagctgtatatgtctcggatcgtctgtcttcacggtgtgccaaagaagatagtgtcagaccgaggaacgcagttcacctctcatttctggcagcaattgcatgaagccttgggcacacatctgaatttcagttcagcgtatcatccgcagacagatggtcagactgaaaggaccaatcaaattcttgaagacatgttgagagcctgtgcgttgccagatcagtccggatgggacaagagattgccttatgcagagttttcctataacaacagttaccaggccagtttgaagatgtcaccatttcaggcgctttatggaaggagttgtagaactccgttgcaatgggatcagcctggagaaaagcaagtgttcgggccagacattctgcttgaagccgaagagaacatcaagatggtccgagagaatctgaagatagcgcaatcaaggcagcgaagttatgcagacacaaggagaagagagctgagtttcgaagtcggagactttgtctatctgaaagtgtcaccgatcagtggagtcagaaggttcggagtcaaaggcaagctagcaccccgctacatcggtccgtatcagattctcgcaaggcgtggagaattgaagaagtgcttgcgtgtgccggaagagcagttgccagtggaaggtcttgaagtccaggaggacttgacctacacagagaaaccagcgcaaatccttgagattgcagacatagtcacccgaaggaagaccatcagaatgtgcaaagtcaaatgggatcaccactctgaggaagaagcaacctgggagcgtgaagatgatctgatggctaaatacccagagctctttgctagccaaccctga

SEQ ID NO: 5215 - DNA, 882 bp, Zea mays
  Clone ID: TF_ZM4999.C2.o18.fg
atggatgctgaagactggctgcgcactatggagcgggagttgcataccgctcagtgtgatgacggggagaaagtcctgtatggtccccgtctgttgagaggagtagcccagtcatggtgggagtcttatctcgccacccatgccaacctcgacaccatcacctgggaagagttcagaggaagctttcgtcagtaccatgttcctgccggtctcatgacaatgaagaaggaggagttcctggccctcaagcaagggtcatcgtcttatcagctgatgaatcacaccttcccgacattccagcacctgattgacagagcaatcatgacagagaggaagcgtaaggagatggaggattgcaagcgcaaaatcagtggaccccagcctggaagcagcaatcgccctcgtttctcaagcaatcaacctcagcagttcaggcagaaccagcgtccacctcagcagcagcagtttcaaaggcagtttcctcagcatcagaatcgccagaacaatcagtcaggaggaggtcagttccagaggcagaatcagcaggcacctcgtcttcctgccccagcaaaccagcagaacagtcaggcagcaccagctcaggttggaaacagagcatgtttccactgtggagagcaaggccattgggtgatgcaatgtccgaagaaggcagcccagcagcagtcaggcccaaatgccccagcaaagcagagtgtgtctcagcctggagcaggcaactgctctcagccgcgctataaccatgggagactgaaccacttggaggctgaagcagttcaggagacccccggcatgatagtaggtatgtttctagtcgactcccatattgcagaagtgttatttgatactggagcaatgcattaa

SEQ ID NO: 5216 - DNA, 5091 bp, Zea mays
  Clone ID: TF_ZM5011.C3.o1.fg
atggagagtcatgatctccgggcagaatgggaatcacggcttgtgggtggttatgagatcgatgattctggttatgactatggtgctggtaagtggtattctttccgtttggaaaggatggctcgacttagacacactgcacgaaagtcagtcatccccttcttaccctcccgccttgctgagcgtccgcttcgccgtcccgtggccggacagtccagccacttggagagactacaccaccgcctgcgtgaggaccaggaacgtcgacgacaggagcagcagggctcttccttctcgctccagcaggagatagagtccgtgaggagctgctcccctgtgcttcctctggaggcgccccctgcaccaccactgggcgccccagcttctggagtagctgctggaggagacccagacgacggaggtggcgacgacagctcgagccacgacaccgacttctctgctaaccctgagccggaaggatgggttgctcgacccatcactcgcgacttctctgcattttggtttatctattatgttaatgaaatgtcagagaacaggcgcagaggaggaaggcgtgctcagcaggagcgagccgctcaacaggaggaggtgccccagcagcagcacctgccgcccccgcccccgatgtccatcgagcagatgtttctgatgcagactcaggcagttcaagccatcggtcagactttggccgccattcagcagcagcagcaggccccacctcagcctcagatgcctcagatgcccagagacaagcgtgctgaattcatgagaggtcatccaccaacgttcgctcattcttctgaccccatggatgctgaagactggctgcgcactgtggagcgggagttgcataccgctcagtgcgatgacagggagaaagttctgtatggtccccgtctgttgagaggagcagcccagtcatggtgggagtcttacctcgccacccatgcccaccctgacgccatcacttgggaagagttcagaggtagctttcgtcagtaccatgtccctgcaggtctgatgacagtgaagaaggaggagttcctggctctcaagcaagggccattgtctgtcagtgagtaccgggacaggtttctgcagttgtctcgctatgctcctgaagatgtcaacaccgacgccaagcgacagtaccgtttcctgagaggcttggttgaccctcttcagtatcagctgatgaatcacaccttcccgacattcaagcacctgattgacagagcaatcatgacagagagaaagcgtaaggagatggaagatcgtaaacgcaagatcagtggaccccagcctggaagcagcaatcgtcctcgtttctcaggcaatcaacctcagcagttcaggcagaaccagcgtccacctcagcatcagcagtttcaaaggcagtatcctcagcaccagtatcagaaccgtcagagcaatcagtcaggaggtcagtttcaaaggcagaatcagcaggcacctcatcttcctgccccagcaaaccagcagaacagtcaggcagcaccagctcaggttggaaacagagcatgtttccactgtggagagcaaggccactgggtgatgcaatgtccgaagaaggcagcccagcagcagtcaggccccaatgccccagcaaagcagaatgtgtctcagcctggatcaggcaaccgctctcagccgcgctataatcatggaagactgaaccacttggaggctgaagcagttcaggagacccccggcatgatagtaggtatgttcccagtcgactcccatattgcagaagtgttatttgatactggagcaacacattctttcattactgcatcatgggtagaagcacataatcttccaattactaccatgtcaacccccattcaaatcgattcagccggtggtagaattcgagccgatagcatttgtttgaatataagtgtgaaaataagggggatagcatttcccgccaaccttatagtaatgggtactcagggaatagatgtcatcctagggatgaattggctagataagtatcagacagttatcagttgtgataaaaggacaatcaagttggtgtccccactaggagaggaagtggtaaccgagttagtcccgcctgagccaaagaaaggaagttgttatcggatagctgttgatagcagtggagcagacccaattgagagtatcaaggttgtgtctgagttctcagatgtgtttccgaaggacttaccgggcatgccaccagagcggaaagttgaatttgccatagagcttcttcccggaaccgcccctatcttcaagagagcttacagaatatctggaccagagttggttgagcttaaggagcagattgatgagctgtcagagaaaggttacatccggccaagcacctcgccttgggccgcccctgtcctgtttgtggagaagaaagatggcaccaagaggatgtgtattgattatcgagctttgaatgaggtcacgatcaagaacaagtatcccttgcccagaattgaagatctgttcgaccagttgagaggagccagtgtgttctccaagattgatctgaggtcaggttatcaccagctcaggatccgaccttcggacattccgaagacggcattcatttccaagtatggtttgtacgagttcacagtgatgtcttttggtttgaccaatgcgccagcgtttttcatgaacttgatgaatagtgtattcatggattaccttgataagtttgtggtggtattcattgatgatattctggtttattctcaaagcgaagaagagcacgcagatcatttgaggatggtattgcagagattgcgagagcaccaactgtatgcaaagttgagcaagtgtgagttctggatcagtgaagtcctgttcttgggtcacataatcaacaaagaaggattggctgtggatccgaagaaagtggcagacattctgaactggaaagcgccaacagatgctagaggaatcaagagtttcattggaatggccggatattatcggcgattcattgaagggttttcgaagattgcgaaaccaatgacagcgttgctaggcaacaaagttgagttcaagtggacccagaaatgccaagaggcctttgaagcgctgaaagagaagttgactacagcgcctgtcctagtcttgcctgatgtacacaagcccttctcggtgtattgcgatgcttgttacacaggtttgggatgtgtgttgatgcaagagggaagagttgtggcttactcgtcccgacagttgaaggttcatgagaagaattacccaatccatgatctagagttggcagcagtggttcacgcactgaagacatggaggcactatctgtatggacagagatgcgatgtttacacagatcacaagagtctgaagtacatattcactcagtcagagttgaacatgaggcaacgaagatggttagagttgatcaaagactatgagttggagatccattaccatccaggcaaagcaaacgtagtggcagatgctttgagcagaaagagtcaagtcaatctgatggtcgctcgtccgatgccttatgagttggctaaggagtttgacaggttgagtctcagatttctgaataattcgcgaggagtcacagttgagttggaacctaccttggagcgcgaaatcaaagaagcgcagaagaatgatgagaaaatcagtgagattcggcgactgattctagatggcagaggcaaagattttcgagaggacgcagaaggcgtgatatggttcaaagaccgcttgtgtgttcccaatgtccagtctattcgggagttgattcttaaggaagctcatgagacagcctattcgattcaccctggcagtgagaagatgtatcaggatctgaagaagaaattctggtggtacggaatgaagagggaaattgcagagcatgtggctatgtgcgatagttgccgaagaattaaggcagagcaccagagacctgccggattgttgcaaccgttgcagatccctcagtggaaatgggatgaaattggtatggatttcatagtcggattgcctcgcactcgagccggctacgattccatctgggtagtagtggaccgtttgaccaagtcagcccacttcatacctgtcaagaccaactatagcagtgccgtattggcagagttgtatatgtctcggatcgtttgtcttcatggtgtgccaaagaagatagtgtcagacagaggaacgcagttcacctctcatttctggcagcagttgcatgaagctttgggcacgcatctgaatttcagttcagcttatcatccgcagacagatggccagaccgaaaggaccaatcaaattcttgaagatatgttgagagcctgtgcgttgcaagatcagtccggatgggacaagagattgccttatgcagagttttcctataacaatagttaccaggccagtttgaagatgtcaccatttcaggcgctctatggaaggagttgtagaactccgttgcaatgggatcagcctggagagaagcaagtgtttgggccagacattttgcttgaagccgaagagaacatcaagatggtccgagagaatctgaagatagcgcaatcgaggcagcgaagctatgcagacacaagaagaagagagctgagtttcgaagtcggagactttgtctatctgaaagtgtcaccgatcagaggagtcaagaggttcggagtcaaaggcaagctagcaccccgctacattggtccgtatcaggttcttgcaagacgtggagaagtggcttatcagctcagtttgcccgagaatttgtctgctgtgcatgatgtctttcatgtgtctcagttgaagaagtgcttgcgtgtgccagaagagcacttgccagtggaaggtcttgaagtccaggaggacttgacctacgttgagaagccagtgcagatccttgaggttgcagaccgagtcacccgaaggaagaccatcagaatgtgcaaagtcagatgggatcatcactctgaggaagaagcaacctgggagcgtgaagatgatctgatggccaaataccctgagctctttgctagccaaccctga

SEQ ID NO: 5217 - DNA, 4113 bp, Zea mays
  Clone ID: TF_ZM5011.C5.o1.fg
atgtcgatcgagcagatgtttctgatgcagactcaggcagttcaagccatcggtcagactttggccgccattcagctgcagcagcagcaacagcagcaggccccacctcagcctcagatgcctcagatgctcagagacaagcgtgctgaattcatgagaggtcatccaccaacgttcgctcattcttctgaccccatggatgttgaagactggctgcgcactgtggagcgggaattgcataccgctcagtgcgatgacagggagaaagtcttgtatggtccccgtctgttgagaggagcagcccaatcatggtgggagtcttacctcgccacccatgcccaccctgacgccatcacctgggaagagtttagaggaagctttcgtcagtaccatgttcctgcaggtctgatgatagtgaagaaggaggagttcctggctctcaagcaagggccattgtctgtcaatgagtaccgagataggtttctgcaattgtctcgctatgctcctgaagatgtcaacaccgacgctaagcgacagtaccgtttcctgagaggcttggttgatcctctgcagtaccaactgatgaatcacaccttcccgacattccagcacctgattgacagagcaatcatgacagagaggaagcgtaaggagatggaggattgtaagcgcaagatcagtggaccccagcctggaagtagcaatcgtcctcgtttctcaggcaatcaacctcagcagttcaggcagaaccagcgtccacctcagcagcatcagcagtttcaaaggcagtatcctcagcatcagtaccagaaccgtcagagcaatcagtcaggaggtcagtttcagaggcagaatcagcaagcacctcgtcttcctgccccagcaaaccagcagaacagtcaagcagcaccagctcaagttggaaacagagcatgtttccactgtggagagcaaggccactgggtgatgcaatgtccgaagaaggcagcccagcagcagtcaggccccaatgccccagcgaagcagaatgtgcctcagcctggagcaggcaaccgctctcagccgcgttacaatcatggaaggctgaaccacttggaggctgaagcagttcaggaaacccccgacatgatagtaggtatgttcccagtcgactcccatattgcagaagtgttatttgatactggagcaacacattctttcattactgcgtcatgggtagaagcacataatcttccaattactaccatgtcaacccccattcaaattgactcagccggtggtagaattcgagccgatagcatttgtttgaatataagtgtggaaataagggggatagcgtttgccgccaaccttatagtaatgggtactcagggaatagatgtcatcctagggatgaattggctagataagtaccaggcagttatcagttgtgataaaaggaccatcaagttggtgtccccactaggagaggaagtggtgaccgagttagtcccgcctgagccaaagaaaggaagttgttatcagctagctgttgatagcagtgaagcagacccaattgagagtatcagggttgtgtccgagttcccagatgtgtttccaaaggacttaccgggtatgccaccagagcggaaagttgagtttgccatagagcttcttcctggaaccgcccctatcttcaagagagcttacagaatatccggaccagagttggttgagctgaaggagcagattgatgagctgtcagagaaaggttacatccggccaagcacctcgccttgggccgcccctgtcctatttgtggagaagaaagatggcaccaagaggatgtgtattgattatcgagctttgaatgaggtcacgatcaagaacaagtatcccttgcccagaatagaagatctgttcgaccagttgagaggagccagtgtgttctccaagattgatctgaggtcaggttaccatcagctcaggatccgaccttcggacattccgaagacggcattcattaccaagtatgggttgtatgagttcacagtgatgtcttttggtttgaccaatgcaccagcgttcttcatgaactcgatgaacagtgtattcatggactaccttgataagtttgtggtggtattcattgatgacattctggtttattctcaaagcgaagaagagcacgcagatcatttgaagatggtattgcagagattgcgagagcaccagttgtatgcaaagttgagcaagtgtgagttctggatcagtgaagtcctgttcttgggtcacataatcaacaaagaaggattggctgtggatccgaaaaaagtggcagacattttgaactggaaagcgccaacagatgctagaggaatcaagagcttcattggaatggccggatactatcggcgattcattgaagggttttcgaagattgcgaaaccaatgacagcattgctaggcaacaaagttgagttcaattggacccagaaatgtcaagaggcctttgaagcgctgaaagagaagttgactacagcgcctgtcctagtcttgcctgatgtgcacaagcccttctcggtgtattgcgacgcttgttacataggtttgggatgtgtgttgatgcaggagggaagagttgtggcttactcgtcccgacagctgaaggttcatgagaagaattacccaatccatgatctagagttggcagcagtgaaatgcgatgtttacacagaccacaagagtctgaagtacatattcactcagtcagagttgaacatgaggcaacgaagatggttagagttgattaaagattatgagttggagattcattaccatccaggcaaagcaaacgtagtggcagatgctttgagcagaaagagtcaagtcaatctgatggtcgctcgtccgatgccttatgagttggccaaggagtttgacaggttgagtctcggatttctgaacaattcgcgaggagtcacagttgagttggaacctaccttagagcgcgaaatcaaagaagcgcagaagaatgatgagaaaatcagtgagatccggcgactgattctagatggtagaggcaaagattttcgagaagatgcagaaggcgtgatatggttcaaagaccgcttgtgtgttcccaatgtccagtccattcgggagttgattctcaaggaagctcatgagacgtcctattcgattcaccctggcagtgagaagatgtatcaggatctgaaaaagaaattctggtggtacggaatgaagagggaaatcgcagagcatgtggctatgtgcgatagttgccgaagaattaaggcagagcaccagagacctgctggattgttgcaaccgttgcagatccctcagtggaaatgggatgaaattggtatggatttcatagtcggattgcctcgcactcgagccggctacgattccatttgggtagtagtggaccgcttgaccaagtcagcccacttcatacctgtcaagaccaactatagcagtgtcgtattggcagaattgtatatgtctcggatcgtttgtcttcatggtgtgccaaagaagatagtgtcagacagaggaacgcagttcacctctcatttctggtcagcttatcatctgcagacagatggccagaccgaaaggaccaaccaaattcttgaagatatgttgagagcctgtgcgttgcaagatcagtccggatgggataagagattgccttatgcagagttttcctataacaacagttaccaggccagtttgaagatgtcaccatttcaggcgctctatggaaggagttgtagaactccgttgcaatgggatcagcctggagaaaagcaagtgtttgggccagacattttgcttgaagccgaagagaacatcaagatgttgaagaagtgcttgcgtgtgccagaagagcagttgccagtggaaggtcttgaagtccaggaggacttgacctacgttgagaagccagtgcagatccttgaggttgcagacagagtcacccgaaggaagaccattagaatgtgcaaagttagatggaatcatcactctgaggaagaagcaacctgggagcgtgaagatgatctgatggccaagtaccctgagctctttgctagccaaccctga

SEQ ID NO: 5218 - DNA, 4506 bp, Zea mays
  Clone ID: TF_ZM5030.C4.o1.fg
atgctcatctgttcagtgctgttgaagaattctattctctttccttatgctgcaagatttgccagatcagttctgatgtgtggttgcattctgcagatgtcagagaacaggcgcagaggaggaaggcgtgctcagcaggagcgagccgctcaacaggaggaggtgcctcagcagcagcacctgccacccccgcccccgatgtccatcgaacagatgtttctgatgcagactcaggcagttcaagccatcggtcagactttggccgccattcagcagcagcaacaacagcaggctccacctcagcctcagatgcctcagatgccaagagacaagcgtgctgaattcatgagaggtcatccaccaacgttcgctcattcttctgaccctatggatgccgaagattggctgcgcactgtggagcgggagttgcataccgctcagtgcgatgacagggagaaagttctgtatggtccccgtctgttgagaggagcagcccagtcatggtgggagtcttacctcgccacccatgcccaccctgacgccatcacttgggaagagttcagaggtagctttcgtcagtaccatgtccctgcaggtctgatgacagtgaagaaggaggaattcctggccctcaagcaagggcccttgtctgtcagtgagtaccgggacaagtttctgcaattgtctcgctatgctcctgaagatgtcaacaccgacgccaagcgacagtaccgttttctgagaggcttggttgaccccctgcagtaccaactgatgaatcataccttcccgacattccagcacctgattgacagagcaatcatgacggagagaaagcgcaaggagatggaagatcgtaagcgcaagatcagtggaccccagcctggaagcagcagccgtcctcgtttctcaggcaatcaacctcagcagttcaggcagaaccagcgtccacctcagcagcatcagcagtttcaaaggcagtaccctcagaatcagtaccagaaccgtcagagcaatcagtcaggaggtcagtttcaaaggcagaatcagcagccacctcgccttcctgccccagcaaatcagcagaacagtcaggcagcaccagctcaggttggaaacagagcatgtttccactgtggagaacaaggccactgggtgatgcaatgtccgaagaaggcagcccagcagcagtcaggccccaatgccccagccaagcagaatgtgcctcagcctggagcaggcaatcgctctcagccgcgctataatcatggaagattgaaccacttggaggctgaagcagttcaggagacccccggcatgatagtaggtatgttcccagtcgactcccatattgcagaagtgttatttgatactggagcaacgcattctttcattactgcatcatgggtagaagcacataatcttccaattactaccatgtcaacccccattcaaattgactcatccggtggtagaattcgagccgatagcatttgtttgaatataagtgtgaaaataagggggatagcatttcccgccaaccttatagtaatgggtactcagggaatagatgtcatcctagggatgaattggctagataagtatcaggcagttatcagttgtgataaaaggacaatcgagttggtgtccccactaggagaggaagtggtgaccgagttagtcccgcccgagccaaagaaaggaagttgttatcagatggctgtcgatagcagtgaagcagacccaattgagagtatcaaggttgtgtccgagttcccagatgtgtttccaaaggatttaccgggtatgccaccagagcggaaagttgagtttgccatagagcttcttcctggaaccgcccctatctttaagagagcttacagaatatctggaccagagttggatgaacttaagaagcaaattgatgagctgtcagagaaaggttacattcggccaagcacctcgccttgggccgcccctgtcctgtttgtggagaagaaagatggcaccaagaggatgtgcattgattaccgagctttgaatgaggtcacgatcaagaacaagtatcccttgcccagaatagaagatctgttcgaccagttgagaggagccagtgtgttctccaagattgatctgaggtcaggttatcatcagctcagaatccgaccttcggacattccgaagacagcattcatttccaagtatggtttgtacgagttcacagtgatgtcttttggtttgaccaatgcgccagcgttcttcatgaacttgatgaacagtgtattcatggattatcttgataagtttgtggtggtattcattgatgacattctgatttattctcaaagcgaagaagagcacgcagatcatttgaggatggtgttgcagagattgcgagagcaccggttgtatgcaaagttgagcaagtgtgagttctggatcagtgaagtcctgttcttgggtcacataatcaacaaagaaggattgtctgtggatccgaagaaagtggcagacattttgaactggaaagcgccaacagatgctagaggaatcaagagtttcattggaatggccggatattatcggcgattcattgaagggttttcgaagattgcgaaaccaatgacagcgttgctaggcaacaaggttgagttcaagtggacccagagatgtcaagaggccttcgaagcgctgaaagagaagttgactacaacgcctgtcctagtcttgcctgatgtgcacaagcccttctcggtgtattgcgatgcttgttacacaggtttgggatgtgtgttgatgcaagagggaagagttgtggcttactcgtcccgacagttgaaggttcatgagaagaactacccaatccatgatctagagttggcagcagtggttcacgcactgaagtcatggaggcactatttgtatgggcagaaatgcgatgtttacacagaccacaagagtctgaagtacatattcactcagtcagagttgaacatgaggcagcgaagatggttagagttgatcaaagactatgagttggagattcattaccatccaggcaaagcaaacgtagtggcagatgctttgagcagaaagagtcaagtcaatctgatggtcgctcgtccgatgccttatgagttggccaaagagtttgacaggttgagtctcggatttctgaacaattcgcgaggagtcacagttgagttggaacctaccttggagcgcgaaatcaaagaagcgcagaagaatgatgagaaaatcagtgagatccggcgattgattctagaaggcaaaggcaaagattttcgagaagatgcagaaggcgtgatatggttcaaagaccgcttgtgtgttcccaatgtccagcccattcgggagttgattcttaaggaagctcatgagatagcttattcgattcaccctggcagtgagaagatgtatcaggatctgaagaagaaattctggtggtacggaatgaagagggaaatcgcagagcatgtggctagatcccttagtggaaatgggatgaaatcgtcagcccacttcatacctgtcaagaccaactacaacagtgcagtattggcagaattgtatatgtctcggatcgtttgtcttcatggtgtgccaaagaagatagtgtcagacagaggaacgcagttcacctctcatttctggcagcagttgcatgaagctttgggcacacatctgaattttagttcagcttatcatccgcagacagatggccagaccgaaaggaccaatcaaattcgtgaagatatgttgagagcctgtgcgttgcaagatcagtccggatgggataagagattgccttatgcagagttttcctataacaacagttaccaggccagtttgaagatgtcaccatttcaggcgctctatggaaggagttgtagaactccgttgcaatgggatcagcctggagagaagcaagtgtttgggccagacattctgcttgaagccgaagagaacatcaagatggtccgagagaatctgaagatagcgcaatcgaggcagcgaagctatgcagacacaagaagaagagagctgagttttgaagtcggagactttgtctatctgaaagtgtcaccgatcagaggagtcagaagattcggagtgaaaggcaagctagcaccccgctacattggtccgtatcagattcttgcaagacgaggagaagtggcttatcagctcagtttgcccgagaatttgtctgctgtgcataatgtctttcatgtgtctcagttgaagaagtgcttgcgtgtgccagaagagcagttgccagtggaaggtctggaagtccaggaggacttgacctacgttgagaagccagtgcaaatccttgagattgcagatagagtcacccgaaggaagaccatcagaatgtgcaaagtcagatggaatcaccactctgaggaagaagcaacctgggagcgtgaagatgatttgatggccaagtacccagagctctttgctagccagccctga

SEQ ID NO: 5219 - DNA, 4551 bp, Zea mays
  Clone ID: TF_ZM5033.C3.o1.fg
atgtcagagaacaggcgcagaggaggaaggcgtgctcagcaggagcgagccgctcaacaggatgaggtgccccagcagcagcacctgccgcccccgcccccgatgtccatcgagcagatgtttctgatgcagactcaggcagttcaagctatcggtcagactttggtcgccattcagcagcagcagcaggccccacctcagcctcagatgcctcagatgcccagagacaagcgtgctgaattcatgagaggtcatccaccaacgttcgctcattcttctgaccccatggatgctgaagactggctgcgcactgtggagcgggagttgcataccgctcagtgtgatgacagggagaaggtcctgtatggtccccgtctgttgagaggagcagcccagtcatggtgggagtcttacctcgccacccatgcccatcctgacgccatcacctgggaagagttcagagggagctttcgtcagtaccatgttcctgcaggtctgatgactgtgaagaaggaggagttcctggctctcaagcaagggccattgtctgtcagtgagtaccgggacaggtttctgcaattgtctcgctatgctcctgaagatgtcaacaccgacgccaagcgacagtaccgtttcctgagaggcttggttgaccctctgcagtaccaactgatgaatcacaccttcccgacattccagcacctgattgacagggcaatcatgacagaaaggaagcgtaaggagatggaggatcgtaagcgcaagatcagtggaccccagcctggaagcagcaatcgtcctcgtttctcaggcaatcaacctcagcagttcaggcagaaccagcgtccacctcagcagtatcagcagtttcaaaggcagtatcctcagcatcagtaccagaaccgtcagagcaatcagtcaggaggtcagtttcagaggcagaatccacaagcacctcgtcttcctgccccagcaaaccagcagaacaatcaggcagcaccagctcaggttggaaacagagcatgtttccactgtggagagcaaggccactgggtgatgcaatgtccgaagaaggcagcccagcagcagtcaggcctcaatgccccagcaaagcagaatgtgcctcagcctggatcaggcaatcgctctcagccgcgctataatcatggaaggctgaaccacttggaggctgaagcagttcaggagacccccggcatgatagtaggtatgttcccagtcgactcccatattgcaaaagtgttatttgatactggagcaacgcattctttcattactacatcatgggtagaagcacataatcttccaattactaccatgtcaacccccattcaaattgactcagccggtggtagaattcgagccgatagcatttgtttgaatataagtgtggaaataagggggatagtgtttcccgccaaccttatagtaatgggtactcagggaatagatgtcatcctagggatgaattggctagataagtatcaggcagttatcagttgtgataagaggacaatcaagttggtgttcccactaggagaggaagtggtgaccgagttagtcccgcctgagccaaagaaaggaagttgttatcagatagctgttgatagcagggaagcagacccaattgagaggatcaaggttgtgtccgagttcccagatgtgtttccaaaggacttaccgggtatgccaccagagcggaaagttgagtttgccatagagcttcttcctggaaccgcccctatcttcaagagagcttacagaatatccggaccagagttggttgagcttaagaagcagattgatgagctgtcagagaaaggttacatccggccaagcacctcgccttgggccgcccctgtcctatttgtggagaagaaagatggcaccaagaggatgtgtattgattatcgagctttgaatgaggtcacgatcaagaacaagtatcctttgcccagaattgaagatctgttcgaccagttgagaggagccagtgtgttctccaagattgatctgaggtcaggttatcatcagctcaggatccgaccttcggacattccgaagacggcattcatttccaagtatggtttgtatgagttcacagtgatgtcttttggtttgaccaatgcgccagcgttctttatgaacttgatgaacagtgtcttcatggattaccttgataagtttgtggtggtattcattgatgacattctgatttattctcaaagcgaagaagagcacgcagatcatttgaggatggtattgcagagattgcgagagcaccagttgtatgcaaagttgagcaagtgtgagttctggatcagtgaagtcctgttcttgggtcacataatcaacaaagaaggattggctgtggatccgaagaaagtggcagacattttgaactggaaagcgccaacagatgcccgaggaatcaagagtttcattggaatggccggatattatcggcgattcattgaagggttttcgaagattgcgaaaccaatgacagcgttgctaggcaacaaagttgagttcaagtggacccagaaatgccaagagacctttgaagcgttgaaagagaagttgactatagcgcctgtcctagtcttgcctgatgtgcacaagcccttctcggtgtattgtgatgcttgttacacaggtttgggatgtgtgttgatgcaagagggaagagttgtggcttactcgtcccgacagttgaaggttcatgagaagaattacccaatccatgatctagagttggcagcagtggttcacgcactgaagacatggaggcactatttgtatgggcagaaatgtgatgtttacacagaccacaagagtctgaagtacatattcactcagtcagagttgaacatgaggcagcgaagatggttagagttgataaaagactatgagttggagattcattaccatctaggcaaagcaaacgtagtggcagatgctttgagcagaaagagtcaaatcaatctgatggttgctcgtccgatgccttatgagttggccaaagagttcgacaagttgagtctcggattcctgaataattcgcgaggagtcacagttgagttggaacctaccttggaacgagaaatcaaagaagcgcagaagaatgatgagaagattagtgagatccggcgactgattctagatggcagaggcaaagattttcgagaagatgcagaaggcgtgatatggttcaaagaccgcttatgtgttcccaatgtccagtccattcgggaattgattcttaaggaagctcatgagacagcctattcgattcaccctggcagtgagaagatgtatcaggatctgaagaagaaattttggtggtacggaatgaagagggaaatcgcagagcatgtggctatgtgcgatagttgccgaagaattaaggcagagcaccagagacctgctggactgttgcaaccgttgcagatccctcagtggaaatgggatgaaattggtatggatttcatagtcggattgcctcgcactcgagccggctacgattccatttgggtagtggtggaccgcttgaccaagtcagcccacttcatacctgtcaagaccaactacagcagtgcagtattggtagaattgtatatgtctcgaatcgtttgtcttcatggtgtgccaaagaagatagtgtcagacagaggaacgcagttcacctctcatttctggcagcagttgcatgaagccttgggcacgcatctgaatttcagttcagcttatcatccgcagacagatggccagaccgaaaggaccaaccagattcttgaagacatgttgagagcctgtgcgttgcaagatcagtccggatgggacaagcgattgccttatgcagagttttcctataacaacagttaccaggccagtttgaagatgtcaccatttcaggcgctctatggaaggagttgcagaactccgttgcaatgggatcagcctggagaaaagcaagtgtttgggccaggcattttacttgaagccgaagagaacatcaagatggtccgagagaatctgaagatagcgcaatcgaggcagcgaagctatgcagacacaagaagaagagagctgagtttcgaagtcggagactttgtctatctgaaagtgtcaccgatcagaggagtcagaagattcggagtcaaaggcaagctagcaccccgctacattggtccgtatcagattcttgcaagacatggagaagtggcctatcagctcagtttgccagagaatttgtcagctgtgcatgatgtctttcatgtgtctcagttgaagaagtgcttgcgtgtgccagaagagcagttgccagtggaaggtcttgtagtccaggaggacttgacctacgttgagaaaccagtgcaaatccttgaggttgcagacagagtcacccgaaggaagaccatcagaatgtgcaaagtcaaatggaatcatcactctgaggaagaagcaacctgggagcgtgaagatgatctgatggctaaataccctgagctctttgctagccaaccctga

SEQ ID NO: 5220 - DNA, 4287 bp, Zea mays
  Clone ID: TF_ZM5035.C1.o2.fg
atgcgcttgacaccctgctacgtcgggcatttgaccggcatacttggtccgtcgagtatcgctgtgtggtctaccagcacagtcgcggggtctacccggaccgctgggaggcaacctgcttggtgcgctgtccggagaacagtctccagggtgctgaggtctgctcagagcactattttatctctgagcgggactcagctgaggcagccatgcaagatgctgcacggcgtgcgctttcgcactactgctcggttttcgatgtcagagaacaggcgcagaggaggaaggcgtgctcaacaggagcgagccgctccgcaggatgaggtgccccagcagcagcacctgccgcccccgcccccgatgtccatcgagcagatgtttctgatgcagactcaggcagttcaagccatcggtcagactttggccgccattcagcagcagcagcagcagcagcaacaacaacaggccccacctcagcctcagatgcctcagatgcctagagacaagcgtgctgaattcatgagaggtcatccaccaacgttcgctcattcttctgaccccatggatgctgaagattggctacgcactgtggagcgggagttgcataccgctcagtgcgatgacagggagaaagtcttgtatggtccccgtctgttgagaggagcagcccagtcatggtgggagtcttacctcgccacccatgcccaccctgacgccatcacttgggaagagttcagaggtagcttttgtcagtaccatgttcctgcaggtctgatgacagtgaagaaggaggagttcctggctctcaagcaagggccgttgtctgtcagtgagtatcgagacaggtttctgcagctgtctcgttatgctcctgaagatgtcaacaccgacgccaagcagcagtaccgtttcctgagaggcttggttgaccctctgcagtaccaactgatgaatcacactttcccgacattccagcacctgattgacaaagcaatcatgacagagaggaagcgtaaggagatggaggatccaaaccagcagaacagtcaggcagcaccagctcaggttggaaacagagcatgtttccactgtggagagcaaggccactgggtaatgcaatgtccgaagaaggcagcccagcagcagtcaggccccaatgccccagcaaagcagaatgtgcctcagcctggagcagacaatcgccctcagccgcgctataatcatggaagactgaaccacttggaggctgaagcagttcaggagacccccggcatgatagtagccggtggtagaattcgagccgatagcatttgtttgaatataagtgtggaaataagggggatagcgtttcccgccaaccttatagtaatgggtactcagggaatagatgtcatcctagggatgaattggctagataagtatcaggcagttatcagttgtgataagaggacaatcaagttggtgtccccactaggagaggaagtggtgaccgagttagtcccgcctgagccaaagaaaggaagttgttatcagatagctgttgatagcagtgaagcagacccaatcgagaggatcaaggttgtgtccgagttcccagatgtgtttccaaaggacttaccgggtatgccaccagagcggaaagttgagtttgccatagagcttcttcctggaaccgcccctatctttaagagagcttacagaatatctggaccagagttggatgaacttaagaagcaaattgatgagctgtcagagaaaggttacattcggccaagcacctcgccttgggccgcccctgtcctatttgtggagaagaaagatggcaccaagaggatgtgtattgattatcgagctttgaatgaggtcacgatcaagaacaagtatcctttgcccagaatagaagatctgttcgaccagttgagaggagccagtgtgttctccaagattgatctgaggtcaggttatcatcagctcaggatccgaccttcggacattccgaagacggcattcatttccaagtatggtttgtatgagttcacagtgatgtcttttggtttgaccaatgcgccagcgttcttcatgaacttgatgaacagtgtattcatggattatctcaataagtttgtggtggtattcattgatgacattctggtttattctcaaagcgaagaagagcatgcagatcatttgaagatggtattgcagagattgcgagagcatcagttgtatgcaaagttgagcaagtgtgagttctggatcagtgaggtcctgttcttgggtcacataatcaacaaagaaggattggatgtggatccgaagaaagtggcagacattttgaactggaaagcgccaacagatgctcgaggaatcaagagcttcattggaatggccggatattatcggcgattcattgaagggttttcaaagattgcgaaaccaatgacagcgttgctaggcaacaaagttgagttcaagtggacccagaaatgccaagaggcctttgaagcgctgaaagagaagttgactacagcgcctgtcctagtcttgcctgatgtgcacaagcccttttcggtgtattgtgatgcttgttacacaggtttgggatgcgtgttgatgcaagagggaagagttgtggcttactcgtcccgacagttgaaggttcatgagaagaactacccaatccatgacctagagttggcagcagtggttcatgcactgaagtcatggaggcactatctgtatggacagaaatgtgatgtttacacagatcataagagtctgaagtatatattcactcagtcagagttgaacatgaggcaacgaagatggttagagttgatcaaagactatgagttggagattcattaccatccaggcaaagcaaacgtagtggcagatgctttgagcagaaagagtcaagtcaatctgatggttgctcgtccgatgccttatgagttggccaaggagtttgacaggttgagtctcggatttctgaacaattctcgaggagtcacagtcgagttggaacctaccttggagcgcgaaatcaaagaagcgcagaagaatgatgagaagatcaatgagatccggcgactgattctagatggcagaggcaaagattttcgagaagatgcagaaagcgtgatatggttcaaagaccgcttgtgtgttcccaatgtccagtctattcgggagttgatccttaaggaagctcatgagacagcctattcgattcaccctggcagtgagaagatgtatcaggatctgaagaagaaattctggtggtacggaatgaagagagaaatcgcagagcatgtggctatgtgcgatagttgtcgaagaattaaggcagagcaccagagacctgctggattgttgcaaccgttgcagatccctcagtggaaatgggatgaaattggtatggatttcatagtcggattgcctcgcactcgagccggctacgattccatttgggtagtagtggaccgcttgaccaagtcagcccacttcatacctgtcaagaccaactatagcagtgccgtattggcagaattgtatatgtctcggatcgtttgtcttcatggtgtgccaaagaagatagtgtcagatagaggaacgcagttcacctctcatttctggcagcagttgcatgaagccttgggcacgcatctgaatttcagttcagcttatcatccgcagacggatggtcagaccgaaaggaccaatcaaattcttgaagacatgttgaaagcctgtgcgttgcaagatcagtccggatgggataagagattgccttatgcagagttttcctataacaacagttaccaggccagtttgaagatgtcactatttcaggcgctctatggaaggagttgcagaactccgttgcaatgggatcagcctggagagaagcaagtgtttgggccagacattttgcttgaagccgaagagaacatcaagatggtccgagagaatctgaagatagcgcaatcgaggcagcaaagctatgcagacacaagaagaagagagctgagtttcgaagtcggagactttgtctatctgaaagtgtcaccgatcagaggagtcagaagattcagagtgaaaggcaagctaccaccccgctacattggcccgtatcagattcttgcaagacgtggagaagtggcctatcagctcagtttgcccgaaaatttgtctgctgtgcatgatgtctttcatgtgtctcagttgaagatgtgcttgcgtgtaccagaagagcagttgccagtggaaggtcttgaagtctag

SEQ ID NO: 5221 - DNA, 1941 bp, Zea mays
  Clone ID: TF_ZM5061.C1.o5.fg
atggatacccataggccaccacacttcgacgccactaacttcccatattatagtgctagaatggcttgttacctagaggccgttgatctaggtgtttggagagtcactcgtgacgggatgaaacccctcaataatcgcgagaaacccaccacgagtgaggaaaaagaaattcatttaaatgctagagccaaaaattgcttgtatgaatatcttagcatggatattttcaatcaagtatttaccttgaaaactgctaatgagatttggctaaaattgcatgagctccataacggcacttccaatgtccgtgagcaaaaacattgcctagtcttaaatgagtataattcttttgccatgaaagatgatgagcttgttagagacatgtattctcgtttgaatctaattatcaatgagctcaattctattggcattaataagctaggtgatgcggacattgtgaggaagattatctccctgctacctcaacaaagatatgggagcatcatcaccatccttcacaacatggaggacttgagcaacatgaccccgaccattgtgattgggaaaatcgcggcctttgaaatgtcgcgtaaaatgagtcgtggagaggagccaacttcctcaagaccatatgcttttgcatgtgatgaaagaaagggcaaaaagaaggctcccactccaagttcctcaagtgaagaagaggaagaagaagaaagtgatgatgacgaagataatcaaccatgcacatcatcctccgaggacgaagaaacagtcgaggatcttctctttaacattgacaggaaaaagcaaaggaagagaggatgcttcgcatgtggggagaagggccacttcagggacaactgtccaaatatggccaaacccaaaaaggagaggagcaaaggcaaggcgctaacaagtgttagaacttgggatgattcttcaagtgaagatgaacctccaaggacgcacagccaccagtcctcgtcacgatcatcacggtcatcacacaaatgccttatggcaagaggtaacaaaagcattccatcctctagtgatgaaagtagtagtgatgatgaaggtgagggaaagccctctctagatgagcttgcggaagccgtagaatttttccaggatgtttgcactaagcaaaaagctcaacttaaaactttgaaaaataagttggttagctctcaaaatgattacaaaggtttgctagaaaaatttgaaacttttgcaaacttaaataatgagctatcaactaaaattgagctattagaatctagtgctccatccactgctaccgatgatggccttattaaaaagaatgaaaaacttaaggctaagttagctagctcccaagaagctattgaaaatttgctagagaaaatggaaattcttagcatacacaacaatgagctaactactaagctagaaaacattggtagcaccccagcagcatctttagttgaaatacctgaaataattaagaaagatgcttctacttcctgctttgatttaattgatgattctaacccctgcaaccaagtcgttgttgagaatattgttgtagagacatgttcggatgaggttgcaaaggaaaatgaacaattaaagcaagaagtggctcgccttggcaaggctttgctatgccacatggaaggccacaagtctttccaatgcaaggcgatgaccggggataaacaaaggcaaaagctcaagcaaaagccatcaagcaaaatctccaacacctacatcaaaaaggtgaacaaaaaggatgctacaccatatttgatcaaaaagaaaaagaatggaaaggtgatagcaatcaaggccaacaagcaaaccaacaaaggaaaaggggccaaacgcatctgggtgccaaaggagataatctcaaccatgaaaagcaccaagaaggtttggatcccgaaagggaagtga

SEQ ID NO: 5222 - DNA, 4914 bp, Zea mays
  Clone ID: TF_ZmC951_374
tcaatcaaaattcctagaatcaagaatatttagctcatgcctaagtttggtaaatgtttgctcatctaatggcttggtaaagatatcggctaattgttctttggtgttaatataagaaatctcgatatcccccttttgttggtgatccctcaaaaagtgataccgaatggctatgtgtttagtgcggctatgttcaacaggattatccgccatgcggattgcactctcattatcacatagaagatgaactttggttaatttataaccatagtccctaagggtttgcctcatccaaagcaattgcgcgcaacaatggcctgcggcaatatactcggcttcggcggtagaaagagcgacagaattttgcttctttgaagcccaagacaccagagatcttcccaagaattggaaagtccctaatgtgctctttctattaattttacaccctcccgtgtcaaggtcgagatgcccattagttcccatgggtgtcttgatgggcttggcatccttcatcccaaactttgtgagtatgtcttgaatgtacttcgtttggctaatgaaggtgccctcttggagttgcttcacttgaaatcctaagaaatacttcaactcccccatcatagacatcttgaatttttgagtcatgatcctactaaactcttcacatgtagattcgttagtagacccaaatatgatatcatcaacataaatttggcatataaacaaatcatttgcaagtgttttagtaaagagagtaggatcggcttttccgactttaaatccattagtgataagaaaatctcttaggcattcataccatgctcttggggcttgcttgagcccataaagcgccttagagagtttatatacatggttaggatactcactatcttcaaagccgggaggttgttcaacatagacctcttccttgattggtccattaaggaaggcactttttacgtccatttggtaaagcttaaagccatggtaaatagcataggcaagtaaaatgcgaattgactcaagtctagctacgggtgcataggtttcaccgaaatccaaacctttgacttgtgaatatcccttggccacaagtcgggctttgttccttgtcaccacaccatgctcatcttgtttgttgcggaagacccacttggttcctacaacattttggttaggacgtggaactaaatgccatacctcattcctcgtgaagttgttgagctcccttgcgtcgccaacacccaatccgaatcttgaagtgcttcctcccttatgaatgtcgccgaggatggtgttcacggggtggtctcgttgtattgcttgatggactcttgggtgtggcggtcttggaccctcatcatcttccttgtcttgatcattatcatttcccccttgatcattgtcctcctcttgaggtggctcctcttgatcttcatcatcatcatcttgagcttgatcctcatcttgagttggtggagatgcttgcattgaggaagatggttgatcttgtgcatgtggaggctcttcggattccttaggacacacatccccaatggacatgttccttagcgcgacgcatggagcctcttcatcatctagctcatcaagatcaacttgctctacttgagagccgttagtctcatcaaacacaatgtcacaagaaacttcaattagtccagaggacttgttaaagactctatatgtccttgtgtttgaatcataacctagtaaaaagccttctatagccttaggagcaaatttagattttctacctcttttaacaagaataaagcatttgctaccaaagactctaaaatatgaaacattaggctttttaccggttaagagttcataagatgtcttcttgaggattcggtgaagatataaccggttgatggcgtagcaagcggtgttgaccgcctcggcccaaaaccgattcgaagtcttgtactcatcaagcatggtccttgccatgtccaatagagttctattcttcctctccactacaccattttgttgtggcatgtagggagaagagaactcatgcttgatgccctcctcctcaagaaagctttcgatttgtgagttcttgaactcggtcccgttgttgcttctaatctttttgatccttaagccgaactcattttgagcccatctcaagaatcccttcaatgtctcttgggtttgtgatttttccttgatttccatccccgaatgtgatagctctttggggatcatggttttttcgtaggaggagaaaatcttcttctcccttgtcatgtggtttgtgcacccgctatcgatgatccaacttgagcccccggatgcataaaccttgggtacccaaatacaagtctttgagcccttgtgtttggccccaacatatttggcaactactttgcctgatttgttagttaaaacatatgatgcatcaaaagtcttaaatgaaatgttatgttcatttgatgcaatatgagttttcttcttaggcaatttagcacgggttgattgcctagaactagatgcctcactcttatacataaaagcatgattagagccagagtgagacttcctagaatgaattctcctaattttgtgctcgggataaccggtaggatacaaaatgtaaccctcattatcctgaggcatgggagccttgcccttaacaaagttagataatcttttaggaggggcattgagtttgacatttcctcccttttggaagccaatgtcatccttaatgccagggcgtctcccactataaagtatgctacgagcaaatttaaatttctcattttctagttcatgctcggcaattttagcatctaattttgctatatgatcatttttttgtttaatcatagcaatgtgatcatgaatagcatcaatgttaacatctctacatctagtgcaaatagtaacatgctcaacggtagatgtagagggtctgcaagaatttagttcaacaatcttagcatgtaaaatgtcattctcatctctaagattgaaaatagaaacattgcaaacatctaattccttagccttagcaattaatttttcattctcatttctaaggctagcaagagaggcatttaatttttcaatcttagcaattgaactagcattatcatttctaagattgtcaattgaatcatcacaaatatttgatttctcaaccttagcaattaatttggcattttcatttctaaggttggaaataacatcatggcaagtgcttagctcactagataatttttcacatttttctacctctagagcataagcatttttaaccttaacatgctttttattttctttaactaggaagtcctcttggctatccaagaattcatccttctcatgaatagcactaatcaattcatttaatttttctttttgttgcatgttcaagttggcaaaaagggtgagcaaatcatcctcatcatcactagagctagcctcatcactagaagttgcatatttagtggaagctctagattttaccttcttccttttgtcgtcctttgccatgaggcacttgtggccgacgttggggaagaggagtcctttggtgacggcgatgtttgcggcatcatcgtcggaggaggagtcagtggagctctcgtcggagtcccactcccggcaaacatgagcatcgccgccctttttcttgtagtacctcttcttttctctcctctttcccttcttgtcgttatccctgtcactatcactagacaaagggcatttagcgataaaatgaccgggcttaccatatttgtagcaaaccttcttggagcgggacttgtagtctttccccctcctttgcttgaggatttggcggatgctcttgatgatgagcgccatttcctcattgtcgagcttggaggcatcgatggggaccctactaggtgtagagtcttctttcttctcctccgttgctttgaatgcaacgggttgcacatcgggtgtggaggaggcgccttgctcgatgattttcttggagcctttgatcatcaactcaaagctcacaaattttcctatcacttcctcgggagacattagtttgtatcttggatcgccacgaattaattgaacttgggtggggttaagaaaaacgagtgatctaagaataacattgaccatttcatggtcatcccacttggagctcccaaggttgcgcacttggttcaccaaggtttttagccggttgtacatggcttgcgggtcttctccttggttgagcataaagcgaccgagctccccctcgatcgtttcccgcttggtgattttggtcacttcatcttcttcgtgcgcggtcttgagtacgtcccaaatctctttgacgctcttcaacccttgcaccttaatatactcctctcgacttagagaggtgaggagtatagtagttgcttgagagttgaagtgctcgatttgggccacctcgtcctcatcataatcttcatcccctacggatggtacctgtactccaaactcaacaacatcccatatgcttttgtggagtgaggttaggtgatatctcaccatatcactccacctagaataatcttcaccgtcaaatgtcggtggtttgtctaatgggacagaaagtattggagtatgtttaggaatgcgaggatagcgtagggggatcttactatacttcttgggctcttggcgcttagaagtgatggacgcggcgtcggatcccgatgtagagggcgatgaagagtcggtctcgtagtagaccactttcttcattttcttcttcttctcgccactcttgtgcgtcctattgcgtgaaggggatccctccttctttttgttgccggactcccttgatggagccttcccgtggcttgtggcgggcttctcgccggtcaccatctccttcttggcgtgatcttccgacat

SEQ ID NO: 5223 - DNA, 3486 bp, Zea mays
  Clone ID: TF_ZM4351.C4.o2.fg
atgacgctcatcatcaagagcttccgccaaatcctcaagcaaaggagggggaaagattacaagtcccgctccaagaaagtttgctacaaatatggtaagcccggtcattttattgctaaatgtccattgtctagtgatagtgacaggggcgacgacaagaggaaggaaaagaagagatactacaagaagaagggcggcgatgcccactttaactacttatctatagatgtatgtgtgacgtttagaaacatgaatgtctcacacacgcaattcttattcgtacacacagccgcaataatgggtgatagacgtgattggatgtatgaaggtttcaagaagggctataaggtctggtatctccacggggagtcacgccttgaacgagtagcagaagtagaagttgatgacggtgaagatgatgttgataggatggaccagatgcttgaggatctgcagcctgaactggcaccagatcatcatgattcacctacaccggaggttcagaagttcttcgacctacttaaagcgtcagaagagcctcttcacgggcacactaactccaagtttgcattctcaattaattgttacaaggagctcgtggatttgattagcgaggttcttcctacgggtcacaagatgcccaaagacatgtaccagtccaagaaattgcttgaaggtcttggtatggagtatgagaagattgatgtttgccaagacaactgtatgcttttttggaaggaacatggcagagaacagaaatgcttaaaatgtgggaagtcgaggtacgtggagcttgtaaatgaagatggggagaaggtggtgacaaaggttgcacataaacagcttcggtacatgcctctcactcctagagtgaaacatttgtttctctcgaggaagaccgctatgcacatgaggtggcataaagattgtacgaacagacaagatgggttaatggtgcacccgtcagatggtgatgcatggaaggctcttaacaaatttgatccagattttgccagcgatgcaagaaacgttcgtatcagcttggcaactgatggtttcatgtcgttcaatatgaccgctgcgtcgtattcatgttggcctgtcattgccataccgtacaaccttccatctgctctttgcatgaaatatgagtttatgttcctatgtcttgttatacctgggcctgagcatcctggcgtacgcctcaatgtgatgcttcaaccactgattgaagagttaaagaagctatggcaaggtgtggaagcctatgattgcttcaagaagcagaaattcaatcttcgtgttgcatatctgttctcggttcatgattttatggcatatggtattttctctggatggagcgtgcatggtagattgacgtgtccttattgtgctaaagatacatattgttttcgtcttagtgctggtggcaagatatgttactttgattgccatagatgttttctacccttcaatcaccccttcagaaggcagagaaaggaatttaggaagggcaccatcgtcacgaagggaccgcccaagcgacgtagtgggatagaaattacagaagagcatatgaaacttgtcctagacgagagtgggaaaaggtatcaaggttttggtgaggagcataactggactcacatatgtggcttgtgggagcttccttatgctaagtcattgattttgatgcacaacatcgacgtcatgcatcaagagagtaacttttgccaagacctcataaatacatgcatggatttccctgataaaacgaaagacaatgacaaggcacgcatggacttagcagtgatatgtgatcgtccaacccaagtgcttagagaaaacggaggcaaaccaaaagctgactattgtctgaaatctaagcaacggaaagaagtgatgaagtggatgaaggatattaatttccccgatggttatgccgctggttttagaagatctgtgaacttgaagacaatgaagatgaatggattgaagagccatgacttccacataattatggagaggctcatgcctgtaatgtttcgtgggtacatttccgaagctgtgtggaaaacattagctgaagttagctatttctacagacagttatgtgctaaaggaatcagaagagatgtgatggaacaactggaggaagaggcaccagtgcttttgtgcaaattggaaaaaatatttccaccgggtttcttcaatcctatgcagcatctctttatacatcttccatatgaggctaaggtcggtggtcctgttcagtataggtggatgtttcatatagaaagagctttaaaaaagcttagagcaatgatgggcaataaggcaagagttgaaggatgtattgcggaacaatttaaacttaaggaggtagcacacttcacaagttgttactttgcagaagaacataatgtatttgctcgaaagaaaaggtaccatgatgatgaacgagagatgcctccttgtagtgatctttcgatttttcagacaaacggcaaagccgttggtccacccaaggcatatcacctcagtatggaagaacggaagtctgctttactgtacatgttcacgaatatgcctgaggtggagaaatactttgtcgagtttgatgaacaaaacatgaggtgtctcggtaggccaacagcgagagacatagacaaattgcgacgcgatggtatgcatgggcgacctaatttcattatgtggctttgggaccgtgtgatggttccatggatggcgcccgtgcctgatgcgtactatgcttggtgtcgatattgggcttccgaaggcttccagaaagtgttagcgcatcacagacaatgtcgaggaaccaatcctaaccacaagtttggcggtgacgacatgatacgaaaagctaaaagaatggaagctactagtggccaaaagcctagtgacattgaggtctaccaggagggccacaaaggaccagacccgaacaaccctgaccagctctgcagccagacagccacggatcgcttggcggcatatggggaggagatggttcgtcgccatggccctgacttcgactggcgccatgaaccggtggatcccttggtggtatacacactcttcgacggattcattgactcgtcgtcggatttggagattatgaggatgcgtgaagagatgagacaacaacacgaatttatggaggcttgcaatgcacataaccaagcgatgtatcaattaatgcagcaacagggcatggcaacaaattttccaccgccaccacaatggagccaatttgctaacacactagttccaccaccacagttcaacacccctccgacacatatacctgcacctggagatagggttacgcctgaagcgggtggtagtgggtctgatccagcagtagggactggatttgttgactcgctcttcgcgttccctcctcctggtggtggtggcgacagcggtcaaagctctaaccacccaagtggtggttatctctaa

SEQ ID NO: 5224 - DNA, 2355 bp, Zea mays
  Clone ID: TF_ZM4904.C4.o1.fg
atgtcgggagatcacgccaagaaggagatggtgaccagcgagaagcccaccacaagtcatgggaaggctccatccggggagtccgacaacaaggtgaagggatccccttcacacgacaagtcgcgtcggagtggtgagaagaaaaagaagatgaagaaagtggtctactacgagaccgactcttcatcgccatccacctctggctccgacacaccgtccgtcacttctaagcgccatgagcgcaagaagtttagcaaaccacccatgtttgatggtgaagattataatatgtggagtgacaaaatgaggcaccatctaacctcactccacactagtatttgggatgttgttgagattggagtacaggtgcaagggttgaagagtgccaaagagatttgggacgtggtcaaaaccgcgcacgaaggagacgaggtgaccaagatcaccaagagggagacaatcgagggggagctcggtcgcttcatgcttcaccaaggggaggagccacaagcaatgtacaatcggctcaagacattagtgaaccaagtgcgcaacctcgggagcaccaagtgggatgaccatgaaatggtcaaggttattcttagatcactcatttttcttaatcccactcaagttcatttaattcgtgatgatccaagatataaactaatgtatcccgatgaagtgataggaaaatttgtgagctttgaattgatgatcaaaggctccaagaaaatcatcgagcaaggcgcctcctccacacccgatgtgcaacccgttgcattcaaggcaacggaggagaagaaagaagactctacaccaagtagggtccccatcgacgcctccaagctcgacaatgaggagatgacactcatcatcaagagcttccgccaaatcctcaagcaaaggagggggaaagactacaagtcctgctccaagaaggtttgctacaaatatggtaagcccggtcattttatcgctaaatgtcctttgtctagtgatagttacagggataacgacaagagggggaagaagaaggagaagaagagatattacaagaagaagggcggcgatgcccatgtttgccgggagtgggactccggcgagagctccaccgactcttcctccaacgaggacgccgccaacatcgccgtcaacaagggacttctcttccccaacgtcggccacaagttcctcatggcaaaggacggcaagaaaaagaaggtaaaatcaagatcctccactaaatatgcaatctctagtgatgaggataattctagtgatgatgaggataacttgctcactctttttgccaatcttaacatgcaacaaaaggagaaattaaatgaattaattagtgctattcatgagaaggatgaactcttggatagccaagaggacttccttattaaggaaaacaaaaagcatgttaaggttaaaaatgcttatgctctagaggttgagaaatcaaatgtttgtgatgattcaattgttaatcttagaaatgaaaatactagtttaattgctaagattgataaatcgaatgcatccctttctagccttaggaatgagaatgaaaaattaattgctaaggctaaagacttagatgtttgcaatgtttctattaccaatcttagagatgagaatgctattttacatgctaagattgttgaattaaatgattgcaagccctctacatctacgattgatcatgcttctatttgcactagatgtagagatgttaacattgatgctattcatgatcactttgctatgattaaacaacaaaatgatcatatagctaaattagatgctaaaattgccgagcatgaactagaaaatgagaaatttaaatttgctcgtagcatgctttatagtgggagatgccctggcattaaggatggcattggcttccaacagggagacaatgtcaagcttaatgcccctcctaaaagattgtctaattttgttaagggcaaggctcccatgcctcaggataacgagggttatattttatatcctactggttatcctgaggataagattaggagaattcatgcaaagaagactcattctcatcatgcttttatttataagaatgaggcttctagctctaggcgttctacacatgttaaaatgcctaagaagaaaacacctattgcatcaaatgaacctaatgtttcatttaagacttttgatgcatcatatgttttaactaacaaatcaggcaaagtagttgccaaatatgttgggggcaaacacaaggggtcaaagacttgtgtttgggtacccaaggtgcttgtttctaatgtcaaaggacccaagaccgtttgggtacttaagaacaaggcctaa

SEQ ID NO: 5225 - DNA, 897 bp, Zea mays
  Clone ID: TF_ZM4636.C4.o12.fg
atggccatccagatagtccgggttaacctccaggacttcagcccccgccgtgaagcagcgacgaatagaggcctccgaccactgctccggagggaagtcagtgagggccaccagagccaaccattcgggggtgcgggtgaacctgttagaggtctcctccgggtgctccaaggcggggacgctgtcgccatccccgggggaagcggatgccttggaggtgccaagtgggaggggagcgaggctgaggaggcccgcatcggcaacgggggagctgggggcggatgggggggaacgtctgtcgtcaggcgagtgaggcgacgacagctcccgaccaaggcgattcttcccgccacaaacgaccatgcggacgtcaaagcactggggggtaatgggtggggcgggggtggcaagggggcggggcagcacagcagccgctgccgcgcagacgcggcaatcggggtgtggtgccagggtgccggagggcggcgtggtggagctgaggggagggaggttgacatgggggtggtgagcttcaacggtggggcgggggcggccgcgcccggcgacagcgaggactcctcagggaaggggcagctgacacggggacacagggggcgggtgctgggctggaggaacagcggcgagggtggggggttagcacccgggcaatcagcatcggacaacttttgtgccgatgcccgaagcgactgcaaccgcggcagcgaactgggtcacgacagtcacgaacctggtggtccgcggcgaggcagcgaaaacagcgggaaggggcgggtgggaggcaaaaggggtggcgggggcggcgagggggagctttggcgggagagagcatcgcgtttaaaaagggggtgtagctcccgggggaagcggctgtcgtga

SEQ ID NO: 5226 - DNA, 1557 bp, Zea mays
  Clone ID: TF_ZM4269.C2.o4.fg
atggctgctttaattgtgggaagtctggacactttatcaaggactgtccctatccaaagcaaaataaaccaaattctcaacagacttctaggaacacgtctcaaggcaagggaaatgtggccaacactccagcgggcaaaaatacaaggaaaactaggcgagtctactaccacctcggaaggagaaccggtgatgatgggtaatccgagggatgtattccctgaagatttgctcggattacctccggagagggatgtggagtttgtgattgaattgaaactcgcccgggtattttctaaaattgatctcagatcgggctatcatctgatcagaattcgacccgagaatatacccaagaccgctttcaccactcggtttatcccagatttctccaaaatcgttaaacctattactaagttactgaagaatgatgttaagtttgactggtctcccaagtgcaaagaggcctttgaacaattgaaaatattgctgaccactgcaccagttttggctcaaccggatattgagaagccatttgatgtttattgtgacgcattaggcattggacttggtttaaagtacattttcacccagtcggagctaaacatgagacagagaaggtggctcgacctgatcaaggattatgacctagaaattcattatcacccaagaaaggctaatgtggtggcagatgctttaagttgtaaagtcttttgtcattgtctcactatgggatttcctgacaccaccttatgtcaggaaatggaaatattaaatctagggatagtgcaacaaggaaccttgatgcatttaaagcttgggtcaattattctacaaaagattattgatgctcaaaggatcgataagggtatgaaatatatacatgagaaagtggaggctggcaaagctaattgttttaggaaagatgataaaggaataatatggtttaaagaccgcatagtggtgcataaggatgctgaacttcgtcaacaaatcttggatgaagctcatcttagtcgacgtgtcaaggcgatacatatgaaaactgctggacctctacaatccttgtcgatccccacatggaaatgggaagaccttagtatggattttgttgtgggattacccaagacatctaaagggtatgactctatttgggtgatagtggactggcatacaaagacagcacattttcttcaggttaaaacagatcacccagttgctatttatgctcagttgtaccttgctcgtattctcatcctgcatggagttccaaagacgatagtgtcagaccgaggaccacaatttgtatccatgttttgggaagagctgcacaaatctttgggcactaaattgctccacgattcagcctatcatccacaaacaagtgggcaaactgaaagggtaaatcaaatattggaagatatgctacacgcctatgtcttggagttcctacaaaaatgggatgattgtctgtcgctggcagaattttcttataataacagttaccaagaaagtattaaaatggcaccgtttgaagccctgtacggacggcgatga

SEQ ID NO: 5227 - DNA, 1593 bp, Zea mays
  Clone ID: TF_ZM4443.C1.o3.fg
atggctgctttaattgtgggaagtctggacactttatcaaggactgtccctatccaaagcaaaataaaccaaattctcaacagacttctaggaacacgtctcaaggcaagggaaatgtggccaacactccagcgggcaaaaatacaaggaaaactaggcgagtctactaccacctcggaaggagaaccggtgatgatgggtaatccgagggatgtattccctgaagatttgctcggattacctccggagagggatgtggagtttgtgattgaattgaaactcggacatgttttatctgctaaagggattacggttgatcccagcaaggttaaggatattctggaatggaaatctcctacctcggtacatcaagttagaagtttccttggattgtatggttattaccgcaggtttatcccagatttctccaaaatcgttaaacctattactaagttactgaagaatgatgttaagtttgactggtctcccaagtgcaaagaggcctttgaacaattgaaaatattgctgaccactgcaccagttttggctcaaccggatattgagaagccatttgatgtttattgtgacgcattaggcattggacttggtttaaagtacattttcacccagtcggagctaaacatgagacagagaaggtggctcgacctgatcaaggattatgacctagaaattcattatcacccaagaaaggctaatgtggtggcagatgctttaagttgtaaagtcttttgtcattgtctcactatgggatttcctgacaccaccttatgtcaggaaatggaaatattaaatctagggatagtgcaacaaggaaccttgatgcatttaaagcttgggtcaattattctacaaaagattattgatgctcaaaggatcgataagggtatgaaatatatacatgagaaagtggaggctggcaaagctaattgttttaggaaagatgataaaggaataatatggtttaaagaccgcatagtggtgcataaggatgctgaacttcgtcaacaaatcttggatgaagctcatcttagtcgacgtgtcaaggcgatacatatgaaaactgctggacctctacaatccttgtcgatccccacatggaaatgggaagaccttagtatggattttgttgtgggattacccaagacatctaaagggtatgactctatttgggtgatagtggactggcatacaaagacagcacattttcttcaggttaaaacagatcacccagttgctatttatgctcagttgtaccttgctcgtattctcatcctgcatggagttccaaagacgatagtgtcagaccgaggaccacaatttgtatccatgttttgggaagagctgcacaaatctttgggcactaaattgctccacgattcagcctatcatccacaaacaagtgggcaaactgaaagggtaaatcaaatattggaagatatgctacacgcctatgtcttggagttcctacaaaaatgggatgattgtctgtcgctggcagaattttcttataataacagttaccaagaaagtattaaaatggcaccgtttgaagccctgtacggacggcgatga

SEQ ID NO: 5228 - DNA, 1980 bp, Zea mays
  Clone ID: TF_ZmC158438_1
aggcaatcgtacgtgaacaagtgaatcatccagtttggggagcatatgctcagcgacttctaaatcctgaagcaagactttggaggaatcccagtaatggtggtcatgatgacaaggcacatcctcctattcatccaaccaaattttcagaaggtgaaagaaactggagtccagaccacactagattgtatgagtttgttgtccgacatttccttgcatgttgctctcaaccggctgttggagctgaaacaactgtggaaattgacatagctggtgaacagtttaatgcatcagggcgtgtcatacttgctaaaaattatctggatgtttaccgctttgactcatggggtggaacgttacttccaacatacaacattgggcagcagtttgttccgacaactttaacacttgattctggagtgactcggccaccgcctcttctggctgaagccgaccttcttagctgtatggataaagcaggaattggcactgatgcaaccatgcatgatcacataaaaaagttgcttgaccgttgttatgcaaccaaagatgaaaacacacgtttctccccgacaaatcttggtgaggcattggtgatgggttatgatgaaatggggtatgagctttggaagccttatttaagatcaatgatggaagctgatatgaaatcagttagcgtgggtactaagagtaaatcagaagtacttgagagttgtttgcagcagatgaaggcctgttttcttgacgcaagggtgaagaaagcaaaactccttgatgcaatggggacattctttgcaaggtctaataggcctataaatgaaactcaaaatccagtagaggttgtgaggccttgtggtgcatgcaatggatctgaaatgttgcttaagcgaagggcgagtggtgaatttatggttgggtgccgaagttatccacaatgtagaaacgtggtatggctcccaggatctctttcagaagcggctgtaactaatcaagtttgtcctatctgcgcaccaggccctgtttataagattcaattcaagttccgtcggagggatattccaccaaatttcgatgttgatcacctaggttgtgttggtggttgtgatgatatcctcaaagaccttatggagataagtaggtttggaagtcgcagccaggctgcaacaccagcaagaggaccaactccaaatggtgtgggtcaggggactccaagacaggatttacatactatttttcgtccggcaagccagcttaataatgataacccatcggttatgcattctcaaggtttccgttcaacccatacccaaaatccaagtaatgcatcagatgcaggtcaagtgctgtgcacctcatgtggagcgctttgcatatcacgaattgctaatacagaggctaacagggggaggaggttctacaaatgtcaagatcctggctgtggcttcttcaaatgggaagacgaagtggacaatggtacggggagaggccgccgtgggcgcggcagcagcaggcaggcgtctgcgtctgcgtctgcatctgcaggacggagaggcggaggccggagaggcagaggccgtaacgctgacggcgggatgttcgtttcagcgacgggcgacaccgtgctcggctgctgctttaactgcggcgatccttcccacttcgcaaacgcctgcccgaaccggagatagttatcagggagctgctcgctatgcgtgtacagagactggcagcgtccgccaaacgatgaagccttcggatgggtttcgtgtactgaggtgcatataagtgcacctgacaagctcattttctagacaattactaatatttttaaacaaaatgcagctattaggctgatgctagttcagcaaatctgacggcacttatttacaaaagttagggcggtaccagaaaaaactgacaaaggaagagatatggaaacacgagctgattcactaaggtttcgataacaagtttctactc

SEQ ID NO: 5229 - DNA, 4311 bp, Zea mays
  Clone ID: TF_ZmC951_281
tcaacaaaagaagttcctagaatcaaggatatttagctcatgcctaagtttgttaaaagtttgttcatcaagtggcttggtaaagatatcggctaattgatctttagtgttaatgtatgcaatttcgatgtctcccttttgttggtgatcccttagaaaatgataccgaatggctatgtgtttagtgcgactatactcaacgggattatccgccatgcggattgcactctcattatcacatagaagaggaactttggttaatttgtaaccgtagtccctaagggtttgcctcatccaaagtagttgcgcgcaacaatggcctgaggcaatgtactcggcttcggcggtagaaagagctacggaattttgcttctttgaagcccaagacaccaaggatcttcccaagaactggcaagtccccgatgtgctctttctattaattttacacccttccgtgtcgaggtcgagatgcccattggttcccatgggtgtcttgatgggtttggcatccttcatcccaaacttgcttagaatatcttgagtatacttcgtttggctaaggaatgtgccctcttggagttgctttacttgaaatcccaagaaatacttcaactcccccatcatagacatctcgaatttttgtgtcatgatcctactaaacttatcttcaaagtcgggaggttgctcaacatagacctcttccttgattggtccattgaggaaggcactcttcacgtccatttggtaaagctcgttcctagtgaagttgttgagctcctcttgcatcgccaccacccaatctgaatcttgaagtgcttcctctaccccccttatgaatgtcgccgaggatggtgtcgacggggtgatctcgttggattgcttggtggactcttgggtgtggcggcctttgctcttcatcctccttgtcttgatcatttgcatctccccttgatcattgtcgtcatcttgaggtggctcatctctttgatcttctacttcatcaacttgagcctcatcctcattttgagttggtggagatgcttgcgtggaggaggatggttgatcttgtgcatttggaggctcttcggattccttaggacacacatccccaatggacatgttccttagcgcgatgcacggagcctcttcatcacctatctcatcaagatcaacttgctctacttgagagtcgttagtctcatcaaacacgacgtcacacgaaacttcaacttgtccggaggacttgttaaagactctatatgcccttgtgtttgaatcatatcctagtaaaaatccttctacagtcttaggagcaaatttagattttctacctcttttaacaagaataaagcatttgctaccaaagactctaaaatatgaaatgttgggctttttaccggttaggagttcgtatgaggtcttcttgaggattcggtgtagatacaaccggttgatggtgtagcaggcggtgttgaccgcctcggcccaaaaccgatccgaagtcttgtactcatcaagcatggttcttgccatgtccaatagagttctattcttcctctccactacaccattttgttgtggggtgtatggagaaaagaactcatgcttgatgccctcctcctcaaggaagccttcaatttgacagttcttgaactccgtcccgttgtcgcttctaattttcttgatccttaagccgaactcattttgagcccgtctcaagaatccttttaaggtctcttgggtatgagatttttcattagtaaaaagacagttgtagcccatttgacataattgagatacggaaagcaaattgtaatctaaggaatcttgatttccatccccgaatgtgatagctcgttggggatcttggtttttctcataggaggagaacatcttcttctccccagtcatgtggtttgtgcacccgctatctatgatccaacttgagcccccggatgcataaaccttgccggatttgttagttaacacataagttgcatcaaaagttttaaatgaaatgctatgttcatttgatgcattaggagttttcttcttaggcaacttagcacgggttggttgcctagaactagatgcctcacccttatacataaaagcatggttagggccagagtgagacttcctagagtgaattctcctaatcttgctctcgggataaccgacagggtataaaatgtaaccctcgttatcctgaggcatgggagccttgcccttaacaaagttggacaatttcttaggaggggcattaagtttgacattgcctccctgttggaagccaatgccatccttaatgccagggcgtctccctctatagagcatgcttctagcaaatttaaatttttcgttttctaagtcatgctcggcaattttagcatctaattttgctatatgatcattttgttgtttaattaaagccatgtgatcatgaatagcatcaatgttaacatctctacatctagtgcaaatagtagtatgttcaacggtagatgtagagggtttgcaagattttaattctacaaccttagcatgtaatatatcatttttacttctaaggtcggaaatggaagcattgcaaacatctaattctttagccttagcaagcaatttttcattttcatttctaaggctagcaagagaaatattcaattcttcaatcttagcaagtaaatcaacattatcatttctaagatttggaattgaaacatcacaaacatttgaatcaaccttagctaacaaattagcattcttatttctaaggttgtcaatggtctcatggcaagtgcttagctcactagatagtttctcacatttttcaacttctagagcataagcatttttaaccttaacatgctttttattttccttaatgaggaagtcctcttgggtatccaagagatcatccttttcatgaatagcactaatcaattcatttaatttttctttttgttgcatgtttaggttggcaaaaagaatacgcaagttatcctcctcattactagcattttcctcatcactagaggtttcatatttggtggaggatcttgattttaccttcttccttttgccgtccgttgccatgaggcacttgtggccgacgttggggaagagaagtcccttggtgacggcgatgtttacggcgtcctcgtcggaggaggagtcggtggagctctcttcggagtcccactcccggcaaacatgggcatcgccgcccttcttcttgtagtatttcttcttctcctttcttctccccttcttgtcgtcgcccctgtcactgtcactataaataggatattttgctataaagtgaccgggcttaccacacttgtagcaaactttcttggagcggggtttgtaatcttcccccctcctttgcttgaggatttggcggaagctcttgatgatgagcgtcatttcctcgttgtcgagcttggaggcgtcgatgggagttcgacttggagtagattcctccttttcttccatcgccttgaatgcgaccggttgtgcttcggacgtggaggggccgtcaagctcgttgatcttctttgagcctttgatcatcaattcaaagctcacaaaattcccgattacttcctcgcgagtcattagtgtatatctaggattgccacgaattaattgaacttgagtagggttaaggaaaacaagtgatcttaaaataaccttaaccatttcgtggtcatcccattttttgctcccgaggttgcgcacttggttcaccaaggttttgagccggttgtacatgtcttgtggctcctcccctgggcgaagtcggaagcgaccgagctccccctcgatcgtttcccgcttggtgattttggtcacctcgtctccttcgtgcgcggtctttagtatgtcccaaatctccttggcatttttcaacccttgcaccttattatactcctgtacaccaaactcaacaacatcccatatacttttgtggagtgaggttagatgaaatcgcattaagtcactccacctagcataatcttcaccatcaaacgttggtggtttgctaaacttcttgcgctcatggcacttagaagtgatggacggcgcgtcggagccggaggtggatggtgatgaggtgtcggtctcgtagtagaccactttcctcatcttctttttcttgtccccactccgatgcgacttgtgggaagaggatttcttctccttccccttccctttgttgtgggactcttccgatgaagccttcccgtggcttgtagtgggcttgttgccggtcaccatttccttcttggtgtgatctcccgacat

SEQ ID NO: 5230 - DNA, 5313 bp, Zea mays
  Clone ID: TF_ZM4508.C2.o1.fg
atggctagtaacaacaatgtgcacattgggaagccaccacattttgatgggaataactacgactattggaaaataagaatgtcaatgcatcttagagcaatgggtggaaaaaattggccaattgtcaaggatgggtttgttgtgctgaaagaagatgaaccatcggttagtgacaatgaaaacattcttacaaatgatcaagccatgaatgtattatatgatgctcttgatataaatgagttcaaccgtatcaagaatctcacaaccgctcatgagatttggattaagctaatggaaattcatgaaggaactacaattgtgaagagtgccaagctatatgtgtgcaaaggaaaatttgagcaattcattatggaagaagatgcaagtgtatccgatatgttcaaccggttaaatgagatagtgaatgaactcaagggacttggttttaatgtaccggatgtgggtttcactcataagttccttagatctcttccggagaagtatgagaccattgtgaccatgttagtaagaagtgatctatctacaacttctccaaccgaagtattgggggaaattcttactcaagatatattcaagaaatctcaagccgatgctataagtttggcaaagaaagtgaagaatgaatcaatcgctctcaaagataaagcttctaaagcaattgaaaaagaagatagtgatgatgaagaaaatgaaagtgagagtgatggagatatggctctatttttaaagaaattcaacaaattcataaagatgaagagaggtcaacttagaagaggccaaacatcaagaaggaatgctttcaatgatagaaaatgttttgagtgcggggaacccagtcacattgccatgaattgccctaacaagaagaagaagggcaaagatggagatgataagaagaagaagaaattttacaacaagaagaaagatggcaaagcctacctagttgaatgggattcggatgatagctcggatgatgatgatgatgacacctcatccaagcttaatgctggaattgccatcaaggaagctccctcacttttctcatcccctcattgtctcatggaaaagggagatgctaatgccgatgactacatgcacaaagaaaaagaaaaatttaagaccttgaaggaatcgtataaaaacgtccaagtgtcttttgaggagctcaagacctctaacaacaatctaaaagagaattgtgagaagcttgtggaagctcaaaactcatctattgtgcatgaagttgtggtggtcaccgaggatgttggagtcacttgtgacttacttgatagtcctacaagtgaaccactacctactaactctatttgtgataaatgcaaaatttctcttatgaatgataatattgctcttgatgaatcacaaatcattgttgagaatgaagtgttagtagatagagtaaatgctctaactcatgatctagagaaggcatatggtggaaaggctaaattggatttcatattgggaagtcaacggtgctcacttaatcgtgagggtcttggatatgttcccaagaaaggaaagaatgcttttataaagcaaaagacattgtttgtgaaagaatgtggcaaagtgtgtcacaagaagggacatattaagaaaatttgtcctaagctcaagaatgtatcctacacttgttttgagcattgttatgttctttctcataatgcaaaaggtgttcatgctaaatttgttagtacttcaattgttggcaacaagaaagctatttgggtgccaaagaccttggtcactaacatccaaggacccaagcaagtttgggtgaactacaaggcgggagggaatcattgggtgttggatagtggatgcactcaacacatgactagagatatgaaaatgttcacccaaatgagtgaggaagattgctcaaattatgatagtatcacatttggagataatcgcaaaggaaaggttaaaggcttgggtaaaattgctattttgaatgatcattccatatcaaatgtgctcttggttgagtctttgaattttaatttactattcgtagctcaattacgtgatttaggatttagttgcaatttcactgttgatgatgttattatctctattgttgatggtagcaatcttaagtttaaaggttttagatatgaaaatctttaccttgttgatttctcatctagtgagccaaagctcacaacttgcttattctcaaaggcttcactaggttggttatggcatagaagacttggtcatgttggaatgaagcaactcaatcgttcaaccaaacatgatttagtccgtggtttgaaagatgtgaaatttgagaagaacaaattgtgtagctcttgtcaagccgggaagcaagtggcaaatactcatccaaataaaagtcaaatgtctactcatcgacctttggaattacttcacatggatttatttgggccaacatcgtttgtgagtattggcggtaattcctattatcttgtgattgtggatgattattatagattcacttgggtttactttcttcgggataaatctaatgtgtttgaaacattcaagtcatttgctatattggctcaaaaccaatttgattttgatatcaagaaagttagaagtgataatgggtcggaattcaaaaatacaagaattgatgaatattgtgatgacaagggtattaaacatgaattatcttccaaatatactccggaacaaaatggtattgttgaaagaaagaataggactctcattgatatggctaggtctatgttagcggaatataatgtgtcggattcttattgggccaaagcaataaacactgcatgtcactcatcaaataggctatattgtcacaagcttttgaagaaaactccctatgaattgctcattggtagaaagccaaatatctcatattttagagtattcggttgcaaatgctatattttgagaaagggaagccggctctctaaatttgagaagaaatgtgatgagggttttctacttggatattcatcaaatagtaaggcttatagagttttcaacaaaactcatggtattattgaagaagcatatcatgttgagtttgatgaaactaatgggtctcaagatgaaagttataatcttgatgatgttagtggcactcaattgaaaaatgctatgaaaacaatggccattagtgaaataaagccaaagaaagatgatgatgagaatagtgtggttgtcattccatcctcttcaaccctaaatgaagaaaatcaccaaagccaaaataatgatgaaattatggatactcatgatcaagatacttcaagtcattcggttcctcctcatgcttcaactagcaattatcaaacagtatcaagaattcatcattctattgtgaaggatcacccggttgatcaaattgtggttgatattaatgaagctctacttgatgttgattgggtgaatgcaatgcatgaagaattaaataacttcactcgaaatgaagtttgggagcttgttgagagaccaaagaaccacaatgttattggtacaaaatgggtgtttcgcaacaagcacaatgaagatggattagtagtaaggaacaaggcaagattagttgctcaagggtatactcgaatagagggattggattttggtgagagatttgctcccgtggcaaggttggaagcaatccggatccttcttgcttatgcttgtgctcacaatatcaaactctaccaaatggatgtaaagagtgcctttctaaatggtaagattagtgaactagtgtatgttgaacaaccccccgattttgaggaccccaaaagacctatccacgtgttcaagctttctaaagctctctatgggcttaagcaagctccacgcgcttggtacgaaaggcttagggatttcttgctttccaaagactttagaattgggaaggttgacactaccctattcactaaaataattggcaaagatttgtttgtttgtcaaatttatgttgatgatattatttttggatctactaatgaattattttgtgaggaatttggaaaaatgatgtcaaaagaatttgaaatgtctatgataggagaattgagcttcttccttggtcttcaaatcaaacaattgaaagatggaatctttataagtcaatcaaaatatttgaaggatatgctcaagaagtttggcttagagaatgcgaagcctatcaagactcctatggcaacaaatggtcatctagacttagatgagggagcttcacctagagagattcacttgaaggccgcaaaaagaattctaagatatttgaagtatactcccaatattggtctatgtggtctaggtggtcttcggaagaagcttgccggtcgtttcaaatcaaagcgccctcgtgtagacgatgcagactataatccaaccacagactcagaggcccaatctttagctgggggtagtgtctctatggacacagaagatgttccacatgctcatcctgactatccgattgagatcacgggatggccttatccaaagaggaggaccgatttcagtgagatggctgtaaaacaattgttagccactgctgagattgatatcgatgaggaatccatcacatggatgactagtttcaagaggtattatgcaacatttgctgaatttgctactccaaacagtctggattatgatacaatttcagctgggattgatttgtacactgaagataactttgaagaatttgtgcaattttatgagccagcaaggctgggaattcctaggaggtttggtgagactgtagaactgaggcatcatcctgctgtgattaacaaaatttctagagttacaattcttcccaagagtggagacaagagcaaaattagagacaagttctggaacattatccaccatgtcatgaatggtgaggtaatgaatgttgtgctattcatgatgagacaattaaatgacctcaaaatggacaaaaaccagaacttagcctatgctccatacattatggttctcattaaagccaagactaaatttgaggggcactgtgagatagttcacacaccttttaggcccttgaagaatgagattgggttcctcaccaggcctcttactcccttcccagatgatgaggaagaagctggtgatgatgcaggagaagctcctgaagctgatgcagagcagatgcctcctcctctacctcctcctcagcctcagcagtactggcagcctggtccaggctattttgacccttactttcagaacatgcaacaagggctccagacccacatggatggccgcttctag

SEQ ID NO: 5231 - DNA, 4341 bp, Zea mays
  Clone ID: TF_ZM4550.C1.o1.fg
atggatcctaagggaaaggggatggtggtcaacgacaaagagaaggagtccatcttcaacgagccaagagacgacaagcccactgactctagctcgagtcacaagaagaaggacgggaagaagaagaggcgcatcaagaagatcatttactacgatagcgacgcctcctcttcttcaccaagagacgacgacgaaaatgactcgtcgaaaaagaaatcggtgagaggcttggacaacgccaaacaaatctgggacaccctcaagatatctcatgagggaaacgacgccaccatgatcaccaaaatggagttggtggaaggcgggctagggagatttgcgatgatcaggggagaggagccaacacagacctacaacaggctcaagaccctcatcaacaagattagaagctatggaagcacaagatggacggaccacgacgtcgtccgacttatgctaaggtcattcacagtaattgacccccatcttgtaaaccttattcgtgaaaatcccagcagggaggcgctaccaagcaaggtggcacaagttgaggctgccgggctaaacgaagaagagatggctctaatcatcaagcgcttcaagaccgcactaaaaggacgcaaggagtaccccaacaagaacaaagcaaggggaaagtgctcctgcttcaaatgcggtaagactagtcatttcatagcacaatgccccgataatgataatgaccaggaacaagaaaagcatgggaagagggagaagaagaaggtttacaagaaggcgaagggcgaggagcaccttggcaaagaatgggattcagactgctcttcatccgactctgacgatgaaggattggttgcctcgaccatcgacaaatcttcgctcttccccaacgaacgccatacatgtcttatggctaaggaaaagaaggtatgtattcggaacactcccaagtatacttcttctagtgatgaagagtcatctgatgatgaagtggactatattgatttgtttaaaggcttagatcgaaacaaagtagacaaaattaatgaattaattgatgcccttaatgaaaaggatagattgctagagaagcaagaagatattttgtatgaagagcatgacaaatttattagtgttcagaaatctctcgctttagaaattaaaagaaatgaagtgctatcctctgaattgtttgcttgccatgaatctgtctctagtttaaggagtttaaaggatgaattaaatactaagctagaggaggttagtaaaataaattcatgtgtagagcatgttagtatttgtaatagatgcaaggactttgatgttgatgcatgtaacgaacatcttatttctattactaagttgaatgatgaagtggcaggtcttaatgctcaacttaagacttgcaaaaataattttgataaattaaagttttctagggatgcctacactgttggtagacacccctcaattaaggatggtcttggttttcaaaggaaaaccaagaactcaacaagccaaaaggctcccattctcaccaaggagaaagggaaggcccctatggctagtagtcctcaaagaaaccatgcttttatttatgataggaaaagtgctagtcacaataagagtcatattcatgttgcttataatgattcccatgctatgtttgcctctagctctacttttgtgcatggtagaagtaggcctaggagaagtaatattgtacctcatgtgcctaggagaatgtgcaatgaaccttctaccatttaccatgcttgcaatacttcatttgcgctcttatgtttatgcatccgggggctcaagctggattatcgacagcggatgcacaaaccacatgacgggggagaagaagatgttcacctcctacgtcaagaacaaggattcctaggattcgatcatctttggagatgggaaccaaggcaagatgtatctgtctttataaggagtgatggttcattagcttttaagggtgtattagacggcaaattctacttagttgatttttcgaaagaggagaccgatctagatgcatgcttaatagctaagactagtatgggctggctgtggcatcgtcgtctagcacatgttgggatgaagaaccttcataaacttctaaagggagaacatgtgttaggactaaccaatgtttgcttcgagaaagatagaccttgtgcagcttgtcaagcagggaaacaggtgggaagcactcatcacagcaagaatgtgatgacaacatcaagacctctggagcttcttcacatggacctcttcggacccgttgcctaccttagcatcgggggaagtaagtatggtcttgtaattgttgatgatttttcccgcttcacttgggtgttctttttgcaggataaatcagaaacccaagggaccctaaagcgctttctaaagagggctcaaaacgaatttgagctcaaggtgaaaaagataagaagcgacaacgggtccgagttcaaaaaatttcaagttgaggaatatcttgaggaggaaggcgtcaagcacgagttctccgctccctacacaccacagcaaaacggtgtagtagagaggaagaacaggacgcttattgacatggtgaggacgatgcttggagagtccaagatgcccgagcggttttggtcggaagctgtgaacgcagcctgccacgccataaaccggctatatctgcatcgcctcctcaagaagacctcctacgaactccttatcggtaacaaacccaatgtctcttactttcgtgtatttgggagcaaatgctacattttggtgaagaaagtctctagcgatgttgtatttgatgagactaatggctctccaagagagcaagttgatcttgatgacatagatgaagatgatgttctgacggccgcaatgcgcacgatggcgataggagaggtgcgaccacaggaacaacaggagcaagatcaaccatcttcctctacaatggtgcatcccccaactcgagatgatggacaggttcctcaagaagaggcgcgtgatcaaaggggagcacaagaagaacaagttatggaggaagaagcaccactggcccctccaactcaagtccgagcgatgatccaaataaatcaccccgtcgatcagattctaggtgacataagcaagggagtaacaactcgctcacgtttagctaatttttgtgaacattactcgtttgtctctactattgagcctttcagggtagaagaggccttgcaggatccggactgggtgttggccatgcaggaagagctcaacaacttcaagaggaacgaagtttggagcctggtgccacgtccaaagcaaaatgttgtgggaaccaagtgggtgttccgcaacaaacaagacgagcacggggtggtgataagaaacaaggctcgacttgtggcaaaaggttatgcccaagtcgcaggtttggatttcgaggagacttttgctcctgtggctaggctagagtcaattcgaatattattagcctatgccgctcaccactctttcaggttgtttcaaatggatgtgaagagtgctttcctcaatgggccaatcaaggaggaggtgtacgtggaacaaccccctggctttgaggatgacaggtatcccgaccatgtgttcaaactctctaaggcgctctatggacttaagcaagccccaagagcatggtatgaatgccttagagatttcttaattgctaatgctttcaaggttgggaaagccgatcccactcttttcactaagacttgtgatggtgatctttttgtgtgccaaatttatgtcgatgacataatatttggttctactaaccaaaagtcttgtgaggagtttagcagggtgatgactcaaaaatttgagatgtcgatgatgggcaagttgaactacttccttgggttccaagtgaagcaactcaaggacggcaccttcatctcccaaacgaagtacactcaagatcttctcaagcggtttgggatgaaggacgccaagcccgtgaagacacctatgggaaccgacgggcatgtcgacctcaacaaaggaggtaagtccgttgatcaaaagacataccggtctatgatagggtcattactttatttatgtgctagtagaccggatattatgcttagcgtatgcatgtgtgctagatatcaatccgaccccagggaatgtcaccttgtggccgttaagcgaattcttagatatttagtttatacgccttgcttcgggatctggtatccaaaggggtctacctttgacttgattggatactcagactctgattatgctggatgcaaggttgataggaagagtacatcagggacgtgctaa

SEQ ID NO: 5232 - DNA, 2353 bp, Zea mays
  Clone ID: TF_ZM4646.C1.o1.fg
atgtcgggagatcacgccaagaaggagatggagaccggcgaaaagcccactacaagccatgggagcacttcattcgaagagtcccgcaccaagagaaaggagaagaagaactcctccaaagggaaggagaagaagacttcttcacaccaaaaggagaagaaggagaaaaccttttctcacaagacgcgtcgaagtggggacaagaaaaagaggatgaggaaagtggtctactacgagaccgattcttcatcgccatccacctccggctccgacgcggcttccgtcacttctaagcgccaagagcgcaagaagtatagtaagattcccctacgctatcctcgcatttccaaacatacacctttactttccgtcccattaggcaaaccaccaacttttgatggtgaagattatgctaggtggagtgatttaatgcgatttcatctaacctcactccacaaaagtatatgggatgttgttgagtttggtgcacaggtaccatctgtaggggatgaagactatgatgaggatgaggtggcccaaatcgagcacttcaactctcaagcaacaacaatactcctcgcctctctaagtagagaagagtataacaaagtgcaagggttgaagagcgccaaggaggtttgggatgtgctcaaaaccgctcacgaaggagatgagctcacaaagatcaccaagcgggagacgatcgagggggagctcggtcggttccggcttcgcaaaggggaggagccacaaaacatgtacaaccggctcaagaccttggtgaatcaagtgcgcaacctcgggagcaaaaagtgggatgaccacgaggtggataaggttattctaagatctcttattttccttaaccctactcaagttcaattaatccgtggcaacccaaggtatacactaatgacccccgaggaagtaatcgggaattttgtaagttttgagtgcatgatcgaaggctcgaggaagatcaacgagcttgatgatccctccacatccgaagctcaacccgtcgcattcaaggcgacggaggaaaagaaagaggagtctacaccaagtagacaaccaatcgacgcctccaagctcgacaatgaggaaatggcgctcgtcatcaagagcttccgccaaatcctcaaacaaaggagagggaaagactacaagtcccgctccaggaaggtttgctacaagtgtggtaagcccggtcactttatagctaaatatccattatcaagtgatagtgacaggggcgacgacaagaaggggagaagaaaggagaagaagaggtactacaaaaagaagggcggcgatgcccatgtttgtcgggagtgggactccgacgaaagctctagcgactcctccgacgacgaggacgccgccaacatcgccgtcaccaagggacttctcttccccaacatcggccacaagtgcctcatggcaaaggacggcaaaaagaaggttaaatctaaatcccccactagatatgaatcctctagtgatgataacgctagtgatgaggaagataatttgtgcactctttttgccaacctcaacatgcaacaaaaagagaaacttaatgaattgattagtgccattcatgaaaaggatgatctcttggatacccaagaggacttccttattaaagaaaataagaagcatgttaaggttaaaaatgcttatgctctagaaattgagaaatgtgaaaaattatctagtgagctaagcacttgccatgagacaatagacaaccttagaaatgaaaatgctaatttgttagctaaggttgattctcatgtttgtaatggatcaacttccaatcctagagatgttaatgatgatttgcttgctaggattgaagaattaaacttatatcttgctagccttagaaatgaaaatgaaaaattgcttgctaaggctaaagatgttgatgtttgcaatgctactatttccgaccttagaagtaaaaatgaaatattgcatgctaaggttgtagaactaaaatcttgcaaatcctctacatctaccgttgagcacacttctatttgcactagatgtagagatgttaacattgatgctatacatgatcacatggctttaattaaacaacaaaatgatcatatagctaaattagatgctaaaattgccgagcataacttagagaatgaaaaatttaaatttgctagaagtatgctctataatgggagacgccctggcatcaaggatggcattggcttccaaaggggagacaatgtcaaacttagtgcccctcctaaaagattgtcaaattttgtaaagggcaaggctcccatgcctcaggataacgagggttacattttgtaccctgccg

SEQ ID NO: 5233 - DNA, 3998 bp, Zea mays
  Clone ID: TF_ZM5007.C4.o1.fg
atggtggtcaacgataaggagaaggaatccctcttcaatgagccaagagacgacaagcccactgactcaggctcgagtcacaagaagagggatgggaagaagaagagacgcatcaataagatcatctactacgacagtgatgcatcatcttcttcaccaagggacgacaacgacgacgacgactcttcatcaaagaaaaagatggttaatcaaaattattcttttgattactctcgcattccctataattcaaatgtgcttctacattcaatcccccttggaaaacctccacactttgatggagaggactattcgttttggagtcataaaatgtgtagtcatttattctctcttcatcctagcatatgtgaaattgtagaaaatgggatgcattttgatagcactgataatcctgtgattattaatgagcaaatccataaaaatgcccaagctactactgtgttgttagcatctctttgcagggacgagtataataaagtgagtggcttggacaatgccaaacaaatctgggataccctcaagatatcacatgagggaaatgatgccactatgatcacaaagatggaactagtggaaggcgagctggggaagttcacgatgatcaagggagaggagccaactcagacctacaacaggctcaagaccctggtcaacaagatccgaagctacagaagcacaagatggacggatcatgatgtcatccgactcatgctaaggtcatttactataattgacccctatcttgtgaatcttattcgtgaaaaccccaggtacaccaaaatgacatccgaggagatcctcagaaatttcgagagcgggcgcatgatggtgaaggaggctcgatacatggacgatgcactaaacggcccactacccgtctacgagccacaacccgtttctctcaaagcaaccagcagcaggaaggcgctaccaagcaaggtgacacaagtggaggctgccgggctcaatgaagatgaaatggcgcttatcatcaagcacttcaagaccgcgcttaaaggacgcaaggagtactccaacaagaacaaaacaagaggaaaacgctcctacttcaaatgtggtaagactggtcatttcattgcacaatgtcccgataatgataatgagcagggacaagaaaagagcgggaagaaggaaaggaagaagaactataggaagacaaagggcgaggcacattttggaaatgagtgggattctgactgctcctcatctgactccgacgatgaaggattggctgcctcggccttcgacaagtattcgctcttccccaacgaacgccacacttgcctcatggccaaggagaagaaggtacgtattcgatattcccctaagtactcttcttctagtgatgaggaatcctccgatgatgaagtagattactctagtttatttaaaggtctagataaagccaaagtagagaaaattaatgaattaattgatgctctaaatgaaaaagatagactgctagaaaagcaagaggacattttgtatgaggaacatgacaaatttgttagtgtacaaaaatctcttgctttagaaactaagagaaatgaaatgctatcttttgagttatctgcttgccatgaatctatctctagtctaaagaatgtaaatgatgaattaaatgctaagctagaggaagttagtaaaacaagttcatgtgtagagcatgttagtatttgtaatagatgtaaggactttgatgttgatgtctgtgatgaacatcttatttctattactaaattaaatgatgaggtggcaagtcttaatgctcaacttaagacttgcaaaattgattttgataaattaaaatttgctagggatgcctacactattggtagacacccctcaattaaagatggacttggttttcgaaaggaaaccaagaacttaacaagccaaaggattcccgttctcaacaaggagaaagggaaggcccctttggcgagtagtcctcaaaggaaccatgcctttatttatgataggaaaattgctagttgttctcattataataagagttatgttcatactgcttataatgattcacatgctatgtttgcctctagatctacttttgttcatggtagaggaaaatgtgcaatgaacccactactgtttttcatgcttgcaacacttcttttgtactttcatgtttatgcatccgggggttctagctggataatcgacagtggatgcacaaaccacatgatgggggaaaataagatgttcacctcctacgtcaagaacaaggattcccaggattcgatcatctttggagatgggaaccaaggcaaggtcaaaggattaggaaaaatagccatttcatccaagcattctatctctaatgtgtttttagttgaatcgctcggctataacctgttatctctttggcatcgccgtctagcacatgttgggatgaagaaccttcataagcttctaaagggagatcatgtgttaggactaactgatgtctgttttgagaaagacagaccttgtgcagcatgtcaggcaggaaaacaggtgggaagcactcatcacggcaagaatgtgatgacaacatcaagaccactagagcttcttcacatggacctcttcggacccgttgcctatctaagcatcgggggaagtaagtatggtcttgtaattgttgatgatttttcccacttcacttgggtgttcttcttacaggataaatcagaaacccaagggaccctaaagcggttcttaaggagagctcaaaatgagtttgagcttaaagttaaaaagataaggagcgacaatgggtccgaattcaagaatctacaagttgaagagtttcttgaggaggaaggcatcaagcacgaattctccgctccctacacaccacaacaaaacggtgtggtagagaggaagaacaggacgcttatcgacatggcaagaacgatgcttggagagtttaagatgcccgagcggttttggtcggaagctttgaacacagcctgccacgccataaaccggctctatttgcatcgcctcctcaagaagacctcctacgaacttcttactggtaacaaacccaatgtctcttactttcgtgtatttgggagcaaatgctacattctggtgaagaaaggtagacactctaaatttgctcccaaggctgtagaaggttttttactaggatatgactcaaatacaaagctgtatagtgtcttcagcaaatcatcgggattagttgaaatctctagcgacgttgtatttgatgagactaatggctctccaagagagcaagttgatcttgatgatatagatgaagatgaagttccgacggccgcaatgcgcacaatggcgatagatgatggacaaatacctcaagaagaagggaaggatcaagggggagcacaggaagatcaagtggtggaggaagaagcaccacgggcccgtccaactcaagtccgagcgtcgatccaaaaacatcaccccgtcgaccagattttgggtgacattatcaagggagtaactactcgctcacgattagctaatttttgtgagaattactcgtttgtctcttctattgagcctttcagggtagaagaggccttgcaggatccgaacttggcgttggccatgcaggaagagctcaacaacttcaaaaggattgaagtctggagcctggtgccacgtccaaagcaaaacattgtgggaaccaagtgggtgttccgcaacaagcaagacgagcacggagtggtgacgagaaacaaggctcgacttgtggcaaaaggttatgcccaagtcgcaggtttggattttgaggagacttttgctcgtgtggctaggctagagtcaattcgaatattattagcctatgccgctcaccattcctttaggctatttcaaatggacatgaagagcgctttcctcaacgggccaatcaaggaggaggtatacgtggaacaaccccctggctttgaggatgacag

SEQ ID NO: 5234 - DNA, 1025 bp, Zea mays
  Clone ID: TF_ZmC4916_455
caggccgactctagatgttcggagatcactcatgacgggatgaaaccacctaaaactcccgagatgtctcactacgagtgaagaaaaaagaaatgcatttgaatgttagagccgaaaattgcttgtatggatctcttaacatgaaagtttttaatcaagtttttactttaaaaactgctaatgagatttggcttaaattacatgagctccatgacgacacatccaatgtccatgagcaaaaacattgcctagctttaaatgattataattcttttgccatgaaagagaatgagcttgttagagacctgtactctcgtttgaatctaaccatcaatgagtttaattctattggaattaataagctaggtgatgcggacattgtgaggaagattatctccctgctaccacaacaaagatatgggagcatcatcaccatccttcacaacatggaggacttgagcaacatgaccccgaccattgtgattgggaaaatcgcggcctttgagatgtcgcgaaaaatgagtcggggagaggagccaacttcctcaaggccatatgcttttgcatgtgatgaaaggaagggcaaaaagaaggctcccactccaagttcctcaagtgaagaagaggaagaagaagaaagtgatgatgatgaagataatcaaccatgcacatcatcctccgaggacgaagaaacaatccgacgcgtcagaaaggtcaaggatcttctctttaacattgacaggaaaaagcaaagaaagagaggatgctttgcatgtggggagaagggccacttcagggatagctgtccaactatggccgaacccaaaaaggagaggagcaaaggcaaggcgctaacaagtgttagaacttgggatgactcttcaagtgaagacgaacctccaagaacgcgcagccaccggtcctcatcacgctcatcacacaaatgccttatggcaagaggtaacacaaacactccatcctctagtgatgaaagtagtagtgatgatgaaggtgagggaaagtga

SEQ ID NO: 5235 - DNA, 837 bp, Zea mays
  Clone ID: TF_ZM4623.C4.o7.fg
atgacaagggaagctggacaagaatctggatcctcagagcgcatgggaggaggttttgctgttgtgctaaagcctgatccttttaatggtaaaaacttcttgattcggaaagctaaaatgaaattgtggcttactgcaatgtcttgttttcatgccgttgagggcaagcctgccaacttacctcctgaggatgaggctaagtttaaggctaaagacaacctctttcgaggagcagtaattagcgcacttgatacaaaatttcagaaaagctatatcatccttcctacagggaaagagctgtgggatgcacttgttggaaagtttggagtaactgacgctgagctcattggtactctcgatgttgaggaaagggctagaacgaaggacaatggaaaaggtgtggagacctctactgctaatgtggtgcagaagagaaacttccgtaagttcaacaagaagaaaaaccagaacaaacaagagaatacaaataaacctgttcaaacaacacagtttaaaaagaagaacaacaacaataacaagggaaagggaggatgctttgtctgtggcagtgatcaacattgggctagagagtgccctcatcgcaagttcacacaggacaagaaatcagctaatgttgtaaccactgaaactggagatggaacatctgggtatggtcaggaggtctggcgccttgttaatgggaaatgggtcatgtgcttatgttcttggtgttggtacggtcattctgaagtttacttcgggaaagacggtgtctgtcggtaccctgaaactagggtaccccttgtaaggaaaatggaccccgggccttttggctaa

SEQ ID NO: 5236 - DNA, 1562 bp, Zea mays
  Clone ID: TF_UC-ZMFLMO17035D05_FLI
ggagagggagggctcttccagacacgcgaattgcctcacgcgaattgcaagcaacacattcccgtcccaccttctgcgagcacagagagagtgggagagcaggcctccgaaatcaccgaccgcagagatacacttgcacgggtgtgcgggcgatcagatttttggggagcgtcttcgcgactgctcgcgtgatctgcttcgtcttcttcccggcgaccgttcgagggactgcactgcgtacaccttcctgcatcgacttcgtacggctacatcgaacaaacacacgagatgactcgtgtgaatggagccactgatgccttgagcatcggtccctccgctgggcatttttccgctggtggttttgctgctgcgttaaaaccaagtgaaccttttgatgggacattttacaagagatggcgtagtaagatgatactgtggttgaccgcaatgaactgctatcacgccgcacaggggaaacccgaacagttcactcctgaagaggagagaatgttcgacgttgccgataacctgtttcgaggcgccgtgattggcgctcttgccaacaagtatgttgattcttatctaacgtgcacatctgcaaaagagttatgggatgcattagatgagaagtttggtgtttctgatgctggtagcgagctgtacatcatggagcagctgtttgactataagatggtggaaaaccgtcctgtagttgaacaggctcatgaaatacaggcactggctaaagaactcgaacaattcccatgtgtcttacctgacaagttcgtggccggcggtattatcgctaaactgccaccttcttggacggattttgctaccactctaaaacataagagacaagagtttagcgtggctgagcttattggttctcttgatgttgaggagagggcgagagcaaaagacactcgtggaaaaggagttgagacttctagtgccaatatggtacaaaagaagaactccaatgcatcacataataataaaaagaaaaacaagcaacagaatgccacgaagcccaagcaggcagcctcgttcaaaaagaagaacaaaggagctggttgctttgtttgcggaagtactgatcattgggcaagcgcttgtccagaccgcaaatttaagcaagagaaaaaaccagctcaagagaagaaaacagtaaacatggttgttagcgagactgcagaaggaacatcgggtgcaaagggactggagccttgctgatggggaacggatcacatgcgcgtgttcttggtgttggtacagtcattctgaagtttacttcgggaaagacggtgctattgaagaacgtgcagcatgtcccctccatcaaaaagaatctagttagtggctctcaattgtgccgagatggctacaaaattgtctttgagtctaataaatgtatactgtctaagtatggaacgtttgttggaaaaggctatgacagcggaggcttgttccgcttatctttgcatgatgcgtgtaataagtctgtgaacaatgttgtttcgaatgagtcgtatatttggcattcacgactttgtcatatc

SEQ ID NO: 5237 - DNA, 589 bp, Zea mays
  Clone ID: TF_ZmC119_896
attctttaagctagagatagattcatgataggtagacagctcaaagcatagcatttcatttctcttaatttatagagcaagagatttttgaacactaatgaatttatcatgttcctcatagaaaatatcttcttgcttttctagcaatctatccttttcattaagagcatcaattaattcatttattttgtctaccttagttctatctaatcccttaaacaaattagtgtagtctacttcatcatcagatgattcttcacactagaagaagtatatttgggagtgtcccgaatacataccttctttttcttagccataaggcatgtatggcgttcgttggggaagaacgaagatttgtcgaaggccaaggcggccagtccttcatcgtcggagttggatgagtaacagtcggagtcccattcctttccaaggtgcgcctcgcccttcgccttcctatagttcttcttttctccttcccatgcttttcttgtgcctggtcattctcattatcgggacattgagctataaaatgaccagtcttactgcatttgaagcaggagtgttttccccttgacttgttcttgttggg

SEQ ID NO: 5238 - DNA, 1230 bp, Zea mays
  Clone ID: TF_ZmC3792_76
atgtcagagaataggcgcagaggaggaaggcgtgctcagcaggagcgagccgctcaacaggaggaggcgccccagcagcagcagctgccgcccccgcccccgatgtccatcgagcagatgtttctgatgcagactcaggcagttcaagccatcggtcagaccttggccgccattcagcagcagcagcagcaacagcagcaagcaccacctcagcctcagatgcctcagatgcccagagacaagcgtgctgaattcatgagaggtcatccaccaacgttcgctcattcttctgaccccatggatgctgaagattggctacgcactgtggagcgggagttgcataccgctcagtgcgatgacagggagaaagttctgtatggtccccgtctgttgagaggagcagcccagtcatggtgggagtcttacctcgccacccatgccaaccccgacaccatcacttgggaagaattcaggggtagctttcgtcagtaccatgttcctgcaggtctgatgacagtgaagaatgaggagttcctggccctcaagcaagggccattgtctgtcagtgagtaccgggacaagtttctgcaattgtctcgctatgctcctgaagatgtcaacactgacgccaagcgacaataccgttttctgagaggcttggtcgaccctctgcagtatcagctgatgaaccacaccttcccgacattccagcacctgattgatagagcgatcatgacggagagaaagcgcaaggagatggaagatcgtaagcgcaagatcagtggaccgcagcctggaagcagtagtcgtcctcgtttctcaggcaatcaacctcatcagttcaggcagaaccagcgtccacctcagcagcatcagcagtttcaaaggcagtaccctcagaatcagtaccagaaccgtcagagcaatcagtcaggaggtcagtttcagaagcagaatcagcaagcacctcgtcttcctgccccagcaaatcagcagaacagtcaggcagcaccagctcaggttggaaacaaggcatgtttccactgtggagagcaaggccactgggtgatgcaatgtccaaagaaggcagcccagcagcagtcaggccccaatgccccagcaaagcagaatgtgcctcagcctggagcaggcaatcgccctcaacagcgctataatcatggaagattgaatcacttggaggctgaagcagttcaggagaccccggcatga

SEQ ID NO: 5239 - DNA, 4476 bp, Zea mays
  Clone ID: TF_ZM3641.C4.o2.fg
atgtcgattgagcagatgtttctgatgcagactcaggcagttcaagccatcggtcagactctggccgccattcagcagcagcagcagcagcagcaggctccaccccagcctcagatgcctcagatgcctagagacaagcgtgctgaattcatgagaggtcatccaccaacgttcgctcattcttctgaccccatggatgctgaagattggctgcgcaccgtggagcgggagttgcataccgctcagtgcgatgacagggagaaagttctgtatggtccccgtctgttgagaggagcagcccaatcatggtgggagtcttacctcgccacccatgccaaccccgacaccatcacctgggaagaattcagaggcagctttcgtcagtaccatgttcctgcaggtctgatgacagtgaagaaggaggagttcctggcccttaagcaaggatcatcgtctgtcagtgagtatcgagacaggtttctgcaattgtctcgctatgctcctgaagatgtcaacaccgatgccaagcggcagtaccgttttctgagaggcttggttgaccccctgcagtatcagctgatgaaccacaccttcccgacattccagcacctgattgacagagcaatcatgacagaaaggaagcgtaaggagatggaagatcgtaagcgcaagatcagtggaccccagcctggaagcagcagccgtccccgtttctcaggcaatcaacctcagcagttcaggcagaaccagcgtccacctcagcagcatcagcagcgtcagcagtatcagcagttccaaaggcagtaccctcagaatcagtaccagaaccgtcagagcaatcagtcaggaggtcagtttcagaagcagaatcagcaagcacctcgtcttcctgccccagcaaatcagcagaacagtcaggcagcaccagctcaagttggaaacaaggcatgtttccactgtggagagcaaggccactgggtgatgcaatgtccgaagaaggcagcccagcagcagtcaggccccaatgccccagcaaagcagaatgtgtctcagcctggagcaggcaatcgctctcagcagcgctataatcatggaagattgaatcacttggaggctgaagcagttcaggagacccccgacatgacagtaggtatgttcccagtcgattcccatattgcagaagtgttatttgatactggagcaacacattctttcattactgcatcatgggtagaagcacataatcttccaactactaccatgtcaacccccattcaaattgactcagccggtggtagaattcgagccgatagcatttgtttgaatgtaagtgtggaaataagggggatagcgtttcccgccaaccttatagtaatgggtactcagggaatagatgtcatcctagggatgaattggttagataagtatcaggcagttatcagttgtgataaaaggacaatcaagttggtgtccccactaggagaggaagtggtgaccgagttagtcccgcctgggccgaagaaaggaagttgttatcagatggctgtcgatagcagtgaagcagatccaattgagagtatcaaggttgtgtctgaattcccagatgtgtttccaaaggatttaccgggtatgccaccagagcggaaagttgagtttgctatagagcttcttcctggaaccgcccccatctctaagagagcttacagaatatctggaccagagttggttgagcttaagaagcagattgatgagctgtcagagaaaggttacatccggccaagcacctcgccttgggccgcccctgtcttgttcgtggaaaagaaagatggttctaagaggatgtgtattgattatcgagctttaaatgaggtcacgatcaagaacaagtatcctttgcccagaatagaagatctgttcgaccagttgagaggagccagtgtgttctccaagattgatctgaggtcaggttatcatcagctcaggatccgaccttcggacattccgaagacggcattcattaccaagcatggtttatatgagttcacagtgatgtcttttggtttgaccaatgcgccagcattctttatgaacttgatgaacagtgtattcatggattatcttgataagttcgtggtggtattcattgatgacattctggtttattctcaaagtgaagaagagcatgcagatcatttgaggatggtattgcagagattgcgagagcaccagttgtatgcaaagttgagcaagtgtgagttctggatcagtgaagtcctgttcttgggtcacataatcgacaaagaaggattagctgtggatccgaagaaagtggcagacattctaaactggaaagcgccaacggatgctcgaggaatcaagagcttcattggaatggccggatattatcggcgattcattgaagggttttcgaagattgcgaagccaatgacagcgttgctaggcaacaaggttgagttcaagtggacccagaaatgccaagaggcctttgaagcgctgaaagagaagttgacaacagcgcctgtcctagtcttgcctgatgtgcacaagcccttctcggtgtattgcgatgcttgttacacaggtttgggatgtgtgttgatgcaagagggaagagttgtggcttactcgtcccgacagctgaaggttcatgagaagaattacccaatccatgatctagagttggcagcagtggttcacgcactgaagacatggaggcactatctgtatggacagaaatgcgatgtttacacagaccacaagagtctgaggtacatattcactcagtcagaattgaacatgaggcaacgaagatggttagaattgatcaaagactatgagttggagattcattaccatccaggcaaagcaaacgtagtggcagatgctttgagcagaaagagtcaagtcaatctgatggtcgctcgtccgatgccttatgagttggccaaggagtttgacaggttgagtctcgggtttctgaacaattcgcgaggagtcacagttgaattggagcctaccttggagcgcgaaatcaaagaagcgcagaagaatgatgaaaagatcagtgagattcggcgattgattctagatggcagaggcaaagattttcgagaagatgcagaaggtgtggtatggttcaaagaccgcttgtgtgttcccaatgtccagtctattcgggagttgattctcaaggaagctcatgagacagcttattcgattcaccctggcagtgagaagatgtatcaggatctgaagaagaaattctggtggtacggaatgaaaagagaaatcgcagagcatgtggctatgtgcgatagttgtcgaagaattaaggcagaacaccagagaccagctggattgttgcaaccgttgcagatccctcagtggaaatgggatgaaattggtatggatttcatagtcggattgcctcgcactcgagccggctacgattccatttgggtagtagtggaccgcttgaccaagtcagcccacttcatacctgtcaagaccaactacaacagtgcagtattggcagaattgtatatgtctcggatcgtttgtcttcatggtgtgccaaagaagatagtgtcagacagaggaacgcagttcacctctcatttctggcagcagttgcatgaagccttgggcacgcatctgaatttcagttcagcttatcacccgcagacagatggtcagaccgaaagaaccaaccaaattcttgaagacatgttaagagcctgtgcgttgcaagatcagtccggatgggacaagagattgccttatgcagagttttcctataacaacagttaccaggccagtttgaagatgtcaccgtttcaagcgctgtatggaaggagttgcagaactccgttgcaatgggatcagcctggagagaagcaggtgtttgggccagacattttgctcgaagccgaagagaacatcaagatggtccgagagaatctgaagatagcgcaatcaaggcaacgaagctatgcagacacaagaagaagagagctgagtttcgaagtcggagactttgtttatctgaaagtgtcaccgatcagaggagtcagaagattcggagtcaaaggcaagctagcaccccgctacattggtccgtatcagattcttgcgagacgtggagaagtggcttatcagctcagcctgccagagaatttgtctgctgtgcatgatgtctttcatgtgtctcaattgaagaagtgtttgcgtgtgccagaagagcagttgccagtggaaggtcttgaggtccaggaggacttgacctatgttgagaagccagctcagatccttgagattgcagatagagtcacccgaaggaagaccgtcagaatgtgcaaagtcagatggagtcaccactctgaggaagaagcaacctgggagcgtgaagatgatctgatggccaagtacccggagctctttgctagccagccctga

SEQ ID NO: 5240 - DNA, 2301 bp, Zea mays
  Clone ID: TF_ZM4598.C1.o4.fg
atggatcctaagggaaaggggaacatgatcaacgacaaggaaaaggagaccctctatgttgatgagccaaaaggtgacaagcccaccaactcaggctcaaacaaaaagaggaaagatggaaagaagaagaggcacatcaagaagatcatctactacgatagcgatgcctcctcttcttcaccaagggatgacgacgacgaagactcatccacgaacaagaaaacgcaaattcataagaatgcccaagctactacaatgttgttagcatctctatgcagggatgagtacaataaagtcagcgacttggacaatgccaagcaaatatgggacacccccaagatctctcatgagggaaatgacaccaccatgattacaaagatggaattggtggaaggtgagcttgggagattcgccatgaaaaggggagaggagccaaccgaaacatacaacatgcacaagaccctggtgaacatgatccgaagctatgggagcacaagatggacggatcatgatgtcattcgactcatgctaaggtcatttactgttattgatcctcatcttgtaaaccttatacgtgagaatcctaggtacatcaagatgacacccgaggaaattctcggaaaatttgtaagagggcgcatgatggtaaaggaagttaggtgcgttgatgacattgccaacagaccactcccactaaacgagccgaagcccactgccctcaaggcaacaagcagcaaggacacgctacctaacaaggtggcacaagtggaggctgcagggctcaacgaggatgaaatgacgcttgtaatcaagcgcttcaagaccgctttgaagggacacaaggaatatcctaacaagaataaatcaagggggaagcgctcctgcttcaaatgtggtaagtctggtcattttatagcacaatgtccctgtcccgataatgacaatgaccagccacaagaaaagaaagagaaggagaggaagaaaaactacaggaaggcgaagggcgaggcgcacattggcaagtgtaaagattttgatattgatgcttacaatactcatccttttaccattcttaagttgaataacgatgttgcaaatcttaatgctcaacttaagacttgcaagagtgaaaatgataaaataaaatttgctagggatgcctacaccattggtagacatccatccattaaggatggacttggtttccaaaagagcatcaagaacttaacaagccaaaggacttccaatctcgtcaaggagaaagggaaggttcctatggctagtatcactcattcttctcatgatagaaagaatcatgcttatttgtgtgctcatgttaagaatgcctctaacattgctcatcatgataattgttataatcatgttgttttacctgaacatcatgatgctatttttgattctcatgccatgtttgcatactctaactctttttatgttcatggtttatgcatccggggcacaagctggattattgatagcagatgcacaaaacacatgacgggggagaagaaaatgttcacctcctacatcaagaacaaggattcccaagacacgatcatctttggagatgggaatcatggcaaggtcaaagttttggggaaaatagccatcactaccgagcattcaatttctaatgtgtttttagtagaatcgcttggttacaatttactttctgataaatcagaaacccaagtggaagagtatcttgaggaggaaggtatcaagcatgagttctctgctccctacacaccacaacaaaatggtgtagtagagaggaagaacatgacgctcatcgacatggcgaggacaatgcttggggaatacaagatgcttgtgcggttttggtcagaagttgtaaacacagtgtgccatgccataaaccggctctatcttcatcgcctcctcaagaaaacgtcttatgagcttctaaccggtaacaaatccaatgtttcgtactttcgtgtatttggaagcaaatgctacatcttggttaagaaaggttataattcaaatacaaaggcatatagggtcttcaacaaatcgtcgggtttagttgaagtctctagtgatgttgtatttgatgagactaatggctctccaagagagcaagttgatcttgatggtgtagatgaggatgaagtttcaacgatcgcaatgaggactatggcaataggtgatgtgcaacctcaggaacaacaagataaggatcaaccatcttcctcaacattggtgcaaccccaactcaagatgaggaacaggtacctcaagacggaggcatga

SEQ ID NO: 5241 - DNA, 2835 bp, Zea mays
  Clone ID: TF_ZM4328.C2.o7.fg
atgacgaggaggaatatgaggatgatagcgaggatgagtcttcatcaccacaagaccggcgatgtggaagaagaggagattcgccggttctacacccatctcaataaagaagacaaagtgttcttggttaagctgttgaggaggaacaaggaacaaggcgagacgcttctcaggctagaggaaactctcatcaaaaccaacaacagcctggagaagatgaccaaagaacatgaggagctaaagtgctctcatgataatttggtccaacaatatgaatctgttttatttgagcaaagaaataatcatgatgtattatctgatgttgctcaacttaaaactgagatttctatgcttaagagtcaagtagaaatgataaatttagaaaaaaaaattgctttaagtgaaaaatatgatatgctatcttattctcataatgaattagttgatgaccatatcatgcttgatgttgctcatgaggttgtaattgcgaacttaaattcatgtgaacctcattcttgcacacgtgcgcatttagataatatatcaccatgtgctaacctctgttgctcaaaagaaagccaatttttgaatgagcatcaagctgcaggatcaaaagaaaagcttctcatcaataaagaaaggaacaagaaagcaaaacaactaaggagaagacgcattgctcaacctcctcaagatatccatggacgcgtggtgaagaagcttgagacgggagaaaccgcagcaagtgtccataagaaggatgttcccaaagcaataaatgaagaaatcaacatgaacaaggaaaaaggtaaaaattcaattactcatgttgtttgcattgatcatctctctatgtcatctaagagcaaaaagggaagaggaaaaaggaggtgcttcaagtgcaaggaattaggtcacttcattgcgtcttgtccacacaaagacaaggatgaaggaatgaggagatgttttggatgcaacgataaggaccatatgttcacttcatgtccactcatgaagaatcaaagatgtgcaccctccaagatgaccctcactaagaaaaaagacaaacagcaagtgtcatgtcaggttgagcgatgcttctgctacatgtgtggtgagcatggtcatctacctaaggtaaaaggcaaagagacaaccgatcaagccaatgatggaggcaagaagagcttcaaggtaccgagtgcacgggagaaggtcaaggagaccaggaacccaaagccaggggtgaagaagaagacttgcaaagtcaaggttgatcaagttaagaagagttatgggaccaatgtgagtcaaatccaaaagagcaaaggaagtccagctgaaaggccagtggagtacctgctgcgggtgcaccgtccgattgtaagcagccatgacatcgttgtaactgacatcaacatagtggaaggctctatctgtcacactgacatatctgagcaaacggaggaaggagttgaaatagactccaagccaaggcgacatccagatcctgttcccgggcatagggaactttcatcttctccctacacaccccaacaaaatggtgtagtggagaggaagaatagaactctactggacatggcaaggaccatgcttgatgagtacaagactccggaccgagtctttggaagcaaatgttttattcttgttaaaagaggtagaaaatctaaatttgctcctaaggctatagagggctttttatttggttatgactcaaacacaagggcatatagagtcttcaacaaatccactagattagttgaggtttcttgtgacattgtgtttgatgagactaatggctcccaagtggagcaagttgatcttgatgagctagatgatgaagaggctccgtgcgtcgcgctaaggaacatgtccattggggatgtgtgtcctaaggaatccgaagagcccactcatgcgcaagatcaaccgtcatcttccaatcaagcatctccaccaactcaagatgaggatcaggctcaaaacaatgaagatgaagatcaagaggatgagccacctcaagaggaggacaataatcaagggggagatgaagttgatcaagacaaggaagatgatcaagaaattcagggtcaaagaccaccacacccaagagtccaccaagcgattcaaagagatcaccctgtgaactcaattctctgtgatattcataagggggtaaccactccatctcgagtcgctcatttttgtgaatattactcttttgttttctctattgagccatacagggtggaggatgcactaagagattcggattgggtgctggcaatgcaagaggaactcaacaacttcacgaggaatgagtgggtattccgcaacaagcaagttgagcatggtgtggtgacaaggaacaaagcccgacttgtggccaagggatattcacaagtcgaaggtttggattttggtgaaacttatgcacccatagctaggcttgagtcaattcgtatattacttgcctatgctactcaccatggctttaagctttaccaaatggacgtgaaaagtgccttcctcaatggaccaatcaaggaagaggtctatgttgagcagcctcccggcttcgaagataagtttagtaggataatgattcaaaaattcgagatgtcaatgatgggagagttgaaatattttctgggatttcaagtcaagcaactccaagagggcaccttcatcagccaaacaaagtatattcaagacatactcaacaagtttggaatgaaggatgtcaagcccatcaagacaccctgggaactaatgggcatctcgaccttgacacgggaggtaagtccgtag

SEQ ID NO: 5242 - DNA, 4042 bp, Zea mays
  Clone ID: TF_ZM4993.C10.o4.fg
atgttcggtggggatggacctcctcccgttttttatggtgacaattttccatattggaaaattcgtatggaagcatatttagagtctatagacattggtgtctacaaagccgctacacaaggattctcctcacctagagatcccacaaatcctgtaggtgatgagtttaattatgagaaatggaatgctaaggccaaaaacaccctttttagaggcctttgcaaagatgtgtttaatagagttagaaatcataaaaatgctcatgatttgtggatggacatttgtgctctacatgaaggaactagaagtgagcgtgaggagagatatcacattgctatgagaaagttaaattcttttgaaatgcttgctaatgaaaatgccaatgctatgtactcacgtctcaatattcttgtagaggaagtaaatggattggggcttacacaaatttcacaaccagatgttgtgaggaagattctcagtgtcctcccaattgacaaatatggacacattgtcactgtactgcatcaaatggatctttcagttaccacacctacacagatattgggaaagatcaatgctcatgaaatgtacatgcacatcaatgacaaagatgagtcatcttccaagagaaaggatttggctctcaaagcaaatcaagaaagaaaaggaaaagctaaagtacaaattgaggaagaatcctcaagtgatgatgaccttgatgctaacatttccttgatggtgaggaataccaccaagatgttaaagaagctcaatagagaaggcatcaaatttgattcaagaaagaagaaattcttttctagcaaaagaaagcccatttctgagatggattgctacaactgtggagagcttggtcatcttgctcatcaacgtaacaagcccaaaaagaacaagttcaagggcaagaaagaagattacagcgatgatgagaaaaaggaaaagagattcttcaagaagaaggatgggaagcacaagaggttccacaaaaagaaaatggaaaggcatatattgttggtgactggctcactgacattgagtcatcaagtggatcttcttcaagtgaagaagagaatgatgaaaaagttgtcgccatcgctggggacttctcttcaccaccaccatcgccatcatcgacttctcacctatgcctcatggctagaggtgaacggaagtgatagtgatactgatgaggaatttgcttcaccttcctatgataaactagctgacttgctaaaagaatacactcaaatcattaggaagtcaaaagctaaatgtgataagttgaaaaatgaaaatgaatctttgaatgccaaatatgacatagttatgaaagctagtgatgaaatgaaagaagaaaacaaaactatgtcatccactgtaaatgagctcacatcctccctaaaagatgctaaggacaaatgtgacaagttaaatgaagctgatagggagttgaaagatagactagtgaaaatcaaggaagactatactaagattaaatttgatcatgataatcttcttattgaaaatgaacttttatcttgcaatacacatgaggctattaaccctgttgttaagattgatgtagcaacctcatgtgatgatttgagtcaaggagagcaaactagtctacatgatgaattgaccgaaaaagttgaagtcttgactttagacaaccaaaaattaaagagatacttgactgatgcaactactagaggaaaggttgccattgagaacaatgatttcaacaatgagttggcaatggataatgaaaggcttaaaaatgagagtggtattggatacaatgcttttgtgcaaaagaaagctactactcaatacaagccaaagcagactcataagcctatcaaatgctttgaatgtggaaaagaaggtcactttgcccacaactgcaaagccaaaccaccaactcccttgcctaagcactcaagaatatttgctttcaatgctcattatgttctaagaaaagttgcaaatggaaaggtgaactacaagaccggtgggagccattgggttattgacagtggatgcacacaacatatgacaggcaacccatggatgttcacctcacttgatgagaatgttgatggacaagacaaaatcacatttggggacaattcaaaagggaaagttcaaggacttggcaaggtggcaatttcaaatgatctatcaatttcaaattttctcttggttgcacctttgagcttcaatttattatcagtgggtcaactctgtgatcttggacttcaatgcttatttactccaatagaggttattatatcaaaaatggatgatgaatcaatggtgttcaaaggatttagatacaacaatctctacttagtggatttcacctcagaagatgtagacttaagaacttgcctcttcaccaaagcttcacttggatggctttggcataggaggcttgcacatgttgggatgagcacactcaagaaggtattaaagaaggacatggttagaggattaaaggatgttgtatttgaaaaggagaagccttgtagtgcatgtcaagctgggaagcaagttgctaacacacatcctacaaaagctttcatgtcaacatcaaggccactggaactacttcatatggatttatttggacctacaaactatgtaagtgttggtggcaacctctactgtctagtgattgttgatgatttctcaagatacacttgggtgttctttctccatgataaatctgaagttacatctatattcaagaagtttgccaagaaagctcaaactgaatttgattgcaagatcaagaagattagaagtgataatggtaaagaatttgacaacaccaacattcatgagtactgtgatgagattgggatcaagcatgaagtatctgcaacatatacacctcaacaaaatggagttgttgaaaggaaaaataggaccttgatcactcttgcaagaacaatgattgatgagtataacacaccggagaggttttggtccaaagcatatcgagtattcaatcatgccactgtcatggtagaagaaacatatgatgtggaatttgatgagactaatggctcccaaggagcacttgaaaatcttgatgatgtaggtgatgagccacttagggaagcaatgaagaacatgccaattggagctatcaaaccaaaagaagatgaagaagagcctacatgtatagatgaggcgctacaggatccggacttggtgaacgccatgcatgaagaactaaacaacttcacccgtaaccaagtttggaccctggagaagcctccacaaggtacaagaatcattggaacaaagtgggtgttcaggaacaaacaagatcatcatggcgtgattgtaaggaacaaggcaagacttgttgcaaaaggattctctcaagttgaaggcttatattttggagagacctttgcatcggttgttcgactggaagccatctgtatcctactcgcatatgcatcatgctatgatataaagctttatcaaatggatgtaaaaagttcaattttaaatggcttcataaatgaacttgtatatgttgagcaaccacctggatttgaagaccctagatatcctaaccatgcttacaggttgtccaaggcgctatatgggctaaagcaagctccaagggcttggtatgagcgtcttcgtgacttcctgatcgaaaagggcttcaagatcgggaccgtcaacacaactctattcacaaagaaacataacagtgatattttcatttgtcaagtatatgttgatgacataatctttggctcgacaaatgactatcattgcaaggaatttggtgagttgatgtcgaaggagttcgagatgtcaatgattggtgagctgacatacttcctcggctttcaagtcaagcaaatgaaagatggtaactttctctcacaagagaagtataccaaagacttgttgaaaaggttcaacgtggagaagtgcaaaccaatcaagacacctatgccaacaaatggacatctcgacctagatgagggag

SEQ ID NO: 5243 - DNA, 10722 bp, Zea mays
  Clone ID: TF_ZM4450.C3.o13.fg
atgtccggtggggatggacctcctcccgtttttgatggtgacgattttccttattggaaaattcgtatggaagcatacttagaggctatagacattggtgtctataaagccgccacacaagggttccccgaacctagagatcccacaaatcttgtaggtgatgagttcaattatgagaaatggaatgctaaagccaaaaacaccctttttagaggcctttgcaaagatgtgttcaatagagtaaggaatcataaaaatgctcatgatttgtggatggacatttgtgctctacatgaaggaactagaagtgaacgtgaggaaagatatcacatagccatgcgaaagttaaattcctttgaaatgcttactaatgaaaatgcaaatgctatgtactcacgacttaatattcttgtagaggaagtcaatggattggggcttactcaaatctcacaaccggatgttgtgaggaagattctcagtgtcctcccaatagacaaatatggacacattgtcactgtgctacatcaaatggatctttcagttaccacacctacacaaattttgggaaagatcaatgcccatgaaatgtacatgcacatcaacgacaaagaagaatcatcttccaaaagaaaggatttggctctcaaagcaaatcatgaaagaaaaggaaaagcaaaaatacaagttgaggaagaatcctcaagtaatgatgaccttgatgcaaacattgccttgatggtaaggaagaccaccaagttgttgaagaagctaaatagagaaggcatcaaatttgattcaagaaagaagaagttcttttccaacaaaagaaagcccatttctgagatggactgctacaactgtggtgagcttggtcatcttgctcatcaatgtaacaagcccaagaagaataagttcaagggcaagaaagaagatgacaacgatgatgaaaagaaggaaaagaaattcttcaagaggaaggatgggaagcaaaagaggttccacaagaagaagaatggaaaggcatatattgttggcgactggctcaccgacatcgaatcatcaagtgggtcttcttcaagtgaagaagagaatgatgaaaaagttgcggccatcgccggggacttctcttcaccaccaccatcgccatcatccacttctcacctatgcctcatggctaggggtgaacgaaaggtacaaaatgatattaatattgatgatgatagtgatagtgatagtgatgaagaatttgcttcaccttcatatgatgagttagctgacttacttaaagaatatactcaaatcattagaaagtcaaaagctaaatgtgataggttgaaaaatgaaaatgaatctttaaatgccaagtatgacatagttataaaggctagtgatgaaataaaagaagaaaataaaactatgtcatcaactgtaaatgagctcacaaactccctaaaagatgctaaggaaaaatatgtcaaattaaatgaagctaatagggagttgcaaagtagactagtaaagatcaaggaagactatactcaaattaaatttgatcatgacaatcttcttgttgaaaatgaacttttatcttgcaaaacacatgaggctattaaccctgttgttaagcttgatgtagcaacctcatgtgatgatttgattcaagaagagcaaactagtctacatgctgaattgactgaaaaagttgaagtcctgactttagacaaccaaaaattgaagaattacttgactgatgcaactactagaggaaaagttgctattgagaacaatgatttcaacaatgagttggcagtggataatcaaaggcttaagaatgaggtcaagaaactaaaaagtgaaaatgaacatcttgcaacaagtgtgcaaaagttcaacaagggtcaatacctccaaaatgagctgcttatgaacactgttatgaaaaataacaagagtggtattggatacaatgcttttgtgcaaaagaaagctatcactcaatacaagccaaagcagactcacaagcctatcaaatgctttgagtgtggaaatgaaggtcattttgcccacaactgcaaagctaaaccaccaactcccttgcctaagcactcaagaccatttgctttcaatgctcactatgttctaagaaaggttgcaaatggaaagattaaggtgaactacaagaccggtgggagccattgggttattgacagtggatgcacacaacatatgacaggcaacccacggatgttcacctcactagatgagaatgttgatggtcaagataaaatcacatttggagacaattcaaaaggaaaagtgcaaggacttggcaaggtggcaatctcaaatgatttatcaatatcaaatgttctcttagttgcacctttgagcttcaatttattatcagtgggacaactctgtgatcttggacttcaatgcttatttaccccatcagaggttattgtaacaaaaatggatgatgaatcaatggtattcaagggatttagatacaacaacctctacttagtggatttcacttcagaagatgcagacttaagaacttgcctcttcaccaaagcttctcttggatggctttggcataggaggcttgcacatgttgggatgagcacactcaagaaggcattaaagaaagatatggttagaggattaaaggatgtggtgtttgaaaaagacaagccatgcagtgcatgtcaagctggaaagcaagttgctaatacacatcctactaaagctttcatgtcaacatcaaggccactggaactacttcatatggatttatttggacctacaaattatgtcagtgccggtggcaacctctactgtctagtgattgttgatgacttctcaagatacacttgggtgttctttctccatgacaaatctgaagttgcatcaatattcaagaaatttgccaagaaagcacaaaatgaatttgattgcaagattaagaagattagaagtgacaatggcaaagaatttgacaacaccaacattcatgagtactgtgatgaaattgggatcaagcatgaagtatctgccacatatacacctcaacaaaatggagttgttgaaaggaaaaataggaccttgatcactcttgcaagaacaatgattgatgagtataacacaccagagatgttttgggccgaagctgtcaacactgcttgttatgcatcaaacaggctatttcctcaccggctacttgcgaagactccttatgaactgctaaatgggaaaaagccagacgtctccttcttccgggtatttgggtgcaaatgctacatttacaagaaacgccatcacctagggaagtttcaaagacgttgtgatattggttttcttttgggttattcattaaagtccaaagcatatcgagtattcaaccatgccactggcatggtagaagaaacatatgatgtggaatttgatgagactaatggctcccaaggagcacttgaaaatcttgatgatgtaggtgatgagccacttagggaagcaatgaagaacatgcctattggagctatcaaaccaaaagaagatgaagaagaggtgcaaatcattgacaggccttcttcatcaaatgtaccacaaaatgatgaaaaagatgagaggcatgcaaatgaagatacatttgtctctcatgaacaagcaagggtacaagccgaagatgttgatgctccaggatcttcttcccaagtggttgacaggagaaattcatcattacttcaagctcatcctcaaaaccaaatcatcgggagtccttcacaaggggttattactcgatcacatagacatgctaattttattgaacatcactcttttgtttcttgtgttgagcctacttgtatagatgaggcgctacaggatccggactgggtgaatgccatgcatgaagaacttaacaacttcactcgtaacgaagtctggaccctggagaagcccccacaagatgcaagaatcattggaacaaagtgggtgttcagaaacaaacaagatgatcaaggtgtgattgtaagaaacaaggcaagacttgtcgcaaaaggattctctcaagttgaaggcttagattttggagagacctttgcaccggttgctcgactggaagccatccgtatcctacttgcatatgcatcatgctatgatataaaactttatcaaatggatgtaaaaagtgcatttttaaatggcttcataaatgaacttgtatatgttgagcaaccgcctggatttgaagaccctagatatcctaaccatgcttacaggttgtccaaggcgctttatgggctaaagcaagctccaagggcttggtatgagcgtcttcgcgacttcctcatcgaaaagggcttcaagatcgggaccgtcgacacaactctcttcacaaagaaacataacggtgatattttcatttgtcaagtatatgttgatgatataatctttggctcgacaaatgactatcattgcaaggaatttggtgagttgatgtcgaaggagttcgagatgtcaatgattggtgagctaacatacttcctcggctttcaagtcaagcaaatgaaagatggtaactttctctcacaagagaagtataccaaagacttgttgaaaagattcaacatggagaagtgcaaaccaatcaagacccccatgccttcaaatggacatctcgacttagatgagggaggtaacccggttaatcaaactctctaccattctatgattggtagtctattataccttaccgcatctaggcccgatattatgttcagtgtttgcatgtgtgctagatttcaatctaatcctaagaaagctcatcttcgcgctgttaagagaattcttaggtatctcaggcacaccacaagcgttggtctgtggtatcccaaaggagctacttttgatttaattggctattccgattcggattatgccggttgcaaaattgataggaaaagtacttctgggggatgccatctgcttggtagatcattagtttcatggacatccaaaaagcaaaatagtgttgccttgtcaactgccgaagcggaatacattgccgcaggtgcttgttgcacacagattttatatatgaaacaaactcttctagactatggcgtagttctagaaaaggtacctttgttgtgtgataatgagagtgctgttaaaattgctaataatcctgtacaacactctcgcaccaagcacattgatatccgtcaccacttccttagagatcatgttgctaaaggagatatcattttagaaggagtgagtcatcagatcaggatgccgcgcacgaagaatgcgtcggcgccagggggtggggatgatgaggagcctcgtcgccccttcaggcaggtcaagggcaagactgtgtatttggagcagcaggaaggccgcaagaagtggcgtatggacagagaagcccgtgcagcggcagcagctgcagcagccgctgcgcaggccgctcttggagatcagccgcagactccatccgatcagattgcattccgtgctcgtcgtctcacctcccggcctcgctcctcctctcacacctccgcttccactccgccacccactctgcctgctcccgtcactcctattgctccatccacctccacagccatacccactacctccactacgcccgcttccactgcttcccctgctcccgctcccgcttcagctcctcctgtccctccacctcgcttccgggagcgtgatgagactgaggtccgtcctctggtttcggatcctcgtctgtttgatcttcagcgtgctactgcagcatgggtacgtcggttcaggtacgtacccgtggagtcttggctaccagctcagagagacccagcagcaggtgttcttttcagcacatggattcaggagtcattcttcagagctcagatgtctgctcagatagctctgcgagtgcaccgccttttggatcttccagcttttctgcttgcagctggtgctgactctgaggcgcatctcacctatctgcctggccttctgacccttctgactatcagcggcagatatgttgaggagtgggtccgtgtcttctacgcctctgtttggattgacctggatcatcactggatgaggttccgctttgagcgagaggatgtcacgatcactgccagtcagatccgtcagctctttggattcccagagtcgatgactcgccttcacagtctctgctacggctcttctgaccctcctcgtcgccctcacggcggtgtggctccagggacagctcacgtcgcggctctgttccgcccgcctttcacagatgggtcgcgacgttcaccggcagactttactacagcagcgaagtacttatatgagctcatcagacggacacttctgccgaggatgggatacagggaggctaccactcatattcagctttggctccttggtgccctggtctcccactctgagtttgatgttgtggacttcctgatttgtgagatcgaggacaccgttctggatgggattcgtgctcgtcggcagttgccttatgctcactacttaccgaggatgcagctcttcgacagtttgacactcagggtacagcagctgatgatgatgatgatgatgatgatgattttggggttcctcctccgcctccgcctcctatgcctccacgctcacatgatcatgaggctgggagttctagtgctgcccctcctcatcctcaggctatggaccctgctcttgcttcgattctccagactctcacctagcagcaggctcacctggcagccgagcaggcccgtttatccgacaggatgctctcgatgtttcagaacatgcaggacaggcaggatgcgcttcagcagcagctacttcaggatcgggctgagactgccagtgccaccagcatctgctgttaccactaccgctgtggcagtatctatgaccgcttctgttctgagacaaatgacggcttggtggcgttgggagctcggtgatcaccgtgaagatcttgttggtgacccgactcaagttttggtctactacgagaccgactcttcgtcaccctccacctctggctcggaatcggcctccactacttcaaagcgcaatgagcgcaagaagtatagcaaaccacctatgtttgaagatgaagattattctatgtggagtgataaaatgaggcatcacctaacctcactccacaaaagcatatgggatattgttgagtatggagtgcaggtaccaaagaagggagacaaggattacgactcggaggaggtcgaacaaatccaacacttcaactcccaagccacaactatactcctcgcctctctaagtcgagaggagtataataaggtgcaagggttgaaaagcgcaaaggagatttgggacatgctaaagaccgcgcacgaaggagacgatgtgaccaaaatcaccaagcgggagacgatcgagggggagctcggtcgcttccggcttcgccaaggggaggagccacaagacatgtacaaccggctcaaaaccttggtgaaccaagtgcgcaacctcgggagcaaaaaatgggatgaccacgaaatggttaaggttattcttagatcacttgttttccttaaccctactcaagttcaattaattcgtggtaatcttagatatacactaatgactcccgaggaagtaatagggaattttgtgagctttgaattgatgatcaaaggctcaaagaaaatcgtcgagctagatggcccctccatgttcgaagcacaactggtcgcattcaaggcgatggaggaaaagaaggaggaatctacatcaagtagaacacccatcgacgcctccaagctcgacaacgaggaaatggcgctcatcatcaagagctttcgccaaatcctcaaacaaaggaggggggaggattacaagccccgctccaagaaagtatgctacaaatgtggtgagcccggtcatttcattgctaaatgtccattatctagtgatagtgacatgggtgacgacaagaaggggagaagaaaggataagaagaggtattacaagaagaagggcggcgatgcccatgtttgccaggaatgggactccgacgagagctccaccgactcctcctcctatgaggacgccgcaaacatcgccgtcaccaagggtcttctcttccccaacatcggccacaagtgtctcatggcaaaggacaacaaaaggaagaaggtaaaatcaagatcctccactaaatatgaaacctctagtgatgaggataattgtagtgatgaggaggataacttgcgcaccctttttgccaacctaaacatgcaacaaaaggaaaagttaaatgaattaattagtgctattcatgagaatgatgaactcttggatacccaagaggacttcctaattaaggaaaataagaagcatgttaaggttaaaaatgcttacgctctagaagtagaaaaatatgaaaaattatctagtgagctaagcacttgccatgatactattgccaaccttagaaatgaaaatgctaaacttattgctaaggttgattctaatgtttgtgatgattcgatttccaatcttagaaatgataatgctaatttgcttgctaagattgagaaattgaataattctcttgctagccttagaaatgaaaatgaaaatttgattgctaaggctcaagactttgatgtttgcaatgttactatttgtaaccttagaagtgaaaatgatatattacatgctaaggttgttgaattaaaatcttgcaaaccttctacatctatcgttgagcatacttccatttgtactagatgtagagacattaatgttgatgttatccatgaccacctagccttaattaagaaacaaaatgatcacatagctcaacttaatgcaaaaattaatgagcatgacttggaaaatgaaaaatttaaatttgctagaagcatgctctataatgggagacgccctggcatcaaggatggcattggcttccaaaagggggacaatgtcaaacttaatgcccctcctaaaagattgtcaaactttgttaagggcaaagctcccatgcctcaggataacgagggttacattttgtaccatgtcggttatcctgagagcaaaattaggagaattcattctaggaagtctcactctggccctaatcatgcttttatgtataagagtgagacatctagctctaggcaattaacccatgctaaattgcctagaaagaaaactcatattgcatcaaatgatcataatatttcatttaaaacttttgatgcatcgtatgttttaactaacaaatccggcaaggtttatgcatccgggggctcaagttggattatcgatagcgagtgcacaaaccacatgacaggggagaagaagatgttctcctcttatgagaaaaaccaagatccccaaagagcggtcagattcggggatggaaaccaaggcgttactgtctttagaagatgtgacgattcaatagcatttaagggagtgttagagggtaagctatacttagtagattttgatagagctggactcgacacttgcttaattgctaagactaacatgggctggctctggcatcgccgactagcacatgttggaatgaagaatcttcacaagcttctaaagggagaacacattttgggactaacaaatgttcattttgagaaagacagaatttgtagcgcatgtcaggcagggaagcaagttggtgttcatcatccacacaagaacatcatggcaactgacaggccactcgagctcctacacatggacctattcggcccgatagcttacataagcatcggcgggagtaagtactgtctagttattgtggatgattattctcgcttcacttgggtgttctttttgcaggaaaaatcgcatacccaagagaccttaaagggattcttgagacgagctcaaaatgagttcggcttaaggatcaagaaaattagaagcgacaacgggacggagttcaagaactctcaaattgaaggcttccttgaggaggagggcatcaagcatgagttctcctctccctacaccccacaacaaaatggtgtagtggagaggaagaatagaactctattggacatggcaagaaccatgcttgataagtacaagacttcggatcggttttgggccgaggcggtcaacgccgcctgctacgccatcaaccggttgtatctacaccgaatcctcaagaagacatcatacgaactcctaaccggtaaaaagcccaacgtttcatttttagagtctttggctgtagaaggctttttactaggatatgattcaaacacaagggcatatagagtctttaacaagtcctctggacaagttgaagttttttgtgacattgtgtttgatgagactaacggctctcaagtagagcaagttgatcttgatgagataggtgatgaagaggctctgtgcgtcgcattaaggaacatgtccattggggatgtgtgtcttaaggaatccgaagagccaccacatgcacaagatcaaccatcttcctccatgcaagcatctccaccaactcaagatgaggataagtctcaaaatgatgaaggagaagatcaagaagttgagccacctcaagaggagagcaatgatcaagggggagatgcccatgatcaagatgaggaagatgaacaagttccaaggccgccacacccaagagtccatcaagcaatccaatga

SEQ ID NO: 5244 - DNA, 693 bp, Zea mays
  Clone ID: TF_ZmC441998_1
cctggccggacacgatccaactcataattggtgccagtacgattcaatcgaccctttgaatctcttaccagaagacaccgtctttcaacgtcactccctccattactcgtacgacacttccaatctcttccacaaactcaatcatggaataccaagcacctgctcctgctgctggcgccggcggccgtggctgctacaactgcggcgatgcgtctcaccgcgctgccgagtgccctaccaagggcaccccaacctgctacaactgtggcgagaagggtcacgttagccgtgagtgcagctctcctcaggctgagaagacctgctaccgctgtggcggcactggacacatctctcgtgagtgcaccaaggacggcggtgccccaatgggaggccgtggtggcggcagccaggagtgctacaagtgcggccaggtcggtcacattgcccgcaactgctcccagggaggcggctacggcaacggtggctttggaggaggtcgtggtggctactgcggcggtgccggtggctacggtggtgctcgccagaccacctgctactcgtgcggtggtttcggtcacatgagccgtgactgcacccagggccaagagtgctacaactgcggcgaggttggccacttgtctcgtgactgcccccaggagacatcttctgagcgtgggtgctaccgtttcaagc

SEQ ID NO: 5245 - DNA, 2614 bp, Zea mays
  Clone ID: TF_ZmC31167_1
atgctgcactatccgaagggcaggcctggtgcagtggtgagagctgtcccactgagtcaccaggtcgcagggatctcgtatgcaagaactgccggagacctgggcactttgctaaggagtgcccatctgcgcctacgtgcaataactgtaaccttccaggtggaccataaccccatcccctttattttctacagccacttcgcagcagaatgcacctcaaaaactgtttgctggaactgcaaagagcctgggcacattgcgagtgagtgcaagaacgaggccctgtgccacacctgcaacaaaacaggtcacttggcgcgtgattgccctacttcaggggctaacgtcaagctatgcaacaaatgttttaaatcaggccacatcgccgttgactgcaccaacgaacgggcatgcaacaactgccgtcagccagggcacatagctcgagagtgcaagaacgatcctgtttgcaacctgtgcaatgtctctggccatgtcgcgcgcgtctgtccaaagacgactctggcttcagagatacacatacagggtggcccgttccgtgatatcctgtgccgcatctgtggtcagccagggcacatcagccgcaactgcatggccaccgtcatctgtgacacatgtggcgggagggggcacatgtcttacgagtgcccgtcggcaaggattttcgggttccgcaggctctgaagagcttttcgccaagggctccgctttggtctgatggctgagaattcgccaggatgtttcatttgtttctgacagtattggaacagtttccttctgccgttgtagttgaggaatgattctgtaggatgtgttgcgggtgaaaacttcttttttccccccttttaatcaggatagccctttgtgggctcaaacattgctgtaacggctcgtgtgaaaattgccaggtcatgatttaactcttgtgctcgtgctctgctgtgtcttttgaaaaaaaagggtacacccccagggcccgcggggcgcaccccctcagtccctccccgctcaccaccagtcaccaacgcccaccgggcctcgtccctcgtggcggcaactgggcggccgtcgctgccgccctacgccaggtgccgaggcgaccttcaggcccttggctggcgacgagcaccagtgcaccaccaatactctgagcctggctgccgaaagtgccttttggggttcttgtaatcttgttacattaggattcatttttgatgacttcatcaagaagcaagagcaagagcagaagtaggagccgcagtcgcagcaggagcaggagccgcagtcctcggcgaagagatagattgcgcagtgaacgtgcaccccaccgcagtcgcagccggagccgcagcccataccgtcgcagagaacggcgtggtcacagggattttgcatgcaagaactgccggagacctgggcacttcgctaaggagtgtccatctgcgcctatgtgcaataactgtaaccttccaggccactttgcagcagaatgcaccttacaaactgtttgctggaactgcaaagagtctgggcacattgccagtgagtgcaagaacgaggccctatgccacgcctgcaacaagacaggtcacttggcacgtgactgccctacttcaggtgctaacgtcaagctatgcaacaaatgctttaaatcaggccacatcgccgttgactgcaccaacgaacgggcctgcaacaactgccgtcagccagggcacatagctcgggagtgcaagaacgacccggtctgcaacctgtgcaatgtctccggccacgtcgcgcgcgtctgcccaaagacgactctggcttcagtgatacagggcggcccgttccgagatatcctgtgccgcatctgcggtcagccggggcacatcagccgcaactgcatggcgaccatcatctgcgacacatgcggtgggagggggcacatgtcttatgagtgcccttcggcaagaatattcgggctccgcaggctctgaagagcttttcgccaagagctccgctttgttctgatggctgagaattcgccaggatgtttcatttgtttctgacagtattggaacagttttccttctgccgttgtagttgaggaatgattctgtaggatgtgttgcgggtgaaaacttccttttttccccccttttaatcaggatagccctttgtgggctcaaacattgctgtaacggctcgtgtgaaaattgccaggtcatggtttaactcttgtgctcgtgctctgctgtgtcttttgaacgctaaaaaaaaaagcggtgttttgtgtactcacttatactgtattgtaacgtcacgtagaactgtgaaatttgtatggtgacgttggtggtttgatctggactccttttttactttttgttcggttactctagtatttccctcaatacacatggattaatacacatggattgaggtgtattggggtagcttacccctcaatacacatcaatacatgtgttgtattgaggtaaatcctagagcacccaaacaaagcttaatccctaatcaggatatagggccctttgtgggctaacagtgctgtaacggctcatgtgaaaattgccaggtcatgtttaactct

SEQ ID NO: 5246 - DNA, 7608 bp, Zea mays
  Clone ID: TF_ZmC36592_121
ctagggccaaaacaagtgtgcggccaaaatctcatgtgtcttgtatacaccaaagtgtcccattagtctgccaccatgcggttcatggaatttaccccatggtctaccatccttgcaatgcatcaaattgtccttaaaatcagaatcattggcgtattgttctttcacagtttgtaagccaaaaattttaaaatctaactgagatagcatggtgtatccacgtgacaaagcatcggcaatagtgttatctttcgtgttcttgtgtttaatgatgtaaggaaaagacctaggagaaagggatgcccttcttggtgagttcatgcaacaaagcggcgatggagctgaaatcacgcataaaccgtcggtagaatccttggagaaaatagcagcaccactaagctcatcaagcatatcatcaaggcgaggtataggatagccataatgaattgtgatgttgttaatcgctcgacaatcaacgcacatgtgccaggtaccatccttcttgggaataagtaaaataggaatagagatagggctaagagactcacgaatgtagccgtcatcaaaattagatttagtggcgagcaaaataggagctttcagtttaatttcatttggtatgggtggttgctggtattgttgtttagctctagctatgtcagattttacaatctgttcaggggtcattggatgaagaattattttcttacccttaaacatcaaagagtaattgtttgtgcgaccatgatgtaagctatctgtatcatatttccaaggcctaccgagcagaagtgaacaagcttccattggaacaacatcgcaatcagcataatcatggtaggaccccatagagaaatgaacatgtatcgagcgtgttaccttgagtttaccgccccggttaagccattgaatatggtaggggtgtgggtgtggacgtgtggggagagacaacttctccatcagttgcatccttgccaagttgttgcagctgccaccgtcaataatgatgtgaatggaacgttcttgcacaacacctttggtatggaacaaggtgtggcgctggtgctgctcgggttgtgcaacctgcgtgctgagtacgcattgcacaacaagactctcatacttgttagtatccgtggcatccacatgttcttcttgggttcctgcaacgtcagtggcaagcatagcatatatggtttcttcggaatcactagctgaagaatactcaccattgttatgtataatcagtgtgtgtttgttgggacggtctcgtattacgtgaccaaaccctttacagcgataacattgaatatccttggtgcgtccagcgaaagaagaaccctttgttgatggaggtggcgctagactttttgctacgatcttgtcacgtggagtgctggtagatggcgatgtcgctgctggtggtgccacggcgacaggcttggagtggaacgatgtggtgcgacctgtagaagagttagcttgtgtcctcgcatgtcgtccccggtgtgaggagtctactcctctacctctagacatgcagctgtttggctgtggggtttggttgccaaaagcactagctgagtttcggggcttgccttccaaagcagtggcaggcaggtcctctggtgcaggcttgggtgctgggtccggggctacctcctgagcagctccttgctccggcacgaggatgtactctccgtcagcaagattacagtcgactcctttgggcagaaagtcggggaagcgagagcatagaaaatcctcagtctcccatgtagcttcttcggctgaatggtgactccactgaaccttatacattctgatcgaccttgcccgagttgatctctctttttgatctagtaccttgacggggtactcttggtaggacaagtccggttctatctcaatgtctggttccggtatcacttcagtgggtagacgaacacatttccgcagctgagatacatggaacacattgtgaactgttgacatgcggggtggcaattccaattggtaagctacgggtccacaacttgccttaatctcatagggtccaatgtagcgaggagctaacttgcccttgatcccgaatctctggacacccttggtgggggatactttaagatagacatgatctcccacctcaaactgtagaggcttccgcctcttatcatgatagctcctttgcctggcctgagcagcttccaagttcttggtaataaccctgacctttgcctctgcctcgagtaccaagtctgacccaaaaatttccctttctcccgcttgagaccaatttagtggggtcctacaccttctcccatataatgcctcaaaaggtgccatcttcagactggactgatagctattattgtaagaaaactctgccaaggacagacacttgtcccaatcctttccataatgtagtgcacatgctcgcaacatgtcttccaaaatctgattcaccctttctgtctggccatccgtttgagggtgatatgctgagcttcggattacttgggtcccaagtgattcttgcagtttctcccaaaagcgtgccacaaacagtgctcctctgtcagatataatggtctttggaataccatgcaatcttactatctgatcaacataaatttcagcgtacttctccgtcttgtgggtggtgtgcactggcaagaaatgagcagtcttggtcaacctgtccatgataacccaaatagaatcatggtgtctggaggtattgggtaatcccactatgaagtccatgcaaatgtcctcccatttccaagatggtatgggaaggggttgcaaagggcctgctgccttcaagtgactggctttaattctctggcaggtgtcacattcagatatgtacttggcaatttcccttttcattctagtccaccaatatagagatctgagatcatgatacatcttgttgctaccagggtgcatggagaattttgaaaggtgagcttcatccagtatttgctttctgagctcagggtccttgggaacaaccaatcgatctccaaaccatagaattcccttgctgtcctgtcggaaacacttgtatttttctgccttttgcttgatcatatccttgataacctgaacacccttatcctcaacctgtgccctgactatctgttcttgcaatgtgggctccaccgagatatagcttaggtcacccgcagaaacaacttccaggttcaatctgcacaactcatcacacagggtggtcactcctacatccatgttcatacaattgcactgggcctttcggctcaaggcatctgccacaacattggccttaccagggtggtaatgcacctccaaatcgtagtccttgatcaattctaaccatctcctttgcctcatgttcagatctgcctgagtgaagatgtatttgagactcttgtgatcagtgtagatgttgcagtgagctcccatcaagtagtgtctccatatctttagagcatgaactacagctgccaattctagatcatgtgtagggtagttctgctcatggggcctgagtgccctggaagcataagcaatcactctgttctcttgcatcaagacacatcccaaaccagtaccagaagcatcacaataaacttcaaagggcttggtgttgtcaggttgggccagcactggggctgttgtcaaatgctgcctcaaggtatgaaaggcatcatcacacttttggctccactcaaatttgactcccttctttaacagttcagtcattggcttggcaattctggagaaatccggaataaatcgtcgataataccctgccaatcccagaaaactccgaatctgcttcactgtagtcgggggtttccaatccatcaccttctgcaccttctcaggatcaactgatatcccatcctgagaaattgtgtgacccaagaatttgatttccttcagccagaactcacacttactcagcttagcatacaactgatgatcacgcagtctctgaagtacagtatgcaagtgtttggtgtgctcggcttcattcttggaataaaccagtatatcatcaatgaagacgaccacgaacttgtccaattctggcataaacactgagttcatcaagtacataaaataagccggggcattggtcagcccgaaggacattaccagaaactcatacagcccatatctggttgagaaagccgtcttggaaatatcactggcatggatcttgatctgatggtaacctgagcgaaggtctatcttggagaagaccttggctcctaccaactgatcaaacagaacatcaatacggggcagcgggtatttgttcttgatagtcaccgcattaagaggacggtagtcaacacacatcctcaaactctcgtcctttttcttcacaaataaagctggacatccccatggtgaagtacttggacgaataaaccccttgtccagcaattcttgcaattgcttcttcaattctgccaattccgcgggaggcatcctatagggtctcttggagataggagcagtcccgggttgcaattcgatggcgaactcaatatctcggtcaggtggcattcctggcaattcatctgggaaaacatctgggtagtcacagaccactgggatcttttccactggggaatctatcataacgaaagcacaagaacgggtgcatccctgatcgggcaaatataatgtagtttcaccacaggttggtgagtgcacctcaatggccctggctgcaatatcaataactgctcgatgcctggttaaccagtcagttcccaatataatatccacactatctaaccccaaaatgaggagggtggttttaattattaagctaccaaactttatgggcacgtgtctgttgatttgataggtggcaaccctgcctcctggtgttgaaattgtgatacctccattggtgtggtgaaaaggcaattggcacttggcactaaattttgcactgataaaactcttgccttggttctgattagcattctgcccctgcctttgctgattcctggggcaattcttggcatagtgccccgtgttgccacaggtgaagcatctgttgtcatttgcctggcggtactgctgctgctgctgattgcccctctgagctggaaattgggtgcggttgggtgccggctgctgctgctgctgaggtcggatcacccatcgcccttgctgctgctggggtcccctgccctgggtgtcggacacaatcctgaagcgctgtggctgagctgagggtcctgccacaggggtcttcctcttcttctctgcctgtctagctgtaatacagtcctcttgggagatagccatgttgaccaactcattgtagctgttggccctgacggtgttgagacgatcccggagcttagtgctgagcccccttctgaatctgtctctcttcttctcatctgtatctgcatgatatcccgcatactggcacaagtcattaaaggcctgggcatactgcaacactgtcctgttgccctgagtgagtgccaaaaactcattgagcttcctatccatgatcccggctggtatatggtgtactctaaaagctgccttgaactccctccactccacctctcggtcctctggctgcatagcaagaaaatgatcccaccaagtccttgcaggtccgcgaagctgctgggtggcgaacctgactttggtgacctctgagcaaactccatgtagtagtgggaatttggattccaccactcgcagccacacatctgcatcaagtgggtcctccgcccttgtgaacaatggaggttgggtgctaaggaattcctggtatgtagccgccgcggggtgacgctggtggtctccaccaccataatgctgaggtggtggctgacgttgagccagctgcctcaggatctcattctgctgagccatgagctcctgcagagtgggaggtggtggcggcggtggaggaacgtgctcgttctggccacgacgctgcctcccggccatactcgactcgggggaaggtggtcttcccgagccagcagtgtccacactggaggcaggctcatctcctccctcaatgtcgacgtcctcgtttgcctcttggtcctggatctcctggtgatgcatgtccaggtgctcgttagcctcagcaagctgctgctgagtgttaatgagctgatcctctaggacctcgatggtgttctccctggtgcctaccagctcctccaactcttgaatatcagtggatagctgctccacctgcaagtccttctccaccatttcttgggacaagtcaaccacaagttcctctctgttgtccaatgtaatctttgttgcctccaacagtgccatcagatgggacattgcctcaccgcgcatcacctgcagacggtacagagcattcatgcaccgtattgtcaagtgcgcagtctgacctgggtagatggcccagatgtccttggcatgctccacccgatccttccacattgggtcgtcctccctctcagcggggaacaagccaatggggtgggtagccagctccaagggatggaatccgcagaaagtagtcaatccatgcagagcgatcgcctcgatcgtgtcctccgctcggtatccgaaggactcggagtccaaagagcgccagcctggctgcaggggatgaggctccaaggtcatcctcacccgacagcgaggcactcggtgcttctcgaactgctgcaccgcgtactgagggggtgtcgtgtatccagccccctgaagtacttcccacaaaatgcggggaaagccctctcgtgcaagtccgtcagtgtgggtcagtgcatttccgtcattggaggatccgtgggaagtcatctggtgtgaggagtctactcctctacctctagacatgcagctgtttggctgtggggtttggttgccaaaagcactagctgagtttcggggcttgccttccaaagcagtggcaggcaggtcctctggtgcaggctcgggtgctgggtccggggctacctcctgagcagctccttgctccggcacgaggatgtactctccgtcagcaagattacagtcctggtcaaacaatattcctatttttccttctaatattgagttttgagtagttttcttatttaattcaaaacggcggcagtagggctccggcggggtggtcagtgacgtccgggaggtcgcgacggtcacgtcggtgtgcgggtcggtgttggaggtggtcggagttaccctggccacgagcacaggcggcgggggtcgtcggcggctcgtgtcaggattatatgtagcattgaattcaggtatagtgagttcaatcttagaggaaaaattattttggttacgtaccacacgacgaggtccgtaccggtgacgacggggctgaccgtcgtactcggtgtcgccaccataatcagtgtcaccatgtatctcactaagatgttgggacaactcctccagtcgtgtcatgatggtgtcgagggtggtgttggtggtggcttggggtgtcatattcctggagcgtcgtaccacttcgatttgtgttgtttcaagcgggaaaaggtgcacgttggtgatgtgaatgtctttagcgaggccatcaagttgcagacgcat

SEQ ID NO: 5247 - DNA, 811 bp, Zea mays
  Clone ID: TF_ZmC1373_8
agaactctctccccccgccctccttatctccaggccggacgagcccgcagccgcagcgtccgacctagggttctgcgccgccgccgcccccctgctcccgaggagatgcctcgttacgatgatcgttatggaaacgcacgcttgtatgttggtagattgtcctcccgtactcgttcgcgcgacctagaatatcttttcagcaaatatggaagaatacgggaagtggaattgaagcgcgactatgcattcattgaatacagtgatcctcgtgatgctgatgaggcccgatacaacctagatggcagggatgtggatgggagccgcattattgttgagtttgctaaaggggttccacgtggttctggtggttcacgagaacgtgaatatgtgggaagagggcctcctccaggaacaggccgttgtttcaactgtggtattgatggtcattgggccagggactgcaaggctggtgactggaagaacaaatgctaccgctgtggagaaaggggccatatagaaagaaattgccagaatagcccgaggagtctcaggcgtgagagaagctattcacggtccccatctccacgtcgtggacgggctcgcagtcggagctacagcagaagccgtagttacagccgatctaggtccagatcctattcagagtctcccagagggcgtcgcactgagcgtgatgagaggagatcaaggagcattagctacagcaggagccccaggcgatcgctctccccagaagctaaggacatggatcgcagccctacacctgatcgcagtcggagccccaggcgatcca

SEQ ID NO: 5248 - DNA, 6822 bp, Zea mays
  Clone ID: TF_ZM5008.C2.o12.fg
atggcaaggaccatgcttgatgagtacaagacttcagaccgagtctttggtagcaaatgctttattcttgttaaaagaggtagaaaatctaaatttgctcctaaggctgtagaaggctttttacttggttatgactcaaacacatgggcatatagagtcttcaacaaatccactggattagttgaggtttcttgtgacattgtgtttgatgagactaatggctctcaagtagagcaagtagatcttgatgagctagatgatgaagaggctccatgtgtcgcgctaaggaacatgaccattggggatgtgtgccctaaggaatccaaagagcctccacaagcacaatatcaaccatcatcttcaaatcaagcatctccaccaactcaagatgaggatcaggctcaagacaatgaagaagaagatcaagaagatgagccacctcaagaggaggacaatgatcaagggggagatgacaataatcaagacaaggaagatgatcaagaagaacagggtcaaagacagccacacccaagagtccaccaagtgattcaaagagatcaccacatgaactccatcctcggcgatattcataagggggtaactactcgatctcgagtcgctcatttttgtgaacattactcttgtgtctcctctattgagccatacaaggtagaggatgcactaagagattcggattgggtgctggcaatgcaagaggagctcaacaacttcacaaggaatgagctttaccaaatggacgtgaaaagtgccttcctcaatggaccaatcaaggaagaggtctatgttgagcaacctcccggctttgaagatagtgagtaccctaatcatgtttataaactgtctaaggcgctttatgggctcaagcaagccccaagagcatggtatgaatgcctaagagatttccttatcactaatggcttcaaagtcggaaaggccgatcatacactctttactaagaccattgcaaatgatttgtttgtatgccaaatatatgttgatgatatcatatttgggtctactaacaaatctacatgtgaagagtttagtaggatcatgattcaaaaattcaagatgtctatgatgggggagttgaagtattttctaggatttcaagtcaagcaactccaagagggcaccttcatctgccaaacaaagtacatacaagacatacttaccaagtttggaatgaaggatgccaagcccatcaagacacccatgggaaccaatgggcatctcgacctcgacacgggaggtgctaaaggttcaacacaaaccaataaaaagatccaagttggggttcaaaataaaggagcaaaagaaaccgaagagaaccctggtctgccgcaccggactgtccggtgcaccactgggcagtgtccgttttcgcctattcaccccccctctaggcgacttttagtgtgctacaagtgtggtaagcccggtcattttattgctaaatgttctatgtctagtgatagtgacaggggcgacgacaagagggggaataagaaggagaagaagagatattacaagaagaagggcggcgatgcccacatgtgtcgggaatgggactccaacgagagctccaccgactcctcctctgacgaggatgccgccaacatcgtcgtcaacaagagcctcctcttccccaacgtcggccacaagtgcttcatggcaaaggacgacaagaggaagaaggtacaatctagaacctcacccaaatatactacatctagtgatgagggtagttctagtgatgatgaagatgatttgcttaccctttttgccaacattaacatgcaacaaaaggaaaagttaaatgaactgataggtgccattcatgagaaggatgaactcttggacaaccaagactcaattaaagcaaaaattaatgagcatgagaaagaaaataaaaaatttaaatttgctagaagcatgctctataatgggagatgcccaggcattaaggatggcattggtttccaacatggaagcaatgtcaaaattaatgcccctaaaagattgtctaactttgttaagggcaaagctccaatgatacagaataatgagggctatattttatatcctgctaattatcctgagcacaaaattaggagaattcatgctaggaaatctcatactatttcacatcatgcttttatgtataacaatgaggcttctagctctaggcaatcaacccatgttaaattgcctaaaaataaaactcctactgcatcaaatgagcctaacatttcatttaagacttttgatgcatcttatgatttaactaacaaatcaggcaaaatagttgccaaatatgttgggggcaaacacaagtggggtagaaaatctaaatttgctcctaaggctgtagaaggctttttacttggttatgactcaaacacaagggcatatagagtcttcaacaaatccactggattagttgaggtttcttgtgacattgtgtttgatgagactaatggctcccaagtggagcaagttgatcttgatgagctagatgatgaagaggctccatgcgtcgcgctaaggaacatgtccattggggatgtgtgtcctaagaaatccgaaggcctacacaagcacaagatcaaccgtcatcttccaagcaagcatctccaccaactcaagatgaggattaggctcaagacaatgaaaatgaagaccaagaggatgagccacctcaagaggaggacaatgatcaagggggagatgaagttaatcaagacaaggaagatgatcaagaaatacagggtcaaagatcaccacacccaagagtccatcaagcaattcaacgagatcaccccgtcaactccatccttgccatacaaggtggaagatgcactaagagattcagattgggtgttggcaatgcaagaggagctcaacaacttcacgaggaatgaggtatggcatttagttccacgtcctaaccaaaatgttgtaggtaccaagtgggtattccgcaacaagcaagacaagcatggtgtggtgacaaggaacaaagcccgacttgtggccaaaggatattcacaagtcgaaggtttggactttggtgaaacctatgcacccgtagctaggcttgagtcaattcgtatattacttgcctatgctacttaccatggctttaagctttatcaaatggatgtgaaaagtgccttcctcaatggaccaatcaaggaagaggtctatgttgagcaacctctcggctttgaaaatagtgagaaccctaaccatgtttataaactctcaaaggcgcttaatgggctcaagcaagccccaagagcatggatcatgattcaaaaattcgagatgtctatgatgggggagttgaagtattttctaggatttcaagtgaagcaaatccaagatggcaccttcatcagccaaacaaaatacattcaagacatacttaacaagtttggaatgaaggatgccaaacccatcaagactcccatgcgaacaaaagggcatctcgacctcgacacgggtgatggacatcttagcatgtaccaccataagtttagaaactaccacattcctgctggattgatgaagatcaagaagaaggagtttctgtcattaaaacaaggcaacatgtctgtcagcgagtaccgtgacaaattcatccagctgtcaagatatgttcctgatgaggtggcagatgataaaaggaagcaagagcacttcacagaaggactcaataggcccctacagtatgcactggttgctcacacatttccatcatttcagaagctgctggataaggctcttgctattgaacacaagcgtgttcaattgggagatttgaagaggaaggccattacccaggggcagggctacaccaactcatctaggaggaggaccacgcccagctcagtagactccacaggggtctccacgacacctcccactcgtcaagctacccccactggcaccccgacgaggcctacaggacagaagataggccccacatgcttcaagtgcagtcaggttgggcattatgctaatgcttgtccggcggggaattctagtgcatcagctcagaacaagcaacagactcctggcaagggattcagcattgccagggttaatcaagtcagtgctgaggccactgctgacggtgcagacatcactattgatagggaagtcgaatttgttattgatctcttacctggtactgctcccatttcaaaaaggccatataggatgtcagtggaagagttaaaagaactgaagaaacaattaacggagttacaggaagcagggtacattcgtccgagttcctcaccttggggagcaccggtactgtttgtacagaagaaggatggttcacaacggatgtgtgtggactatagatcacttaataatgttactgtaaagaacaagtatctgttaccccgcattgaggatttatttgatcaaatgagaggtgctagggtattcttgaagattgatctccgatcgggttaccatcaaatgaagattaggccatcagatattcccaagacgactttctcgacccgatatggtttatatgagttcacgtttatgtcatttagactaactaatgcaccggcttatttcatgaatctgatgaataaggtgtttatggagtatctggacagatttgtcatagtattcatcgacgatattcttatttattccaagagtgatagcgatcatgaggaacatctgagattggtgctacagaagctacgaaataaccaactctacgccaagtacagtaaatgtgagttctggattgatgaggtgccattccttggacatatcgtttctaatggtgggatatcagtggatcctgctaaagtcagggagatagtggcgtggagcatacccagtatagttattgaagtccggagtttcttgggacttgcaggctattatcggcgatttattgaagggttctctaagattgctaagcctatgacctcacttctggagaagggaagagagtttaagtgggactcgaagtgccaagataaactggcagtcgtagtgcatgcactcaagatatggagacactatattatgggaaccaagtgccaagtgtacacagatcataagagtttgaagtacatattcacccagaaggatctcaaccttaggcaacgccgatggttggagctcattaaggactatgacttggagattcattatcatccgagcaaggcgaatctggttgcggatgccttgagtcggaaggaacacgttcattccgctattgttgcccagctacccgatgagattgtagaggatttcaggagactcaacctgggaattgttgcgcacactgaaggagtcaccatcgaattggaacctaccttggagcatgaaattcataggggtcaggttggtgatgctaaaattcaagagattaaagatctgattactgaaggtagaggtccagaattcacggaggatgagcaaggcactgtatggttcaaggagcggatatgtgttccggagattgatagccttcgtgagactatattgaaggaagcccatgattctgattactctatccaccctggtagcactaagatgtatcaggatttgaagcaaaagtactggtggtatgggctaaaaagagatgttgctgcagacgtggctaagtgtgatgtgtgtcaaagagtcaaggccgaacatcaaagaccagctggactattgcacccgcttaagatacccgagtggaaatgggaagaaattggcatggatttcattgttggactaccctgcactcctgcagggtatgactctatttgggtaattgtggatagactgaaaaaagtggctcacttcataccagtgaggactaattacacgggagccaagctagcagaattgtatatgactcggatagtttgtctacatggggtgcctaagaagatcgtgtcagaccgagggtcacagtttacttctcagttttggaagaagttgcatgagagcttggttacacagttgaattttagttcggcctaccatcctcaaactaatggacagaccgagaggactaaccaagtgctggaggatatgttaagagcttgtgctcttaaacatggtggtagttgggataagagcttacaatatacagagttctcttataataatagttaccaggctagtctgaagatgtcaccatttgaggctttatatgacaggaagtgcatgactcctctatattgggatcagactggagaaagacagttctttgggcctgaacttatacaagagacagaagaacaagtgcgaatgataaaagagaatttgagaattgcacaatcaagacagaagagctattctgatacccggagaagactactgaagtttaaggagggtgatcacgtgtatctgaaggtgtcaccgatccggggtatgaggagatttaaagttaaagggaagttgtcccctcgcttcattggacctttcttgatcttaaagcgagtgggagtagttgcatatcaactagaactacccgatcacctggcagatgtacatgatgtcttccatgtatctcagctgaagaaatgtctcagggtacctgaaaagcagctaccactggaggatcttagtgttcaggatgatctgacatatgctgagtatcctatcaagattcttgatacattgactcgtgtcacaaggagcaaagtgattaaaatgtgcaaagtacaatggagtcaccatggagaagatgaggctacttgggaaagagaagaagagcttcgcatagactttccccacctctttcctagttctacctaa

SEQ ID NO: 5249 - DNA, 588 bp, Zea mays
  Clone ID: TF_LIB4729-106-A1-K1-A4
gtgtgaatgtgaaaccgaccacccaaagtcccaaaccctaacttactatttgtattcggatctgatctaattgcaagtgtatatatactctgagcctggctgccgaaacttcctttttgagtccctgttacattcggattcgtttttgatgacttcatcaagaagcaacagcaggagccacagtcgcagcaggagcaggagcaggagccgcagtcctcagcgaagagataggttgcgcagcgaacgtgcaccccgccgcagtcgcagtcacagcaggagccgcagcccataccgtcgcagagaacggcgtggatgcaaggatctcgtatgcaagaactgccggagacctgggcactttgctaaggagtgcccatctgcgcctacgtgcaataactgtaaccttccaggccacttcgcagcagaatgcacctcaaaaactgtttgctggaactgcaaagagcctgggcacattgcgagtgagtgcaagaacgaggccctgtgccacacctgcaacaaaacaggtcacttggcgcgtgattgccctacttcagggggctacgtcaagctatgcaacaaatgttttaaatc

SEQ ID NO: 5250 - DNA, 2109 bp, Zea mays
  Clone ID: TF_ZmC4916_404
atggatacccataggccaccacacttcgacggcactaacttcccatattatagtgctagaatggcttgctacctagaggccgttgatctaggtgtttggagagtcactcgtgacgggatgaaacccctcaagaatcccgagaaacccaccacgagtgaggaaaaagaaatccatttaaatgctagagccaaaaattgcttgtttgaatctcttagcatggatattttcaatcaagtatttactctgaaaactgctaatgagatttggctaaaattgcatgagctccatgacggcacatccaatgtccgtgagcaaaaacattgcctagtcttaaatgagtataattcttttgctatgaaagatgatgagcttgttagagacatgtattctcgtttgaatcaaataatcaatgagctcaactctattggcattaataagctaggtgatgcggacattgtgaggaagattatctccctgctaccacaacaaaaatatgggagcatcatcaccatccttcacaacatggaggacttgagcaacatgaccccgaccattgtgattgggaaaatcgcggcctttgagatgtcgcgaaaaatgagtcggggagaggagccaacttcctcaaagccatatgcttttgcatgtgatgaaaggaagggcaaaaagaaggctcccactccaagttcctcaagcaaagaagaggaagaagaagaagaaagtgatgatgatgaagataatcaaccatgcacatcatcctccgaggacgaagaaacaatccgacgcgtcggaaaggtaatgaggatgatccgcaagattaatctaatgggtgtgcctctgcaggtcgaggatcttctctttaacattgacaggaaaaagcaaaggaagagaggatgcttcgcatgtggggagaagggccacttcagggacaactgtccaaatatggccaaacccaaaaaggagaggagcaaaggcaaggcgctcacaagtgttagaacttgggatgactcttcaagtgaagatgaatctccaaggacgcgcagccaccggtcctcgtcacgatcatcacggacatcacacaaatgccttatggcaagaggtaacaaaagcattccatcctctagtgatgaaagtagtagtgatgatgaaggtgagggaaaggcctctctagatgagcttgcagaagccgtagaatttttccaggatgtttgcactaagcaaaaagctcaacttaaaaatttgaaaaataagttggttagctctcaaaatgattacaaaggtttgctagaaaaatttgaaacttttgcaaacttaaatagtgagctatcaactaaaattgagctgttagaatctagtgctccatccactgctaccgatgatagccttattaaaaagaatgaaaaacttaaggctaagttagctagctcccaagaagctattgaaaatttgctagagaaaatggaaattcttagcatacacaataatgagctaactactaagctagaaagcattggtagcaccccagcagcatctttagttgaaatatctgaaataattaagaaagatgcttctacttcctgctttgatttaattgatgattctaacacctgcaaccaagtcgctgttgagaatattgttatagagacatgtacggatgaggttgcaaaggaaaatgaacaattaaagcaagaagtggctcgccttggcaaggctttgtatgacaagaaaggcaaagccaaacaaatccaacctccacaggataacaccactgcgggagtgaacaagcctatggagggagaaactgtgatttgtaggatatgccacaaggaaggccacaagtctttccaatgcaaggcgatgaccggggataaacaaaggcaaaagctcaagcaaaagccatcaagcaaaatctccagcacctacatcaaaaaggtgaacaaaaaggacgctacaccatatttgatcaagaagaaaaagaatggaaaggtgatagcaatcaaggccaacaagcaagccaacaaaggaaagggggccaaacgcatctgggtgccaaaagagataatttcaaccatgaaaagcaccaagaaggtttggatcccgaaagggaagtga

SEQ ID NO: 5251 - DNA, 1428 bp, Zea mays
  Clone ID: TF_ZM4448.C1.o2.fg
atggaaagcccgtctgattttggtctatcaaaagactctactcaaaagcactacaagatgatcaagctaggattgcggaacttgaagcgaagtttgccagaagaaaccctctcgaagctatcgacgatgccctattctctatcttatccccactccgcaagaagttttgttatggatcctttggatctattaccagacttcttgatgttagaccttggaatgtcaactacaagtgatgtcactaaatgcaaggaatgtggtgtgttgacaagtcaaaacaacactataaatgaaacagctgatgaacagaccttcaagacacaaaaggatgcacaaccaaaccaacaaacaagtgaccttggaacatgttgttgttgtgagtactatggaattccttgtcgccagatcagtacaaacgaaagtaaaactacaaaacagaagaaccagattttattttatggcataaacagacaaatgtctccccaagaacaacttatagcagattctctcatacctaatgcactgtcagttgatgaattgcaaagtattccaaaaaggaaacatcacaaggatgcccagccccaagaagaaacacaggagtgttacattgatggatggactatcacctgcacacagtttcagccccatcgtcgcatcaggtccaagaaacaaaaagggaaacatggaaagagtcaagaaataacttcaagaaaagcttgctatcaatgtggacgtgaaggtcattacttccgtaactgtcctgagaagagttcactatcggacacccccgagatgaagcaacctcagtctccagacatggaatatgaacaaaaatgcacagaaacttctaccaacaacgtaaagacaactccaccatgtaacttatcaagtcgtacttgctttggctgtggtgatatcgaccatcttgttaatggttgtcctaagaaggatgtggagatcaataaggtccaaaagaaaagacaacgccctcaaacccatgcatcaacaaagaataaacaacggaaagagtccacaggaaggataagttatgcagtgacaggaaccattccatatgatgatgcagtaatttttggaacactagtcattcacacaaccatcgccaccgtgttgtatgatcctcgtacaacacattctcttatcagtgcccagtttgcaacaaagtatggtatcttcaagtgtcccttaagatcaagaaagaccatcagtacacctgaaaggaaagtgttagcgaactacatatgtccgaaagtaagtattaaaatcaacgggatagtgttgggcccatgcttcgttgcgccgaaggtcttgcgtgaagaagcagcttcggctgaaatcgtccccagaaaatggccgaaggttcctttttatagagcttcggcgttgcaaaccgacataaagatagaatga

SEQ ID NO: 5252 - DNA, 1875 bp, Zea mays
  Clone ID: TF_ZmC71_26
tcaagcacattttggtacccatcgcttgatgggtccgttaaggttagtgaacaaagatctaggaacccaagtgtcctttgtgctagcgcttggtaaacttgttacctttctagcacaagttgcaatcttgggttgcctagttatatatgaatctaatgacaagttaggagtgggaattttaccaatgggacaatctttgcattgatgtcccttctttcggcatgtgtagcatagccgttttccaagttttgaagatttcttctttccttgtttgttgcctgctacatggttagtaaaaaccttcttttctaaccctatgcctttttgttttaaatggggacaagatctaagcatgtgtcccttcttggagcatttaaaacaaagcctatcatccttgttaataatcaagccttttttaatgtagggacacgacctaatcaagtgcccctcttcaaagcattcactacacctcttaatgtgaagtgtgacttgatcattaccttggatgttaccttttgtggaggcgtggttgaggcttttggaggaggtgttgaatttcatattttgttccctcctcattgcaatcctcaaatccttgacattttcttcaagggatgtagtgcatgcaacggttgttcccgtctcaagcttcttcaccatgtgatcacagttatcttgagaaggttgggcaatgcatttccctttaagttgtgtcaagctcttctttagcctctcattttcttctttgagcttttgatatgaatcatcatttgttcctgcaaattctagctcaaaggaagatttgcttgtcgacggacaacaagcattagcacatggtaatatagtattaatttgaacacatgtgcacgagtgaggttgttgggattttaaattttctatcacaacctcatgagcaatgtttaatatgatatgatcatctctaagattttcataagagcataggagcatatcatatttttcttgaaaagctagattttcaatttttagcttttccacttggtccttaagcaaggtattcctatttactaattgagcgatacaatgtgaagcgttattttgctcaattgaaatagtttcatacctttggaccaaatcaacatgagagcactttagctccttatgttctttagtcaactcgtcaaagtgttgcatctttatggagagaatatcttctagcctttgacgagcttcgctttgctctctcgctctttctagaagtttgagcatgaccgccttatcttcttggcttaggcgagcgtagagatgcacaaaacttctttcttcctcctcatcctcatttgtgcttccgctatcattttcattagccacacaacacatgtgggaatcgaaatgggaagacaaaccttttggagaggtggattcatcgtttggtctccatcgttcattttctccttcttccttgcaagggttagtatcacaaaaactaaaggaagtagaggcatcaaatgaactattatgtttggactcatcaaacttgattttaattctagtccaaatatcatgcgcatcgggaatggattcgttatagtttgatatgaaggcatgataatcttctttgctaagagaattgtttaagatgtcaaaagctaggtagtttaagcgataacatctttgatcctcttcggaattaatttttccattaaaactagagggaaaaatactcttgtcaataatttgttctaattgaggatgtatggttctaaaggcatttatcacactagtagaccatgaatcataattagaacaatcatcacataatatctcaagagttacctccttccgagttgggttctcctgggttttcttgttcttttgggatcttctacgagccat

SEQ ID NO: 5253 - DNA, 9869 bp, Zea mays
  Clone ID: TF_ZmC36592_151
ggccgccccttttttttttttttttttgcaataaagcataaaaccatacatgtcacaatgttaaattattacatcaccatcatcatcatcggagttttgcaaaagtaaccatcattgttcgaagtgcagcggaataaaactaacggtcattaaacagagagatggggaagcctgtcccatcactcctcatgctcctccccggccgaggcagggtcccactcaacagtccaacccggtggcagggtggacggccaagttatcccagcaaccatctcctccagagaaccttccaaagcagtggcaggcaggtcctctggtgcaggctcgggtgctggatctggggctacctcctgagcagctccttgctccggcacgaggatgtactctccgtcagcaagattacagtcgactcctttgggtagaaagtcggggaagcgagagcgtagaaaatcctcggtctcccatgtagcttcttctgctgaatggtgactccactgaaccttgtacattctgaccgaccttgcccgagttgatctttccttttgatctagcaccttgacggggtactcttggtaggataaatctggttctatctcaatgtctggttctgggagtacttcagtgggtagacgaacgcatttccgcagctgagatacatggaacacattatgaactgctgacatgtgaggtggcaattccacttgataggctacggttccacaagcttccttgatcttgtagggtccaatatagcgaggagctaacttgcctttgatcccgaatctctgaacacccttggtgggtgataccttaaggtagacatgatctcccacctcaaactgtagaggcttccgcctcttatcatgatagctcctttgcctggcctgagcagcttctaagttcttggtaataaccctgacctttgcctctgcctcgagtaccaagtctggcccaaaaatttctctttctcctgcttgagaccaattcagtggggtcctacaccttctcccatacaatgcctcaaaaggtgccatcttcaaactggactgatagctgttattgtaagaaaactccaccaaagacagacacttgtcccaatcctttccataatgtagtgcacatgctcgcaacatgtcttccaaaatttgattcaccctttctgtctggccatctgtttgggggtgatatgctgagcttcggatgacatgggtcccaagtgactcttgcaattgctcccaaaatcgtgccacaaatgatgctcccctgtcagatataatggtcttgggaataccatgcaacctcactatttgatcaacataaagttcagcgtacttctctgccctgtgggtggtatgcactggcaagaaatgagcagtcttggtcaacctgtccacgataacccaaatagaatcatggtgcctggaagtattgggtaatcctactatgaagtccatgcaaatatcctcccatttccaagatggtatgggaaggggttgtaaagggcctgctgccttcaagtgactagcctttattctctggcaagtatcacactcggatatgtacttggcaatttcccttttcattctagtccaccaatataaggatctgaggtcatggtacatcttgttgctaccagggtgcatggagaattttgaaaggtgagcttcatctagtattttccttctaagctcagggtccttaggaacaaccaatcgatctccaaaccatagaattcccttgctgtcctgtcggaaacatttgtatttttctgccttctgcttgatcatatccctgataacctgaacacccttatcctcaacctgtgccctgattatctgctcttgcaatgtgggttccactgagatatagcttaggttacccgaagaaacaacttccaagttcagcttgcacaactcatcacacagggtggtcactcccacatccatgctcatacaattacactgggcctttctgctcaaggcatctgccacaacattggccttccttggatggtaatgcacttccaaatcataatccttgatcaactctaaccacctcctttgcctcatgtttagatctgcctgagtgaagatgtatttgagactcttgtgatcagtgtagatgttacagtgagctcccatcaggtagtgtctccatatcttaagagcatgaactacaactgccaattctagatcatgtgtagggtagttctgctcatggggcctgagtgcccgggaagcataagcaatcactctgttctcttgcatcaagacacatcccaaaccagtaccagaagcatcacaataaacttcaaatggcttggtgttgtcaggttgagctagcactggggctgttgtcaaatgctgcctcaaggtatggaaggcatcttcacacttttggctccactcaaatttgactcccttctttaacagttcagtcattggtttggcaatcctggagaaatccggaataaatcgtcgataataccctgccagtcccagaaaactccgaatctgcttcactgtagtcgggggtttccaatccattacctcttgtaccttttcaggatcaactgatatcccatcctgagagattgtgtgacccaagaatttaatctccttcagccaaaactcacacttagacaacttagcataaagatgatgatcgcgcagtcgttgaagcacaacatgcaggtgctcagtatgttcgtcttcattcttggaatagaccagaatatcatcaatgaagacgaccacgaacttatccaattctggcataaacactgagttcatcaggtacatgaaataagccggggcattggtcagcccaaaagacatcaccagaaactcatacagtccatatctggtagagaaagccgtcttgggaatatcgctggcacggatcttgatctgatggtatcccgagcgaaggtctatcttggagaataccttggccccaaccaactgatcaaacagaacatcaatgcggggcagtgggtatttgttcttgatagtcaccgcattgagagggcggtagtcaacacacatcctcaaactctcatcctttttcttcacaaataatgctggacatccccatggtgaagtgcttggacgaataaaccccttatccaacaactcttgcaattgcttcttcaattctgccaattccgcgggaggcatcctatagggtctcttggagataggagcagtcccgggttgcaattcgatggcgaactcaatatctcggtcaggtggcatccctggcaattcgtctgggaaaacatctgggtagtcgcagaccactgggatcttttccaccggggattctatcagaacaaaggcacaagatcgggtacaaccctggttgggtaaatacaacacagtctcgccataagcaggggaatgaatttcaatggctctggctgcaatgtccaatactgcctgatgcctggtcaaccagtcagctcccaaaataatatccacactatccaatcctaagatatgaagggtggttctaatcaccagactaccaaattttataggcacttgcctgttgatttggtaagtggcaactctgcctcctggcgttgaaattgtaatgcccccatcggtatggtgaaagggcaactggcatttggcactaaacttagtactgataaaactatgcgatgcacccgaatcaaataaaataatcgcaggataattcaaaactgtaaagataccggtcatgacgggtgctccctctgggatatcaaccatggtggtgaagtttagtctgccctgcctcacttgcaccttctgtctcttgccttggttctgattgacattctgcccctgcctctgctggttcctggggcaattcttggcataatgcccagtgttgccacaagtgaagcacctgttgtcattggcttggcggtactgctgctgattattcctctgagctggaaactggttgcggttgggtgcctgctgctgctgctgctgaggtcggattacccatcgcccttgctgctgctggggtcccctgccctgggtgtcggatacaatcctgaagcgctgtggctgagctgagggtcctgccacgggggtcttcctcttcttctctgcctgcctagctgtaatgcagtcctcttgggagatagccatgttgaccaactcattgtagctgttggccctgacggtgttgagacgatcccggagcttagtgctgagcccccttctgaatctgtccctcttcttctcatctgtatcagcatgatatcccgcatactggcacaagtcattaaaggcctgggcgtactgcaacactgtcctgttgccctgagtgagtgccaagaactcattgagcttcctgtccatgatcccggctggtatatggtgtcctctaaaagctgccttaaactccctccactccacctctcggtcctctggctgcatagcaagaaagtgatcccaccaagtccttgcaggtccacgaagctgctgggtggcgaacctgactttggtgacctctgagcaaactccatggagcagtggaaatttggattccaccactcgcagccacacatctgcgtcaagtgggtcctccgcccttgtgaacagtggaggctgggtgctgaggaattcctgataggtggccgccgcggggtgacgctggtggtctccaccaccataatgctggggtggtggctgacgttgagccagctgcctcagaatctcattctgctgagccatgagctcctgcagagtgggaggtgggggcggcggtggaacgtgctcgttctggccacgacgctgcctcccggccatctgaaaaatccacatacttattgactcgggggaaggtggtcttcccgagccagcagtgtccacactggaggcaggctcatctcctccctcaatgtcgacgtcctcgttggcctcctggtcctggatctcctggtggtgcatgtccaggtgctcgttagcatcctcaagctcctgctgcacattgtggagctggttttcctgtagatctttttctaccaactctgaggataggtcgaccacgaagtcctctcggctgtcgagggtgagcttagtagtctgagcgaggttagcaagatgtgccatagcatcgctctgcagggcctgtaggcggtacagtgcgctcatgcacatctccaggggatggtagccgcaaaaagtcgtcagagtcttcgtagctaccgcctcggtggtgtcgtccgtcctgaatccaatggcctcagagtcaagggaacgccaactcggctgaagggggtgtgcctccaatgtcagccagactcggcaacgtggcacccgatgatcctcgtacagctgcaccgtgtacaaaggggcatagggtagccggtggagttgagcacctcccacaagatggaagggaaaccctcgtgagaaaggaaatcggaactgaaacgagtgtctcctccactggcgggggtgggtgaagtcatctggtggcaaggtggacggccaagttatcctagcaaccatctcctccagagaaccggggcttgccttccaaagcagtggcaggcaggtcctctggtgcaggctcgggtgctggatctgggctacctcctgagcagctccttgctccggcatgaggatgtactctccgtcagcaagattacagtcgactcctttgggtagaaagtcggggaagcgagagcgtagaaaatcctcagtctcccatgtagcttcttctgctgaatggtgactccactgaaccttatacattctgaccgaccttgcccgagttgatctttccttctgatctaataccttgacgcggtactcttggtaggacaagtctggttctatctcaatgtctggttctggtagcacttcagtgggtaggcgaacgcatttccgcagttgagatacatggaacacattgtgaactgacgacatgtgaggtggtaattccacttgataggctacgggtccacaagcttccttgatctcgtagggtccaatatagcgaggagctaacttgcccttgatcccgaatctctgaacacccttggtgggtgataccttaagatagacgtgatctcccacctcaaactgtagaggcttccgcctcttatcatgatagctcttttgcctggcctgagcagcttccaagttcttggtaataactctgacttttgcctctgcctcgagtaccaagtctggcccaaaaatttccctttctcctgcttgagaccaatttagtggggtcctacaccttctcccatataatgcctcaaaaggtgccatcttcagactggactgatagctattattgtaagaaaactctgccaaagacagacacttgtcccaatccttcccataatgtagtgcgcatgctcgcaacatgtcttccaaaatctgattcaccctttccgtttggccatctgtttgagggtgatatgctgagcttcggatgacatgggtcccaagtgattcttgcaatttctcccaaaagcgtgccacaaacagtgctcctctgtcagatataatggtctttggaataccatgcagtcttactatctgaacacccttatcctcgacctgtgccctgactatctgttcttgcaatgtgggctccaccgagatatagcttaggtcacccgaagaaacaacttccaggttcaatctgcacaactcatcacacatggtggtaacccctacatccatgctcacacaattgcactgggcctttctgctcaaggcatctgccacaacattggccttccctgggtggtaatgcacctccaaatcgtagtccttgatcaattctaaccatctcctttgcctcatgttcaggtctgcctgagtgaagatgtatttgagactcttgtgatcaatgtagatgttacagtgagctcccatcaagtagtgtctccatatctttagagcatgaactacagctgccaattctagatcatgtgtagggtagttctgctcatggggcctgagtgcccaggaagcataagcaatcactctgttctcttgcatcaagacacatcccaaaccagtaccagaagcatcacaataaacttcaaatggcttggtgttgtcaggttgggccagcactggggctgttgtcaaatgctgcctcaaggtatgaaaggcatcttcacacttttggctccactcaaatttgactcccttcttcaacagttcagtcattggcttggcaattctggagaaatccggaataaatcgtcgataataccctgccaatcccagaaaactccgaatctgcttcactgtagtcgggggtttccagtccattacctcttgcaccttctcaggatcaactgatatcccatcctgagaaattgtgtgacccaagaatttaatctccttcagccagaactcacacttagacaacttagcataaagatgatgatcgcgcagtcgttgaagcacaatgtgcaggtgctcagtatgtccgtcctcattcttggaatagaccaaaatatcatcaatgaaaacgaccacgaacttgtccaattctggcataaacactgagttcatcaggtacatgaaataagccggggcattggtcagcccaaaagacatcaccagaaactcatatagtccatatctggtagagaaagctgtcttgggaatatcgctagcgcggatcttgatctgatggtatcctgagcgaaggtctatcctggagaataccttggctccaaccaactgatcaaacagaacatcaatgcggggcagcgggtatttgttctttatagtcactgcattgagagggcggtagttaacacacatcctcaaactctcatcctttttcttcacaaataatgctggacatccccatggtgaagtgcttggacgaataaaccccttgtccaacaactcttgcaattgtttcttcaattccgccaattccgcgggaggcatcctatagggtctcttggagataggagcggtcccgggttgcaattcgatggcgaactcaatatctcggtcaggtggcatccctggcaattcatccgggaaaacatccagatagtcacagaccactgggatcttttccactggggattctaacataacaaaggcacaagaacgggtgcatccttgcaccttctgcctcttgccttggttctgattagcattctgcccctgcctctgctggttcctggggcaattcttggcataatgcccagtgttgccacaagtgaagcacctgttatcatttgcctggcggtactgctgctgctggttattcctctgagctggaaactggttgcggttgggtgcctgctgctgctgaggtcggattacccatcgcccttgctgttgctggggccccctgcccaactcattgtagctgttggccctgacggtgttgagacgatcccggagcttagtgctgagcccccttctgaatctgtccctcttcttctcatctgtatccgcatgatatcccgcgtactggcacaagtcattaaaggcctgggcatactgcaacactgtcctgttgccctgagtgagtgccaataactcattgagcttcctgtccatgatcccggctggtatatggtgccctctaaaagctgccttgaactccctccactccacctctcggtcctctggctgcatagcaagaaaatgatcccaccaagtccttgcaggcccgcgaagctgctgggtggcgaacctgactttggtgacctctgagcaaactccatggagcagtgggaatttggattccaccactcgcagccacacatctgcgtcaagtgggtcctccgcccttgtgaacaatggaggctgggtgctaaggaattcctgataggtggccgccgcggggtgacgttggtggtctccaccaccataatgctgaggtggtggctgacgttgagccagctgcctcaggatctcattctgctgagccatgagctcctgcagagtgggaggtggtggcggcggtggaggaacgcgctcgttctggccacgatgctgcctcccggccatactcgactcgggggaaggtggtcttcccgagccagcagtgtccacactggaggcaggctcatctcctccctcaatgtcgacgtcctcgttggcctcctggtcctggatctcctggtgatgcatgtccaggtgctcgttagcctcagcaagctgctgctgagtgttaatgagctgatcctctaggacctcaatggtgttctccctggtgcctaccagctcctccaactcctgaatatcagtggatagctgctccacctgcaaatccttctccaccatctcttgagataaatcaaccacgagctcctctctgttatccaacgtgatctttgttgcctccagtagtgccatcagatgggacattgcctcaccgcgcatcacctgtagacggtacagagcattcatgcaccgtactgtcaagtgcgcagtctgacctgggtagatagcccagatgtccttggcatgctccacccgatccttccacattgggtcgtcctccttctccgcggggaacaagccaatggggtgggtagccagctccaagggatggaatccgcagaaagtagtcaatccatgcagagcgatcgcctcgatcgtgtcctctgcccggtatccgaaagactcggagtccaaagagcgccatcctggctgcaggggatgaggctccaaagtcatcctcaccctacagcgaggcactcggtgcttctcgaactgctgcaccgcgtactgagggggtgtcgtgtatccagccccctgaagtacctcccacaaaatgcggggaaagccctctcgtgcaagtccgtcagtgtgggtcagtgcatttccgtcatcggaggatccgtgggaagtcat

SEQ ID NO: 5254 - DNA, 762 bp, Zea mays
  unsure (1)..(762): unsure at all n locations
  Clone ID: TF_ZmC1373_10
gctatgggaatacacgcttgtatgttggaagattgtctccccgcacccgttctcgtgacctagaataccttttcagcaaatatgggaggnttttcggtgtttttacacaaccatggaggtgtggtggaagggtgcccttgatggaattggtggccatagttccaatgtttgtggaggactttggtgaagggcgcccttggtaattcgagaagtggagttgaagcgtgactatgcattcattgaattcagtgacccccgtgatgctgatgatgcacagtacaacctatatggcagggacgtcgatggaagccgcattattgttgaatttgctaaaggggttcctcgtggttctggtggttcacgtgattacaacggaagaggaccttcaccaggaacaggccgttgttttaactgtggagttgatggtcactgggcaagagactgtcaggctggtgactggaagaacaaatgctaccgttgtggcgaaaggggccatatagaaagaaattgccagaacagtccaaggaacctcaggcgtgagagaagctattcacggtctctatccccacgccgaggacggggccgcagccggagctacagcagaagccggagctatagccgatccagatccccgtctggatctcctaggggtggacgccgagaccgtgatgagaggagatcaaggagtcttatctacagcaggagcgcaagccctaggcgttctgtgtcacctgtaaaggaaaaagagcgcaaccgcacacc

SEQ ID NO: 5255 - DNA, 1396 bp, Zea mays
  Clone ID: TF_ZmC1373_11
cttctcctccgcgccgccacagccgggcgcgcctctcgatcgagatccaggagatatgcctcgttatgatgatcgccatgggaatacacgcttgtatgttggaagattggcccctcgcacccgttcccgcgacctagaatatcttttcagcaaatatggaaggttttcggttttttacccaaccatggaggtgtggtggaagggtgcccttgatggaattggtggccattgttccaatgtttgtggaggactttggtgaagggcgcccttggtgtaatcttattgactgttgtagatgatgaagttgcaagttaatgtatttgagtacttcgactcacgtcagcttattgtttgtggcaaccatttccgcagaattcgagaagtggagttgaagcgcgactatgcattcattgaattcagtgacccccgtgatgctgatgatgcacagtacaacctagatggcagggaagtcgatggaagccgcattattgttgaatttgctaaaggggttcctcgtggttctggtggttcacgtgattacaacggaagaggacctccaccaggaacaggccgttgttttaactgtggagttgatggtcactgggcaagagactgtcaggctggtgactggaagaacaaatgctaccgttgtggcgaaaggggccatatagaaagaaattgccagaacagtccaaggaacctcaggcgtgagagaagctattcacggtctccatccccacgccgaggacggggccgcagccggagctacagcagaagccggagctatagccgatccagatccccgtctggatctcctaggggtgaacgccgagaccgtgatgagaggagatcaaggagtcttagctacagcaggagcgcaagccctaggcgttctgtgtcacctgcaaaggaaaaggagcgcagccgcacacctgatggcagtaggagccccagcccaagggacaaggtgagcccaccaccaaaggataatggtgcacacaatggctcggaccgtgaagacagccctgggggcagggagatgagcaagaggagtcggagcccgtctgatggctaccgtagccctgtgggcaatgggcgcagcccgagcccgagggatgaccgtagcccaagcccaaaggtcaacaatggtgacgacccaagccccaagggcaacaatggtgacgacgagcaccgcggttcaccaagaggaagtcagtccccctgaactgaaaaactccccgtgcaatttggggagcagtgtgcctgatttgagaaaacaaactgtattttgccatttctcagacttgtgatctttttgagcaagaaaactcggtgtaagaatttgttgccctcgggtgtaagacagatttgtggtatttgagcttttcatcctgcc

SEQ ID NO: 5256 - DNA, 1126 bp, Zea mays
  Clone ID: TF_ZmC1373_12
cccaccccgcatcgtcggaaccctccaagtccaaaccctctccccgccgcatcgccgccgccggaagcgcctccctcgatccagatccaggagatatgcctcgcaatgatgatcgctatgggaatacacgcttgtatgttggaagattgtctccccgcacccgttctcgtgacctagaataccttttcagcaaatatgggaggtttttcggttttttacacaaccatggaggtgtggtggaagggtgcccttgatggaattggtggccatagttccaatgtttgtggaggactttggtgaagggcgcccttggtgtaatcttattgactgttgtagatgatgaagttgcaagttaatgtatttgagtacttcgactcacgtcagcttattgtttgtggcaaccatttccgcagaattcgagaagtggagttgaagcgtgactatgcattcattgaattcagtgacccccgtgatgctgatgatgcacagtacaacctagatggcagggacgtcgatggaagccgcattattgttgaatttgctaaaggggttcctcgtggttctggtggttcacgtgattacaacggaagaggacctccaccaggaacaggccgttgttttaactgtggagttgatggtcactgggcaagagactgtcaggctggtgactggaagaacaaatgctaccgttgtggcgaaaggggccatatagaaagaaattgccagaacagtccaaggaacctcaggcgtgagagaagctattcacggtctccatcaaggagtcttagctacagcaggagcgcaagccctaggcgttctgtgtcacctgtaaaggaaaaggagcgcagccgcacacctgatggcagtaggagccccagcccaagggacaaggtgagcccaccaccaaaggataatggtgcccacaatggctcggaccgtgaagacagccctgggggcagggagatgagcaagaggagtcggagctcgtctgatggctaccgtagccctgtgggcaatgggcgcagcccgagccgtagcccaagccccaaggtcaacaatggtgatgacccaagccccagggcaacaatggtgacgacccaagccccaagggcaacaatggtgatga

SEQ ID NO: 5257 - DNA, 1314 bp, Zea mays
  Clone ID: TF_ZmC1373_18
accgcattatcggacgccctccaagtccaaaccctctccccgccgcatcgccgccgccggaagcgcctccctcgatccagatccaggagatatgcctcgctatgatgatcgctctgggaatacacgcttgtatgttggaagattgtctccccgcacccgttctcgtgacctagaataccttttcagcaaatatggaagaattcgagaagtggagttgaagcgtgactatgcattcattgaattcagtgacccccgtgatgctgatgatgcacagtacaacctagatggcagggaagtcgatggaagccgcattattgttgaatttgctaaaggggttcctcgtggttctggtggttcacgtgaatacaacggaagaggacctccaccaggaacaggccgttgttttaactgtggagttgatggtcactgggcaagagactgtcaggctggtgactggaagaacaaatgctaccgttgtggcgaaaggggccatatagaaagaaattgccagaacagtccaaggaacctcaggcgtgagagaagctattcacggtctccatccccacgccgaggacggggccgcagccggagctacagcagaagccggagctatagccgatccagatccccgactggatctcctaggggtggacgccgagaccgtgatgagaggagatcaaggagtcttagctacagcaggagcgcaagccctaggcgttctgtgtcacctgcaaaggaaaaggagcgcagccgcacacctgatggcagtaggagccccagcccaagggacaaggtgagcccaccaccaaaggataatggtgcccacaatggctcggaccgtgaagacagccctgggggcagggagatgagcaagaggagtcggagcccgtctgatggctaccgtagccctgtgggcaatgggcgcagcccgagccgtagcccaagccccaaggtcaacaatggtgatgacccaagccccaagggcaacaatggtgacgacccaagccccaagggcaacaatggtgatgacgagcaccgcggttcaccaagaggaagtcagtccccctgaactgaaaaactccccgtgcaatttggggagcagtgtgcctgatttgagaaaacaaactgtattttgccatttctcagacttgtgatctttttgagcaagaaaactcggtgtaagaatttgttgccctcgggtgtaagacagatttgtggtatttgagcttttcatcctgccaaaagctgaatattcattcaattgccaagtttctcgagtttaagaaaaaaaaaaaaaaaaaaaaaaagcttgtc

SEQ ID NO: 5258 - DNA, 2290 bp, Zea mays
  Clone ID: TF_ZmC1373_25
tcctttccccaccccgcatcgtcggacaccctccaaagtccaaaccctctccccgccgcatcgccgccgccggaagcgcctccctcgatccagatccaggagatatgcctcgcaatgatgatcgctatgggaatacacgcttgtatgttggaagattgtctccccgcacccgttctcgtgacctagaataccttttcagcaaatatgggaggtaagcatcacattatatgcacatagaactattctgaaactcagagtgtgctggcgtgctgctttttgttatgtggtcggacaccagttatgctctactacctccgtttttatatatttgacgccatacaattccacttttacatgccgacgtcaaataaaaatgaacggagggagtagtatatatcatgagcacgtgatgttaactctgcatggttaaattttgtggtacacaactacacatcaatccagatataaaatacaatagcaagctaggggctttcctatcgtgttcaaaaaaaactcgacctgtgggggtaagaccgtctgtacaatattatattaagaagaccttctcacacaggtcaagaagaccttccacgcaggtcgagaaaacctctaaactcctgccccaccacccccacccatacacaatggcaccgtagcccaagtgagaacgaccgggccaggcctgtgctttggcttgggacaggcgaggggatgttttaacttttaaccacagcctgaaaattcgctcccacggggagtcaaacctagaacctgacaagtgctactcagaccacctaaccaactcgcctgttcataataggtagtttatgaaggtgttgggttttgtgatgcttgacatcattttgaggtttttgtggatggggtcatacaagtcttctgattttattggtgtatgttctgttacatcactaagcacaaaataaatgtttgacctgggcctatttgacttgaatgatcttgttgaaggtttttcggttttttacacaaccatggaggtgtggtggaagggtgcccttgatggaattggtggccatagttccaatgtttgtggaggactttggtgaagggcgcccttggtgtaatcttattgactgttgtagatgatgaagttgcaagttaatgtatttgagtacttcgactcacgtcagcttattgtttgtggcaaccatttccgcagaattcgagaagtggagttgaagcgtgactatgcattcattgaattcagtgacccccgtgatgctgatgatgcacagtacaacctagatggcagggacgtcgatggaagccgcattattgttgaatttgctaaaggggttcctcgtggttctggtggttcacgtgattacaacggaagaggacctccaccaggaacaggccgttgttttaactgtggagttgatggtcactgggcaagagactgtcaggctggtgactggaagaacaaatgctaccgttgtggcgaaaggggccatatagaaagaaattgccagaacagtccaaggaacctcaggcgtgagagaagctattcacggtctccatccccacgccgaggacggggccgcagccggagctacagcagaagccggagctatagccgatccagatccccgtctggatctcctaggggtggacgccgagaccgtgatgagaggagatcaaggagtcttagctacagcaggagcgcaagccctaggcgttctgtgtcacctgtaaaggaaaaggagcgcagccgcacacctgatggcagtaggagccccagcccaagggacaaggtgagcccaccaccaaaggataatggtgcccacaatggctcggaccgtgaagacagccctgggggcagggagatgagcaagaggagtcggagcccgtctgatggctaccgtagccctgtgggcaatgggcgcagcccgagccgtagcccaagccccaaggtcaacaatggtgatgacccaagccccaagggcaacaatggtgacgacccaagccccaagggcaacaatggtgatgacgagcaccgcggttcaccaagaggaagtcagtccccctgaactgaaaaactccccgtgcaatttggggagcagtgtgcctgatttgagaaaacaaactgtattttgccatttctcagacttgtgatctttttgagcaagaaaactcggtgtaagaatttgttgccctcgggtgtaagacagatttgtggtatttgagcttttcatcctgccaaaagctgaatattcattcaattgccaaaaaaaaaaaaaaaaaagcggcc

SEQ ID NO: 5259 - DNA, 1569 bp, Zea mays
  Clone ID: TF_ZmC1373_26
gcacgagactggatagagatctgaccttatggaaatgggaaatgcctatgctttttcgactctgacttccccataacctggcgcttcgcccgtggtcaatggtacactggccaacggcactacggaaaaaggtctagttgatactagagaatccccgctccaatttcctacggcactctttcttcctgtgtgagtgcatacctactttccggatagtttcccacttcttaaccagcggcaggcttgcccgtcaccccgcatcgtcggacaccctccaaagtccaaaccctctccccgccgcatcgccgccgccggaagcgcctccctcgatccagatccaggagatatgcctcgcaatgatgatcgctatgggaatacacgcttgtatgttggaagattgtctccccgcacccgttctcgtgacctagaataccttttcagcaaatatgggagaattcgagaagtggagttgaagcgtgactatgcattcattgaattcagtgacccccgtgatgctgatgatgcacagtacaacctagatggcagggacgtcgatggaagccgcattattgttgaatttgctaaaggggttcctcgtggttctggtggttcacgtgattacaacggaagaggacctccaccaggaacaggccgttgttttaactgtggagttgatggtcactgggcaagagactgtcaggctggtgactggaagaacaaatgctaccgttgtggcgaaaggggccatatagaaagaaattgccagaacagtccaaggaacctcaggcgtgagagaagctattcacggtctccatccccacgccgaggacggggccgcagccggagctacagcagaagccggagctatagccgatccagatccccgtctggatctcctaggggtggacgccgagaccgtgatgagaggagatcaaggagtcttagctacagcaggagcgcaagccctaggcgttctgtgtcacctgtaaaggaaaaggagcgcagccgcacacctgatggcagtaggagccccagcccaagggacaaggtgagcccaccaccaaaggataatggtgcccacaatggctcggaccgtgaagacagccctgggggcagggagatgagcaagaggagtcggagctcgtctgatggctaccgtagccctgtgggcaatgggcgcagcccgagccgtagcccaagccccaaggtcaacaatggtgatgacccaagccccaagggcaacaatggtgacgacccaagccccaagggcaacaatggtgatgacgacgagcaccgcggttcaccaagaggaagtcagtccccctgaactgaaaaactccccgtgcaatttggggagcagtgtgcctgatttgagaaaacaaactgtattttgccatttctcagacttgtgatctttttgagcaagaaaactcggtgtaagaatttgttgccctcgggtgtaagacagatttgtggtatttgagcttttcatcctgccaaaagctgaatattcattcaattgccaagtaaaaaaaaaaaaaaaaaaaaaaaaaaaaaaaaaactcgtgc

SEQ ID NO: 5260 - DNA, 6024 bp, Zea mays
  Clone ID: TF_ZmC24260_1
atggctagtaacaacaatgtgcacattgggaagccaccgcactttgatggaaacaattatgattattggaaaataacaatgtcaatgcatcttcgagcaatggttgtaaaagtttggccaattattagggttggatttcttctgttgaaggaagatcaaccctccattagtgataatgttaatattcacacatcgaatcttggtatgaatgtcttttattatgctcttgatataaattagtgcaattgtatcctaaatctcacaaccgctccttatatttgggtaaaattattggaaattcatgaaggaacttcatttttgcagattgccaaactatatgtgtgaaaaggggggtttgagcattttattatgaaagaagaggagagtgtatccgatatgttcaatcggttgtatgagatagtaaaagaactcaaaggacttggtttttatgtaccggatgtggatttctcgggcaaattccttagatcctttccggagaaatatgagactattgtgacaatgctagtaaggagtgatctatctacaacttctccaaccgaagtattgggagaaattctcactcaagatatatttaagaagtcacaagccgatgctttaagtttggcaaagaaggtgaaaaatgaatctattgctctcaaagccaaggcctcaaaggcaattgaaaaagaagatagcaatgatgaagaaaatgaaagtgagagtgatggtgacatggctttatttgtaaggaaattcaataaattcatgaagatgaaaagaggtcaacctagaagaggtcaaacatctagaagaaatgctttcaatgatagaaaatgttttgagtgtggggaacccggtcacattgccatgaattgcccaagcaagaagaagaagggcaaagatgaaagtgacaagaagaaaaagaaatactataacaagaagaaagatggcaaagcctacttagttgaatgggactcggatgatagctcggatgatgatgatgatgacacctcatccaagcttaatgccggaattgccatcaaggaagctccctcactcttctcatcccccccttggcccctggccaaggggggtgcctaggtaaaaatcatcaccgatttaaatgatataaaagatgatgatgatatcgatgatgttgatgatgatggctattcatatgatgatcttgttagaatgttaggtgaggccgatgactacatgcacaaagaaaaagaaaaatttaagaccttgaaggaattgtataaaaacctccaagtgtcttttgaggagctcaagacctctcacaatgacctcaaagaaaattgtgagaagcttgcggatgctcaaaaatcatctattgtgcatgaagttgaggtggtcactaaggatgttggagtcacttgtgacttacttgatagtcttacaagtgaaccactacctactaactctatttgtgataaatgcaaaatttctctcaatgataacattgctcttgatgaatcaaaaattattgttgagaatgaagtgttagtggatagaataaatactctaactcatgacctagaaaaggcatatggtggtaagactaaattggatttcatattgggaagtcaacgatgctctcttaaccgtgaaggtcttggatatgttcccaagaaaggaaagaatgcttttgtaaagcaaaagacattgtttgtgaaagaatgtgacaaagtgtgtcacaagtgtcacaaaaagggacatgttaagaaaaattgtcccaagttcaaacatgtatcctccacttgttttgagcattgttatgttctttctcataatgcaaaaggtgttcatgctaaatttgttggtacttcaattgttggaaacaaaaagaaagctatttgggtgccaaagaccttggtcactaacatccaaggacccaagcaagtttgggtaaactacaaggcgggagggaatcattgggtgttggatagtggatgtactcaacacatgaccggggatatgaagatgtttacccaaatgagtgaggaagattgctcaaattatgatagtatcacatttggagataatcgtaaaggaaaggttaaaggtttgggtaaaattgctatctcaaatgatcattctatatcaaatgtgctattggttgagtatttgaattttaatttactttccgtagctcaattatgtgatttaggattttgttgcaatttcacggttgaagatgttattatctctagtgttgatggtagcaatcttaaatttaaaggttttagacatgaaaatctttatcttgttgatttctcatctaatgaggcaaagctcacaacttgcctattttcaaaagcttcactaggttggttatggcatagaagacttggtcatgttgggatgaagcaactcaatcggttaaccaagcatgacttagttcgaggcttaaaagatgtgaagtttgaaaagaacaaattgtgtagctcttgtcaagccgacaaatccaatgtgtttgaaacattcaagtcatttgctatattggctcaaaatcaatttgatttcgacatcaaaaaggttagaagtgataatgggtcagaattcaaaaatgcaagaattgatcaatattgtgatgacaagggtatcaaacatgaattctcttccaaatataccccggaacaaaatggtattgttgaaaggaagaatagaactcttattgacatggctaggtctatgttagcggaatatagtatatcggattcttattgggccgaggcaataaataccgcttgtcattcatcaaatagactatattgtcacaagctcttgaagaaaactccatatgaattgctcattggtagaaagccaaatatctcatattttagggtattcggttgcaaatgttatattttgagaaaggggagccgactttctaaatttgagaagaaatgtgatgagggttttcttcttggatattcatcaaatagtaaggcttatagagtcttcaacaaaactcatggtattattgaggaagcatatgatgttgaattcgatgaaacaaatgggtctcaagatgagagtgaaaatctcgatgatgttgggggaactcaattgatagatgcaatgaaaacaatggccattggtgaaataaaaccaaaggaagatgatgatgaaaatagcgtggttgtcattccttcatcctcaactataaatgaggaagatcaccaaggccaacaactcaatgaaaccatggatactcatgatcaaggtacttcaagaccttcggttcctcctaatgcttcaacaagcaattatcaaacggtatcaagaattcatcattccattgtgaaggatcacccggttgatcaaattgtgggtgatattagtaagggtgttcaaactcgctctcgtatagcttcattttgtgaacatttctcttttgtatcttgtatggaacctaaccgtgtagatgaagctctacttgatgttgattgggtgaatgcaatgcatgaagaattaaataacttcgctcgaaatgaagtttgggagcttgttgagagaccaaagaaccacaatgttattggtacaaaatgggtgtttcgcaataagcacaatgaagatggtgtggtagtaagaaacaaggcaagattagttgcacaaggatatactcaaattgaaggattggattttggggagacatttgctcccgtagcaagattagaagcaatccggattctacttgcttatgcttgtgcacacaatatcaagctctaccaaatggatgtaaagagtgccttcctaaatggtaagattagtgaactagtgtatgttgaacaacctcccggttttgaggaccccaaaagacctaaccatgtgttcaagctttctaaagctctctatgggcttaagcaagctccacgcgcttggtatgaaaggcttagggatttcttgctttccaaagacttcaaaattgggaaggttgacactactctattcactaaaagaattggcaaagatttatttgtttgtcaaatctacgttgatgatattatttttggatctactaatgaattattttgtgaggagttcggaaaaataatgtcaaaagaatttgaaatgtctatgataggagaattgagcttctttcttggccttcaaatcaaacaattgaaagatggaatttttataagtcaatcaaaatatttgaaggacatgctcaagaagtttggtttagaaaatgctaagcctatcaagactccaatggcaacaaatggtcatctagacttagatgaaggaggtactatggttgatcaaaaactttatcgttcaataattggtagtttgctttatattaccgcatctaggcccgatgttatgtttagtgtatgcatgtgtgctcgatttcaagcttctcctagagagattcacttgaaggccgctaaaagaattctgagatatttgaagtatactcccaatattggtctatgtggttttggtggtctccgcaagaaacttgcaggtcgctttaaatccaagcgccctcgtggcaatgatgatgactataccccaaccactgattcagaggcccaatcctcagctgggggcactgaatccatggatgctgaagattttcctcatgttcatcccgattatcccattgatatccaaggatggacttatccaaagcggagattttctatggctgagtattgctctagacggactgtgaaccagtacactctgccatctgatacaaatattcagtttttccacactcagctgcagtttgatgtcttttggggcaccctggtggataccaattttcataagcatcaggtgattgattggtccttcttgctaagtcaatctgtcatggagggtctgatccccaagtttgaaacatgtggactatatcagtttatgggacaacgcacagatttcaatgaaatggctgttaagcaattcctggctacctctgagattgatattgaagaagaatctatcacctggatgactggcttcaagcgctattctgcttcttttgctgactttgccgctgccaacagtctggactatggcaccatctctgctgggatggatctttatactgaagataattttgaggattttgtgcagttttatgagctagccaggctcggtatacccaggaggtttggagagacagcaggactcagacatcatcctgctgtcatcaacaagattgccagagtcaccattcttcccaagagtggtgataagagtaaaattcgagataagttctggaacataatccagcacatcatgaatggtgaagtcatgaacatagttcttttcatgatgaggcagcttaatgatttgaaaatggacaagaatcaaaatttggcatatgctccatacattatggctctcatcaaatccaagacaagatttgagggcccttgcgagattgttcacaccccattcaggccttttaagaatgagatagggtttctcaccaggccactcactcccttcccagatgatgaggaagaccctggctatgagggtggagcagctcctaatgttgagggacagcagatgcctcctcctccacctcctcctcagcctcagcactattgggagcctgctccaggatactttgatccttattttcacaatatgcagcaagagctggagactcatattgatactcgctttgatggcctgatgtcacatgtggatcaccgcctcgatgacatgcagtctcgctttgacagtaactgggatgcactcaactctgaattttctgagtttcgtgatcaaattcacactaatgtcactgatcccatcatgtccaggctgaataatatgcaacagagttttcaagataacatgggtgctctctccagtcagtttgataatctttctacaaatgacaacatgcatgatataagtcagaggcagcagcagctccagcaggattttggccagttctcctccctgtttgacaccttcagcactcattactacaacatgcatcctccgccgagtgatcagtga

SEQ ID NO: 5261 - DNA, 4260 bp, Zea mays
  Clone ID: TF_ZM4840.C3.o3.fg
atggctagtaacaacaatgtgcacattgggaagccaccgcactttgatggaaacaattatgattattggaaaataagaatgtcaatgcatcttagagcaatgggtggaacaatttggccaattgttagagatggatttgttgtattaaaggaagatgaaccatctgttagtgataatgagaatatcctcacaaatgatcaagccatgaatgtcttttatgatgctcttgatataaatgagttcaatcgtatcaagaatctcacaaccgctcatgagatttgggtaaaactaatggaaattcgtgaaggaactacaattgtgaagagtgccaaactatatgtgtgcaaagggaagtttgagcaatttattatgaaagaagatgagagtgtatccgatatgttcgatcgattgaatgagattgtaaatgaactcaaaggacttggttttaatgtaccggatgtggatttcacacacaagttccttagatcacttccggagaaatatgagactattgtgacaatgctagtaaggagtgatctatctacaacctctccaaccgaagtattgggagaaattctcactcaagatatatttaagaagtcacaagccgatgctttaagtttggcaaagaaggtgaaaaatgaatctattgctctcaaagccaaggcctcaaaggcaattgaaaaggaagatagcaatgatgaagaaaatgaaagtgagagtgatggtgacatggctttatttgtaaggaaattcaataaattcatgaagatgaaaagaggtcaacctagaagaggtcaaacatctagaagaaatgctttcaatgatagaaaatgttttgagtgtggggaacccggtcacattgccatgaattgtccaagcaagaagaagaagggcaaagatgaaagtgacaagaagaaaaagaaatactataacaagaagaaagatggcaaagcctacttagttgaatgggactcggatgatagctcggatgatgatgatgatgacacctcatccaagcttaatgccggaattgccatcaaggaagctccctcactcttctcatccccccattgcctcatggcaaagggagatgctaaggtaaaaatcatcaccgatttaaatgatataaatgatgatgatgatatcgatgatgttgatgatgatggctattcatatgatgatcttgttagaatgttaagtgaggccgatgactacatgcacaaagaaaaagaaaaatttaaggccttgaaggaattgtataaaaacctccaagtgtcttttgaggagctcaagacctctcacaatgacctcaaagaaaattgtgagaagcttgcggatgctcaaaaatcatctattgtgcatgaagttgaggtggtcactaaggatgttggagtcacttgtgacttacttgatagtcttacaagtgaaccactacctactaactctatttgtgataaatgcaaaatttctctcaatgataatattgctcttgatgaatcaaaaattattgttgagaatgaagtgttagtggatagaataaatactctaactcatgacctagaaaaggcatatggtggtaagaagaaattggatttcatattgggaagtcaacgatgctctcttaaccgtgaaggtcttggatatgttcccaagaaaggaaagaatgcttttgtaaagcaaaagacattgtttgtgaaagaatgtgacaaagtgtgtcacaagtgtcacaaaaagggacatgttaagaaaaattgtcccaagttcaaacatgtatcctccacttgttttgagcattgttatgttctttctcataatgcaaaaggtgttcatgctaaatttgttggtacttcaattgttggaaacaaaaagaaagctatttgggtgccaaagaccttggtcactaacatccaaggacccaagcaagtttgggtaaactacaaggcgggagggaatcattgggtgttggatagtggatgtactcaacacatgaccggggatatgaagatgtttacccaaatgagtgaggaagattgctcaaattatgatagtatcacatttggagataatcgtaaaggaaaggttaaagttgaagatgttattatctctagtgttgatggtagcaatcttaaatttaaaggttttagacatgaaaatctttatcttgttgatttctcatctaatgaggcaaagctcacaacttgcttattttcaaaagcttcactaggttggttatggcatagaagacttggtcatgttgggatgaagcaactcaatcggctaaccaagcatgacttagttcgaggcttaaaagatgtgaagtttgaaaagaacaaattgtgtagctcttgtcaagccgacaaatccaatgtgtttgaaacattcaagtcatttgctatattggctcaaaatcaatttgactttgacatcaaaaaggttagaagtgataatgggtcggaattcaaaaatgcaagaattgatcaatattgtgatgacaagggtatcaaacatgaattctcttccaaatataccccggaacaaaacggtattgttgaaagaaagaatagaactcttattgatatggcaaggtctatgttagcggaatataatatatcagattcttattgggccgaggcaataaataccgcttgtcattcatcaaatagactatattgtcacaagctcttgaagaaaactccatatgaattgctcattggtagaaagccaaatatctcatattttagggtattcggttgcaaatgttatattttgagaaagggaagccggctttctaaatttgagaagaaatgtgatgagggttttcttcttggatattcatcaaatagtaaggcttatagagtcttcaacaaaactcatggtattattgaggaagcatatgatgttgaattcgatgaaacgaatgggtctcaagatgagaatgataacctcgatgatgttgggggaactcaattgataaatgcaatgaaaataatggccattggtgaaataaaaccaaaggaagaagatgatgaagatagtgtggttgtcattccttcatcctcaactataaatgagaaagatcaccaaagccaacaactcgatgaaaccatggatactcatgatcaaggtacttcaagacctacggttccttctaatgcttcaacaagcaactatcaaacggtatcaagaattcatcattccattgtgaaggatcacccggttgatcaaattgtgggtgatattagtaagggtgttcaaactcgctctcgcatagcttcattttgtgaacatttctcttttgtatcttgtatggaacctaaccgtgtagatgaagctctacttgatgttgattgggtgaatgcaatgcatgaagaattaaataacttcgctcgaaatgaagtttgggagcttgttgagagaccaaagaaccacaatgttattggtacaaaatgggtgtttcgcaacaagcacaatgaagatggtgtggtagtaagaaacaaggcaagattagttgcacaaggatatactcaaattgaaggattggattttggggagacatttgctcccgtagcaagattagaagcaatccggattctacttgcttatgcttgtgcacacaatatcaagctctaccaaatggatgtaaagagtgcctttctaaatggtaagattagtgaactagtgtatgttgaacaacctcccggttttgaggaccccaaaagacctaaccatgtgttcaagctttctaaagctctctatgggcttaagcaagctccacgcgcttggtatgaaaggcttagggatttcttgctttccaaagacttcaaaattgggaaggttgacactactctattcactaaaagaattggcaaagatttatttgtttgtcaaatctacgttgatgatatcatttttggatctactaatgaattattttgtgaggagttcggaaaaatgatgtcaaaggaatttgaaatgtctatgataggagaattgagcttctttcttggccttcaaatcaaacaattgaaagatggaatttttataagtcaatcaaaatatttgaaggacatgctcaagaagtttggtttagaaaatgctaagcctatcaagactccaatggcaacaaatggtcatctagacttagatgaaggaggtactatagttgatcaaaaactttatcgttcaataattggtagtttgctttatattaccgcatctaggcccgatgttatgtttagtgtatgcatgtgtgcttga

SEQ ID NO: 5262 - DNA, 1776 bp, Zea mays
  Clone ID: TF_ZM4351.C1.o2.fg
atgtcgtcacaagaggtaactgtagaacttcttttaggcgatggctctaattacaaatcttggtctgtctctatttataatgctttcatgagtgttgattctgatttgagacagatctttagtagaagtatttttccatctgatattagtaaaaatccctctaatgatgaactaagatgtttttctctcaatcaccgtgcttgcagcatcttagttgattctctttctagaggtgcttattttgccatcatgagtagtgataatgatttaattgttgatgctcatgatttatggaatagaattaaagtaaaatattgtgtggcaaattgtactacttctactccctatattgcttgtgatactaacctttcaaagggagaagatcaagaacgatgggcacccaacgatgaatccacctcgtcgacaggtttggtctccactaataataagtgttttattgctaacaatgatggtggagacaaaagccatgatgaggaggaatatgaggatgatagcgaggatgaatcttcatcacctcaaggtacattttcccgtttggcttccactgacattaatgacagggaaaatgagaccgatgatgtggaagaagaggaaattcgccgtttctacaaccatctcaacaaagcagacaaagctctcttggttaagttgttgagaagaaacaaggaacaaggcgagacgcttctcaggctagaggaaacactcatcaaaaccaacaacagcctagagaagatgaccaaagaacatgaggagctaaagtactctcatgggaatttggtccaaaggtatgaatatgttttaattgagcaaagaaatagtcatgatgcattatctaatattgctcaacttaaaacggaaaattctatgcttaagagtcaagtagaaacaatggacttagaaaaacgtgctctagaaagccaatcattgattgagcaacaagttttagggtcacaaaagaaattctgtgggaataagaaacaacgacaactgaggagaagacactttgctcaactctctcaagatatccacgggcgcgtggtgaagaagcttgagaaaggaaaaactgcagcaagtgtcaagctcaataagaaaagtgttcctaaagatggagaaatcaacatgagcttggaaaaaggtaaagattcaattaatcatgttgtttgcactgatcatctctccatgtcattcaagcacaaaaagggaagagggaaaaggaggtgcttcaaatgcaaggagataggccacctcatcgcgtcttgtccgtacaaaaacaaggatgaagggacaataagttgttttggatgcaacaataaggaccacacgatcacttcatgtccggtcatgaagaatcaaggatgtgcatcctccaaggtgaccctcaccaaggaaagtgacacacagcaagcgtcatgtcaggttgagcgacgcttctgctacaagtgtggtgagcagggtcatatatccaagtctctaggtggaaaagagaagatgtgcaagaaatggagcaatcaggacttgggtacctctcatcatggtttgattcttgacacaatgcattccaaaattgctaagggcgtagctcggagacaactgatcaagccaaggacggaggcaagaagagcttcgaggtaccaagtgcacgggagaaggtcaaggtggctgaggaacccaaagccaaaggtgaagaagaaggcttgcaaagtcaagggtgatcgagttgagaacagcttcggctcatcaaggatcactacataa

SEQ ID NO: 5263 - DNA, 891 bp, Zea mays
  Clone ID: TF_ZmC18109_7
tcaattattgcttaggtcatgcttggcagatttcttctctattcggtctagacgcttcttggggcattcgcgaataagatgtccttcgtttttgcagtagtagcaagcacctcttgctttgagttctttgcgagtcaactttgcttgaccaacagggggtgagggttgactgggtgtctgtatctcatataactgggtctgacttgattcttctgtttgggtatccaagtgtttcggggcttttgcttgtggttgagatgaactaatcatgtatccaaacatttttctattccttttgttgttcttcgttccattcatcgaatatctcggtgactcatttttctcgttcatagtcattaaggtaggaatattcttgttggcatcatttacttcatttccattggggttcatcatagttggacgtatgtagtttactaacatttttccttcgggtgcattgatagtcttccttgatctcaagggacacttaaagataccatactttgttgcaaactgggcactgataaaagaatgtgtcgtacgaggatcatacaacacggtggcgatagttgtgtgaatgactagtgttccaaaaattactgcatcatcatatggaatggttcttgtcactgcataacttatctttcttgtggtctctttctgttgtttattctttgttgatgcatgggtttgagggtgttgtcttttcttttggaccttattgatctccacatccttcttaggacaaccattaacaagatggccggtatcaccacatccaaagcaagcacgacctgatggtttatatggtggagttgtctttacgttgttggtagaagtttctgtgcatttttgttcatattccatgtctgatgactgagataacttcat

SEQ ID NO: 5264 - DNA, 7497 bp, Zea mays
  Clone ID: TF_ZM3646.C1.o1.fg
atggatcctaaggggaagggaatcgtgatcaacgataaggagaaggagtccttcgtcaacgagcccaaagatgacaagcctaccgactccggctcgggccatagacggaaggaagggaagaagaagaagacaaggcgcatcaaggagatcgtctactacgacgacagcgacggatcttcctcttcccaaaaggacgacgacaacgactacaggaagacgattcataaaaatgcacaagctactactgtgttgctagcctctttgtgcagggacgagtacaataagttggtggagggcgagcttggaagatttgcgatgataaggggcgaggagccaacccaaacatacaaccggctcaagacccttatcaacaaaataaggagctatggaagcacacgatggacggaccatgacgtcgtccgactattactaaggtcctttaccattcttgatcctcatttggtgaataatattcgtgagaatcccaggtacaccaaaatgtcgcccgaagaagttcttgggaagttcgtaagcgggcgaatgatgatcaaggaggcaagatacgtggacgacgcgttgaacggtcctattcatgagcctcaacccattgctctcaaggcaacgaggagcaaggaggcgctaccaagcaaggtggcgcaagttgaggcggccgggctaaataatgaggagatggccctcatcattaagcgcttcaagacggcgcttaaaggtcgcaagggacagccaagcaagaccaaaacaaaggagaagcgctcgtgcttcaaatgtggtaagattggtcatttcattgctaactgtcccgataatgaaagtgaccaggaaaaaggggacaaaagggagaagaagaagcattacaagaaggccaagggcgaagcacatatcggaaaggagtgggattcggattgctcctcctccgactccgacaatgaaggacttgccgccaccgccttcaacaaatcaaccctcttccccaacgagcgtcacacatgccttatggcaagagagaagaaggtgagtactcgagacaccacttatgtctcttctagtgatgatgaatctagcgatgaggaaatagattactctagcttgttcaagggattggatagaaataagattgataaaatcaatgaattgattgatgccttgaatgagaaggatagactcttagagaaacaagaggatttattgtatgaagaacatgataaatttatagaagcacaaaaatcctatgctttagaagttaaaagaaatgaaatgctttcttttgaactatctacttgtcatgaaaccatttctactttaaaaggtgtcaacaatgatttaaatgctaaattagaagtagcaaataaatccaattcttgtgtagaacatgttgtaatttgtactaggtgtaaagattttgacattgatgcttgtagtgaacacctagtttcaatttccaagcttaatgatgaattggctagtcttaatgctcaacttaagactagcaagaatgatttggataaactaaaatttgcaagggatgcctacacgatcggtagacacccctcaattaaggatggacttggcttcaagagagaagccaagaacttaacaagccataaggctcccattcccgccaaggagaaagggaaggcccctatggctagtagtgtgcaaaagaaccatgcgtttatgtaccatgataagagacaaactagaaatgcttataggagttacaatgcttatgatgattttgattctcatgacatgtttgtttctagttcttcccatatgcatggtagaaatatgtctaggagaaatgctattcatcattgtgacaccccagtgtcacctagggtttctcttaaacagccaaaccaaaaaccatcattttatgtgaaccaaaattgtaatcttgccgacggagagtacgtgctcatccccgagcaaggacctgtccaagaggaggaccaggagcaggctccagaggctgctattgaggatctccccgcagccccagcaattgaaggcaagccccgctatggtgggtacaagtgtggtcactgcacggcggcagccggggtcagtggagcattgtatgccaagccgatgaattcacccacccccgccagtggaggagactctcgtttcagttctgacttcctttctcgcgatggctttccctccatcttgtgggaagtgcttaactccgccggttaccctacgccccctttgtacacggtgcagttgtatgaggagcatcgggtacctcgttgtcaggtctggctaactttggaggctcatccccttcagccgggttggcgttctcttgactctgagacgataggactcatgacggacgacaccgttgaggcagcagccatgaagactctgacgactttctgtggctaccatcccctggagatggtgatgcaccccttgggactcttccctgctgagaagaaggatgatcccatgtggtgcaaccgcgtgagccatgtgaaggatgtgtgggcaatgtatcctgacttggttgggagggtcactgttcagtgcatgagtgcgctgtaccgccttcaggcccttcagagcgatgctatgacacttcttgctaacaccgctcaggctgccaagctcactctcgacaatcgggaagattttgtggtcgacctatccacagagttggtggaaaaggatctgcaggtggagaggctgagccagcgtattaccaccctggagcagcaagtggagatccgagataacactattgatgtcttggagaaccagcttcacgacgtgcagagggaacttgaggaagccaatgaccacttggacatgcaccaccaggagatggaggccaatgaagcaggaagcgagggagaagaggctcccgaggagctaggaccagcccctggtgccaatgggactacctccgtgatacctccttcacccgagtttctgagcacgcagccgcccttgttcaccaaggcagaggatccgttggacgccgacgtgtggcttcgcgtcgtcgagtccaagtttcccctcctcacgggagactgccctgatgaggccaaggctcgcttcgccgcacagcagcttcgcggccctgctcggacttggtgggaccacttccgtgctatgctccccgctgatcatgaggtgtcttgggaggaattcaagactgccttcagaggacaccacattccagctagcattcttgatcggaagttgaacgaattcctggccctcaatcaaggaacccgcacggtactgcagtatgcgcaagccttcaacgacttatgccagtatgcagggtatcatgctgattccgatgaaaagaagagggatcgcttccgcaggggtctcaataccaagctgcgggaacgactcaacactgtccgggccgatagcttcaatgagttggtcaacatggccatctctcaggaggattgcattgttgctcaccgggcagagaagaagaggaaggcaccaatggcagcaccatccgctcaggctcagaggttccggattgtttctcacaatcagagcaggggttttcagcagcaggcaggcagatgggtgatcaggccacctcagcagcagcagcagccgacacccaaccgctatccagctcccgccccaagaaacaatcagcctccgcagcagcagcagttccgccagggcaatgggaacaagtgtttcacttgtggcaatatgggccactatgccaagaattgtcccaggaaccagcagaggcagatgccagcaccaaatcaagacaagggaagaaagcagaaggtgcaagtcaggcaagggaagctcaacttcactgctctagaggaagtgccagaaggagctcctatcatgaccggtaccttttcagtttataatcaacctgctttaattctgtttgattctggtgcatctcatagtttcattagccaaaagttcagtgctaattgcaaactgccattctctcactcgaaagggtcattcatgatagtcacacctgggggtaaaattgcaactaatcaattaaaccaaagtgtgcctattcgactgggaagccacattatcaaaaccactcttcttgtattgggattggaaaatgtggacattattctaggagcaaattggatgaccttgcaccaagttgtgcttgatgtagccagtcgtaccgtggaagttaattctcctttctgcgggaatttcactttgattctgcctagtcagggttcttctcagtcatgtgctttctctatgacggagttacccctgaagaagatcccagtggtctgtgagtatgcagatgtctttcctgatgaattgccgggaatgccaccggaccgggatattgaattcgccatcgagttgcaaccgggaacggccccaatttccaagaggccctaccgaatgccacccgctgagttggcagagttgaaaaagcagttgctggataagggatttattcgcccaagcacttcgccttggtgctgtccagcactatttgtaaagaagaaggatgaaagcttgaggctgtgtatagattaccgccctcttaatgcggtaactatcaaaaacaagtatcctttgcctcgtattgatgttctctttgaccagttggtcggggccaaggtgttttccaagatagaccttcgctctggctaccatcagatcaaaatacgagcaagtgatattccgaagacggcattctcaaccagatatgggctatatgaattcttggtgatgtcattcgggctgacaaatgcaccagcatatttcatgtatctgatgaattctgtttttatgccggaattggacaagttcgtggtggttttcatcgatgatatcctggtgtactcaaagaacgaagaagaacatgccgggcatttgcatgtagtgcttcaacgtctacgtgagcaccacctttatgccaagttatccaagtgtgatttttggctaaaggaaatcaaattcttgggtcacactatctctcaggatggaatagctgttgatcctgataaagtgcaagaggtgatgaactggaggccaccaacgactgttcgccagattcagagttttctgggattggctggttattaccgaagatttattccggacttctctcgaattgcgaaacctattactgagttgctgaagaaagaggtcaagtttgtgtggagtcagaagtgcgaagatgccttccatgcattaaggcagcatctgaccacagcaccagttttggcgcaacccgacagcagcaagccttttgatgtgtattgcgatgcctctggcaccgggctaggttgtgtcttgatgcaagacaaccgagtcattgcttatgcctcaagagcactcaggcctcatgagcaaaattatcccactcatgaccttgagttagcagcagtggttcatgcattgaagatgtggaggcactatctaatgggaacccactgcaacatcttcactgatcataagagccttaagtacatttttactcaggctgatctcaacatgaggcagagaagatggctagagctgatcaaggattatgacctggaggtacattatcacccagggaaagctaatgtggtagcagatgccttgagtcggaagttgcaatgcaactgtattctgatggattctcgtgtaaacaccttgtgtgatgagttgagcaagatgcaaattgaagtgattccttctggttctttgtctcacatttctgttgagccaactttgcaagaccagattatcatggcccagctcagtgacaagggagtgcagattatcaagaagaatctccatcagaaggtcgagaagtataattgtttccgccaggatgaaaaaggtgtgttatggttcaaaaacagattggtaattcctaaggatcaggatctgaagaagaaaattttggatgaggctcatctctccaaattctctatgcatccgggaagcaccaagatgtaccatgatttgaagcttttgtactggtggaccagaatgaagagggagatagcccagtatgtatcagagtgtgacacctgtcagaggataaaggcaagccacttgaagtccgctggagctttgcaaccactgtccgtaccttcgtggaagtgggacgacatcagcatggatttcattgtgggtctacccaacacctctcgtcatcatgattcaatttgggttattgtggaccgattgacgaaagtggcacattttcttcctgtgcacaccactgataaggctcagaagtatgcagaattgtatatcgaccggatcgtgtgtttgcatggattacctcggaccattgtttctgaccgaggagcccaatttgttgccagattttgggaacaattgcaagagtctttgggaaccaagctaatcaggagttcagcttaccacccacagactgatggtcagacggaaagggtaaaccagattctggaagatatgctgagagcttgtgcgatcgattgtggcaagaactgggataagcacctctccttggcagagtttgcttataacaatagttatcaatccagcctaaagatggcaccttttgaagctctctatggaagaaggtgcagaacaccactcaattggtctcagcctggtgaaagagaagtttttggacctggtttggtgactgaagccgaaaggaaggtcaagctaatcaggaagaatctagaagctgctcaggccaggcagaagagctatcatgatagaagaaggaaacctctccagttcgaggtgggaagttttgtatacctcaaggtatcacccaccaagggagtgcagaggtttgggatcaaaggcaagctagcccctcgttacattggaccttatgagatcatcgaagcatgtggacccgtggcatacaagctgaagttaccttcaagaatgtctgccattcacaatgtatttcatgtatctcagcttaagaagtgtgttcgattgccgactgagatcatagcagagccagaattggagatagagccagatctctcgtaccaagagtacccctccaagattctggattgcaaggaaagatcaactcgggctaaatcaatcaagatgtttaaggtccagtggagtaatcactcagaggaggaagctacttgggaaaccgaggaattcctgagatccaacttccccgattgcctacctaaggaagctgttgcaaagagaatgacattcgaagagcagttttgccctaataataacaatccccacccttttcctatcagtctcacccttcgcttcaccccgaaaggactctggcccgaatctcgggacgagattcctttaaggggggaaggctgtgacaccccagtgtcacctagggtttctcttaaacagccaaaccaaaaaccatcattttatgtgaaccaaagtaagcatgagcatcaaaacaatttaagtgagaaagaattcaccaagtatatacttaaaagtgtcatgatcaaaacaattgagacttttgaaagataa

SEQ ID NO: 5265 - DNA, 732 bp, Zea mays
  unsure (1)..(732): unsure at all n locations
  Clone ID: TF_LIB4826-025-R2-N1-C6
cctcgaggnnccggccgggaaaaaaaaaaaaaaaaaaaaaaanagtccctccccgctcaccaccagtcaccaacgcccaccgggcctcgtccctcgtggcggcaactgggcggccgtcgctgccgccctacgccaggtgccgaggcgaccttcaggcccttggctggcgacgagcaccagtgcaccaccaatactctgagcctggctgccgaaagtgccttttggggttcttgtaatcttgttacattaggattcatttttgatgacttcatcaagaagcaagagcaagagcagaagtaggagccgcagtcgcagcaggagcaggagccgcagtcctcggcgaagagataggttgcgcagtgaacgtgcaccccaccgcagtcgtagccggagccgcagcccataccgtcgcagagaacgacgtggtcacagggattttgcatgcaagaactgccggagacctgggcacttcgctaaggagtgtccatctgcgcctatgtgcaataactgtaaccttccaggccactttgcagcagaatgcaccttacaaactgtttgctggaactgcaaagagtctgggcacattgccagtgagtgcaagaacgaggccctatgccacgcctgcaacaagacaggtcacttggcacgtgactgccctacttcaggtgctaacgtcaagctatgcaacaaatgctttaaatcagggcacatcgccgntgactgcaccaacga

SEQ ID NO: 5266 - DNA, 2701 bp, Zea mays
  Clone ID: TF_ZmC26852_1
atggctcggagaagatcccaaaagaacaagaagactcctccagcagaacgcaactcagaaggaggtaactcttgagattttatttgatgattgttctaactatgattcatggtctactagtgtgctaaatgcctttagaaccatacatcctcaattagaacaaattattgacaagagtatcttcccctctagttttaatggagaaattgtttccgaggaggatcaaagatgttttcgcttaaactacctagcttttgacatcttaagcaattctcttagcaaagaagattatcgtgccttcatatcaaactatgacgaatccgtccatgatgcgcacgatatttggactagaattagaagcaaatttgatgagtccaaacatgatagttcattttgtgtctctgcttcctttggtatttgtgatactaacccttgcaaggaagaagaagagaatgaacgatggagaccaaacgatgaatccacctctccaaaaggtttgtcttcccatttcgattcccacatgtgttgtgtggctaatgaaaatgatagcggaagcacaaatgaggatgaggaggaagaaagtagctttgtgcatctctacgctcgcctaagccaagaagataaggcggtcatgctcaaacttctagaaagagcgagagagcaaagcgaagctcgtcaaaggctagaggatattctctccatgaagatgctacactttgacgagttgactaaagaacatgaggagctaaagtgctctcatgttgatttggtccaaaggtatgaaactatttcaattgagcaagataacgcttcacattgtatcgctcaattagtaaataggaataccctgctcaaggaccaagtagaaaagctaaaggttgaaaatctagcttttcaagataaatatgatatgctcctatgctctcatgaaaatcttagggatgatcatatcatgttaaacattgctcatgaggttgtgatagaatacttaaaatcccagcaacctcactcttgcacatgtgttcatattgatactatattaccatgtgctaatgcttgttgtccgtcgacaagcaaatcttcctttgagctagaatttgcaggaacaaatgatgatacatatcaaaagctcgaagaagaaaatgagaggctaaagatgagcttgacacaacttaaagggaaatgcatcgctcaaccttctcaagataaccgtgatcacatggtgaaggagcttgagacgggaacaaccgtggcatgcactacatcccttgaagaaaatgtcaaggacttgaggattgccaagaggaagaaacaaaagatgaaattcaatacctcttccaaaagcctcaaccatgcctccatacaaggtaacatccaaggtaatgatcaagccacacttcacactaagaaaagtaagaagtgtagtgaatgctttgaagaggggcacttgattaggtcatgtccctatattaaaaatggcttgattattaacaaggatgatagacattgttttaaatgctctaagaagggacacttagttaaatcttgtccccatttaaaacaaaaaggcatagggttagaaaagaaaatatttactaaccatgtagcaagcaagaaacaaggaaagaagaaatcttcaaaacttgaagatcgcctttgctacatatgccgaaagaagggacatcaatgcaaggattgtcccattggtaactatcccactcctagcttgtcaattgattcatatgtaactaggcaacccaaaattgcaacttgtgctagaaaggtaatgagtttaccaagtgctagcacaaaggacatttgggttcctagatctttgttgactaaccttgatggacccatcaagagatgggtaccaaaatatgcttgacaagctttgcaggggaaaggagatgatatgaagctttggaggtgcttgagagggtcaattcaattcttattaactcaagctatcaatcttacaatgatctatatccctaagattgacccaaagttatttttcgaattattatatctaaaactcatatcatctcgagcaagatattgatgttgtaggaaataaagaattatcctgtgcggaaaagtcaaggcctacaacatggaggaaagccaaaggatggtaacacttatgcttttaagtgcaagtatcttaaattatcatttcttatgtgtcttgtgtagtcacatagaaaaagaaagcacttcaaatatttttaaattatgtcaccattctttgaagaaattcctctcatatggtagattgtatattcatcatttctataccatggcaatctacatgctttaattgttgtaagtatctcatggcatgctttacactaatcatcctattattgccatgttctagttatagagatattccaagctcttaagagaataaggtgtcacgtaaggaattcaatttcttaggacacttataaagggaatctctctttatatctagaaatcgtgggactaatgtttttgtctaaataacctaagtagtctcacatgaagagaataagtttctctttggagatgtgcaatctaacatgaaaagaaaagtcaatccaatgatttatgggtgttttgcctcttgcttaaattggatatgattcttctatgtctatcgctctccatgctatgaattagatctattcccctaatctttaagaattaactatgc

SEQ ID NO: 5267 - DNA, 3255 bp, Zea mays
  Clone ID: TF_ZmC1236750_1
atgccagtgccagccgagctctcgccgccgtcccctcacggcgcgccgcggaccagagccggcgagcaggacgacagcacgcttcctccgacggcggccgccaccgccacggccacgcggggcggcactggcaggaagcgccggcgcggggcgcgggacccgcgcgccagctgggcctgggagacggagtgggaccgcgcgtacctgctcgcctgcgcggcggggctcctggtggacccgctcttcctgtacgccgtcgccgtcagcgcgccgctcatgtgcgtcttcctcgacgcctggttcgcggccgcggtcaccgcgctccggtgcgcggtggacgccatgcacgcatccaacctgctgctgcggctccgaggggcgtgctcgccgaggcgggaagacacggacgaggaggaggcgcagccggggcgcgacggcggcgtgccgggacgggggacgaggtccaaggagggggttttcttggacgtgctggtcatcctaccggtgatgcaggtggtcgtctgggtggcgacgccggcgatgatacgcgccgggtcgacgaccgacgtcatgatcgtgctgctgacggcgttcctgctggagtacctgcccaagatctaccacgccgtccgcgtcctgcgccggatgcagggcgtctccggctacctcttcggcaccatctggtgggggatcgcgctcaacctcatggcctacttcgtcgccgctcacgcggtgggcgcgtgctggtacctgctcggcgcgcagcgggccaccaagtgcctcagggagcagtgcgcccaggccgggagcgggtgcgcgccctgggcgctggcgtgcgcggagccgctctactacggcgccaccgccagcagcgtgggggcggccaggctcgcctgggccggcaacgccacggccaggggcacgtgcctcgacagcgccgacaactaccagtacggggcctaccagtggactgtcatgctggtggccaaccccagcagggtcgagagggttctgctccccatcttctgggggctaatgactctcagcacctttgggaatctggagagcacgacggagtggctggagatcgtgttcaacatcgtcaccatcaccggcgggctgattctcgtgacgatgctcatagggaacatcaaggtgttcctgaacgcgacgacgtcgaagaagcaggcgatgcacacgcggctgcgcagcgtggagctgtggatgaagcgcaaggacctgcccaggagctaccggcaccgggtgcgccagtacgagcggcagcggtgggcggccacgcgcggcgtcgacgagtgccgcatcgtccgtgaccttccggaggggctccgccgggacatcaagtaccacctctgcctcggcctcgtgcgccaggtgccgctgttccaacacatggacgacctggtgctcgagaacatctgcgacagggtcaagtccctcattttccccaaaggagaagttattgtcagagaaggggacccagtgaagaggatgctgttcatcgtgcgtggccacctgcagagcagccaggtgctccgcaacggcgccgagagctgctgcatgctggggccgggcaacttcagcggcgacgagctcctgtcgtggtgcctgcgccggccgttcctggagcggctgccggggtcgtcttccacgctggccacgctggagagcacggaggccttcgggctggacgccgcggacgtcaagtacgtcacgcagcacttccggtacaccttcaccaacgacaagagcccaagagacatgtatatttatgtgtactgtatcagctgcaatagagagggttctagagacttcaaaaccctacctcaacatgatatcagagccaaagcgcggcggcgtgctactgtagcagcgacgacctacgcggagcaggcgtggccgacggcgagcttcagactgtgcaggacgcgagtagagcggtctgccgtgctgaaggaaggaggaggtgaaggtggggcggcaagcgcagcaagaagcaggcggggaagacagatatctggcaccgcgtggagcttggaggcaccaccagcttggacgcagctgccttcgccggcgctggcatcgactagaaggagacgtaggccagctcttgctctggaagaaggctaccgccgtcgagggccagctcgacccggcagctgctgccatcaacttgctctgctccaactccaagaagactgctgtcggctttgggttcttacccatcggaacacaagagaatgggagagaatcaagggattgagcaagttcttgggggtaaagaattatttagcttggtctaggagagccttgcgattattgaaagcaaaaagactcgagggctatgttgatggaactgtcgttgagcccaaagacaagccaagtgctgaatggaaggattgggatgctataaactctttggtagcagcatggatgttaagttctatgatcccagcaattgctagcactgttgatacaattataagtgctgcagaaatgtggaaagcgcttgaagaaatgtattcgggagctggaaatgttatgttgatggtggagactgaagatcgcctccataatatcaaacagggggagcgaactgtggcggagtatgttcaggaattacagtgtttgtgggctgatgttgaccattatgatcctattgagctaccacactcagagtgtgttgtttgggcaaagaaatgggtggaaataagacgtgtgcttcaatttttaaggggtctaaacccagagtttgagggaagacgagcctccatgtttcatcaatccactcttcctagcctacaagaggcaatagctgctatatcccaggaggagtcacgactcaaagtgatgagggaaagtcctccagtgtcatctcaccctgtgttttcagctatgagaactaaagatgctagagagtgttacaattgtggtgatgttggacacattgctcgtaattgtactaaacctttcaagtttaaccgcgggagaggaagaggggctgctagaggtggtagaggtcgtggaggtagaagttgggcaagagctaatgcaacaactacaaaagaagaccttgagatctttatggagaatgaagctgaaacaaagtcgactgagcaacataaaattcctggaaataaaaatcaggagtcctacactagggattttgtcaacttcgcctacacagatgaaggagaggagaacagggaaaagacttgggacagctaccaggcgtag

SEQ ID NO: 5268 - DNA, 2106 bp, Zea mays
  Clone ID: TF_ZmC4916_437
atggatacccataggccaccacacttcgacggcactaacttcccatattatagtgctagaatggcttgttacctagaggtcgttgatctaggtgtttggagagtcactcgtgacgggatgaaacccctcaagaatcccgagaaacccaccacgagtgaggaaaaagaaattcatttaaatgctagagccaaaaattgcttgtatgaatctcttagcatggatatttttaatcaagtatttaccttgaaaactgctaatgagatttggctaaaattgcatgagctccatgacggcacatccaatgtccgtgagcaaaaacattgcctagtcttaaatgagtacaattcttttgctatgaaagatgatgagcttgttagagacatgtattctcggttgaatctaataatcaatgagctcaactctattggcattaataagctaggtgatgcggacattgtgaggaagattatctccctgctaccacaacaaagatatgggagcatcatcaccatccttcacaacatggaggacttgagcaacatgaccccgaccattgtgattgggaaaatcgcggcctttgagatgtcgcgaaaaatgagtcggggagaggagccaacttcctcaagaccatatgcctttgcatgtgatgaaaggaagggcaaaaagaaggctcctactccaagtacctcaagtgaagaagaggaagaagaagaaagtgatgatgatgaagataatcaaccatgcacatcatcctccgaggacgaagagacaatccgacgcgtcggaaaggtaatggggatgatccgcaagattaatctaatgggtgtgcccctgcaggtcgaggatcttctctttaacattgacaggaaaaagcaaaggaagagaggatgcttcgcatgtggggagaagggccacttcagggacaactgtccaaatatggccaagcccaaaaaggagaggagcaaaggcaaggcgctaacaagtgttagaacttgggatgattcttcaagtgaagatgaacctccaaggacgcgcagccaccgatcctcgtctcgatcatcacggtcatcacacaaatgccttatggcaagaggtaacaaaagcactccatcctctagtgatgaaagtagtagtgatgatgaaggtgagggaaaagcctctctagatgagcttgcagaagccgtagaattttttcaggatgtttgcactaagcaaaaagctcaacttaaaactttgaaaaataagttggttagctctcaaaatgattacaaaggtttgctagaaaaatttgaaacttttgcaaacttaaatagtgagctatcaactaaaattgagctattggaatctagtgctccatccactgctaccgatgatagccttattaaaaagaatgaaaaacttaaggctaagttagctagctcccaagaagctattgaaaatttgctagagaaaatggaaattcttagcatacacaataatgagctaactactaagctagaaaacattggtagcacccctgcagcatctttagttgaaatacctgaaataattaagaaagatgcttctacttcctgctttgatttaattgatgattctaacccctgcaaccaagtcgttgttgagaatattgttgtagagacatgtacggataaggttgcaaaggaaaatgaacaattaaagcaagaagtggctcgccttggcaaggctttgtatgacaagaaaggcaaagccaaacaaatccaacctccacaggataacaccactgcgggagtgaacaagcctatggagggagaaactgtgatttgtaggctatgccacaaggaaggccacaagtctttccaatgcaaggcgatgaccggggataaacaaaggcaaaagctcaagcaaaagccatcaagcaaaatctccaacacctacatcaaaaaggtgaacaaaaaggatgctactccatatttgatcaagaagaaaaagaacggaaaggtgatagcaatcaagaccaacaagcaagccaacaaaggaaagggggccaaacgcatctgggtgccaaaagagataatttcaaccatgaaaagcaccaagaaggtttggatcccgaaagggaagtga

SEQ ID NO: 5269 - DNA, 2634 bp, Zea mays
  Clone ID: TF_ZmC4916_467
atggatacccataggccaccacacttcgacggcactaacttcccatattatagtgctagaatggcttgttacctagaggccgttgatctaggtgtttggagagtcactcgtgacgggatgaaacccctcaagaatcccgagaaacccaccacgagtgaggaaaaagaaattcatttaaatgctagagccaaaaattgcttgtatgaatctcttagcatggatatttttaatcaagtatttaccttgaaaactgctaatgagatttggctaaaattgcatgagctccatgacggcacatccaatgtccgtgaacaaaaacattgcctagtcttaaatgagtataattcttttgctatgaaagatgatgagcttgttagaaacatgtattctcgtttgaatctaataatcaatgagctcaattctattggcatgaataagctaggtgatgcggacattgtgaggaagattatctccctgctaccacaacaaagatatgggagcatcatcaccatccttcacaacatggaggacttgagcaacatgaccccgaccattgtgattgggaaaatcgcggcctttgagatgtcgcgaaaaataagtcggggagaggagccaacttcctcaagacaatatgcttttgcatgtgatgaaaggaagggcaaaaagaaggctcccactccaagttcctcaagtgaagaagaggaggaagaagaaagtgatgatgatgaagataatcaaccatgcacatcatcctccgaggacgaagagacaatccgacgcgtcggaaaggtaatggggatgatccgcaagattaatctaatgggtgtgcccctgcaggtcgaggatcttctctttaacattgacaggaaaaagcaaaggaagagaggatgcttcgcatgtggggagaagggccacttcagggacaattgtccaaatatggccaaacccaaaaaggagaggagcaaaggcaaggcgctaacaagtgttagaacttgggatggttcttcaagtgaagatgaacctccaaggacgcgcaaccaccggtcctcgtcacgatcatcacggtcatcacacaaatgccttatggcaagaggtaacaaaagtattccatcctctagtgatgacagtagtagtgatgatgaaggtgagggaaagccctctctagatgagcttgcagaagccgtagaatttttccaggatgtttgcactaagcaaaaagctcaacttaaaactttgaaaaataagttggttagctctcaaaatgattacaaaggtttgctagaaaaatttgaaacttttgcaaacttaaatagtgagctatcaactaaaattgagctattagaatctagtgctccatccactgctaccgatgatagccttattaaaaagaatgaaaaacttaaggctaagttagctagctcccaagaagctattaaaaatttgctagagaaaatggaaattcttagcatacacaacaatgagctaactactaagctagaaaacattggtagcaccccagcagcatctttagttgaaatgcctgaaataattaagaaagatgcttctacttcctgctttgatttaattgatgattctaacccctgcaaccaagtcgttgttgagaatattgttgtagagacatgttcggatgaggttgcaaaggaaaatgaacaattaaagcaagaagtggctcgccttggtaaggctttgtatgacaagaaaggcaaagccaaacaaattcgacctccacaggataacaccactgcgggagtgaacaagcctatggagggagaaactgtgatttgtaggctatgccacaaggaaggccacaaatctttccaatgcaaggcgatgaccggggataaacaaaggcaaaagctcaagcaaaagccatcaagcaaaatctccaacacctacatcaaaaaggtgaacaaaaaggatgctacaccatatttgatcaagaagaaaaagaacggaaaggtgatagcaatcaaggccaacaagcaagccaacaaaggaaagggggccaaacgcatctgggtgccaaaggagataatttcaaccatgaaaagcaccaagaaggtttggatcccgaaagggaatttagcgaaagttttagaagtcctaattcacccccctcttaggcgtcacccgtttcctacagaggctttatgggctcatagaatatctaaacatagggctactaaagtatctccttttgagcttgtctatgggcaggaagcagtgttgcctatggaaataagtttgaatactatcaggttcgccagacaaaatgatctaactgctaccgattattatgattcaatgatggataatattgatgaggtgactgacaaaaggatgatagctttgggagcaatagaaaaggacaaaatcatggtagccagggcctacaacaagaaggtcaaagcaaaatcatttcaagtaggggacctggtgtggaagaccattctgcctctaaggaataaagaccggaagttcgggaaatggtcaccaagctgggaaggcccttataaagtaaaacaggtgatgtctggcaacgcctatttgctacaaacattacaaggcaaggacttgcctaaggctttgaatgagcgtttcctcaaacagtga

SEQ ID NO: 5270 - DNA, 2404 bp, Zea mays
  Clone ID: TF_ZmC4916_482
atgaaagtagcacacaacgcctatagcatgactaattacgaacagaacctagacggcgatgtctgtggtcagtcaaactatgcgtcttccaagcacatgtttggcacggtgaacaatactcgtcgctcgcgaagagacggtcgatctacggacatgtttggttctatgcctaggacaccacagcctaacattaggacttgttgcaagctgagggcaccaggagacccttgtttgctactgctcaagttcacaggatgcgttgaggattggaccaaggaaatgaggatgcaacacctcaaaagaagtcataaaaagatgcatagaagtccaagactcaagaacaaaagaagcccaaagaaatcagcgaagaaacctgagaagagggctgtcagccagcgactggtgacgcaccggacagtgcatagtacctgtccggtcgaagatcttctctttaatattgacaggaaaaagcaaaggaagagaggatgcttcgcatgtggggagaagggccacttcagggacaactgtccaaatatggccgaacccaagaaggggaggagcaaaggcaaggcgctaacaagtgttagaacttgggatgactcttcaagtgaagatgaacctccaaggacgcgcagtcaccggtcctcatcacgctcatcacggtcatcacacaaatgccttatggcaaaaggtttgctagaaaaatttgaaacttttgcaaacttaaatggtgaactgtcaactaaaattgagctattagagtctagtgctccatccattgctaccgatgatggccttattaaaaagaatgaaaaacttaaggctaagttagctagctctcaagaagctattgaaaacttgctagagaaaatggaaattcttagcatacacaatgatgagctaactactaagctagaaaacattggtagcaccctaggagcatctttagttgaaattcctgaaattattaagaaagatgcttctacttcttgctttgatttaattgatgactctaacccctgcaaccaagttcttgttgagaatattgttgtagaaacatgttcggacgaggttgcaaaggaaaatgaacaattaaggcaagaagcggctcgccttggtaaggctttgtatgacaagaaaggcaaagccaaacaaatccgacctccaaaggataacaccactacgggagtgaacaagcctatggaggtagaaaccgtgatttgtaggctatgccacaaggaaggccacaaatctttccaatgcaaggcgatgaccggggataggcaaaagcaaaagctcaagcaaaagccaacaagcaaaatctccaacacctacataaaaaaggtggacaaaaagactgctacaccatatttgatcaagaagaaaaagaatggaaaggtgatagcaatcaaggccaacaagcaagccaacaaagaaaaggggggcaaacgcatctgggtgccaaaggaaataatttcaaccatgaaaagcaccaagaagttcacaggatgcgttgaggattggaccaaggaaatgaggatgcaacacctcaaaagaagtcataaaaagatgcatagaattccaagactcaagaacaaaagaagcccaaagaaatcagcgaagaaacctgagaagagggctgtcagccagcgcctggtgacgcaccggacagtgcacagtacctgtgtgccgccaccgtgtatcggagggaacgaggcccgcggcgtttcggccggaagctcgatagtggagacggcggggagcgtccgagaggagccggaagcggagcaccacttgcgcgtggagaaggcccgtggctctctacggagttactcgaccgtggtgcttggccctcgcgtgggctaaccttttcgtaggggcaccaacaaggattagtcggaaccttgtgtggttccagatacctcggcaaaaatatcggtgtcatccatgagagtttgatttctctactagctcttttaccttccgcatttacattaagtacttaagtttcaatctctcctttctaattagaatatttaggattgaaacttaggttttgtggtagagatagcaacacttagacaaaacctagtttgcacattctggattgcttatttacataagttttgttctatggatttatttgtggcttagtttagaaagaagttttttagaagtcctaattcacctcgctcttaggcgtcaccatttcccatagcatgctacatacacaagttgatcttgcgaaattccaaatgaggtatagatagttcaccaagctagaatcaaactctagtgcatgtgaatacctagtgattaattggaacattattgggtaaagaagagtgatcaagggcacaacttgccttcaacgagctcctgcttagtattttccacatgctga

SEQ ID NO: 5271 - DNA, 2106 bp, Zea mays
  Clone ID: TF_ZM4291.C1.o10.fg
atggatacccataggccaccacactttgacggcactaacttcccatattatagtgctagaatggcttgttacctagaggccgttgatctaggtgtttggagagtcactcgtgacgggatgaaacctcccaagaatcccgagaaacccaccacgagtgaggaaaaagaaatacatttaaatgctagagccaaaaattgcttgtatgaatctcttagcatggacatttttaaccaagtatttaccttgaaaactgctaatgagatttggctaaaattgcatgagctccatgacggcacatccaatgtccgtgagcaaaaacattgcctagtcttaaatgagtataattcttttgctatgaaagataatgagcttgttagagacatgtattctcgtttgaatctaataatcaatgagctcaactctattggcattaataagctaggtgatgcggacattgtgaggaagattatctccctgctaccacaacaaagatatgggagcatcatcaccatccttcacaacatggaggatttgagcaacatgaccccgactattgtgattgggaaaatcgcggcctttgagatgtcgcgaaaaatgagtcggggagaggagccaacttcctcaaagccatatgcttttgcatgtgatgaaaggaagggcaaaaagaaggctcccactccaagttcctcaagtgaagaagaggaagaagaagaaagtgatgatgatgaagataatcaaccatgcacatcatcctccgaggacgaagaaacaatccgacgtgtcggaaaggtaatgaggatgatccgcaagattaatctaatgggtgtgcccctgcaggtcgaggatcttctctttaacattgacaggaaaaagcaaaggaagagaggatgcttcgcatgtggggagaagggccacttcagggacaactgtccaaatatggccaaacccaaaaaggagaggagcaaaggcaaggcgctcacaagtgttagaacctgggatgactcttcaagtgaagatgaacctccaaggacgcgcagccaccggtcctcgtcacgatcatcacggtcatcacacaaatgccttatggcaagaggtaacaaaagcattccatcctctagtgatgaaagtagtagtgatgatgaaggtgagggaaaggcctctctagaagagcttgcggaagccgtaaattttttccaggatgtttgcactaagcaaaaagctcaacttaaaactttgaaaaataagttggttagctctcaaaatgattacaaaggtttgctagaaaaatttgaaacttttgcaaacttaaatagtgagctatcaactaaaattgagctattagagtctagtgctccatccactgctaccgatgatagccttattaaaaagaatgaaaaacttaaggctaagttagctagctcccaagaagctattgaaaatttgctagagaaaatggaaattcttagcatacacaataatgagctaactactaagctagaaaacattggtagcaccccagcagcatctttagttgaaatacctgaaataattaagaaagatgcttctacttcctgctttgatttaattgatgattctaacccctgcaaccaagttgttgttgagaatattgttgtagagacatgttcgaatgaggttgcaaaggaaaatgaacaattaaagcaagaagtggctcgtcttggcaaggctttgtatgacaagaaaggcaaagccaaacaaatccgacctccacaggataacaccactgcgggagtgaacaagcctgtagagggagaaactgtgatttgtaggctgtgccacaaggaaggccacaagtctttccaatgcaaggcgatgaccggggataaacaaagacaaaagctcaagcaaaagccatcaagcaaaatctccaacacctacatcaaaaaggtgaacaaaaaggatgctacaccatatttgatcaagaagaaaaagaacggaaaggtgatagcaatcaaggccaacaagcaagccaacaaaggaaaaggggccaaacggatctgggtgccaaaggagataatttcaaccatgaaaagcaccaagaaggtttggatcccgaaagggaagtga

SEQ ID NO: 5272 - DNA, 2106 bp, Zea mays
  Clone ID: TF_ZM4323.C2.o1.fg
atggatacccataggccaccacactttgacggcactaacttcccatattatagtgctagaatggcttgttacctagaggccgttgatctaggtgtttggagagtcactcgtgacgggatgaaacctcccaagaatcccgagaaacccaccacgagtgaggaaaaagaaattcatttaaatgctagagccaaaaattgcttgtatgaatctcttagcatggatattttcaatcaagtatttaccctgaaaactgctaatgagatttggctaaaattgcatgagctccatgacggcacatccaatgtccgtgagcaaaaacattgcctagtcttaaatgagtataattcttttgctatgaaagatgatgagcttgttagagacatgtattctcggttaaatctaataatcaatgagctcaactctattggcattaataagctaggtgatgcggacattgtgaggaagattatctccctgctaccacaacaaaaatatgggagcatcatcaccatccttcacaacatggaggacttgagcaacatgaccccgactattgtgattgggaaaatcgcggcctttgagatgtcgcgaaaaatgagtcggggagaggagccaactacctcaagaccatatgcttttgcatgtgatgaaaggaagggcaaaaagaaggctcccactccaagttcctcaagcgaagaagaggaagaagaagaagaaagtgatgatgatgaagataatcaaccatgcacatcatcctccgaggacgaagaaacaatccgacgcgtcggaaaggtaatgaggatgatccgcaagattaatctaatgggtgtgcccctgcaggtcgaggatcttctctttaacattgacaggaaaaagcaaaggaagagaggatgcttcgcatgtggggaaaagggccacttcagggacaactgtccaaatatggccaaacccaaaaaggagaggagcaaaggcaaggcgctcacaagtgttagaacttgggatgactcttcaagtgaagatgaacctccaaggacgcgcagccaccgatcctcgtcacgatcatcacggtcatcacacaaatgccttatggcaagaggtaacaaaagcattccatcctctagtgatgaaagtagtagtgatgatgaaggtgagggaaaggcctctctagaagaacttgcggaagcagttaattttttccaggatgtttgcactaagcaaaaagctcaacttaaaactttgaaaaataagttggttagctctcaaaatgactacaaaggtttgctagaaaaatttgaaacttttgcaaacttaaatagtgagctatcaactaaaattgagctattagaatctagtgctccatccactgctaccaatgatagccttattaaaaagaatgaaaaacttaaggctaagttagctagctcccaagaagctattgaaaatttgctagagaaaatggaaattcttagcatacacaataatgagctaactactaagctagaaaacattggtagcaccccagcagcatctttagttgaaatacctgaaataattaagaaagatgcttctacttcctgctttgatttaattgatgattctaacccctgcaaccaagttgttgagaatattattgtagagacatgttctgatgaggttgcaaaggaaaatgaacaattaaagcaagaagtggctcgtcttggcaaggctttgtatgacaagaaaggcaaagccaaacaaatccgacctccacaggataacaccactgcgggagtgaacaagcctgtagagggagaaactgtgatttgtaggctgtgccacaaggaaggccacaagtctttccaatgcaaggcgatgaccggggataaacaaaggcaaaagctcaagcaaaagccaacaagcaaaatctccaacacctacatcaaaaaggtgaacaaaaaggatgctacaccatacttgatcaagaagaaaaagaacggaaaggtgatagcaatcaaggccaacaagcaagccaacaaaggaaagggggccaaacgcatctgggtgccaaaggaaataatttcaactatgaaaagcaccaagaaggtttggatcccgaaagggaagtga

SEQ ID NO: 5273 - DNA, 2106 bp, Zea mays
  Clone ID: TF_ZM4789.C1.o5.fg
atggatacccataggccaccacacttcgacggcactaacttcccatattatagtgctagaatggcttgttacctagaggccattgatctaggtgtttggagagtcactcgtgacgggatgaaacccatcaagaatcccgagaaacccaccacgagtgaggaaaaagaaattcatttaaatgctagagccaaaaattgcttgtatgaatctcttagcatggatatttttaatcaagtatttaccttgaaaactgctaatgagatttggctaaaattgcatgagctccatgacgacacatccaatgtccgtgagcaaaaacattgcctagtcttaaatgagtataattcttttgctatgaaagatgatgagcttgttagagacatgtattctcgtttgaatctaattatcaatgagctcaattcgattggcattaataagctaggtgatgcggacattgtgaggaagattatctccctgctaccacaacaaagatatgggagcatcatcaccatccttcacaacatggaggacttgagcaacatgaccccgaccattgtgattgggaaaatcgcggcttttgagatgtcgcgaaaaatgagtcgaggagaggagccaacttcctcaaggccatatgcttttgcatgtgatgaaaggaagggcaaaaagaaggctcccactccaagttcctcaagtgaagaagaggaagaagaagaaagtgatgatgatgaagataatcaaccatgcacatcatcctccgaggacgaagaaacaatccgacgcgtcggaaaggtaatgaggatgatccgcaagattaatctaatgggtgtgcccctgcaggtcgaggatcttctctttaacattgacaggaaaaagcaaaggaagagaggatgcttcgcatgtggggagaagggccacttcagggacaactgtccaaatatgaccaagcccaaaaaggagaggagcaaaggcaaggcgctaacaagtgttagaacttgggatgattcttcaagtgaagatgaacctccaaggacgcgcagccaccggtcctcgtcacgatcatcacggtcatcacacaaatgccttatggcaagaggtaacaaaagcattccatcctctagtgatgaaagtagtagtgatgatgaaggtgagggaaagccctctctagatgagcttgcggaagccgtagaatttttccaggatgtttgcactaagcaaaaagctcaacttaaaactttgaaaaacaagttggttagctcccaaaatgattacaaaggtttgctagaaaaatttgaaacctttgcaaacttaaatagtgagctatcaactaaaattgagctattagaatctagtgctccatccactgctaccgatgatagccttattaaaaataatgaaaaacttaaggctaagttagctagctcccaagaagctattgaaaatttgctagagaaaatggaaattcttagcatacacaataatgagctaactactaagctagaaaacattggtagcaccccagcagcatctttagttgaaatacctgaaataattaagaaagatgcttctacttcctgctttgatttaattgatgattctaacccctgcaaccaagtcgttgttgagaatattgttgtagagacatgtacgaatgaggttgcaaaggaaaatgaacaattaaagcaagaagtggctcgccttggcaaggctttgtatgacaagaaaggcaaagccaaacaaatccaacctccacaggataacaccactgcgggagtgaacaagcctatggagggagaaactgtgatttgtaggctatgccacaaagaaggccacaagtctttccaatgcaaggcaatgaccggggataaacaaagacaaaagctcaagcaaaagccatcgagcaaaatctcaaatacctacatcaaaaaggtggataaaaagactgctacaccatacttaatcaaaaagaagaagaatggaaaggtgatagcaatcaaggccaacaagcaagccaacaaaggaaagggggccaaacgcatctgggtgccaaaggagataatttcaaccatgaaaagcaccaagaaggtttggattccgaaagggaagtga

SEQ ID NO: 5274 - DNA, 2100 bp, Zea mays
  Clone ID: TF_ZM5010.C3.o2.fg
atggatacccataggccaccacacttcgacggcactaactttccatattatagtgctagaatggcttgttacctagaggccgttgatctaggtgtttggagagtcactcgtgacgggatgaaacctctcaagaatcccgagaaacccaccacgagtgaggaaaaagaaattcatttaaatgctagagccaaaaattgcttgtatgaatctcttagcatggatattttcaatcaagtatttaccctgaaaactgctaatgagatttggctaaaattgcatgagctccatgacggcacatccaatgtccgtgagcaaaaacattgcctagtcttaaatgagtataattcttttgctatgaaagatgatgagcttgttagagacatgtattctcgcttgaatctaataatcaatgagctcaactctattggcattaataagctaggtgatgcggacattgtgaggaagattatctccctgctaccacaacaaaaatatgggagcatcatcaccatcctccacaacatggaggacttgagcaacatgaccccgaccattgtgattgggaagatcgcggcctttgagatgtcgcgaaaaatgagtcggggagaggagccaacttcctcaaagccatatgcttttgcatgtgatgaaaggaagggcaaaaagaaggctcccactccaagttcctcaagcgaagaagaggaagaagaagaagaaagtgatgatgatgaagataatcaaccatgcacatcatcctccgaggacgaagaaacaatccgacgcgtcggaaaggtaatgaggatgatccgcaagattaatctaatgggtgtgcccctgcaggtcgaggatcttctctttaacattgacaggaaaaagcaaaggaagagaggatgcttcgcatgtggggaaaagggccacttcagggacaactgtccaaatatggccaaacccaaaaaggagaggagcaaaggcaaggcgctcacaagtgttagaacttgggatgactcttcaagtgaagatgaatctccaaggacgcgcagccaccggtccttgtctcgatcatcacggtcatcacacaaatgccttatggcaagaggtaacaaaagcattccatcctctagtgatgaaagtagtagtgatgatgaaggtgagggaaaggcctctctagaagaacttgcggaagccgttaattttttccaggatgtttgcactaagcaaaaagctcaacttaaaactttgaaaaataagttgattagctctcaaaatgattacaaaggtttgctagaaaaatttgaaacttttgcaaacttaaatattgagctatcaactaaaattgagctattagaatctagtgctccatccactgctaccgatgatagccttattaaaaagaatgaaaaacttaaggctaagttagccagctcccaagaagctattgaaaatttgctagagaaaatggaaattcttagcatacacaataatgagctaactactaaactagaaaacattggtagcaccccagcagcatctttagttgaaatacctgaaataattaagaaagatgcttctacttcctgttttgatttaattgatgattctaacccctgcaaccaagttgttgagaatattgttgtagagacatgttctgatgaggttgcaaaggaaaatgaacaattaaagcaagaagtggctcgtcttggcaaggctttgtatgacaagaaaggcaaagccaaacaaatccgacctccacaggataacaccactgcgggagtgaacaagcctgtagagggagaaactgtgatttgtaggctgtgccacaaggaaggccacaagtctttccaatgcaaggcgatgaccggggataaacaaaggcaaaagctcaagcaaaagccaacaagcaaaatctccaacatcaaaaaggtgaacaaaaaggatgctacaccatatttgatcaagaagaaaaagaatggaaaggtgatagcaatcaaggccaacaagcaagccaacaaaggaaaagggaccaaacgcatctgggtgccaaaagagataatttcaaccatgaaaagcaccaagaaggtttggatcccgaaagggaagtga

SEQ ID NO: 5275 - DNA, 5829 bp, Zea mays
  Clone ID: TF_ZM4874.C2.o9.fg
atggctagtaacaacaatgtgcacattgggaagccaccgcattttgatggaaataattatgactattggaaaataagaatgtcaatgcatcttagagcaatgggtggaaaaatttggccaattgtcagggatggatttgttgtgttgaaagaagatgaaccatccgttagtgataatgagaatatcctcacaaatgatcaagccatgaatgtcttttatgatgctcttgatataaatgaattcaatcgtatcaagaatctcacaaccgctcatgagatttggattaagctaatggaaattcatgaaggaactacaattgtgaagagtgccaaactatatgtgtgcaaagggaagtttgagcaatttattatgaaagaagatgagagtgtatctgatatgttcaatcagttaaatgagaaagtaaatgaactcaagggacttggttttaatgtaccggatgtggatttcactcacaagttccttagatcacttccggagaaatatgagaccattgtgacaatgttatttggcaaagaaggtgaaaatgaatcaattgctctcaaagctaaggcctcaaaggcaattgaaaaggaagatagtaatgatgaagaaaatgaaagtgagagtgatggtgacatggctctatttgtaaggaaattcaataaattcatgaagatgaagagaggtcaacctagaagaggtcaaacatctagaagaaatgctttcaatgatagaaagtgttttgagtgtggggaacccggtcacattgccatgaattgcccaagcaagaagaagaagggcaaagatgaaagtgacaagaagaaaaagaaatactataacaagaagaaagatggcaaagcctacttagttgaatgggactcggatgatagctcggatgatgatgatgatgatacctcatccaagcttaatgccggaattgccatcaaggaagctccctcactcttctcatccccccattgtctcatggcaaagggagatgctaaggtaaaaatcatcaccgatttaaatgatataaaagatgatgatgatatcgatgatgttgatgatgatggctattcatatgatgatcttgttagaatgttaggtgaggtcgatgactacatgcacaaagaaaaagaaaaatttaagaccttgaaggaattgtataaaaacctccaagtgtcttttgaggagctcaagacctctcacaatgacctaaaagaaaattgtgagaagcttgtggatgctcaaaaatcatctattgtgcatgaagttgaggtggtcactaaggatgttggagtcacttgtgacttacttgatagtcttacaagtgaaccactacctactaactctatttgtgataaatacaaaatttctctcaatgataacattgctcttgatgaatcaaaaactattgttgagaatgaagtgttagtagatagagtaaacactctaactcatgacctagaaaaggcatatggtggtaaggctaaattggatttcatattgggaagtcaacggtgctctcttaaccgtgaaggtcttggatatgttcccaagaaaggaaagaatgcttttgtaaagcaaaagacattgtttgtgaaagaatgtgacacagtgtgtcacaagtgtcacaaaaagggacatgttaagaaaaattgtcccaagttcaaaaatgtatcctccacttgttttgagcattgttatgttctttctcataatgcaaaaggtgttcatgctaaatttgttggtaaactacaaggcgggaggaatcattgggtgttagatagtggatgcactcaacacatgaccgaagatatgaaaatgtttacccaaatgagtgaggaagattgctcaaattatgatagtatcacatttggagataatcgcaaaggaaaggttaaaggtttgggtaaaattgctatttcaaatgatcattctatatcaaatgtgctcttggttgagtctttgaattttaatttactctccgtagctcaattatgtgatttaggattttattgcaatttcacggttgaagatgttattatctctagtgttgatggtagcaatcttaagtttaaaggttttagacatgaaaatctttatcttgttgatttctcatctaatgaggcaaagctcacaacttgcctattctcaaaagcttcactaggttggttatggcatagaagacttggtcatgttggaatgaagcaactcaatcgattaaccaagcatgactcagttcgtggcttaaaagatgtgaagtttgagaagaacaaattgtgtagctcttgtcaagccgacaaatctaatgtgtttgaaacattcaagtcatttgctatattggctcaaaatcaatatgatttcgacataaaaaaggttagaagtgataatgggtcggaattcaaaaatgcgagaattgatgaatattgtgatgacaagggtattaaacatgaattctcttccaaatataccccgaaacaaaacggtattgttgaaagaaagaatagaactctcattgatatggctaggtctatgttagcggaatataatatatcggattcttattgggccgaggcaataaataccgcttgtcattcatcaaatagactatattgtcacaagcttttgaagaaaactccatatgaattgctcattggtagaaagccaaatatctcatattttagggtattcggttgcaaatgttatattttaagaaagggaagccggctttctaaatttgagaagaaatgtgatgagcgttttcttcttggatattcatcaaatagtaaagcttatagagtcttcaataaaactcatggtattattgaagaagcatatgatgttgaattcgatgaaacaaatgggtctcaagatgagagtgataatctcgatgatgttgggggaactcaattgataaatgcaatgaaaacaatggccattggtgaaataaaaccaaaggaagatgatgatgaaaacagtgtggttgtcattccttcatcctcaactctaaatgaggaagatcaccaaagccaacaacatgatgaaactatggatactcatgatcaaggtacttcaagacattcggttcctcctaatgcttcaactagcaattatcaaacggtatcaagaattcatcattccattgtgaaggatcacccggttgatcaaattgtgggtgatattagtaaaggtgttcaaactcgctctcgcatagcttcgttttgtgaacatttctctttcgtatcttgtatggaacctaaccgtgtagatgaagctctacttgatgttgattgggtgaatgcaatgcatgaagaattaaataacttcgctcgaaatgaagtttgggagcttgttgagagactaaagaaccacaatgttattggtacaaaatgggtgtttcgcaacaagcacaatgaagatggtgtggtagtaagaaacaaggcaagattagttgcacaaggatatactcaaattgagggattggattttggggagatatttgctcccgtggcaagattagaagcaatccgaattcttcttgcttatgcttgtgcacataatatcaagctctaccaaatggatgtaaagagtgcttttctaaatggtaagattagtgaactagtgtatgttgaacaacctcccggttttgaggaccccaaaagacctaaccatgtgttcaagctttctaaagctctctatgggcttaagcaagctccacgcgcttggtatgaaaggcttagagatttcttgctttccaaagacttcaaaattgggaaggttgacactactctattcactaaaagaattggtaaagacttatttgtttgtcaaatctatgttgatgatattatttttggatctactaatgaattattttgtgaggaattcagaaaaatgatgtcaaaagaatttgaaatgtctatgataggagaattgagcttctttcttggccttcaaatcaaacaattgaaagatggaatttttataagtcaatcaaaatatttgaaggacatgctcaagaagtttggtttagaaaatgcaaaacctatcaagactccaatggcaacaaatggtcatctagacttagatgaaggagttctactcactgtgaatgctgtgcaaaattttgaactcgtttggatgggtattctctgcaaagtcatcaattcaacatttgtggcggctagggttctttggagtcgcccctggtcggtcgcggaccgtccgcctggtgggcacggaccgtccgggcctctggcgcggacagtccggccccctagcgcggaccgtctggaccctggcagagaaatgcagttctattcctttttattgtgtggttttggtggtctccgcaagaaacttgcaggtcactttaaatcaaagcgccctcgtggagatgatgatgactatacaccaaccactgattcagaggcccaatcctcagctaggggcactgaatctatggatgctgaagactttcctcatgttcatcccgattatcccattgacacctcaagatggacatatccaaagcggaggttttctatggctgagtactgctcaaggcggactatgaaccaatacactctgccatctgacaccaatattcaaattttccacactcagctgcagtttgatgttttttggggcaccttggtggatacaaattttcataaacatcaagtgattgattggtccttcatgctaggtcaatcagtcatggagggtctgatccctaagtttgagacgtgtggcctgtatcagtttatggggcaacgaacagacttcagtgaaatggctgtcaagcaattcctggccacctcagagattgatatagaagaagaatccgtcacctggatgactggcttcaagcgctattctgcctcttttgctgactttgccactaccaacagtctagattatggcaccatttcagctggactggatctctacactgaggataattttgaggacattgtgcaattctatgagccagcacggctgggaatacccaggaggattggagagacaacaggactcaggcatcatcctgctgtgatcaacaaaattgccagagtcactattcttcccaagagtggggataagagcaaaatacgggacaaattctggaatattatccatcacatcatgaatggtgagatggacaagaatcaaaatttagcatatgctccttatattatggctctcatcaaagccaagacaagatttgaggggccctgcgagattgttcacacaccattcagaccctttaagaatgagatagggtttctcaccaggcctctcactcccttcccagatgatgaggaagaccctggctataatgcaggagcagctcctgatgttgaggccgagcagatgcctcctcctcagcctcagcagtattggcagcctggtccaggctactttgatccctattttcacaatatgcagcaggggcttgagacccatattgatactcgctttgagggcatgatgacacatgtggatcaccgcctagatgacatgcagtctcactttgacagtaactgggatgcgctcaactctgagttttctgagtttcgtgatcacattcacactaatgtcactgatcctatcatgaccaggctgaataatgtgcagcagagttttcaagataacatgggcgctctctccagccaatttgaccatctttctacaaatgacagcatgcatgatatcagtcagaggcagcagcaactccagcgagattttggccagttctcctctctatttgacacattcagcactcactactacaacatgcatcctccgcccagtgatcagtga

SEQ ID NO: 5276 - DNA, 1175 bp, Zea mays
  Clone ID: TF_ZmC19722_1
ccggccggggctcagtgctcacacacttctccctttccgccgccgccaccgaggaagacaccaggtcaccagccataggcccatagcaaaccaagcgcgaggaggaacaggcgtagctccgtagccatagatggctaacaagcgtcagcgggatgcgcggaagcgcttccgggaggcgaacccagacctattccctccgcaaaccgccccttctgccgacggaaccaagaacaagagcaagaagaagaagaataagagcatgttcaagaaggccaataagggcggcacgggaaggtttaagcacccgctacgggttcccgggatgcggcccggggaacgctgcttcatctgcaagtccaccgaccacgtcgccaaggcttgccccgagaaggccctctgggacaagaaaaagatttgcttgctttgcagggagcggggtcatagtctgaagaactgtcctgacaaaagcgagggaaatttgatgaaattttgctataactgtggtgaatctggacactctctttccaagtgccccaagcccattgagaatgggggtacgaattttgcaagctgttttatctgcaatcagcaagggcatttgagcaagaactgccctgaaaacaaacatggcatctatccaaagggtggttgttgtaaggtatgtggcgaagttacccacttggccagacattgtccgaataaagggagacaagatttgatatcctccagagatgatgatgtcaacatggaagagcacagtcaggaatgtcctgcggttcaccatggtggagatgacctagaagatgatttcgttaatgaagaagaaccaaaacccgccaaatcaaagaaggcaaagcaatcaggttcaagaccagccacagggacgggaaatgacgtgaagagcgccagtgccaagacaaaagcgaaacaagctcctaaagttgtaaaattctttggttaaagaatgggaattttgttgtagcttaagatacgaatgttccatctggacaaccttgtactgtcaagcggttgtgtgtaacgctgatgacgatgagaatacgtctgccaactgcatacgcctctcgttgcccctaggtgctcttctgtcttctcattgtttggctagcattgggttatgcgagaccagtagacccattacaatatggaattcgctc

SEQ ID NO: 5277 - DNA, 282 bp, Zea mays
  Clone ID: TF_701161114H1
ctacaactgacgtgaatcgggacatctgactagcgcacgcagctgatgcacgagtgactacaggtacggcatgaacgcgtggaggtgccagatatggagtcagtggcggctggaggtacggagtaggtggaggcggcggcttcggcggaggaagctgctacagctgtggagagtctgggcattttgccagagattgcccatcaagtgctcgttgaatttactgttagggttgtttatgttttgcggattgttttaagtttttactttaatatgtcttaggga

SEQ ID NO: 5278 - DNA, 1936 bp, Zea mays
  Clone ID: TF_ZmC951_447
tcacccttgactttgcaagccttcttcttcacccttggctttgggttcctcagcctccttggccttctcccgtgcacttggtacctcgaagctcttcttgcctccgtccttggcttgatcagttgtctttgacttacagaggtacccaagtcctgattgctctatttcatgctcatcttctcttttccaccttgagacttggtcaaggcatactctatcactttcatcacacaaagataccaatttgaatgtcaagtgaaagattgacttggatagatgaccctgctcgccacacttgtagcagaagcgtcgttcaacttgacatgacacttgctgtttgttattttccttagtgggagtcatcttggagggtgcacgtgcttggttcatcaatagcggacaagacgtgatcatgtggtccttattgttgcatccaaaacaactccttgtcccttcatccttgtctttgtatggacaagatgcgataaggtggcctagcttcttgcacttgaaacacctcctttttcctcttctctttttgctctttgatgacatagagaaaaggtcagtgcaaacaacatgattaaataaatctttacctttttccaagctcatgttgatttcttcatctttaggaacaatctttttatgaagctcagcacttgctgcagtttttcctttctcaagcttcttcaccacgcgcccgtggatatcttgagagagttgagcaatgcgtcttctccttagttgtctttgcttcttgttcccacacaatttcttttgtgaccctgcatcttgatgcttattcaaaaattggctttcttttgaacagcaggggttagcacatggtgatatacaattcaaatgcgcactcgtgcgagagtgaggttcacatgaatttaagttcgcaattataacctcatgagcaacattaagcatgatatggtcatcaatcattttattatgagaatatgataacacatcgtactcttcacctagagcaaggttatcatgactcaacaatttttacttctctctcaagcatgacattttccattttaagttgagcaacacaagatatagcatcatcattactattttgctcaattaaaattgaatcataccgttggaccaagacatcatgagagcactttagctcctcatgttctttggtcatcttctccaggctgttgtttgttttgatgagagtctcctctagcctgagaagcatctcgctttgttccttgttccttctcaacagcttaatcaagagcgctttgtcttctttgttgagatgggtgtagaaacggcgaatctcctcttcttccacatcatcggtctcattttccctgtcattaatgtcagtggaagcaatataggaaaatgtaccttgtgatgatgaagattcatcctcgctatcatcctcatactcttcctcatcatggcttttgtctccaccgtcattgttagcaataaaacacttattattagtggagaccaaacctgttgacgaggtagattcatcgttgggtgtccatcgttcttgatcttctccctttgaatggttagcatcacaagcaatatagggagtggaagtagtacaatttgccacaaaatatttttctttaattctattccataaatcatgagcatcaacaattaaatcattaccattactcaagatggcaaaataagcacctctagaaagagaatcaactaagatgctgcaagcacggtgattgagagaaaaacatcttagttcatcattagagggatttttactaagatcagatgggaaaatacttctcctaaagatctgtctcaaatcaggatcaacactcatgaaagcattataaatagagacagaccaagatttgtaattagagccatcgcctaaaagaagttcagcagttacctcttgtgacgacatcgtcat

SEQ ID NO: 5279 - DNA, 1734 bp, Zea mays
  Clone ID: TF_ZmC18109_3
ttacttctttgctccgaaatgtatactaatcaagcgaccttcatcatcatacttataaaatggtgggtcttctgaattattgcttaggtcatgcttggcagctttcttctttattcggtctagacgcttcttggggcactcgcgaataagatgtccttcatttttgcagtagtagcaagcacctcttgctttgagttctttgcgagtcaactttgcttgaccaacaggggatgagggttgattgggtgtctgtatctcatatagctgagcctgacttgattcttctgtttgggaatccgtgtgtttcgtgacttttgcttgcggttgaggtggtctaatcatgtatccgaacatttttctattccttttgttgttcttcattccattcatcgaatatctctgtgactcatttttctcgctcgtagttgttaaggtaggaatattgtcgttggcaccgtttacttcatttccattggggttcatcattttcggacatatgtagtttactaacatttttccttcgggtgcactgatggtcttccttgatctcaagggacacttaaagataccatactttgttgcaaactgggcactgataagagaatgtgttgtacgaggatcatacaacacggtggcgatggttgtgtgaatgactagtgttccaaaaatcgccgccttatcatatggaatggttcctgtcactgcataacttatccttcctgtggtctctttccgttgtttattctttgttgatgcatgggtttgagggtgttgtcttttcttttggaccttattgatctccacatccttcttaggacaaccattaacaagatggccggtatcaccacagccaaagcaagcacgacttgataagttacatggtggagttgtctttacgttgttggcagaagtttctctgcatttttgttcatattccatgtctggagactgaggtagcttcatctcggaggtgatctgtagtgaacacttctcaagacagttacggaagtaatgaccttcacgtccacattgatagcaagcttttcttgaagttatttcttgactttttgcacgtttccctttttgtttcttggatctgatgcgaccatgaggctgaaactgtgtgcaagtaatagtccatccatcaatgtaacactcatgtgtttcttcttggggctgggcatccttgtgatgtttcctttttggaatactttgcaattcatcaactgacagtgcattaggtatgagagaatctgttattagttgttcttggggagacatttgtctttttatgccagaaaataaaatctggttcttctgttttgtagtttcactttcatttgtactgatcttaaccaagaagaatggtaatagatccaaagaatccataacaaaacttcttgtggagtagggataagacagagaatagggactcgacaatagctttgaaagggtttcttctggcaaactttgcttcaagttccgcaatcctagcttgatcatcttgtagtgcttctgagtagagtcttctgatagaccagaatcagacatttggaacatcaatatcataagcgagagtgatagatcaatcagtgctgtttcagtcgcggtggcgaacggcgtgcggatgcggacggtccggcgagttccatgggcggtccgagcacgacgaggcgatgtatggtccagccggggtgctgcgcggttgcgtcgacggtggtcggtgagcgccat

SEQ ID NO: 5280 - DNA, 757 bp, Zea mays
  unsure (1)..(757): unsure at all n locations
  Clone ID: TF_LIB4977-008-R1-K1-B11
gcttgctctctctctcgttgcgacgactgtgtggagtaccgcccccgccccctcaggccctcaccccccgacgccgacgccctaggcggctacgccaggtcccgagggacgggcccttcatcttcgtcagtctattcgccgggcgacgagcacccgccaggtttcgtaatgatttgtgcaacaattgtaagcgtcctgggcattttgctagagagtgtcctagcgtggctgtctgccatacctgcgggcttcctgggcacattgcagccgaatgttcttccaaaggtgtttgctggaactgcaaagagcctggccacatggctaacagctgcccaaatgaagggatatgccgtaactgtggcaagtccggtcacattgcaagagactgcaccgctccaccagtgccgccaggagaagtgatcctttgcagcaactgctacaaaccagggcattttcgtgaggaatgcaccaatgagaaggcctgcaataattgccggcagagcggccaccttgcccgtaactgcaccaatgatcctgtttgcaacctgtgcaatgttgctggccatctggcccgtcagtgccccaagtctgatacattgnngtgagaggggtgggcctcctnccttccgtggtgttggcgctcccttccatgatgttggcgctcccttccgtggtggcttcagtgacgtggtctgtcgggcctgcaaccagattggtcatacgagtcgtgattgcatggctggtgncttcatgatct

SEQ ID NO: 5281 - DNA, 838 bp, Zea mays
  Clone ID: TF_ZmC519073_1
gatgcatggggtgccttcggtgtccggaccaacccaatcccaatccaacatcgcgagtcggggtctctgtccctcaccgtcgccgccgcggcttccccccgctgacctccgccggagttcgccggactcgtagggtttcttcagtcgtcctcttccctgctggagatccgtaccctaggaaggaagggaggaaggaagcagggtgagttgtggtgattttgtggtttggacgtgtggtgttcacagtttggtgggagcttggaggcaggagatttagaaggaagggttgacgatgagcagccgaagcccgccgcagggaccggaggatgcgtactgaacgcaccttgtaccgtgacgcgccataccggagagacagggacggccgccgtggtccaaacaggtctgctagtgatttgtgcaacaactgtaagcgtccagggcattttgctagagattgtccaaatgtgtctgtctgccatgcctgtggccttccagggcacattgcagctgagtgttcttccaaagatctctgctggaactgcaaagagcctggacacatggctaatgcctgcccgaacgaagggatatgccgcaactgtggcaaatcaggccacattgcaaaagactgcactgctccgccaatgctgcctggagaagtgaagctctgcaacaactgctacaaaccagggcacattgccgtggagtgcaccaacgagaaggcctgcaacaactgtaggaagagtggccatcttgcccgtaactgcaccaatgagcctgtttgcaacctctgccatgttgcagggcatttggcccgtcaatgccccaaatctgacgagat

SEQ ID NO: 5282 - DNA, 809 bp, Zea mays
  unsure (1)..(809): unsure at all n locations
  Clone ID: TF_ZmC6609_12
ccggccggggcgacgactgtgtggagtaccgcccccgcccccgccccctcaccccccgacgccgacgccctaggcggctacgccaggtcccgagggacgggcccttcatcttcgtcagtctattcgccgggcgacgagcacccgccagtttggttggagcttggagtttagagggaagatttggtgatgagcagccgcagcctgccgccgaaggatcgcaggatgcgtactgaacgcacctcataccgtgatgcaccatatcggagggacagccgccatggtccaagcaggtttcgtaatgatttgtgcaacaattgtaagcgtcctgggcattttgctagagagtgtcctagcgtggctgtctgccatacctgcgggcttcctgggcacattgcagccgaatgttcttccaaaggtgtttgctggaactgcaaagagcctggccacatggctaacagctgcccaaatgaagggatatgccgtaactgtggcaagtccggtcacattgcaagagactgcaccgctccaccagtgccgccaggagaagtgatcctttgcagcaactgctacaaaccagggcattttcgtgaggaatgcaccaatgagaaggcctgcaataattgccggcagagcggccaccttgcccgtaactgcaccaatgatcctgtttgcaacctgtgcaatgttgctggccatctggcccgtcagtgccccaagtctgatacattgggtgagagggggtgggcctccttccttncgtggtgttggcgctcccttccatgatgttggcgctcccttccgtggtggct

SEQ ID NO: 5283 - DNA, 5145 bp, Zea mays
  Clone ID: TF_ZmC951_444
tcagggtgttacaggtgcataccctagggtggagttaaccaccacgttcccttctttgcgctgaggtggaggaccttttccctttctaagtttgcacctccgagctgtatgctcggagacaccacaaacgtagcagataaagtcctcctttttcttcttcatctttttggacttaggttggttcatattcttctgtggagagttcttcttcttcttctggaattttctatctccacccttctcaacaacgtgagcctggagttgctgggatggcttgttactggaccttgcacgctcttccacattaatcgtagctgacaactcagtgagagtcatttgcttcttcatgtggcggcgtgaagtcacaaagtctcgccaagacggcgggagctttgccagtattgcattcacctgaaaactgtctggtaggacgcagccatattggaccaagtccctaacaaggagttgaatctcctgtagctgctccataacagaccttccctcaaccattttatagttgaggtagttttctgttgtgaatgactcattgccattgtcaacttcagagaactcgttctcaagttcagtccatagacccttagcggaggtaaaactagagtacacgtcaaataagcggttcgacaagacgttcaccagacgagacaagcatgcctcatcggcttcgtcccacttggccttctccgctagtgcggcggcctttgctgcatcatcagcattatctgatgcagcctcgggaacagccaacgtcactaccagctcagcgaacacaaggttctgtcccagaaaaccaattccgccgcccacgtccggcccggacggtccgcgcctgaggccggacggtccgcgcgaggtcttggacggtccttgctttttccttcggacggtctgtagtgtagacttagatttttgcattggttctgtccgagggtcatcctggtgttgcggacggtccgccgcaagggcccggacggtccgcgcttggcctatttttccaaaaagcttctcctgtccggaataatctacggtatttcggacagtcgatttagtatagttgtagatgaacctttgacactttctccccctttggcatgaatcgccaaaaacggagtcattagagcccttagaaatactctctccccctccttcgtcgaggtcgagatgcccattggttcccatgggtgtcttgatgggtttggcatccttcatcccaaacttgcttagaatatcttgagtatacttcgtttggcttaggaaggtgccctcttggagttgcttcacttgaaatcctaagaaatacttcaactcccccatcatagacatctcgaatttttgtgtcatgatcctactaaattcttcacatgtagactcgttagtagacccaaatataatatcatcaacataaatttggcatacaaacaagtcattttcaagagttttagtgaataaagtaggatcggcctttccgactttgaatccattagtgataagaaaatccctaaggcattcataccatgctcttggggcttgcttgagcccataaagcgccttagagagcttatagacatggttaggatactcactgtcttcaaagccgagaggttgctcaacatagacctcttcctcattcctagtgaagttgttgagctcctcttgcattgccaccacccaatccgaatcttgaagtgcttcctctatcctgtgtggctcaatagaggaaacaaaagagtaatgctcacaaaaatgtgcaacacgagatctagtggttacccccttttgaatgtcgccgaggatggtgtcgatggggtgatctcgttggattgcttggtggactcttgggtgtggcgacctttgttcttcatcctcctcatcttggtcatttgcatctcccctttgatcattgccgtcatcttgaggtggctcatttgcttgatcttctatttcatcaacttgagcttcatcctcattttgagttggtggagatgcttgagtggagaaggatggttgatcttgtgcatttggaggctcttcggattccttaggacacacatccccaatggacatgttccttagcgcgatgcacggagcctcttcaatacctatctcatcaagatcaacttgctcggtaaggagttcgtatgaggtcttcttgaggattcggtgtagatatagccggttgatggcgtagcaggcggtgttgactgcctccgcccaaaaccgatctgaagtcttgtactcatcaagcatggtccttgccatgtccaatagagttctattcttcctctccatcccgccgatgcttatgtaagtgatcgggccgaatagatccatgtgtaggagctccagtggcatgtcagttgtcatgatgttcttgtgtggatggtgagcaccaacttgctttcctgcttggcatgcgctacaaaccctgtctttctcaaaatgaacattggttaatcctaaaatgtgctctccctttagaagcttatgaagattcttcatcccaacatgtgctagtcggcgatgccagagccagcccatgttagtcttagcaattaagaaagtgtcgagttcagctctatcaaaattcactaagtatagctgaccctctaacactcccttaaatgctattgaatcatcacttcttctaaagacagtgacaccttgatttccatccccaaatgtgatagctcgttggggatcttggtttttctcgtaggaggagaacatcttcttctcccctgtcatgtggtttgtgcacccgctgtcgataatccaacttgagcccccggatgcataaaccttgccggatttgttagttaacacatatgatgcatcaaaagttttgaatgaaaagctatgttcatttgatgcactaggagttttcttcttaggcaacttagcatgggttggttgcctagagctagatgtctcacccttatacatgaaagcatggttagggccagagtgagacttcctagaatgaattctcctaattttgtcctcgggataaccggcagggtataaaatgtaaccctcgttatcctgaggcatgggagccttgcccttaacaaagttggacaatttcttaggaggggccattaagtttgacattgcctccctgttggaagccaatgccatccttaatgccagggcgtctcccactataaagcataatctagtacaaatagaagtgtgctcaacggtagatgtagagggtttgcaagattttaattctacaaccttagcatgcaatatatcatttttagttctaaggtcggaaattgtagcattgcaaacatcaaaatctttagccttagcaagcaatttttcattctcaattctaaggctagcaagagaaatgtttaattcttcaatcctagcaagcaaatcatcattatcattcctaagattgggaattgaaacattacaagcaatagaatcaaccttagctaacaaattagaattctcatttctaagtttgtctatagtctcatggcaagtgcttagctcactagataatttttcacatttttcaacttctagagcataagcatttttaaccttaacatgctttttgttttccttgattaggaagtcctcttgggtgtccaagaggtcatccttctcatggatggcactaattaattcatttaacttttctttttgttgcatgtttaggttggcaaaaagagtgcacaagttatcttcctcatcactagcattttcatcactagaggattcatatctagtggaggatttagatttaaccttcttctttttgccgtcctttgccatgaggcacttgtggccgacgttggggaagagaaggcccttggtgacggcgatgttggcggcgtcctcgtcgtcggaggagtcgctagagctttcgtcgaagtcccactcccgacaaacatgggcatcgccgcccctcttcttgtagtatctcttcttctcctttcttctccccttcttgtcgtcgcctctgtcactgtcactagatataggacattttgcaataaaatgaccgggcttaccacatttgtaacacactttcttggagcgaggtttgtagtccttccccctcctttgtttgaggatttggcggaagctcttgatgacgagcgccatttcctcattgtcgagcttggaggcatcgattggttgtctacttggtgtagactcctccttcttctcctccgtcgccttgaatgcaaccggttgagcttcggacgtggagggaccgtcaagctcgttgttcttccgtgagcctttgatcataaattcaaagctcacaaaattcccgataacttcctcgggagtcattagtgtatatcttaaccacctcgtggtcatcccattttttgctcccgaggttgcgcacacttggttcaccaaggttttgagccggttgtacatatcttgtggttcctccccttggcgaaggcggaagcgaccgagcttcccttcgattgtttcccgcttggtgatcttggtgagttcatcaccctcgtgcgtcgtcttgagcacgtcccaaacttccttggcgctttttagtccttgcaccatgttgtactcctccctacttagagaggcgaggagtatggttgtggcttgggagttgaagtgctcgatttgggccacctcgtcctcatcataatcctcatcccctacggatggtacctgtgctccaaactcaacaacattccatatacttttgtggagtgaggttagatgaaatttcattaaatcactccacctagcataatcttcaccgtcaaaggttggcggtttgcctaatggaacggaaagtaatggagtatgtctagaggtacgaggataatgtaaggggatcttactaaacttcttgcgctcatggcgcttagaagttatggagggcgcgtcggagccagaggtagaaggtgacgaagtgtcggtctcgtagtagaccaccttcctcatcttctttattttgtcgccactctgatgcgacttgtgagaagaagtcttcttctccttcttctccttcatcttctccttgttgtgggactctcccgatgaagccttcccgtggcttgtagcgggcttgtcgccggtctccatctccttcttggcgagttctcccgacat

SEQ ID NO: 5284 - DNA, 1419 bp, Zea mays
  Clone ID: TF_ZmC1373_13
ctcgaggccggccggggaggcttagaattcggatccctcccagcacatccatccccttcccttccctcgtgccccgccggctctccagcgcgccgtctctgcccagatccaggagatatgcctcgctatgatgatcgctatggaggcacgcgcttgtatgttggcagattggccccccgtactcgttctcgtgatttagaatatctcttcggcaaatatggaaggcttactgtttgtggcaaccctttccgcagaatacgagaagtggagttgaagcgcgactatgcatttattgagttcagtgaacatcgtgatgccgatgaagctcggtaccaactagatggcagggatgtcgatggaagtcgcattgttgttgagtttgctaaaggggtcccacgtggtccaggtggctcacgtgaatatatgggaagaggccctccaccaggcacaggtcgttgtttcaactgtggaatggatggtcactgggcaagagattgtaaggctggtgactggaaaaataaatgctaccgttgtggagaaagagggcatatagaaagaaattgccagaacagtcctaggagcgtcaggcgtgaaagaagttactcacgctccccatctccacgccgtggaagaggtcgcagtccaagctatagcaggagcaggagtcgtagccggagctatagccgatcgaggtccctatctggatctcctaggggaggccgccgtgaccgtgatgataggagatcgaggagtcttagctacagcaggagccccgtgcggtcgccacctgcaaaggaaaaggagcgcagtcccacacctggcggaagcaggagcccaaggagtcgcagcccacaggatcaggtgatgagcccaccacctaaggataacggcgacaggaatggttcagaccgtggcgacagccccagagggagggaagacagcaggagccgcagccgcagcccatccggtggtaaccgcagccctgcagctaatgggcgtagcccgagccccagaggtgaccgtggcccgagccccatggctgaccgtagcccgagcccaaagggcaatggtaacaacgatggtggtgatgatgatactggccgtggtggttcccccacaggaagcaagtcaccctgaacgctgcaccgtctcagttcttaggtgcttcgtgatgcagtgggcaaacataccaaagacgtgatagctgtatcgtttccctatctgagacgtggacttatttagcttgctttgatcttggactcttattttttctcttatggatatatgatatgatgccttcgggctggcttggatctgaataagtgaatgtggacacgcatgttgtgtcgccctatgttggtatttacctgcaatgctatagcgtcagtcttgttgaaaaaaaaaaaaaaaaaagcggcc

SEQ ID NO: 5285 - DNA, 1474 bp, Zea mays
  Clone ID: TF_ZmC1373_24
ccggccgggacaccgcctccggcttcagttccccgaggcttagaattcggatccctcccacggtcccaccacatccatccccttcccttcccttccttcgtgccccgccggctctccagcgcgccgtctctgcccagatccaggagatatgcctcgctatgatgatcgctatggaggcacgcgcttgtatgttggcagattggccccccgtactcgttctcgtgatttagaatatctcttcggcaaatatggaagaatacgagaagtggagttgaagcgcgactatgcatttattgagttcagtgaacatcgtgatgccgatgaagctcggtaccaactagatggcagggatgtcgatggaagtcgcattgttgttgagtttgctaaaggggtcccacgtggtccaggtggctcacgtgaatatatgggaagaggccctccaccaggcacaggtcgttgtttcaactgtggaatggatggtcactgggcaagagactgtaaggctggtgactggaaaaataaatgctaccgttgtggagaaagagggcatatagaaagaaattgccagaacagtcctaggagcgtcaggcgtgaaagaagttactcacgctccccatctccacgccgtggaagaggtcgcagtccaagctatagcaggagcaggagtcgtagccggagccggagctatagccgatcgaggtccctatctggatctcctaggggaggccgccgtgaccgtgatgataggagatcgaggagtcttagctacagcaggagccccgtgcggtcgccacctgcaaaggaaaaggagcgcagtcccacacctggcggaagcaggagcccaaggagccgcagcccacaggatcaggtgatgagcccaccacctaaggataacggcgataggaatggttcagaccgtggcgacagccccagagggagggaagacagcaggagccgcagccgcagcccatccggtggtaaccgcagccctgcagctaatgggcgtagcccgagcccagagggggccccagaggtgaccgtaccccgagccccatggctgaccgtggcccgagccccatggctgaccgtagcccgagcccaaagggcaatggtaacaacgatggtggtgatgatgatactggccgtggtggttcccccacaggaagcaagtcaccctgaacgctgcaccgtctcagttcttaggtgcttcgtgatgcagtgggcaaacataccaaagacgtgatagctgtatcgtttccctatctgagacgtggacttatttagcttgctttgatcttggactcttatttttttctcttatggatatatgatatgatgccttcgggctggcttggatctgaataagtgaatgtggtcaaacgcatgttgtgtcgccctatgttggtatttacctgcaatgctatagcgtcagtcttgttgaggcctgaccaaaaaaaaaaaaaaaaaagcggcc

SEQ ID NO: 5286 - DNA, 1580 bp, Zea mays
  Clone ID: TF_ZmC1373_28
cattgggtacctcgaggccggccgggaccgcctccggcttcagttccccgaggcttagaattcggatccctcccaccacatccatccccttcccttcccttccctcgtgccccgccggctctccagcgcgccgtctctgcccagatccaggagatatgcctcgctatgatgatcgctatggaggcacgcgcttgtatgttggcagattggccccccgtactcgttctcgtgatttagaatatctcttcggcaaatatggaagaatacgagaagtggagttgaagcgcgactatgcatttattgagttcagtgaacatcgtgatgccgatgaagctcggtaccaactagatggcagggatgtcgatggaagtcgcattgttgttgagtttgctaaaggggtcccacgtggtccaggtggctcacgtgaatatatgggaagaggccctccaccaggcacaggtcgttgtttcaactgtggaatggatggtcactgggcaagagattgtaaggctggtgactggaaaaataaatgctaccgttgtggagaaagagggcatatagaaagaaattgccagaacagtcctaggagcgtcaggcgtgaaagaagttactcacgctccccatctccacgccgtggaagaggtcgcagtccaagctatagcaggagcaggagccggagccggagccggagctatagccgatcgaggtccctatctggatctcctaggggaggccgccgtgaccgtgatgataggagatcgaggagtcttagctacagcaggagccccatgcggtcgccacctgcaaaggaaaaggagcgcagtcccacacctggcggaagcaggagcccaaggagccgcagcccacaggatcaggtgatgagcccaccacctaaggataacggcgacaggaatggttcagaccgtggcgacagccccagagggagggaaaacagcaggagccgcagccgcagccgcagcccatccggtggtaaccgcagccctgcagctaatgggcgtagcccgaggagccccagaggtgaccgtaccccgagccccatggctgaccgtagcccgagcccaaagggcaatggtaacaacgatggtggtgatgatgatactggccgtggtggttcccccacaggaagcaagtcaccctgaacgctgcaccgtctcagttcttaggtgcttcgtgatgcagtgggcaaacataccaaagacgtgatagctgtatcgtttccctatctgagacgtggacttatttagcttgctttgatattggtgtcttatttctcttatgaataatgtggacacgcatgttgtgtcgccctatgttggtatttacctgcaatgctatagcgtcagtcttgttgaggcctgagcaaaaacaaccagataccccctttgaaaggtactgctttgttgtgggtgaatcggggactcggggtggcataggttcacggcagagtcgttttccgcgactcgtgctgccggttagccgagtcctgctcgctagtcttcagcctgttttgctttaaatcgtaccggcttttactacttataaagtgtttgttttatctc

SEQ ID NO: 5287 - DNA, 1264 bp, Zea mays
  Clone ID: TF_ZmC31167_2
cccacgcgtccgcccacgcggccgcccacgcgttctgctgcaaccctgtgttttcttcctccattaacccccagcgacgagcgtgcgagcactccctcgccgcccaccgcgcctcgtggcggcaactgggcggccgtcgctgccgccctacgccaggtgccgaggtgattttccgcccctttgccggcgacgagcactaccagatactctgagcctggctgccgaaacttccttttggtgtccctgttacattcggtttcgtttttgatgacttcatcaagaagcaagagcaggagccacagtcgcagcaggagcaggagcaggagccgcagtcctcagcgaagagataggttgcgcagcgaacgtgcaccccgccgcagtcgcagtcacagcaggagccgcagcccataccgtcgcagagaacggcgtggatacaaggatctcgtatgcaagaactgccggagacctgggcactttgctaaggagtgcccatctgcgcctacgtgcaataactgtaaccttccaggccacttcgcagcagaatgcacctcaaaaactgtttgctggaactgcaaagagcctgggcacattgcgagtgagtgcaagaacgaggccctgtgccacacctgcaacaaaacaggtcacttggcgcgtgattgccctacttcaggggctaacgtcaagctatgcaacaaatgttttaaatcaggccacgtcgccgttgactgcaccaacgaacgggcatgcaacaactgccgtcagccagggcacatagctcgagagtgcaagaacgatcctgtttgcaacctgtgcaatgtctctggccatgtcgcgcgcgtctgctcaaagacgactctggcttcaatacgaggaacacatacagggtggccccgttccgtgggggcgaagcgaggggcggcaggaaaagaagggtcgatcagtgagtaactagactagagcatgtgtccagcgcctaacgcgcttatcctctgttggaatcgatggccctaatggtaacgggacatcatgaggcgtctgcctaaattgacttggtttctgagagagtggagcgggaatagcggatccgctaaaacaagatctttaaaagtgtccagtgcatccaaatctgaacctgcgaaacctttctatctttgttcttcccactttcgcgctttcgaactactggttatgtcatcacttttctttgatgtttactctttttggttaggagatcagctgctaacctattttcatttctaactta

SEQ ID NO: 5288 - DNA, 5259 bp, Zea mays
  Clone ID: TF_ZmC951_428
ttaagtacattttggtacccatctcatgataggtccatcaaggttagccaataaggacttaggcacccaaatagccttggtcctagaatgtggtgaactcatcacctttctagcacaagagtcaaatttgggtctcctaagcatatttgaatgtattgacaagttaggcttaggagttttaccctttggacaaaccttgaatagatgacctttttcacggcaattgtagcaaatgtgatgcttgtccttgcaatgcttttgccttttgctttcatcctttttgatggtcatctttcttgatcgtgcaaggtcttgattcttcatgtgggggcatgaatcaatttcatggcccttctccttgcatccatagcatctcctatcgcttctctttgatctttctttgttgaagcacataggtacattgttagagcaaatcatatgagcattaattttctcaccatggattttgctcatgcccttcttggaaagcttggtattcttttgaaggggttttgtgcatgctacggttgtccccttctcaagctttttcaccatattatcacggttatcttgagaaggttgagcatgacactttcccttcaaacgagttaagctccttcttagcattccaacttcttccttgagctctttattttcttgtgtgatagaaatatcactaattcctgaaatttctagctcaatggaagattggcttgcttgataacaacaattgttagcacatgataatgtagtttctacttgagtacatgtgcatgtgtgaggtttgtatgatttaaaattagttaacacaacctcatgagccatttctaacatgatatgtgaatccataaatttattatgagagcatacaagcatatcatgtttttcttgcaaagctagattttcaatgtttagcttttctaccgtgttcttgagcatagcatttttattttctaattgagcaatatatgatgaatgattaatagctttaatttgctcaattgaaatgtcttcatacctttggaccaaatcatcatgagagcactttagcttctcatgctctttggtcaacttctccaagtctttgattttttcgatgaggatatcttcttgcttatgaagcatttccttttgttcttccgctcttttcatgagtttgagcaagctcatccggttcttcttacttagttgagcgaagaatttttgaagatcatcctcatcttcactatcactttcatgctcctcctcatcctcactttcgctttcactgtcactctcattagcaacaaagcacatatgagaagtggatttgaaagacgaaccttgtgaagaggtggattcgtcgtttggtctccatcgatcattttcttcttcttcaataatgttcttcgcctcatcttccttcattttgaggaacatcctttcggcgattctcatggcaaggtctattgccctaggatcaacatctgcagactggtcaagttgaccaagaccggttgaaccgccccaggggggggcggttgaacccgcccccctgacagctctggcgacctgtttgccagtctgactggcagaccccttatgaatgtcgccgaggatggtgtcgacggggtgatctcgttggattgcttggtggactcttgggtgtggcggcctttgctcttcatcctccttgtcttgatcatttgtatctcccccttgatcattgtcgtcattttgaggtggctcatttgcttgatcttctatttcatcaacttgagcttcatcctcattttgagttggtggagatgcttgcgtggaggaggatggttgatcttgtgcatttggaggctcttcgaattccttaggacacacatccccaatggacatgttccttagcgcgatgcacggagcctcttcaatacctatctcatcaagatcaacttgctctacttgggagccgttagtctcatcaaacacaacgtcacaagaaacttcaacttgtccagtagacttgttaaagactctatatgcccttgtgtttgaatcatatcctagtaaaaagtcttctacagtcttaggagcaaatttagactttctacctcttttaataagaatgaagcatttgctaccaaagactctaaaatatgaaatgttgggctttttaccggttaggagttcgtatgatgtcttcttgaggatttggtgtagatataaccggttgatggcgtagcaggcggtgttgaccgcctcggcccaaaaccgatccgaagtcttgtactcatcaagcatggttcttgccatgtccaatagagttcgattcttcctctccactacaccattttgttgtggcgtgtagggggaggagaactcatgcttgatgccctcctcctcaaggaagccttcaatttgagagttcttgaactccgtaccgttgtcgcttctaattttcttgatcctcaagccgaactcattttgagcccgtctcaagaatccctttaaggtctcttgggtatgagatttttccctgtctttctcaaaatgaacatttgttaatcctaaaatgtgttctccctttataagcttatgaagattcttcatcccaacatgggctagtcggcgatgccagagccaacccatgttagtcttagcaattaagcaagtgtcgagttcagctctttcaaaatctaccaagtatagctgaccctctaacactcccttaaatgctattgaatcatcacttcttctaaagacagtgacaccttgatttccatccccgaatgtgatagctcgttggggatcttggtttttctcatatgaggagaacatcttcttctcccctgtcatgtggtttatgcatccgctgtcgatgatccaacttgagcccccggatgcataaaccttgccggatttgttagttaaaacatatgatgcatcaaaagttttaaatgaaatgtcatgatcatttgatgcactaggagttttcttcttaggcaacttagcacgggttggttgcctagaactagatgtctcacccttatacataaaagcatggttagggccagagtgagacttcctagaatgaattctcctaattttgctctcagggtagccggcagggtacaaaatgtaaccctcgttatcctgaggcatgagagccttgcccttaacaaaattagataaccttttaggaggggcattaattttgacattgcctccctgttggaagccaatgccatccttaatgccagggcgtctccctctatagagcatgcttctagcaaatttaaatttttcatcttctaagtcatgctcggcaatcttagcatctagttttgctatatgatcattttgttgtttaattaaagccatgtgatcatgaatagcattaacatcaacatctctacatctagtacaaatagaagtgtgctcaatggtagatgtagagggtttgcaagattttaattctacaaccttagcatgcaaaatatcatttttagttctaaggtcggaaatagtagcattgcaaacatcaaaatctttagccttagcaagcaatttttcattctcaatcctaaggctagcaagagatatgttcaattcttcaatcttagtaagcaaatcatcattatcatttctaagattggaaattgaagcattacaaacatttgaatcaaccttagctaataaattagcattctcatttctaaggttgtctattgtctcatggcaagtgcttagctcactagataatttttcatatttttcaacttctagagcataagcatgtttaaccttaacatgttttttgttttccttgattaggaagtcctcttgggagtccaagaggtcatccttctcatggatggcactaattaattcatttaacttttccttttgttgcatgtttaggttggcaaagagagtacgtaaattatcttcctcatcactagaattgtcatcactagaggattcatatctagtggaggatttagatttaaccttcttctttttgccgtccttagccatgaggcacttgtggccgacgttggggaagaggagtcccttggtgacggcgatgttggcggcgtcctcgtcgtcggaggagtcgctagagctttcgtcggagtcccactcacgacaaacatgggcatcgccgcccttcttcttgtagtacctcttcttctcctttcttctccccttcttgtcgtcacccctgtcactgtcactagaaatgggacatttagctataaagtgaccgggcttaccacatttgtaacaaaccttcttggagcggggcttgtaatctttctccctcctttgtttgaggatttggcggaagctcttgatgacgagcgtcatttcctcattgtcgagcttggaggcatcgattggttgtctacttggtgtagattcctccttcttctcctccgtcgccttgaatgcaaccggttgagcttcggacgtggagggaccgtcaagctcgttgatcttccgtgagcccttgatcataaattcaaagctcacaaaattcccgattacttcctcaggagtcattagtgtatatcttggattaccacgaattaattgtacttgagtagggttaaggaaaataagagatcttagaataaccttaaccacctcgtggtcatcccactttttgctcccgaggttgcgcacttgattcaccaaggtcttgagccggttgtacatatcttgtggctcctccccttggcgaagacgaaagcgaccgagctccccctcgatcgtttcccgcttggtgatcttgttgtactcctccctacttagagaggcgaggagtattgttgtggcttgggagttgaagtgctcgatttgggccacctcgtcctcatcataatcctcatcccctacggatggtacctgtgctccaaactcaacaacattccatatacttttgtggagtgaggttagatgaaatttcattaaatcactccacctagcataatcttcaccgtcaaaggttggcggtttgctaaacttcttgcgctcatggcgcttagaagttatggagggcgcgtcggagccggaggtagaaggtgatgaagtgtcggtctcgtagtagaccaccttcctcatcttctttattttgtcgccactccgatgcgacttgtgagaagaagtcttcttctccttcttcttcttctctttgttgtgggactctcccgatgaagccttcccgtggcttgtagcgggcttgtcgccggtttccatctccttcttggtgagttctcccgacat

SEQ ID NO: 5289 - DNA, 2049 bp, Zea mays
  Clone ID: TF_ZM4989.C10.o4.fg
atggcttgttacctagaggccgttgatctaggtgtttggagagtcactcgtgacgggatgaaaccccccaagaatcccgagaaacccaccacgagtgaggaaaaagaaattcatttaaatgctagagccaaaaattgcttgtatgaatctcttagcatggatatttttaatcaagtattcacattgaaaactgctaatgagatttggctaaaattgcatgagcttcatgacggcacatccaatgtccgtgagcaaaaacattgcctagtcttaaatgagtataatacttttgctatgagagatgatgagcttgttagagacatgtattctcgtttaaatctaatcatcaatgagctcaactctattggcattaataagctaggtgatgcggacattgtgaggaagattatctcccttctaccacaacaaagatatgggagcatcatcaccatccttcacaacatggaggacttgagcaacatgaccccgaccattgtgattgggaaaatcgcagcttttgagatgtcgcgaaaaatgtgtcggggagaggagccaacttcctcaagaccatatgcttttgcatgtgatgaaaggaagggcaaaaagaaggctcccactccaagttcctcaagcgaagaagaggaagaagaagaagaaagtgatgatgatgaagataatcaaccatgcacatcatcctccgaggacgaacaaacaatccgacgcgtcggaaaggtaatgaggatgattcgcaagattaatctaatgggtgtgcccctgcaggtcgaagatcttctctttaacattgacaggaaaaagcaaaggaagagaggatgcttcgcatgtggggagaagggccacttcagggacaactgtccaactatggccgaacccaaaaaggagaggagcaaaggcaaggcgctaacaagtgttagaacttgggatgactcttcaagcgaagatgaacctccaaggacgcgcagccaccgatcctcatcacgctcgtcacggtcatcacacaaatgccttatggcaagaggtaacaaaagcattccatcctctggtgatgaaagtagtagtgatgatgaaggtgagggaaaggcctctctagatgaacttgcggaagccgtagaatttttccaggatgtttgcactaagcaaaaagctcaacttaaaactttgaaaaataagttggttagctctcaaaatgattacaaaggtttgctagaaaaatttgaaacttttgcaaacttaaatagtgagctatcaactaaaattgagctattagaatcttgtgctccatccactgctaccgatgatagccttattaaaaagaatgaaaaacttaaggctaagttagctagctcccaagaagctattgaaaatttgctagagaaaatggaaattcttagcatacacaataatgagctaactactaagctagaaaacattggtagcaccccaggagcatccttagttaaaattcctgaaattattaaaaaggatgcttctacttcttgctttgatttaattgatgattctaacccctgcaaccaagttcttgttgagaatattgttgtagaaacatgttcggacgaggttgcaaaggaaaatgagcaattaaggcaggaagtggctcgccttggcaaggctttgtatgacaagaaaggcaaagccaaacaaatccaacctccacaggataacaccaccgcgggagtgaacaagcctatggagggagaaactgtgatttgtaggctatgccacaaggaaggccacaagtctttccaatgcaaggcgatgaccggggataaacaaaggcaaaagctcaagcaaaagccatcaatcaaaatctccaacacctacatcaaaaaggtggacaaaaaggatgctacaccatatttgatcaagaagaaaaagaatggaaaggtgatagcaatcaaggccaacaagcaagccaacaaaggaaagggggccaaacgcatctgggtgccaaaggaaataatttcaaccatgaaaagcaccaagaaggtttggatcccgaaagggaagtga

SEQ ID NO: 5290 - DNA, 992 bp, Zea mays
  Clone ID: TF_ZmC65805_1
acctgtcatgctagtcatctgggaaagcattgcggaaggataaaccttcacaagatgtagaagggacctcggttaaagaatcaaaaccatcagctggtgaagatgattcgtcaaaaatatgttataaatgcaaaaaggctggacatctttctcgcgattgcccagaaagcacatctgaggtggaccgaaatgatggcagtattagtagaagcagagacgatacgggtaccaatactgctcctgctggtggcaacagtcctatggacgaagacgatgttcaagaaattggtgatgaagagaaagaaaagttgattgacttggactacttaactggaaacccactaccaaatgatattttgctatatgctgtacctgtgtgtgccccttacaacgcattgcagacatacaaatatcgtgtaaagattaccccaggcactgcaaagaaagggaaagctgcaaaaaccgcgatgagcttgttcctgcacacacctgatgctaccaaccgtgagaaggagctcatgaaggcatgcacagaccctgagctggtggctgcaatcgtcgggaatgccaagatcacagcgcctggcctcactcaactgaagcagaaacagaagcagaaggggaagaagtctgcaaaacagaactagtgtgaaactggtgggtccaaagaactgatccatccccgattcgcaggaagtgaagctttgcctttgcagaaagtctgtggatgttgtggtttgtcagttgtcgctcgaggcgcatttgggggtatatgcagcctgtcagggagtacacccctttggcgtcacactggtgaggccagagcgacaggcacgcagtaggggacccaagctgcacgtctatgatgcaattgcgatatacagctcataataaaagaagtattgatttcatatgcaaaaaaaaaaaaaaaaaacccccctgtgataccctggaaagaattccgacatacatttcatgtgcaattcccactt

SEQ ID NO: 5291 - DNA, 1931 bp, Zea mays
  Clone ID: TF_ZmC12531_2
gaaatttattccggacatgtaatgccgcatcagtgatgcactgcccactcaaacatcagggaaaggctcaaagcacagttacagactttcagttgccgtttttgcaaaaggcatcaacgccatgccatggaagacagtaaaaaaaaataataaatagtttgaaccacgattacatatataataatctcagaacaaacaactatcgaaagggcatgaaccgacgacaggtagagttcatccccaggagataattggtatctatctatggctaaaacgaacaacaatatcaggcgcgtgcatccagctaatttctcccgaaccggacatgggtgttgctggcggcagccgcggcgaatcttgatgacgagaacccatgcttcctggcgctgggtgaataattccagttcggtgacatggtaccatggctgtgccctcgtgaagactcgggagtgaagtagtcacagccagacaagaattggtgattcggtgaagacatggtaccatggtagttgtgccttcgtgaaggctggggagtgaggtagtcgcaaccagacaagaactggtggtttgcgtaagacttcttgggagtagatggagagccccacccattggatttgtacttcttcaatggtagatcatctccaccagtccagccacccctcgatttgggtttatgacgaggtgtgcccactctttcctcgagatgggggcttttccttttgcttgtttttcgggcgtcataaggagctgatctagcactactggaagcctttttccatttctccttcctctgaatatgcgacgatgacttgcctttcgaccgatcggacttagcgttctttgtgcagccacgtgcaaagtgaccttcctcgccacatttgaagcataaggttggagttgtgacagcactggtttccctgcgtttggcacatcccagaccagaatgaccagattgggcacaattataacagctaatttgtttcggacaatcgtcagagaagtcggaacaacatagatggcccttctggttacacacgtagcatcttattttctcgatatcatctggtgggtaatcattggtacatccaaacatatcatgacctatttctccacattttaaacataatgtggattgatgatcattcctcctgtgcttatcagggcagtcctttgccatatggcctccttttttacagataaaacagtcttgaccctgcgtgcactgctttgcattgtgcccaaacaacccacaaacaaagcaaggcttctttcgcttttccaatggacagtttgcagctacatgcccttcctcgctacaattaaaacaagtctccaacagtgtttccccaggatcaaagtatctcggtatgcgaaggagcttccgcagaaccatattatcagatgcaggggcatcagccccattttcagttaacaccgattctgctgtcccaatgggctcctcctgggtgctacaaaccgccttctcttcctcgtccacggcggcccccgccgcagcggtcgcctccttccgttgccttttcctttgcttccagtgctgcctcttcttctgtttcctccggggctcatccgcctcagcgagctccaccacggcgtcctcatcgtcgccggaggacactgagagcaggttggcgaagccggtgactccaccgcaggacgcccaacgccgcttccgctgcgcgcgcgcgatgatctccaggctgaggtcctcgttccccacctcgtcgtcctcctcgtcgctcccgcccctgcgcggcttccgaaaaggcggggaaccatcttcgtccaggtctgagtcccaccgcgccctggagcgccagcgctgggccatcagcgttctgcggcggcgggtgagggacagagaaaaccaaataacgcgctcgatctcgaggcggcgcaagaaagtcccggcc

SEQ ID NO: 5292 - DNA, 789 bp, Zea mays
  Clone ID: TF_ZmC12531_3
tttttaccagataaaacagtcttgaccctgcgtgcactgctttgcattgtgcccaaacaacccacaaacaaagcaaggcttctttcgcttttccaatggacagtttgcagctacatgcccttcctcgctacaattaaaacaagtctccaacagtgtttccccaggatcaaagtatctcggtatgcgaaggagcttccgcagaaccatattatcagatgcaggggcatcagccccattttcagttaacaccgattctgctgtcccaatgggcccctcctcggtgctacaaaccgcattctcatccacctctacggcggcccccgccgcagcctctgtagtctccttccgatgcttcttcctttgcttccggcgctgcttcttcttctgcttcctccggggctcatccgcctcatcgagctccaccacggcgccctcctcgtcggcggaggacaccgaaagaaggtcggcgaacacgggcactccgccggctgattccccgcgccgcttccgctgcgcgcgcgcgacgatctccaggctgagatcctcgttccccagctcatcgtcctcctcgtcgcccccgctgtggcgcggctgccgggacggcggggaagcatcttcgtccaggtctgggtcccgccgcgccctcgagcgccagcgctcggccatcggcggctgcggcggcgggcgaggggcagagaaaaccctagcgcactcgatgtggaggaggcgccgacaataggatgggaaagccttcccagcgggtctccccgtctccggccggggtcgagg

SEQ ID NO: 5293 - DNA, 1299 bp, Zea mays
  Clone ID: TF_ZmC6609_1
gctgcgctccctccgagcccgagcccgagcccgaggaccgggctactgccgtccgccgcaagccccgtcctgcactcctgcatccgggaacgttttaccccgtccggccgtccccctcgttctttctctcccccttctctctcgctgcgacgactgggtaggctgccgccgccgccctacgccaggtcccgaggaccaaggcattcgtattcgtcagtctcttcgccgggcgacgccagtttggttggaacttggagtgtagagggaagatttggtgatgagcagccgcagcccgccgccgaaggaccgcaggatgcgtactgaacgcacctcataccgtggcgcaccatatcggagggacagccgccatggtccaagcaggtttcggaatgatttgtgcaacaattgtaagcgtcctgggcattttgctagagagtgtcctagcgtggctgtctgtcatacctgcgggcttcctgggcacattgcagctgaatgttcttccaaaggtacctgctggaactgcaaagagcctggccacatggctaacagctgcccaaatgaagggatatgccgtaactgtggcaagtccggacatattgcaagagactgcactgctccaccagtgccgccaggagaagtgatcctttgcagcaactgctacaagccagggcattttcgtgaggaatgcaccaatgagaaggcctgcaacaattgccggcagagtggccatattgcccgtaactgcaccaatgatcctgtttgcaacctgtgcaatgttgctggccacctggcccgtcagtgccccaagtctgatacattgggcgagaggggtgggcctcctcccttccatggtgttggcgctcccttccgtggtgttggcgttcccttccgtggtggcctcagtgacgtgatctgccgggcctgcaaccagattggccatgcgagtcgtgactgcatggctggtgctttcatgatctgccacaactgtggcggccgtggccacacggcatatgagtgtccctctgtgagtctcattgagaggttcccacctcgccgtttctgaaggacgtccaagggctatccagatgactgttgttttcagcccattgtgtcaagaacactcatttccgttttcttttttttttccaaaccctaatggattctagatctttcagattcttaacttgtcagcactatttgtgattccctaatggattctagatatttcagattaataactcgtcagcaccatttataattctggattttctaccaaaaaaaaaaaaaaaacctcgagag

SEQ ID NO: 5294 - DNA, 2439 bp, Zea mays
  Clone ID: TF_ZmC6609_10
gtaatttaaaaataactagccaaattgattacaaactgcaatcactaaacctatatgttacattttagaatgaacgattccatgtgaattttagcacacaaccaactacccctaggtctgtatcatttttcaatttgcaagcacaaataacaaagttttctaatactatcacagaactaatttatcacgatgatgggaaaagtatataatttacgaaaaaaaaatctactaatctatttccatcgaactgaagaatcaagaatgtaaagaggaactaggatgagcttggtttctgcctctcctggctggaggtgtcccaaacatcttgctcctttgggctcgaagcatatgagccacatggcatcccagtgcagccttctacatggttcacaagtgtatgatagaacaaatgattcaccatggaaaaccctagcacaaagggaggagggaggggggagggcaagtaccagccgccaccttacagggagaagaacaatgggaaggagctttgctggcattgcttctagtcttggtcctgttggcgcattggacgcgcgagggtcacatgacaacaaaacccagcctcaagtggcgatgctcctcctttccctctgggttgatgcgaattgggcttagaacaaatccaaccacatcattaccaaattctcttttggccgaaggcagttcctttcctggatgccgtggatctgcccctggaccacgccattccataggcttccaaatgaggcctttcaggacccttgtgacctaccatgggaacttgagcatgctcatagtgaaggttggtgatttttgtgggacatagccacataggattggattttagtctggttttggtgttttgctgtggacagaaagaagaccagaggtttgtgggagtatcgaaggtggtggtgattttgtagcgtggtgttgcagtttggttggaacttggagtgtagagggaagatttggtgatgagcagccgcagcccgccgccgaaggaccgcaggatgcgtactgaacgcacctcataccgtggcgcaccatatcggagggacagccgccatggtccaagcaggtttgagctaatctaagtcaaacaggacgagtgtttggcattgttcttccaaacatcactgcttcctcttgttatcatgtatatatttggctaaatgctatgtgaaattaccataattgttattttatttagatgtaaactttgcctatatttatcccattgcaaccacttatgcatgtatgtagcttaaataagggcacttgatattggttaatgtagcactatttttttttctgaaagtctagtaaaaagtgtatggtaaagtgatctgggattgaaattttttggatgaattcatgttgtgccatggttttaggagaaagcctatgcaggattgtaactagaaatgagtcatgacaagaatggtgaaattacttaaaaatttatgtgaatggaactgtaatatcttattattcagacatttggaatcttatgtatcctttagttatttccctttccattgtgcaggtttcggaatgatttgtgcaacaattgtaagcgtcctgggcattttgctagagagtgtcctagcgtggctgtctgtcatacctgcgggcttcctgggcacattgcagctgaatgttcttccaaaggtacctgctggaactgcaaagagcctggccacatggctaacagctgcccaaatgaagggatatgccgtaactgtggcaagtccggacatattgcaagagactgcactgctccaccagtgccgccaggagaagtgatcctttgcagcaactgctacaagccagggcattttcgtgaggaatgcaccaatgagaaggcctgcaacaattgccggcagagtggccatattgcccgtaactgcaccaatgatcctgtttgcaacctgtgcaatgttgctggccacctggcccgtcagtgccccaagtctgatacattgggcgagaggggtgggcctcctcccttccatggtgttggcgctcccttccgtggtgttggcgttcccttccgtggtggcctcagtgacgtgatctgccgggcctgcaaccagattggccatgcgagtcgtgactgcatggctggtgctttcatgatctgccacaactgtggcggccgtggccacacggcatatgagtgtccctctgtgagtctcattgagaggttcccacctcgccgtttctgaaggacgtccaagggctatccagatgactgttgttttcagcccattgtgtcaagaacactcatttccgttttcttttttttttccaaaccctaatggattctagatctttcagattcttaacttgtcagcactatttgtgattccctaatggattctagatatttcagattaataactcgtcagcaccatttataattctggattttct

SEQ ID NO: 5295 - DNA, 1153 bp, Zea mays
  Clone ID: TF_ZmC6609_2
attcggctcgaggcccgaggaccgggctactgccgtccgccgcaagccccgtcctgcactcctgcatccgttcacgttttaccccgtccggccgtccccctcgttctttctctcccccttctctctcgctgcgacgactgggtaggctgccgccgccgccctacgccaggtcccgaggaccaaggcattcgtattcgtcagtctcttcgccgggcgacgccaggtttcggaatgatttgtgcaacaattgtaagcgtcctgggcattttgctagagagtgtcctagcgtggctgtctgtcatacctgcgggcttcctgggcacattgcagctgaatgttcttccaaaggtacctgctggaactgcaaagagcctggccacatggctaacagctgcccaaatgaagggatatgccgtaactgtggcaagtccggacatattgcaagagactgcactgctccaccagtgccgccaggagaagtgatcctttgcagcaactgctacaagccagggcattttcgtgaggaatgcaccaatgagaaggcctgcaacaattgccggcagagtggccatattgcccgtaactgcaccaatgatcctgtttgcaacctgtgcaatgttgctggccacctggcccgtcagtgccccaagtctgatacattgggcgagaggggtgggcctcctcccttccatggtgttggcgctcccttccgtggtgttggcgttcccttccgtggtggcctcagtgacgtgatctgccgggcctgcaaccagattggccatgcgagtcgtgactgcatggctggtgctttcatgatctgccacaactgtggcggccgtggccacacggcatatgagtgtccctctgtgagtctcattgagaggttcccacctcgccgtttctgaaggacgtccaagggctatccagatgactgttgttttcagcccattgtgtcaagaacactcatttcccttttcttttttttttccaaaccctaatggattctagatctttcagattcttaacttgtcagcactatttgtgattccctaatggattctagatatttcagattgaagacggggatacttgcccttacgaactcaaaaaaaaaaaaaaaagacaaaaaacagaaaaaaaaaaaaagggcggc

SEQ ID NO: 5296 - DNA, 1245 bp, Zea mays
  Clone ID: TF_ZmC6609_5
cgttttaccccgtccggccgtccccctcgttctttctctcccccttctctctcgctgcgacgactgggtaggctgccgccgccgccctacgccaggtcccgaggaccaaggcattcgtattcgtcagtctcttcgccgggcgacgccagaaagaagaccagaggtttgtgggagtatcgaaggtggtggtgattttgtagcgtggtgttgcagtttggttggaacttggagtgtagagggaagatttggtgatgagcagccgcagcccgccgccgaaggaccgcaggatgcgtactgaacgcacctcataccgtggcgcaccatatcggagggacagccgccatggtccaagcaggtttcggaatgatttgtgcaacaattgtaagcgtcctgggcattttgctagagagtgtcctagcgtggctgtctgtcatacctgcgggcttcctgggcacattgcagctgaatgttcttccaaaggtacctgctggaactgcaaagagcctggccacatggctaacagctgcccaaatgaagggatatgccgtaactgtggcaagtccggacatattgcaagagactgcactgctccaccagtgccgccaggagaagtgatcctttgcagcaactgctacaagccagggcattttcgtgaggaatgcaccaatgagaaggcctgcaacaattgccggcagagtggccatattgcccgtaactgcaccaatgatcctgtttgcaacctgtgcaatgttgctggccacctggcccgtcagtgccccaagtctgatacattgggcgagaggggtgggcctcctcccttccatggtgttggcgctcccttccgtggtgttggcgttcccttccgtggtggcctcagtgacgtgatctgccgggcctgcaaccagattggccatgcgagtcgtgactgcatggctggtgctttcatgatctgccacaactgtggcggccgtggccacacggcatatgagtgtccctctgtgagtctcattgagaggttcccacctcgccgtttctgaaggacgtccaagggctatccagatgactgttgttttcagcccattgtgtcaagaacactcatttccgttttcttttttttttccaaaccctaatggattctagatctttcagattcttaacttgtcagcactatttgtgattccctaatggattctagatatttcagattaataactcgtcagcaccatttataattctggattttct

SEQ ID NO: 5297 - DNA, 2993 bp, Zea mays
  Clone ID: TF_ZmC11384_1
gtcctctccattctgccgtctcctctcctactcctcccccctgccgccgcaagatccaccagggctctcgaccgcaatggagccgcagctgacgcccggcgcggtggcggcggtctccgcccacgccgacggcaacggcacgctgcagccggtgctgcaggtggtggacgtgcggatggtcaacaacgccaagaacccctccgccgagcgcttccggatggtgctctccgacggcgaacacaccatgcagtccatgctcgccaccgccgagaacgcgcgcgtccgggacggctccatccagaagggctccatcgtccacctcctggagtgcacctgcagcaccatccagtctcgcaggatcattatcgttatcaaacttgatgttctgcaaagtgagtgtgccataattggaaaccccaggccctatgaaatgagaaaccaacctaatgagcagggcaccaacataccggccaatgctgctcaagctaatactggaacgtattccagtggccctggtcctctgtgatcacctgctgcttctgaacgagcacaagttgctaataatgtaccatacagtggtttttattaggtgcctcatggtaatggcatccctgcgtccatgtgtgcaggatgcaaaccacccccttttatgtttgtgtgtgaagttagaactatgtatcagtacttctttatgttttcgtcttataaatcctcgttgctgtgtcaaaaaaaaaagaactctcaccagaaccaaaggtttgcagttccttccatggctggtggcagtggtgctcctgggaatacatatggacaacctgcacagtcgttttatcagcaaccgcctccagggcatatgaatagaactcctgtgtctaagaacgatgcatatcgtcttgtcccattggctcaattgaacccttatctagataaatggacaatcaaggtcagggtaactgcaaagactgatctcaggttctacaacaatgctagaggtgctggaaaagtcttttcctttgatctccttgatgaacagcgtggagaaatccgtgcaacatgcttcaatacgcaggctgatcagttttttaacctcattgaggttgataaggtgtacctgatatctaaagggtcgttgaaaccagcacagaagaagtttaactccttgaatcacgagtatgagataagtctggattccagaacatctattgaagtttgtgctgatgatgatagcaacatccctaggcagcagtataatttccggaagataagtgaaattgagaacattgagaaagatgctattttggacttgattggaattgtcacatcagttggcccttctgtcacgtttatccgaaaggatggcgtggaaacccagagaagaacacttgaactgaaagacatgtctggtcgaagtgtacaacttaccttatgggggaagttgtgtgttgctgaaggcaaccagctgcagtcgctgtgcgattctggtttgaatcctgttctagctttgaaaggtgcccgcgttactgactacagtggtagatctgtgtcctcagccggctcaactcagttaaaaatagacccagaaattcctgaggctgagagtctgcggcgctggtacgcaactggaggaaagacagctgcttgtgtttctctgtcagtggtaagtatgggtggtacttgtgtccggaaatcaatcgctcagatcaaggatgaaaatctggggcagttagagaagccagactttatcactgttaaagctgcaatttcacatctgatagcagacaatttttgttatcctgcttgcaccattgatgtgaatggtaggatgtgcaacaaaaaggtaacagataatggtgatgggacatggcgttgtgacaaatgcgaccagagcttaccaaattgtgagtacaggtacgtgctgaatggccagatccaggaccacagtggggtcaccaattttactgcattcgaagatgctgctaaggtgatgattggccacagtggccacgagctcaacaacattagtgtagaagactcggaacgatttgcagagatcttgcaggcggctcgttggcagcagtttctgttcacgctgaaagtcaaggaggagatctataatgatgcgccgcaagtcaagtgcaacattactaaagcagagaagctggatccggcaatagagagttcttaccttctaggggtaatcaatggcctgttgcaggatgacactggctcatcttctggggcgcaaggtgccatggcctacaatgctggtatcagcaacactggcgctggacgaagtgtgccaaccaccaacagtgcctacaccaccaatttgagtggtccaaggtatggcgagtctgcaaaccagctcgcgcagcaggaaagcacgtacaccggggtgaccactccagtgtcggcggcacggaatgtgcagcagacctgcgtgtcttgcgggtcaagtgggcacaacgtgcagaactgccctgcaggaacgtacaggcagcaggcggctgcaagcgcagcaagctcctacggttcttcgcagcctcgcaatggactgtgcttcaaatgcaatcagcctggacactttgccaactcttgtccactactggctcctgctccccagcagcagcagcagcagtatcggagcggcggcgctccctcaggcggttatggtaggcagcagccctatgttggggctaccaactactgaaagtcattatctctgtcgagtcaggcgtgatgttggttttgcttagatgcctgtcctgaatggcatcgctgcgtccatgtgaagtagatgcaaaccattcctttttatgtttgtgtgtgaactatgtatcagtacttctttatgttttcgtcttataaatcctcgttgctgtgtcagttctgttgaattcgtttcgtggtttgtctccctgaataactcactgtatggtgggtgtaaattaaatggaaatcacttatcaggagacaaaaaaaaacgaacagag

SEQ ID NO: 5298 - DNA, 3096 bp, Zea mays
  Clone ID: TF_ZM3971.C7.o8.fg
atggattgctacaactttggagagcttggtcatcttgctcatcaatgtaacaagcccaagaagaacaagttcaagggcaagaaagaagatgacaacgatgatgagaaaaaggaaaagagattcttcaagaggaaggatgggaagcacaagaggtttcacaaaaagaaaaatggaaaggcatatattgttggtgactggctcactgacattgagtcatcaagtggatcttcttcaagtgaagaagaaaatgatgaaaaagttgtcgccatcattggggacttctctagaccaccaccatcgccatcatcgacttctcacctatgcctcatggctagaggtgaacggaaggtacaaaatgataatgatattgacgatagtgatagtgatagtgatgatgaatttgcttcaccttcctatgatgaactaactgacttgcttaaagaatacactcaaatcattaggaagtcaaaatctaaatatgctaaggataaatgtgagaagttaaatgaagctaatagggagttgaaagatatactagtgaaaatcaaggaagactatactaagattaaatttgatcatgataatcttcttgttgaaaatgaacttttatcttgcaatacacatgaggctattaaccatgttgttaagattgatgtagcaacctcatgtgatgatttgagtcaaggagatcaaactagtctacatgatgaattgactgaaaaagttgaagtcttgacattagacaaccaaaaattgaagagatacttgactgatgcaactactaggggaaaggttgccattgagaacaatgatttcaacaatgagttggcagtggataatgaaaggcttaaaaatgaggtcaagaaacttaagagtgaaaatgaacatcttgcaacaagtgtgcaaaaattcaacaagggccaatacctccaaaatgaattgttcatgaacactgtcataaaaaacaacaagagtggtattggatacaattcttttgtgcaaaagaaagctgcaactcaatacaagccaaagcaaactcataagcctattaaatgctttgagtgtggaaaagagggtcattttgcccacaattgcaaagctaaaccaccaactcccttgcctaagcacttaagaccatttgccttcaatgctcattatgttctaagaaaagtagcaaatggaaaggtgaactacaagaccggtgggagccattgggttattgatagtggatgcacacaacatatgacatgcaacccacggatgttcacctcacttgatgagaatgttgatggacaagacaaaatcacatttggggataattcaaaagggaaagttcaaggacttggcaaggtggcaatttcaaatgatctatcaatttcaaatattctcttagttgcacctttgagcttcaacttattatcagtggatgttattgtatcaaaaatggatgatgaatcaatggtgttcaaaggatttagatacaacaatctctacttagtggatttcacccctgaagatgtagacttaagaacttgcctcttcacaaaagcatcacttggatggctttcgcataggaggcttgcacatgttggaatgagcacactcaagaaagtattaaagaaggacatggttagaggattaaaggatgttgtatttgaaaaggacaagccttgtagtgcattgatagttgatgatttctcaagatacacttgggtgttctttctccatgataaatctgaagttgcatctatattcaagaagtttgccaagaaagctcaaaatgaattttattgcaagatcaagaagattagaagtgataatggtaaagaatttgacaacaccaacattcatgaatattgtgatgagattgggatcaagcatgaagtgtcagcaacatatacacctcaacaaaatggagttgttgaaaggaaaaacaggaccttgatcacacttgcaagaacaatgattgatgagtataacacaccagagaggttttgggctgaagctgtcaacactgcatgttatgcatcaaataggttatttcctcaccgactacttgcgaagactccctatgaactgctaaatgggaaaaagccagacgtctccttcttccgggtgtttggatgcaaatgctacatctacaagaaacgccatcacctcgggaagtttcaaagacgttgtgatattggttttctattgggttattcatcaaagtccaaagcatatcgagtattcaatcatgccactggcgtgttagaagaaacatatgatgtggaatttgatgagactaatggctcccaaggagcacttgaaaatcttgatggtgtaggtgatgagccacttagggaagctatgaagaacatgccaattggagctatcaaaccaaaagaagatgaagaagaggtgcaaaacattgacatgccttcttcatcaagtgtaccacaagatgatgaaaaagatgagagacatgcaaatgaagacacatttgtctctcatgaacaagcaagggatccggactgggtgaacgccatgcatgaagaactaaacaacttcacccgtaaccaagtttggaccctggagaagcccccacaagatgcaagaatcattggaacaaagtgggtgttcagaaacaaacaagatgatgaaggtgtgattgtgaggaacaaggcaagacttgttgcaaagggattctctcaagttgaaggcttagattttggagagacctttgcaccgcaaccacctgggtttgaagaccctagatatcctaaccatgcttacaggttgtccaaggcactatatggattaaagcaagctccaagggcttggtatgagcgtcttcgtgacttcctcatcgaaaagggcttcaagatcgggaccatcgacacaactctattcacaaagaaacataacagtgatatattcatttgtcaagtatatgttgacgacataatctttggctcgacaaatgactatcattacaaggaatttggtgagttaatgtcgaaggggttcgagatgtcaatgattggtgagctgacgtacttatttggctttcaagtcaagcaaatgaaagatggtaacttcctctcacaatag

SEQ ID NO: 5299 - DNA, 539 bp, Zea mays
  Clone ID: TF_jC-zmshLIB3587P037h11b1
gcgctgcatgcgctgaggcgcgccatcacggacgaccccaagaagctgacggagaactggtgcgggcccgacgtgtgcaactacttcggcgtgtactgcgcgccggcgcccgacgacccctgccagcgcaccgtggcctccgtggacctcaaccacggcgacctcgccgggacgctccccgaggagctgggcacattgcagctgaatgttcttccaaaggtacctgctggaactgcaaagagcctggccacatggctaacagctgcccaaatgaagggatatgccgtaactgtggcaagtccggacatattgcaagagactgcactgctccaccagtgccgccaggagaagtgatcctttgcagcaactgctacaagccagggcattttcgtgaggaatgcaccaatgagaaggcctgcaacaattgccggcagagtggccatattgcccgtaactgcaccaatgatcctgtttgcaacctgtgcaatgttgctggccacctggcccgtcagtgccccaagtctgatacattgggcgag

SEQ ID NO: 5300 - DNA, 846 bp, Zea mays
  Clone ID: TF_ZmC515769_1
cggccgctcgaggcgatggcgcatccctctagtcttgtcccctcccgcggctagggtttcctccgcttcgctctcgcagaatgcctcgctacgatgagcgtgatcgttatggcggcaacacaaggctgtacgtgggtcgtcttccctcgcgcacccgcacaagggaccttgaagacctcttcggcagatatgggagagtgcgacatgtggatatgaagcacgagtttgcatttgttgagtttagtgatcccagggatgctgatgaagcaaggtacaatcttgatggtcgtgactttgatggaagccgcatgattgttgagtttgctaaaggggttccgcgtggccaaggaggaggaggtgaccgtgaccgtggccgtggtggtgaccgtgaatatatgggtcggggacctcctcctggttctgggcgttgctttaactgtgggattgatgggcattgggctcgtgactgcaaagctggcgactggaaaaataggtgctatcgttgtggagatagtggccacatagaaagggattgtcagaacagccctaagaacctcaagcgtggaaagagttactccagatctccatctcctcgccgcggaagggtgcgtgataggagctacagcaggagccgcagtaggagctacagccgctctgtttccccaaggagggatgaaaggcgatcaaggagccctcgcgacagtcgcagcccaaggaggagcccccgtgacagtcgcagcccaaggaggagcccccgagacagtcgcagccctatgaagagcccccgtggcagtcgcagccctatgaggagcccccgtgacagccgcagccctatgaggagcgctt

SEQ ID NO: 5301 - DNA, 6282 bp, Zea mays
  Clone ID: TF_ZmC951_402
ctactggaccgctgccaagtgagcctgctgttgagtgagagtctggagaatctccgcaagagcagggtcaatggcaggaggggcagcaggggcagcaccattggaactcccagcctcatgatcatgagaacgtggaagcataggaggcggaggtggaatcccaaaatcatcatcatcattatcatcatcatcatcaactgttgtgtcctgagcttcgaactgatgaagagcagtatcctcggcctgagtgtcaaatactggagcaggtgctggcacaggatcctcaggcgctggacggtaggacccaaagaggaggtgtgaggcctcaagtgtgccctggaactgtggaggccgaatcagctgagcaaaaatgtgacacagatagtgagcataaggcagctgtcgacgagcacgcagaccatccagtacggtgtcctcgatctcacaaataaggaaatccacaacatcaaactctgagtgagagactagggcaccaagaagccagagctggatatgagtggcagcctccctgtaccccatccgcggcagaagtgtccgtctcataagctgatataaaaactttgctgctgtggtgaagtctgccggagagcgtcgcgacccatcaggagcaacaccaccgtgagggtgacgaggagggtcagaggtgccatagcataagttgtgaagacgagtcgatgactcatgaaatccaaatagctggcgaatctggctggcatgaatagtgacatcctctcgctcaaaacgaaatctcatccagtggtgatcagggtcgatccatacagtagcgtagaaaactcggacccattcctcaacatatctgccgctggtagtcaaaagagtgagaagtccaggcagataggagagatgaacctcagagtcagcaccggggctagcagaaaagcgggaaggtccaaaagctggtgcacatgcagagcaatctgtgcagacatctgggccctgaagaaggactcctgaatcctggtgctgaagagatcgacggcaacagtgtccctctgagccggtagccaggtctccatgggtacgtgtctgaaccgatgtacccgtgccgctcagtctcatcgcgctcccggaagcgagcaggtgggataggaggagcagaagcgggagcaggaggaggagcagtggaagatggtgtagtggaggtggtggatggcgcagcagggtgacgggagcaggcaaagtgggtggtggagtggaagcagtgatgggagtggaggagcgaggccgggaggcgaggcgacgaactcggtacgcaatctgatctgaaggagtctgtggctgatctcctagctcggcctgctcagtggctgttgctgccgctgctcgggctgctctgtccatacgccgcttcctgcggccttcctgctgctccaagtacatggtctttcccttgacctgcctgaaggggcgacgaggatcctcatcatcgcctccccctggcgccgacacattcttcgtgcgcggcatcctgacctgacgaacgagaggtgaaaatccaggcaggacaggagacggctcacgggcaggcaaggtcactccctcatctaggtcgagatgtccatttgttggcataggtgtcttgattggtttgcacttctccatgttgaaccttttcaacaagtctttggtatacttctcttgtgagagaaagttaccatctttcatttgcttgacttgaaagccgaggaagtacgtcagctcaccaatcattgacatctcgaactcttgacaaatgaaaatatcaccgttatgtttctttgtgaatagagttgtgtcgatggtcccgatcttgaagccctttttaatgaggaagtcgcgaagacgctcataccaagcccttggagcttgctttagcccatatagcgccttggacaacctgtaagcatggttaggatatctagggtcttcaaatccaggtggttgctcaacatatacaagttcatttatgaagccatttaaaaatgcactttttacatccatttgataaagctttatatcatagcatgatgcatatgcaaggaggatacgaatggcttccagtcgagcaaccggtgcaaaggtctctccaaaatctaagccttcaacttgagagaatccttttgcaacaagtcttgccttgttccttacaatcacaccttgatcatcttgtttgtttctgaacacccactttgttccaatgattcttgcatcttgtgggggcttctctagggtccaaacttggttacgggtgaagttgttaagttcttcatgcatgacgttcacccagtccggatcttgtagcgcctcatctatacaagtaggctcaacacaagaaacaaaggagtgatgttcaataaaagaagcatgtctatgtgatcgagtaataaccccttgtgaaggactcccaatgatttggttttgaggatgagcttgaagtagtgatgaatttctcctgtcaaccacttgggaagaagatcctggagcatcaacatcttcagcttgtatccttgcttgttcatgagagacaaatgtatcttcatttgcatgcctctcatctttttcatcatcttgtggtacatttgatgaagaaggtctgtcaatgttttgcacctcctcttcatcttcttttggtttgatagctccaattggcatgttcttcattgcttccctaagtggctcatcacctacatcatcaagattttcaagtgctccttgggagccattagtcacgccagtggcatgattgaatactcgatatgctttggactttaatgaataacccaataaaaaaccaatatcacaacgtctttgaaacttccctaggtgatgacgtttcttgtaaatgtagcatttgcatccaaacacccggaagaaggagacgtctggctttttcgcatttagcagttcatagggagtcttcgcaagcagccggtgaggaaatagcctgtttgatgcataacatgcagtgttgacagcttcggcccaaaacctctctggtgtgttatactcatcaatcattgttcttgcaagagtgattaaggtcctattttttctttcaacaactccattttgttgaggtgtatatgttgcagatacttcatgcttgatcccaatttcatcacagtactcatgaatgttggtgttgtcaaattctttgccattatcacttctaatcttcttgatataatttgtaggtccaaataaatccatatgaagtagttccagtggccttgatgttgacataaaagcttttgtaggatgtgtgttagcaacttgcttcccagcttgacatgcactacatggcttgtccttttcaaataccacatcctttaatgatctaaccatgtccttctttaataccttcttgagtgtgctcatcccaacatgtgcaagcctcctctgttggagtgaataagcattgaattccaagatcacagagttgacccacttgccaagtctttgcactttcccttttgaattgtctccaaatgtgattttgtcttgtccatcaacattctcatcaagtgaggtgaatatccgtgagttgcctgtcatatgttgtgtgcatccactgtcaataacccaatggctcccaccggtcttgtagttcacctttccatttgcaacttttcttagaacataatgagcattgaaagcaaatggtcttgagtgcttaggcaagggagttggtggtttggctttgcagttgtgggcaaagtgaccttcttttccacactcgaaggatttgataggcttgtgagtctgctttggcttgtattgagtagtagctttcttttgcacaaaagcattgtatccaataccactctcatttttaagactttcattatccactgccaactcattgttgaaatcattgttctcaatggcaacctttcctctagtagttgcatcagtcaagtatctcttcaatttttggttgtctaaagtcaagacttcaactttttcggtcaattcatcatgtaggctagtttgctctccttgactcaaatcatcacatgaggttgctacatcaatcttaacaacagggttaatagcctcatgtgtattgcaagataagagttcattttcaacaagaagattatcatgatcagatttaatcttagtatagtcttccttgattttcactagtctatctttcaactccctattagtttcatttaacttgtcacatttatccttagcatcttttagggaggttgtgagctcatttacagtggatgacatagttttgttctcttctttcatttcatcactagctttcataactatgtcatatttggcatttaaagattcattttcatttttcaacttatcacatttagcttttgacttcctaatgatttgagtatattctttaagtaagtcagctagttcatcatatgaaggtgaagcaaattcctcatcactatcactatcactatcatcaataatatcaatatcattttgtaccttccgttcacctctagccatgaggcataggtgagaagtcgatgatggcgatgatggtggtgaagagaagtccccggcgatggcggcaacttttttatcattctcttcttcacttgatgaagatccacttgatgactcaatgtcagtgagccagtcaccaacaatatatgcctttccatttttctttttgtggaacctcttttgctttccatccttcctcttgaagaatctcttttcctttttctcatcatcgttgtaatcttctttcttgcccttgaacttgtttttcttgggtttggtacattgatgagcaagatgaccaagctctccacagttgtagcaatccatctcagaaatgggctttcttttgctggaaaagaatttcttctttcttgaatcaaatttgatgccttctctgttgagcttctttaacatcttggtggtcttcctcaccatcaaggcaatgttagcatcaagatcatcatcacttgaggattcttcctcaatttgtactttagcttttccttttctttcttgatttgctttgagagccaaattctttctcttggaagatgactcatctttgtcattgatgtgcatgtacatctcatgagcattgatctttcccagtatctgtataggtatggtaactgaaagatccatttgatgtagcacagtgacaatgtgtccatatttgtctattgggaggacactgagaatcttcctcacaacatccggttgtgagatttgtgtaagccctaatccatttacttcctctacaagaatattgagaattgagtacatagcattggcattttcattagcaagcatttcaaaagaatttaactttctcatagcaatgtgatatctctcctcacgctcacttctagttccttcatgtagagcacaaatgtccatccacaaatcatgaggatttttatgatttcttactctattgaacacatctttgcaaaggcctctaaaaagggtgtttttggccttagcattccatttctcataattaaactcatcacctacaagatttgtgggatctctaggtgcggggaatccttgtgtggcggctttgtagacaccaatgtctatagcctctaaatatgcttccatacgaattttccaatatggaaaatcgtcaccataaaaacgggaggaggtccatccccaccggacatcgttactcggtgcgccaacggcgcgccaacggtcgactccaacggctagttctgacaagtagtcgttgggcatttgtctaccctgtcggaaggccgtgatgatagaagcatcagaaatacgaggtatcgtacctcgcaccttggtgaagcgggagatgaacttccggagagtctcccctggctcctgcctcactgcatggaggtgggcctccacaccgtgcttttggtaagcactggcgaagttcgccacgaaccgcgcaaatagttcttcccatgagtagacggccaaggggacacccgtttgggaccgggtgcccattggtgtctgcggtgcaatcgcagcaaagtcttgattgaggtcgcgaccatcgatgtttttgcgacgctcacgcgccctttccaaggatacccaagcgtcctctcccgcacgcctgcggttgagctctgcccgaaggtcgttggtctgtgcgccccttactgagggcgagcgcacagatgctggtgcctcgtgttggcgtcgggatgaccgtgtcttcaacctggtcgaggtagaatgcaccatactgagcagttggtcgacatcgtcccgccattgcttcat

SEQ ID NO: 5302 - DNA, 2003 bp, Zea mays
  Clone ID: TF_ZmC12531_1
tccttcccttctctcctttttttttttttctttgttcacagtagaaataatcagtttcaaccgcgcttacatatgtaaatatgtaatctcagacaagacacctatctaagggcatgaaccagcagctagagttcaaccccaggagataactgttatcaatggctaaacaagcaacaaaaacagacacgtgcatccggctagcttcttttgaaccggacatgggtgttgctggcggcgaatattgacgacgagaacctgtgtttcctagcaccgggtgacgcggtaccatggttgtgccttcgtgaggactggggagtgaagtagtcaccaccaccagacaagtactggtgattcgtgtaagacctcttgggagtagctggtgaaccccatccattgggtttgtacttcttcgatggtagatcgtcatcaccagtccaaccacccctccatttcgatttatgattagatgcgcccattctttcctcgaaagaggggctattgcttttgcttgttgtacaggcatcatgaggagctgatctagcactggaatctttcttccatttttccttcctccggatgtgtgatggtgacttgccatcgtttttccatcttcccttcctctgactgtgtggtgacgaccagccttttggcccatcggacttggcattcttcgtgcagccgcgtgcgaagtgaccttcctcgccacatttgaagcataaggttggggttgtgacagcactagcttccctgcgttgcttagcacatcccagaccagaatggccagattgggcacagttataacagctaacttgttccagagaattgtcaaagaagtcggaacaacatagatggcccttctggttacacacgtagcatcttattttctcgatatcatctggtgggtaatcattggcacatccaaacatatcatgacctgtttctccacatcttatacataatgtggattgatgatcattcctcttgtgcttatcagggcaatccttcgccatatgccctccttttttgcagatgaaacagtcttgaccctgcgtgcactgctttgcattgtgcccaaacaacccacaaacaaagcaaggcttctttcgcttttccattggacagtttgcagctacatgtccttcctcgctacaattaaagcaagtctccaacaatgtttccccaggatcaaagtatcttggtatgcgctggtcacaagtagaagtaacacaatgtcaagtgttcaagtataagtgaactgcccacctctcccgatcaacttaagcttttggccgaactggtcagtgcatgcaatcaaagctagaggtctcaagctcgaatcaaggagcttccgcagaaacatactgtgagatgtaggggcatcagccccatcttcagttagcaccgattctgctgtcccaatttgctcctcctgggtggtaccaacctccttctcttcctcgtccacggcagccgcagccgcagcagcagcggtcgcctccttccgttgccttttcctttgcttccagtgctgcctcttcttctgtttcctccggggctcatccgcctcagcgagctccaccacggcgtcctcgtcgtcgccggaggacaccgagagcaggttggcgaacccggtgactccaccgcaggacgcccaacgccgcttccgctgcgcgcgcgcgatgatctccaggctgaggtcctcgttccccacctcgtcgtcctcctcgtcgctcccgcccctgcgcggctgccgaaaaggcggggaaccatcttcgtccaggtctgagtcccaccgcgccctggagcgccagcgctgggccatcagcgttctgcggcggcgggtgagggacagagaaaacctaataacgcgctcgatctggaggcggcgcggagaagtgggatggtggcagcgccgcagcggcaatttttcggcagcggctcgggaaaatcaatttgcctgcggctgtccagaaaacgaccagccggccagcctcgggggtacc

SEQ ID NO: 5303 - DNA, 568 bp, Zea mays
  Clone ID: TF_ZmC83001_1
tgtgactgtgattaccgcacaacgcacgccttcatacacgtgcatgctaacaaacttgcactcgcgccgggcacgcacacgaacgcgacacacgctaaccacggcaacatgcagacacacgcacacacatcgacctgaccagcgcacacacacccggtgtcgagtttattcctaacaatctccccctaaacacggcacggctttctgcactcacaggagcgtcgcctcctcttcggcattggcgaatagtgcctcttccttcttcggcttggggcagtcccgtgcaaagtggccgcggttgccacagttgaagcatttgccgatcgtcgacttcttcttttttcgagctttccactcggcctccgtgaggaggagctgatcgtcgcgccgttcaccaccggcatgagtacgccgccgagaacgctcatcgaacgccttgagacgtccgagcgcctcctcgaacggcatcgtctcgacgtcgcagaactgctcgatgcccgcgacgacggggaagagccgatctggaacggtgtcgaggagcttcttcaccatggcagcgtcgtcgagc

SEQ ID NO: 5304 - DNA, 1339 bp, Zea mays
  Clone ID: TF_ZmC6609_3
gttttaccccgtccggccccgtccccctcgttcttttcccccttctctctcgctgcgacgactgggtggagtaccgcccccgccccctcaccctcaccccccgacgccgacgccctaggcggctacgccaggtcccgagggacgggcccttcatcttcgtcagtctattcgccgggcgacgagcacccgccagaaagaagatcagcggtttgttggagtatcgaaggtggtgatttcgtagcgtggtgttgcagtttggttggagcttggagtttagagggaagatttggtgatgagcagccgcagcctgccgccgaaggatcgcaggatgcgtactgaacgcacctcataccgtgatgcaccatatcggagggacagccgccatggtccaagcaggtttcgtaatgatttgtgcaacaattgtaagcgtcctgggcattttgctagagagtgtcctagcgtggctgtctgccatacctgcgggcttcctgggcacattgcagccgaatgttcttccaaaggtgtttgctggaactgcaaagagcctggccacatggctaacagctgcccaaatgaagggatatgccgtaactgtggcaagtccggtcacattgcaagagactgcaccgctccaccagtgccgccaggagaagtgatcctttgcagcaactgctacaaaccagggcattttcgtgaggaatgcaccaatgagaaggcctgcaataattgccggcagagcggccaccttgcccgtaactgcaccaatgatcctgtttgcaacctgtgcaatgttgctggccatctggcccgtcagtgccccaagtctgatacattgggtgagaggggtgggcctcctcccttccgtggtgttggcgctcccttccatgatgttggcgctcccttccgtggtggcttcagtgacgtggtctgccgggcctgcaaccagattggccatacgagtcgtgattgcatggctggtgccttcatgatctgccacaactgtggcggccgtggccacatggcttatgagtgtccctctgccagtctcatggaccggttcccccctcgccgtttctgaaggaaggacatccaagggctgttcagatggctgttgttttcagcccattttgtcaggagcacctgttttgctttgctttatgtatttctaaacccgaatggattctagatatttcagattcataactcgtcagcgctatttgtaattctggatatgttacccgactccgatgttcttgatgataatgtttgaagacggggatacttgcccttacgaactcaaaaaaaaaaaaaaaaaaaaaaaaaaaaaaaaaaagcggcc

SEQ ID NO: 5305 - DNA, 752 bp, Zea mays
  Clone ID: TF_ZmC218_59
aggacgcgtggggcggaggaggcggcggcggcggtggctgcttcaagtgcggcgagcctggccacatggccagggactgctccagcggcggcggcggctacggcggtggcggcggcggtggtggtggcggctgctacaactgcggccaggccggccacatggccagggactgcccaagcggtggcggcggtggcggagggaggttcggcggcggcgggggtggaggcgaccgctcctgctacaactgcggcgaggccggccacatcgcccgcgactgtcccacgtgaggtgtgtccgcgtccgtccagccagccagatcggatcggatcgctccaccacctgctggtctgatggcgccgcccccttctagatctcgcttaaaaaaacacccccctctcgctgtgtgtcggagtaccgctttagttttgccgatccgggcacgagtgcccgctgcctctttcctctcatgcgtaagaggaacccgtccgccgttttcagatttcgttcggtccgtagaagaactctcaagttaagttaagttatcatggtgtgtgcttggtcgttgttcgtcgtcgtcgttaaggttttaagagatgatttggtcctgtgttgccgaggggaagtcgaatctgcttttttctttttttgtggtttgttccaccagactgaggaaggagatgagatgattattctcccagattataatcctgcctgcttgtgcttgatttggttaaaaaaaaaaaaaaaaaaaa

SEQ ID NO: 5306 - DNA, 1527 bp, Zea mays
  Clone ID: TF_ZmC71_35
ctatatcatcctttgacagtcctccatgttgtaggccttgattttccgcacatgatgattcttcaattcctttctagcacaagttacaatcttgggttgcctagttatatatgaatcaaatgacaagttaggagtaggatttttaccaatgggacaatctttgcattgatgtcccttcttccggcatgtgtagcataggcgttttccaagttttgaagatttcttctttcgttgtttgttgcttgctacatggttagtaaaaactttcttttctaacatcatgcatttttgttttaaatagggacaagatttaactaagtgtcccttctttgagcatttaaaacaaagtctatcatccttgttaataatcaagccatttttaatgtagggacatgacctaatcaagtgtccctcttcaaagcattcattgtacttcttatttatcttagtgtgaagtgtggcttgatcattaccttggatgttaccttttgtggaggcgaggttgaggcttttggaggaggtattgaatttcctcttttgtttcctcctcttggcaatcctcaagtccttgacattttcttcaagggatgtagtgcatgccacggttgttcccgtctcaagctccttcaccatgtgatcacggttatcttgagaaggtcgggcaatgcacttcccttttagttgtgtcaagctcttctttagcctctcattttcttctttgagcttttgataggtatcatcatttgttcctgcaaattcttgctcaaaggaagatttgctttggaccaaatcaacatgagagcactttagctcctcatgttctttagtcaactcgtcaaagtgttgcatcttcatggagagaatatcttctagcctttgacgagcttcgctttgctctctcgctctttctagaagtttgagcatgaccgccttatcttcttggcttaggcgagcgtagagttgcacaaagctcctttcttcctcctcatcctcgtttgtgcttccgctatcattttcattagccacacaacacatttttggagaggtggattcatcgtttggtctccatcgttcattttctccttcttccttgcaagggttagtatcacaaaaactaaaggaagttgaggcattaaatgaactattatgtttggactcatcaaacttgattttaattctagtccaaatatcatgcgcatcgggaatggattcgtcatagtttgatatgaaggcacgataatcttctttgctaagagaattgtttaagatgtcaaaagctaggtagtttaagcgataacatctttgatcctcctcggaattaatttttccattaaaactagagggaaaaatactcttgtcaataatttgttctaattgaggatgtatggttctaaaggcatttatcacactagtagaccatgaatcataattagaacaatcatcaagtaatatctcaagagttacctccttttgagttgcgttcgttggaggagtcttcttgttcttttgggatcttctacgagccat

SEQ ID NO: 5307 - DNA, 1093 bp, Zea mays
  Clone ID: TF_ZmC17063_1
caatccgtgccaaacacggggggaggaggtcagatcggcggtggcggtgacggtggcggtggtggcggcggcggatatgtaaatgcgggcgtggaggtggaggacaaggcgtgcccctgcggtgtcgggagctgcctcgtgctcacgtccaacacgccgaagaaccccggtcgcaagttctacaagtgccccatgcgggatgggggttgcaacttctttgagtggtgcgatgctccatctcccgcccctgccaatgcacgaaataacatggttgtacactcagagacatcagcaacagatatgctttgcccatgcagtgctggaacttgcttaattctcaccacaaagacagggaaaaattctatttctggtgcacgacggggacaaatcacccagggtggtggtggtggctcttgtggctttttcaagtggtgtgacgagctacagcctagggttggtgcaccactgcaagcttcagcgcaataccaagcggattccatgccaagcatccaaaaccccagccagaggagctcgtcttcctgcttcaagtgcgggcaggagaaccactgggctcgagactgtccgaatcaaccgtcggatccttatcctgacaagggtgggagaccagtagctccagcgggctcacctggtgcgtgctacaactgtggtcggtccggccactggtcccgcgactgcccaacctcgaatagtggtggtggtggtggtaccggcaccagccgtgccaggtcgtcctcagccttgagctcgtggaatagtcagagatactgataggaggctcctgtgaactcaattgaactgacatggacatgctgtacgaaacttggacaattgcccccctccacgtgttgcttaggtatgtgctcacgtcgatgccttttgctgctctacgctatctctatatgtaagagagaactgttgctgttctctgtcttcaccctcaccctgttttatgctcctatctctgtcgaacttgggtatactgtttttttatctactctaggatttttttcatataaaatattgtatgtgtgggtctaaggagaaccatatcgtccaagcatttctttccatg

SEQ ID NO: 5308 - DNA, 830 bp, Zea mays
  Clone ID: TF_ZmC17063_2
caatccgtgccaaaaaggggagatgaagtcagaacggcggtagcggtgacggtagcagtagtggcagcggcggatatgtaatagcgggcgtggaggtagagagcaaggcgtgcccctgcggtgtcgggagctgcctcgtgctcacgtccaacacgccgaagaaccccggtcgcaagttctacaagtgccccatgcgggatgggggttgcaacttctttgagtggtgcgatgctccatctcccgcccctgccaatgcacgaaataacatggttatacgctcagagacatcagcaacagatatgctttgcccatgcagtgctggaacttgcttaattctcaccacaaagacagggaaaaatgttgggaggcagttcttttgctgcccattaaatcagggtggtggtggtggctcttgtggctttttcaagtggtgtgacgagctacagcctagggttggtgcaccactgcaagcttcagcgcaataccaagcggattccatgccaagcatccaaaaccccagccagaggagctcgtcttcctgcttcaagtgcgggcaggagaaccactgggctcgagactgtccgaatcaaccgtcggatccttatcctgacaagggtgggagaccagtagctccagcgggctcacctggtgcgtgctacaactgtggtcggtccggccactggtcccgcgactgcccaacctcgaatagtggtggtggtggtaccggcaccagccgtgccaggtcgtcctcagccttgagctccgtggaatagtcagagatactgataggagggccctgttgaatcaattgaactgacatggacatgctg

SEQ ID NO: 5309 - DNA, 308 bp, Zea mays
  unsure (1)..(308): unsure at all n locations
  Clone ID: TF_21626426
gcacgaggccagatgggggacatctaccctttactattgatcctggataccatgatctagtctgctataactgcggtgaacctggtcattttgtgggcatttgttcaaaaccaaaaatctgtttcatctgtgggattccgggtcaccatatgaatgaatgccccgcttggaaagtgttgacgccttttcggagcgccaaatactcaagaagatgtaatacccactttgtaagaaaaaaaaatctaaaaggaggnaattatataaaaaaaaaaaaaaaaaaaaaaaaaaaaaaaaaaaaaaaaaaaaaa

SEQ ID NO: 5310 - DNA, 751 bp, Zea mays
  unsure (1)..(751): unsure at all n locations
  Clone ID: TF_LIB4719-018-Q1-K1-B4
ccctgttcttttaaacaatgcagtaatgcacaatgttgtgtatttctttttcttctggatgaagttgcatccgctaaggttcatgctaacagcctagcacctcataagacctaatgctggtccagagtgtctttaggcacaccatggtttactactgaaaaaggggcactcggcactcacacattcttctcatcttttaccaagataagctttatcttatgttaatggaaaccttgctttgctcttcatacatggtcatgccaatgtttaatatgctttatgtgaatcacattccaggcttatcgaagatgaaacattttttaaatgaatgattttgcagggattttgcatgcaagaactgccggagacctgggcacttcgctaaggagtgtccatcttcacctatgtgcaataactgtaaccttccaggccactttgcagcagaatgcaccttacaaactgtttgctggaactgcaaagagtctgggcacattgccagtgagtgcaagaacgaggccctatgccacgcctgcaacaagacaggtcacttggcacgtgactgccctacttcaggtgctaacgtcaagctatgcaacaaatgctntaaatcaggccacatcgccgttgactgcaccaacgaacggccctgcaacaactgccgtcagccagggcacatagctcgggagtgcaagaacgaccccggnctgcaacctgtgcaatgtcttcggccacgtcgcgcgcgtctgcccaa

SEQ ID NO: 5311 - DNA, 212 bp, Zea mays
  Clone ID: TF_jC-zmXLIB3526P093be10b1
cggacgcgtggggcggaagaggcggcagcgatggtggctgcttcaagtgcggcgagcctggccacatggccagagactgctccagcggcggcggcagctaacgcggtggaggcggtggtggtggtggccggtgctacaactgagggcaggccggccacatgagcagggactgcccaagcggaggcgagcggtggcagaaggaggttcggcgg

SEQ ID NO: 5312 - DNA, 1451 bp, Zea mays
  unsure (1)..(1451): unsure at all n locations
  Clone ID: TF_ZmC1068_2
tcgaggccggccgggctccaactcccgccagaaccctcgatttccctttttttccccttgcccaggaccaggagcaagatccatccatccatccccgattccccaaccctaagcagccatggccgcgccgccgcccacgggctgcttcaagtgtggccgccccggccactggtcccgcgactgcccctcctccgcctccaccaaccctcctgccgccgccgacgcgcccaccaaccctagccacctctccggcgccgcctcccgcttcaacgccaagcccaggccccccgcggcggcggtggatggcgaggacggcaaggggaagaagaagaaggagagggccacgcgccccaagctcacgccggacctgctcctctccgacggcggcatcggcttcgtgctccgctacttccccaaggcgttcaagccccgcgcccgcccaggccacgaggtggacgacctcgccaacctcatcaagctctacgcggactggcactcccgcctgatcccctactactccttcgaacagttcgtgcgcaaactcgagaaattgggtgccggcaaccgcgtcaggagatgtgtttccgaactcagggatagggtcgccagaggcggtgatcctacgcttctgcacgaaccgccagtccacgaagacatgccattgccaggcggaggtgaacatggtactgaagacccagttctcggcaccgatgctccgctgtcggacaaccatggcactggccccgtggtgcaggaagacgcagatccaccgatggagagcaacgacgtggtggatcccatggaagaggatctgcttaacgaaatctacgaaaacacagctgatatcccggctggtgagggagccagcaaggagtctccggagcagtcggctccaaaagaagccaactcgctggcgcaggaaccccaggacggcgacgtccccaagccggcgaaggttgagctcactgaggcgcagaaggcacgcatggaggccaacaggctcaaggccttggagagagcggcggcacgggctcgtgcctcgcagcagcccacctagatacgcaagatgctgctgtcttcacttcacttcaatagttggttggttggttgagatgatgcatcattctgtggtgtgtcattgacaaggacacgtagttcgctggtgtctgattgaatctgggtctgctctagtcgatttggtccctagtagtatgtaacaggagaagataagagtttgttggatgtgcttgaaagcttcgtcctgttctcgcttccccaaccattctagagtcagaattccatgtcattcaagctgatcttctcattcatcgttttgctgcatagtgcgtcttggtccaattgtcttcatttaggttctagtttgagaaccctattttttcaatggatttttatttttacaagaaaaaaatagntnnntcattnnttccccc

SEQ ID NO: 5313 - DNA, 1352 bp, Zea mays
  Clone ID: TF_ZmC4152_2
cccacgcgtccgcccacgcgtccgggattttctcagccaccttcttcacgttctctgatcagttgtgagcagggatgggtgacattgcaactaactagagaaccaggatatggcagaggcttcttttctcctagatctgttactggttttctatctgatgtttgttcagctgctgcagatgaagttggcaaaatatacataacagcagatgagaatgtccaaggagcagtcttcgatttacctgaggaaattgcaaaggacctgcttactatggaggtccccccgggaaacacactaacgtccggcttccagctgcctgcgttgcaagatgatagtcctgctactgatagctatggtcgcttttcaaacgaccgaggttccaggaacaggcgttcaaggggtggaggcgcttcaagaggccggggtggttgggacaccgacagtgaggaccgataccggcgtggtggcaggagcttgaggtctgacaacgatagttggtcagatgatgactggtcaggcggtgggagaaaatcaaaccgttcctcctcatcctttggtggccgctcatcatcctacggcagccgtggctcaccatcaccatccttcggtgtccgctcatcatccttgggcggtagggagagcagcagaagcttcagtggcgcttgtttcaactgcggcgaatccggtcaccgtgcatcggactgcccaaacaagtagatggcgcattcttccctgcccaagcaagtagacagctcgagcatcaggacgcacgcagagcgaaaacccaagcgcgcccctgatcgaccagtatactacgcctgacagccagctacagtttttgtgtggctgtctcgtcaggactgaagattttggcatgctgattccagttatttagatccagaggagtccttactctacagggatatgttgagtctcagtagaattgtgtaaccagtaaccacacacacgaacaatggcggaggactaaaatataaaatcatagctggcatattgaacacgtaacatatattgcagttggcatggctcttttcttttccttccaatttgactccagtggtcgcactgtgtcgatcgtttttacatgcactactacacatgcagcctcctttgcttgctggcagctatgcatagttgcgtgtgcgacacagcatctccaagctctggcaatcgcttgtcaaatgtctgctcctcagagctgtcctccgtatcaatcctctttctgacttttctagtcttctctagagattttatcttgtatatcttatttctcttcaacattttctaaatcatgtcctctatatgtaaatatctatattagaaacaatttcttc

SEQ ID NO: 5314 - DNA, 1681 bp, Zea mays
  unsure (1)..(1681): unsure at all n locations
  Clone ID: TF_ZmC4152_4
cgtccgaccaaagtgttgatttgattattccattacgagattgccaaancgatcgcagaaacttttgtccatcggtgctggacgcactaggacggtgctgggaaagcaggaactgcaatcttgatgtttaccagcagccagaaaaggacagttatgtcacttgagcgtgatgttggttgcaagtttgagtttataagccctccgtccatagaagaagtgctggagtcatctgctgagcatgtcattgctacattgcgaggggtgcacccagagtcaactcaatactttcttggagcagctgagaaattaacagaagaactaggacctcatgcccttgcttctgcactggcacatctgagtggattttctcagccaccttcttcacgttctctgatcagttatgagcaggtaagaagtgacacaacaaaattacatatgcattgttctatattatacctagcatagagggactggtcaggcggtgggagaaaatcaaaccgttcctcgtcattcggtagccgttcctcatcatcctacagcagccgtggctcaccatccttcggtggccgctcatcatccttcggcggtagggagagcaacagaagcttcagcggtgcttgtttcaactgcggcgaatctggtcaccgcgcatcggactgcccaaacaagtagtaagatggaaagagatggcgcagtctcccctgccgcacggggtcgattatcctgatcggccggagcatcaatcaggacgcacgcagagcgaaatcaatcccaaagaccactccacctgctgatcggtgtactacgcccgacacccagccgacgttattactggctacagttttgcgtggtcgtctggcgtcggaaaacagaggaaggttttggcatgctgactacagttactacatcaagagttccttcagcttattcatgtcacacggacactcctctacactacagggatatatatggtagtattttttttatatgtattttttgtggtgctcttgattgaggatctcggtataactgtaaccacacgcactggttacggttgcttctgcttcacaatcgctggcgacggttggattctttgaatgttatagatctgtatgctgtcttgcttcgggacgtgaacgtccatccctaggttagccagccccctttcgcttcttttggcacagaaaatactgccagacttcgttgcgttagataaaaaaaaggggggttggttacgctaccccgacccgggttgctctggcagctcgtcctcctgatctgaccttgcaggaaagaaacacgggttagtcaacgcggtcgcagcgcacggcacgactgcagggagaaagtaaaaataataaaccatccaggggtgcaacatgctagtcggtggttggccgtcgaggcgaaacagccagccagaccccacccacccccgggtggatgcgtcgcagcgtggtgtgttgtacatgtactagatggaatgcggggagtttgacagcgtggggagcttctgccggtccatcggccgatggagtgggtggcgaatgctataccgagcgatcctgcatgcagatagtagtatcaaaaaagacctgagcctgagactattcccgtcagacgtgaggtcaaggtccatgtcccggccagccaggcctgtgtgtgtacatacccgctccag

SEQ ID NO: 5315 - DNA, 984 bp, Zea mays
  Clone ID: TF_ZM4871.C1.o2.fg
atggaaacatggaaaagtcaagaaataaccgcaagaaatgcttgctatctatgtggacgtgaagatcattaccttcgtaattgtcctaagaagagttcactaccgaacatccccgagataaagctatctcagtcttcagacatagaatatgaacaaaaatgcacagaaacttctatcaacgtcatgaaggcaactcaaccaagtaacttatcaagtcgtgcttgctttggctgtggtgataccggccatcttattaatggttgtcctaagaaggatgtggagatcaataaggtccaaaagaaaagacaacaccctcaaacccatgcatcaacaaagaataaacaacggaaagagaccaatggaaagataagttatgtagtaacaggaaccattcaaagtgataatgcagtaatttttggaacactgtgtcccttgagatcaaggaagaccatcagtgcacccgaaggaaaaatgttagtaaactacatatgtccaaaaatgatgaaccccaatggaaatgaagtaaatggtgccaacgacaatattcctaccttaacaactatgaacgagaaaaatgagtcacagagatattcgatgaatggaatgaagaacaacaaaaggaatagaaaaatgtttggatacatgattagtccaccccaaccacaagcaaaagccacgaaacacatggatacccaaacagaagaatcaagtcaagctcagctatatgagatacagacacccagtcaaccctcaccccctgttggtcaaacaaagttgactcgcaaagaactcaaagcaagaggtgcttgctactactgcaaaaatgaaggacatcttattcgcgaatgccccaagaagcgtctagatcgaataaagaagaaagctgccaagcatgacctaagcaataattcagaagacccgccattttataagtacgatgatgaaggtcgcttgattagtatacattacggagcaaagaaataa

SEQ ID NO: 5316 - DNA, 655 bp, Zea mays
  Clone ID: TF_ZmC3007_2
gtggaggcggtgaccgcggctatggcggcggcggcgaccgtgtctacggtggtggaggtgaccgcggctacggccgcggcggcggaggcggctacggtggtggtggcggcggcggtcgcggctgcttcaagtgcggcgaggagggccacatggcaagggactgctcccagggcggcggcggcggcggctacggaggtggcggcggcggtggttacggaggtggcggcggtggccgcgagtgctacaactgccaccaggagggccacatctcccgcgactgccccgagaagatgcgctaggcgcggcgccaccgtcgcgtcggatccggcggagtcccatgtcgtctctcgcccgcttccctacccgctcaaggtatcgctcggctgactctgcctgaagtcgtcggagccagttatctatcagtagtagcagtgtcgtgtttcgttctcgtcgatgctatcgtatcgtaggtggtggtagcaagaaaagcaagccgtatggggctatctttagtagtttggatctgtgttggagcagtatcagtttctttctgttggaatcgtcagttgtatggcagccttttcatggatggctctgcctaatctatcagtcatgaactatctataatatatcaatgcaatcgtgtcggttggcc

SEQ ID NO: 5317 - DNA, 591 bp, Zea mays
  Clone ID: TF_LIB3969-006-Q1-M6-F9
gcccgcccccgcctccccctccgtagccgccgccctgggagcagtcccttgccatgtggccctcctcgccgcacttgaagcaggggattgcggagggcggttggggattgcggcgggcgggcgtgggagaggcgggggcagtctacattaggctcttaatagttgtagagatatgtggcacaccagccacgtactataagacagtggctacatgaagggcataacaaatagtagtaattaagctcaatggacaaagtaactgcaaaaatgactaaatttcccaattacagcatatatggttaagcatcagcatcccacgagcttattcaacataatacgccgtctagatgacggctcgccggcaatatagagtattaattgggagatagtgacgaacctaaagattgcgaggctaacttgcaggtagttgaccgccttggtcctcgtgatgtactttgccgcattcccttccttcttcttacccgcagggcggtagtgcttcggcattcgtggcggcagcgcaggtcgttccccgtgctggaaaagggaggggaaaagagaggaggagaggggaaaaggcggtagcgcttg

SEQ ID NO: 5318 - DNA, 630 bp, Zea mays
  unsure (1)..(630): unsure at all n locations
  Clone ID: TF_LIB4729-111-A1-K1-F3
ngaaagttggcaatcttcattacatccaaagcttctttcataaccgggtcgggctcagggttgtacggctccagtggtggtgaaagcctattaacccccactctcccagcgaagagcgtgcgagcactccctcgccgcccactgcgcctcgtggcggcaactgggcggccgtcgctgccgccctacgccaggtgccgaggtgattttccgcccctttgccggcgacgagcaccaccagatactctgagcctggctgccgaaacttccttttggtgtccctgttacattcggtttcgttttttatgacttcatcaagaagcaagagcaggagccacagtcgcagcaggagcaggagccgcagtcctcagcgaagagatagattgcgcagcgaacgtgcaccccgccacagtcgcagtcgcagcaggagccgcagcccataccgtcgcagagaacggcgtggatacaaggatctcgtatgcaagaactgccggagacctgngcactttgctaaggagtgcccatctgcgcctacgtgcaataactgtaaccttccaggccacttcgcagcagaatgcacctcaaaaaactgtttgctggaaactgcaagagcctgggcacattgccagtgag

SEQ ID NO: 5319 - DNA, 1157 bp, Zea mays
  Clone ID: TF_ZmC172453_1
gaagagttttttttttttttttttatcaaatactccttcaatatatctcaattcactctaatacgactcattactagaatacctacactaggcctcagtagtcgtactggccagactgttccacatgcacctactagaacttcacacgatccagcggctttgtcaatatatccgtgagctgatcttgagttgtaatctgcttaaggataattttcctcctgtagaagaacaacccgcttgtgctccttctgtcgtcaacatctcctgcgtggtcactgtcactgaatccaaccaattccttgtgttccgtgaatccaaccatctcctgcgtggtcatcaacatctccttctgtcatccaccagatgtacgtgctgctgctccgtcgcggcgcgtggcttctccagcgctggcagcagggtcactggcccctccacagcactgggcgactcctccagcgctggggctagggttagaggtggtggatccggcgccgccttctccagcaggggccaggccacctgcttcgggggatgatctgtcggcgcctcctccaccagggacgggaccgctagctgcaacagttgtcccggcggcgcctccaatgccccgaccggggtctcctgtgggtggatctgagcccgagaagcctccagcgccggggattctgccgacgatgcggtctccaccgcagagcgggcggagctggacggaggagacccgtgcgaggagcagagtcccctcctcctcttcggcctgcgcgacataggccttccccttgttggacttagacgggcaatctctggcccagtggccagttttgccgcagctccggcactggtcgcggcctttcccagcaccggttcgctcgccagttgcttgtcgcgcctcgacgtagacgtcgcctgtggttaccggacttcgacgcgccggcgtcatttcggtgcttctccttccaccgagcctcccactgctcctccgttaggtacagcttaccccccgtcgacggtggtgaggcatcatcagcatgctcggccgctttcagtcggccggtgatatcctccatcgacagggtcgacacatccagtcggaaactactagttgcttgtaccttgactcccgatccaaagatacttctccacgaaaaaaaaaaaaaaaa

SEQ ID NO: 5320 - DNA, 619 bp, Zea mays
  unsure (1)..(619): unsure at all n locations
  Clone ID: TF_ZmC18109_12
atggnggttttctaaacacatggttctctcagacaactattaacaagatggttgatatcaccacaaccaaagcaagcacgacttgataagttacatggtggagttgtctttacgttgttggtagaagtttctctgcatttttgttcatattccatgtctgaagactgagatagcttcatctcggaggtgatctgtagtgaactcttctcaggacagttacgaaagtaatgaccttcacgtccacattgatagcaagcttttcttgaagttatttcttgactttttccatgtttccttttttgtttcttggacctgatgcgaacacgaggctgaaactgtgtgcaagtaatagtccatccatcaatgtaacactcctgtgtttcttcttggggctgggcatccttgtgatgtttcctttttggaataccttgcgattcatcaactgacagtgcattagtttcactttcgtttatactgatctggcgacaaggaattccatagtactcacaacaacaacatgttccaaggtcacttgtttgttggtttggttgggcatccttttgtgtcttgaatgtctgttcatcaactattttatttaaagtgttgttttgacttgccc

SEQ ID NO: 5321 - DNA, 3116 bp, Zea mays
  Clone ID: TF_ZmC4152_1
gaattcggcaccgggccatttcttatcccctctcctccggtcctcccccctccccccgatggcgtccctcacgctcccagcactcgctctcgccctctctaaccccggcgccgtccgcctacgcgctgcggccttccgctgctgggcgctccggcggcgcggctgggcggcggcgggcgccctggcctcgcccaactccgtgcttagcgagcatgccttcaagcggctccagctcgggagcgacgacgaggacggggaagggccgtacgggagcgacgccgacgaggggttcgaggcgggggagggggacaacgaggaactcgccattgccaggctcggcctgcccgacgagctcgtcgccacgctcgagaagcgcgggattacgcacctgttccccatccagagggctgtgttgattcccgctctcgagggccgtgacctgattgctagagcaaagactggaactggaaagacactggcctttggcatacccatgatcaagcaattaatcgagcaagacgatggtcggattacaaggagaggtcgtactcctcgggttctggttctagcacctaccagagagttagccaaacaagtcgagaaggaaataaaggaatcagcacccaagctcggcacagtgtgtgtttatggcggtgtctcatataatgtccagcagaatgcactctctcgtggtgtcgatgttgttgttggaacacctggccgcataatcgatttgataaatggcggaagcctccagttgggagaagttcagtatttggtcctggatgaggctgaccaaatgcttgcagtggggtttgaggaagatgtggaaacaatattacaacagcttcctgcaggcaggcaaagcatgttgttctctgcgacgatgcctagctgggtgaagaaactgtccaggcggtacttgaacaaccctttgacgattgacttggttggcgatcaagatgaaaagcttgctgaaggaatcaaactccatgctatcccactcacagcaacatcaaagcgtaccattcttagtgatctaatcacggtttatgcaaagggtgggaaaaccatagttttcactcgcacaaagaaagatgcagatgaggtatcattggcactgacaaacagtattgcttctgaggcacttcatggtgatatttcacagcatcagcgtgaaaggacactaaatggattccgtcaagggaaatttactgttctagtagcaacagatgttgctgcccgtggtcttgatataccaaatgttgatctgattatccattacgaattgccaaatgatccagaaacttttgtccatcgttctggacgcactggacgtgctgggaaagcaggaactgcaatcttgatgtttaccagcagccagaaaaggacagttaagtcacttgagcgtgatgttggttgcaactttgagtttataagccctccgtccatagaagaagtgctggagtcatctgctgagcatgtcattgctacattgagaggtgtgcacccagagtcaactaaatactttcttggagctgctgagaaattaacagaagaattgggacctcatgctcttgcttctgcactggcacatctgagtggattttctcagccaccttcgtcacgttctctcatcagtcatgagcagggatgggtgacgttgcaactaactagagaacagggatttggcagaggcttcttttctcctagatctgttactggttttctatctgatgtttgttcagctgctgcagatgaagttggcaaaatatacctaacagcagatgagaacgtccaaggagcagtcttcgatttacctgaggaaattgcaaaggacctgcttactatggagctccccccaggaaacacattaaccaaaatttccaagctgcctgcgttgcaagacgatggccctgctactgatagctacggtcgcttttcaaacgaccgaggttccaggaacaacaggcgttctaggggtggcggcgcttcaagaggccggggtggttgggacactgacggcgaggaccgattccgccgtggtggtaggagcttgaggtctgacaatgacagttggtcagatgatgactggtcaggcggtgggagaaaatcaaaccgttcctcatcattcggtagccgctcatcatcctacagcagccgtggctcaccatccttcggtggccgctcatcatccttcggcggtagggagagcaacagaagcttcagcggtgcttgtttcaactgcggcgaatccggccaccgcgcaacggactgcccaaacaagtagtaagatggaagagatggcgcggtctcccctgccgcacggggtcgatgatcctgattggccggagcatgcagagcgaaatcccaaagcccactccacctgctgatcggtgtactacgcccgacacccagccgacgttattactggctacagttttgcgtggtcgtctggcgtcggaaaacagaggaaggttttggcatcctgactacagttactacatcaagcggagttccttcagcttattcatgtcacacggacactactctacactacagggatatgttagtatttcttttatatatatgtattttttttgtggtgctcttgattgaggatctcggtataactgtaaccacacgcactggttacggttgcttctgcttcacaatcgctggcgacggttggattctttgaatgttatagatggcgcattcttccctgcccaagcaagtagacagctcgagcatcaggacgcacgcagagcgaaaacccaagcgcgcccctgatcgaccagtatactacgcctgacagccagctacagtttttgtgtggctgtctcgtcaggactgaagattttggcatgctgattccagttatttagatccagaggagtccttactctacagggatatgttgagtttcagtagaattgtgtaaccagtaaccacacacacgaacaatggcggaggactaaaatataaaatcatagctggcatattgaacacgtaacatatattgcagttggcatggtcttttcttttcgaaaaaaaaaaaaaaaaaaaaaaaaaaaaaaaaaaaaaaaaaaaaaaaaaaaaactcgaggaggggc

SEQ ID NO: 5322 - DNA, 769 bp, Zea mays
  Clone ID: TF_LIB4740-106-A1-K1-D8
gttcccctgcccccctcgttctctctctcgttgcgacgactgtgtggagtaccgcccccgccccctcaccccccgacgccgacgccctaggcggctacgccaggtcccgagggacgggcccttcatcttcgtcagtctattcgccgggcgacgagcacccgccaggcacattgcagccgaatgttcttccaaaggtgtttgctggaactgcaaagagcctggccacatggctaacagctgcccaaatgaagggatatgccgtaactgtggcaagtccggtcacattgcaagagactgcaccgctccaccagtgccgccaggagaagtgatcctttgttttttctgctacaaaccagggcattttcgtgaggaatgcaccaatgagaaggcctgcaataattgccggcagagcggccaccttgcccgtaactgcaccaatgatcctgtttgcaacctgtgcaatgttgctggccatctggcccgtcagtgccccaagtctgatacattgggtgagaggggtgggcctcctcccttccgtggtgttggcgctcccttccatgatgttggcgctcccttccgtggtggcttcagtgacgtggtctgccgggcctgcaaccagattggtcatacgagtcgtgattgcatggctggtgccttcatgatctgccacaactgtggcggccgtggccacatggcttatgagtgtccctctgccagtctcatggaccggttcaccccctcgcccgtttctgaaggaaggaccatccaa

SEQ ID NO: 5323 - DNA, 1077 bp, Zea mays
  Clone ID: TF_ZmC31167_4
atggcctacacggtcacacggagttatacggaccaggttcggccgttctgccaatatgctgcaacccaacggtttcttccaacattaacccccagcgggcagcggccgcgcactccctcagtccctccccgctcaccaccagtcaccaacgcccaccgggcctcgtccctcgtggcggcaactgggcggccgtcgctgccgccctacgccagaagcaagagcaagagcagaagtaggagccgcagtcgcagcaggagcaggagccgcagtcctcggcgaagagataggttgcgcagtgaacgtgcaccccaccgcagtcgtagccggagccgcagcccataccgtcgcagagaacgacgtggtcacagggattttgcatgcaagaactgccggagacctgggcacttcgctaaggagtgtccatctgcacctatgtgcaataactgtaaccttccaggccactttgcagcagaatgcaccttacaaactgtttgctggaactgcaaagagtctgggcacattgccagtgagtgcaagaacgaggccctatgccacgcctgcaacaagacaggtcacttggcacgtgactgccctacttcaggtgctaacgtcaagctatgcaacaaatgctttaaatcaggccacatcgccgttgactgcaccaacgaacgggcctgcaacaactgccgtcagccagggcacatagctcgggagtgcaagaacgacccggtctgcaacctgtgcaatgtctccggccacgtcgcgcgcgtctgcccaaagacgactctggcttcagtgtatacagggcggcccgttccgagatatcctgtgccgcatctgcggtcagccggggcacatcagccgcaactgcatggcgaccatcatctgcgacacatgcggtgggagggggcacatgtcttatgagtgcccatcggcaagaatattcgggctccgccggctctgagagcctttcaccgctttgtttctgatggtttgagtttcgccaggatgtttaatttgtttctgacaatattggaacaattttccctatggttgttgaggaatgattctgtgagg

SEQ ID NO: 5324 - DNA, 4537 bp, Zea mays
  Clone ID: TF_ZmC14816_1
atgtccctacgctcgaccacttcgagtgcgcagcgccagcaggaggccgaggtcgccgcggcacaggaacgcgagcgagcagcagcagcggctgcagcgacagcggcgagggcagcacggttggcggcggcggaactgacagcggcgagagcggaagtagaagcagcggaggcgacggatgctgcacgtgcggcggcagcagagctcgaggttctgcgcggcagtagagcaggcagctatgcttctgtcgacgacaacaccgacgaagagcttaggctggcgagggaagcagcgcgagagcaggcggcacagtgggcagccgcgcacccccatgggggcgcgcgtggcggcagcccagataggcgccgacacgctgacagcgccccgcgggagggcgcacgcggcggcagcccagacgggcgtagacgcgccggcggtgctcccggcggcggcgaccgggtcgacggagatcgcggcctctacaggcggcgcgactctccctccccggatcggtaccatggtcgccgcatggcccaggcctttgtcagggacatcggtcccggcggtgggtggcctaccctcaccaagaccaactacattgagtgggccgcggtgatgagggtacggctccaggttcgccaaatgtgggaagcagttcggtacggcgacgtcgactaccacgaggatcggcgagcgctggatgccctcattgctgcagtcccgctcgagatgcagttttcgctttcccagaagcggactgccaaggaggcctgggacgccatcgctgcgacccgcatcggcagcgaccgtgcccgcaagaccacactgcagacacttcgcaaggagtgggagaacctggccttcaagccaggtgaggatgttgatgactttgctctccgcctcaacactctgttgcagaagatggtgcagttcggcgacgaaacctacgatgaggagagagctgttgagaagctcttctgttgcatccccgagaagtacaagcagattgctcgctcgatcgagtctctgctagacctctccacgatgacgatcgaagaggcgataggtcgtctcaaggtggtcgacggcgacgaaccacaggctccctctgggcctatcactatcggcgggaagctacatctcactcgggaacagtgggaggcctgccagggtgacaagaagaaggagtcctcctcgacacgaggccgcaaacgcggcaagcagcgcaaggcacgtggaggcacccaggccggggcgcgaggacatgttgagggtggtgcacgtggaggtgcccaaggcggcgtcgtcggcaacaagaagccggcacgagacgacggctgtcacaactgcggcaagcttggccactgggccagggactgtcggcagccacgacgtggtcaggccaacgtcgcacaggcggaggcggaggaggccctgctcctggcacatgcaagcatcgagccatctccagcggcaccggccgcagcggcactcctccaccttgatgagtcgaaagcacgcgctttcctcggcgacggctccaacaaggacatgatcgaaggatggtgcctcgacaccggcgccactcatcacatgaccggccgacgggagttcttcaccgagcttgactctagcgtccgaggctccgtcaagtttggggacgcctccggtgtagagatcaagggcgtcggctcagtcgtcttcaccgtcacgtctggtgagcacaggctgctcaccggagtctactacatccccgcattgagaaactctatcatcagcttgggacagctggatgagaacgcaagggaggtcgctgcggaggcggtgtgcggtcgcaagctgcgcgtgttgcgcaccgacaacggcagcgaattcacggcggctgagttcgcgtcgtactgcgcggatgagggcgttcagcgccactactccgcgtcgtacaacctgcagcagaacggcgtcgtcgagcggcgcaaccagacggttgtgggaatggctcgggctctcctcaaacagaggggaatgtcggctgccttctggggagaggcggtggtgacagcggtctacatcctcaaccgctcgcccaccaaggcactcaacgggatgacaccgtacgaggcttggcatgggcgcaagccggcggtctctcacctacgggtcttcggctgcctcgcgttcaccaaggagcttggccacatcggcaagctcgacgacaggagcaccccgggggtgttcattggctacgcggagggctcgaaggcctaccgcatccttgacccaagaacacagcgtgtgcgcacggcgcgagacgtagtgttcgacgaagggcgaggatgggcgtgggacaaggcggtggacgatggcgcgactccgacgtacgacttcaccatcgagtacgtccactttgagggagctgggggagtaggcaactcttctccgagcaggtctaccccagccctcaagtctccaccgactccagcgccacactctccagctcttgctacaacgagctcttcaccaccacgcactccagccacgactccggctacagcgagctcttcgccaccacctcgtgtcgagcacgacccagtggagctcgtgaccccgctctcccgcgacgaggagcgcgtcgacgcgtgctacgacggcgagtcattgaggtatcgaagggtggagggccttctcatcgactcgtcgatgccaggccctgcatctcgcattctggcaggagagttgcatcttgcatgcgacgatggtgagcctcggtctttcgcggaggccgagaaacatgcggcttggcgtgccgcgatgcagtcgaagatggacgcgcaggaggggatcgacttcgacgatgctttcgcccccgtggcacggatggaatctgtgcgactccttgcgctgtcagcccagcagggctggcacgttcatcacatggacgtcaagtcggcgtttcttaacggcgacttaaaggaggaggagggcaaggtgttgcgcctgcgcaaggctctctatagcctgcgacaggcaccgagggcgtggaatgccaagctggattccacgctcaaaggaatgggtttcacgccaagcccgcacgaggcgaccatctatcggcggggcaatggaggaagtgccctgctggtgggtgtctacgtcgacgacttggtgatcaccggcgccaaggatgcagaggtggcaacgttcaaggaagagatgaaggccaccttccaaatgagtgacctggggcatctctccttctacctggggattgaggtgcaccagggagactccgggatcacacttcgccagaccgcctacgccaagcgcattgttgagctggctgggctcaccgactgcaacccagctctcactccgatggaggagaggctgaagctgagtcgcgacagcacgacggaggaggtggatgctacacagtaccggcgtcttgtggggagccttcgctacctcgtccacacacggcctgacttggcatactccgtcggctatgttagtcggttcttgcagcgaccgacgacggagcatgagcaggctgtgaagaggatcatccgctatgttgcggggactctcgaccacggtctctactacccgaggtgccctggggaggcacaccttgtcgggtacagcgacagcgaccacgccggtgacatcgacactagcaagagcacaagcgggatcctcttcttcctcggcaagtgcctcattagctggcagtcggtcaagcagcaggtggtggccatgtccagctgcgaggccgagtacatacggcgtccactgcttcgactcaggcgctcttgctggctcgactgctcggtgatctcctcgggagagacactggagcggtggaactcagggtggacagccagtccgctctggcattggccaagaaccccgtgttccatgaacggagcaagcacatccggctaagataccacttcatccgagactgcttggcagaagggagcatcaaggcgcgctacatcaacaccaaggatcagcttgcagacctgctcaccaagccccttgggaagatcaagtttgttgagctttgctccaggtccgggatgacccaactttctcacaagacgacacccaagacttagggggagaatgatggaataagtcttgagcatctagaggacaacagtcgcttttgactgtcctctgtagtcctttagcatctagaggacagcttgactgtcctctgtagtctctttagcatctagaggacaacagtcgctttttgactgtcctctgtagtctctttagcatctagaggacaacagtcgcttttgactatcctctgtagtttctttagcatctagaggacaatcctgttgtatagtgtgtgtgagaaggtgtggtagtgcagcctctagggctataaatatgggtctccaacccttagatgagtatgtcattgtgtagtgtttgaggaaataaacagaaaattgccccaactcatagtgtcatcctcttgatgagagttagagtccctctacttacagtttatagcatgtag

SEQ ID NO: 5325 - DNA, 1670 bp, Zea mays
  Clone ID: TF_ZmC5443_1
atgtgggaagcagtttggtacggcgacgtcgactaccacgaggatcggcgggcgctggatgccctcattgctgcagtcccgcccgagatgcagttttcactttctcagaagtggactgccaaggaggcctgggacgccatcgctgcgacccgcatcggcagcgaccgtgcccgcaagaccacactacaggcacttcctaaggagtgggagaacctggccttcaagccaggtgaggatgttgatgactttgctctccgcctcaacactctgttgcagaagatggtgcagttcggcgacgacaactacgatgaggagagagctgttgagaagctctcccgttgcatccccgagaagtacaagcagattgctcgctcgatcgagtctctgctagacctctccacgatgacaatcgaagaggcgataggtcgtctcaaggtggtcgatggcgacgaaccacaggctccctctgggcctatcactatcggcgggaagctacatctcactcgggagcagtgggaggcctgccagggtgacaagaagaagggggagtcctcgacacgaggccgcagacgcggcaaaccgcgcaaggcgcgtggaggcgcccaggccggggtgcgaggacatgctgaggttggtgcccatggaggtgcccaaggcggcgccgtcggcaacaagaagccggcacgagatgacggctgtcacaactgcggtaagcttggccactgggccagggactgtcgacagccacgacgtggccaggtcaacgttgcacaggcagaggcggaggaggagaccctgctcttggcacatgcaaacatcgagccatctccagcggcatcggctgcagcggcactcctccaccttgatgagtcgaaagcacgcactttcctcggcgacggctccagcaaggacatgatcgaaggatggtgcctcgacaccggcgccactcatcacatgaccggccgacgggagttcttcaccgagcttgactctagcgttcgaggctccgtcaagtttggggacacctccggcgtagagatcaagggcgccggctcagtcgtcttcaccgccgcatctgatgagcacaggctgctcaccggagtctactacatccccgcgtcgaggaactctatcattagcttgggacagctgaatgagaacggttcgcgcgtggaggtcgagcacggagtcatgaggatctgggacccctctcgtcgccttcttgccaaggtacgcaggggtccaaatcggctatacatcctcaatgtgaaggtggcacaaccttgctgctcgtcgagacgacgtggcatggcagtggcacgagcgcttcgggcaccttaacttcgaggccctgaagcggctcagtgccaaggagatggtacgaggcctgccgtgccttgaccatgtggagcaattctgcgatgtctgcatgttgacaaagcagagacgactcccctttccccagcagtcaagcttccgagccaaggagaggctcgagctcgtgcatgggaacttgtgtggcccggtgacaccagccacaccaggaggacgacgctacttcttgctgctcgtcgacgatctctcccgctacatgtgggtgatgatccttggcagcaagggagaggctgcgaacgccatcaggcgtgtgcaggtcgctgcggaggcggagt

SEQ ID NO: 5326 - DNA, 1649 bp, Zea mays
  Clone ID: TF_ZM3738.C8.o2.fg
atgggggcgcgcgtggcggcagcccagataggcgccgacacgctgacggcgctccgggcgagggcgcacgcggcggcagcccagacgggcgtagacgcgccggcggtgctcccggcggcggcgaccgggtcgacggagatcgcggcctctacaggcggcgcgactctccctccccggatcggtaccatggtcgccgcatggcccaggcctttgtcagggacatcggtcccggcgaagatggtgcagttcggcgacgaaacctacgatgaggagagagctgttgagaagctcttctgttgcatccccgagaagtacaagcagattgctcgctcgatcgagtctctgctagacctctccacgatgacgatcgaagaggcgataggtcgtctcaaggtgccccaaggcggcgtcgtcggcaacaagaagccggcacgagacgacggctgtcacaactgcggcaagcttggccactgggccagggactgtcggcagccacgacgtggtcaggccaacgtcgcacaggcggaggcggaggaggccctgctcctggcacatgcaagcatcgagccatctccagcggcaccggccgcagcggcactcctccaccttgatgagtcgaaagcacgcgctttcctcagcgacggctccaacaaggacatgatcgaaggatggtgcctcgacaccggcgccactcatcacatgaccggccgacgggagttcttcaccgagcttgactctagcgtccgaggctccgtcaagtttggggacgcctccggtgtagagatcaagggcgtcggctcagtcgtcttcaccgtcacgtctgcaagggaggtcgctgcggaggcggtgtgcggtcgcaagctgcgcgtgctgcgcaccgacaacggcggcgaattcacggcggctgagttcgcgtcgtactgcgcggatgagggcgttcagcgccactactccgcgccatacagcccgcagcagaacggcgtcgtcgagcggcgcaaccagacggttgtggggatggctcgggctctcctcaagcagagaggaattccagctgtcttctggggagaggcggtggtgacagcggtttacatcctcaaccgctcgcccaccaaggctctcaacgggatgacaccgtacgaggcttggcatgggcgcaagccggcggtctctcacctacgggtcttcggctgcctcgcattcaccaaggagcttggccacatcagcaagctcgacgataggagcaccccgggggtgttcattggctacgcggagggctcaaaggcctaccgcatccttgacccaagaacacagcgtgtgcgcacggcgcgagacgtagtgttcgacgaagggcgaggatgggcgtgggacaaggcggtggacgatggcgcgactccgacgtacgacttcaccatcgagtacgtccactttgagggagctgggggagtaggcaactcttctccgagcagctcttgctacaatgagctcttcaccaccacgcactccagccacgactccggctacagcgagctcttcgccaccacgtactccagcaccgacgctcatgtcgagcacgacccagtggagctcgtgaccccgctctcccgcgacgaggagcgcgtcgacgcgtgctacgacggcgagtcattgag

SEQ ID NO: 5327 - DNA, 1519 bp, Zea mays
  Clone ID: TF_ZmC1373_16
cctctcgcgcgccggctccacgcagatccaggagatatgcctcgctatgatgaccgctatggaggcacgcgcttgtatgttggcagattggccactcgtactcgttcccgcgatttagaacatctgtttggcagatatggaaggtttttcggtttttaccggaggtctttggtggaagggtgcccttggtggacttggtgaccatttggtgaagggtgcccttggtgtaatgttattgactgttttagtggaagttccaagttggtgatgcatttgagtacttgacacatgacgtgacggcttactgtttgtggcaaccctttgcgcagaatacgagaagtggagttgaagcgtgactatgcatttattgagttcagtgatcatcgcgatgctgatgaggctcgataccagctagatggcagggatgttgatgggagtcgtattgttgttgagtttgctaaaggggtcccacgtggttcaggtggctcacgtgaatatatggggagaggccctccaccaggtacaggtcgttgtttcaactgtggagttgatggtcactgggcaagagactgtaaagctggtgactggaaaaacaaatgctaccgttgtggagaaaggggccatatagaaagaaattgccagaacagtcctaggagtctcaggcgagagagaagttactcacggtccccatctccccgccgtggacggggccgcagtcgaagctatagcaggagcaggagccggagtcggagctatagtcgatcaagatccctgtctagatctcctaggggaggtcgtcgtgaccgtgacgataggagatcaaggagtcctagctatagcaggagccccatgcgatctgcctcgccaccagtaaaggaaaaggagcgcagccccgcacctgatggaagcaggagcccaaggagtcgcagcccccaggatcaggtgatgagcccaccaccaaaggataatggcgaaggcaatggctcagaccgtggcggcagccccagagggagggagaacagcaggagctgcagccgcagccgcagtccatctggtagtaaccgcagccctgcggccaatggacgtagccggagtcctggaggtgagcggagcccgagtcctggaggtgagcggagcccgagtcctagaggtgagcggagcccgagtcctagggctgaccgtagcccaagccccaatggcaatggtaacaatgatgctgctgctgatgtcgatgctgatgctgctgcccgcagtggctcccccactggaagcaagtcaccctgagcgctggcggtcccagattgtggtggtgcttctcaatgcaatgggcaatcgtattgctattttttgctaccatatcgaagacacaatagctacatcattttcttctctgaaacaaggactttattttgcttgctttgagatatgactcttaccctctcatggataatatatatatgatatgatgccactggtgcttgcttgcatctgaataagtgaatgctcgcatgttgaggtt

SEQ ID NO: 5328 - DNA, 1357 bp, Zea mays
  Clone ID: TF_ZmC1373_20
attgggtccctcgaggccggccgggagtttctctctagtagaattgagatccctcctaccacatccgttccccttcccttccctcctctcgcgcgccggctccacgcagatccaggagatatgcctcgctatgatgaccgctatggaggcacgcgcttgtatgttggcagattggccactcgtactcgttcccgcgatttagaacatctgtttggcagatatggaagaatacgagaagtggagttgaagcgtgactatgcatttattgagttcagtgatcatcgcgatgctgatgaggctcgataccagctagatggcagggatgttgatgggagtcgtattgttgttgagtttgctaaaggggtcccacgtggttcaggtggctcacgtgaatatatggggagaggccctccaccaggtacaggtcgttgtttcaactgtggagttgatggtcactgggcaagagactgtaaagctggtgactggaaaaacaaatgctaccgttgtggagaaaggggccatatagaaagaaattgccagaacagtcctaggagtctcaggcgagagagaagttactcacggtccccatctccccgccgtggacggggccgcagtcgaagctatagcaggagcaggagccggagtcggagctatagtcgatcaagatccctgtctagatctcctaggggaggtcgtcgtgaccgtgacgataggagatcaaggagtcctagctacagcaggagccccatgcgatctgcctcgccaccagtaaaggaaaaggagcgcagccccgcacctgatggaagcaggagcccaaggagtcggagcccccaggatcaggtgatgagcccaccaccaaaggataatggcgaaggcaatggctcagaccgtggcggcagccccagagggagggagaacagcaggagccgcagccgcagtccatctggtagtaaccgcagccctgcggccaatggacgtagccggagtcctggaggtgagcggagcccgagtcctggaggtgagcggagcccgagtcctggaggtgaccgtagcccaagccccaatggcaatggtaacaatgatgctgctgctgatgtcgatgctgatgctgctgcccgcggtggctcccccactggaagcaagtcaccctgagcgctggcggtcccagattgtggtggtgcttctcaatgcaatgggcaatcgtattgctattttttgctaccatatcaaagacacaatagctacatcattttcttctctgaaacaatgactttattttgcttgctttgagatatgactcttaccctctcatggataatatatatatgatatgatgccactggtgcttgcttgcatc

SEQ ID NO: 5329 - DNA, 1467 bp, Zea mays
  Clone ID: TF_ZmC1373_23
ggaccctcgaggccggccgggactcctttccccccttcccttccctcctctcgcgcgccggctccacgcagatccaggagatatgcctcgctatgatgaccgctatggaggcacgcgcttgtatgttggcagattggccactcgtactcgttcccgcgatttagaacatctgtttggcagatatggaagaatacgagaagtggagttgaagcgtgactatgcatttattgtacgctaagtttacctccctcagttcaattcagtatctattttcgttttctgtgcccatttgttattgtgtgggaaatgtatttcttttatatacatggttttgtttgttttgcttcttgccaaattaccatacaggagttcagtgatcatcgcgatgctgatgaggctcgataccagctagatggcagggatgttgatgggagtcgtattgttgttgagtttgctaaaggggtcccacgtggttcaggtggctcacgtgaatatatggggagaggccctccaccaggtacaggtcgttgtttcaactgtggagttgatggtcactgggcaagagactgtaaagctggtgactggaaaaacaaatgctaccgttgtggagaaaggggccatatagaaagaaattgccagaacagtcctaggagtctcaggcgagagagaagttactcacggtccccatctccccgccgtggaaggggccgcagtcgaagctatagcaggagcaggagccggagtcggagctatagtcgatcaagatccctgtctagatctcctaggggaggtcgtcgtgaccgtgacgataggagatcaaggagtcctagctatagcaggagccccatgcgatctgcctcgccaccagtaaaggaaaaggagcgcagccccgcacctgatggaagcaggagcccaaggagtcgcagcccccaggatcaggtgatgagcccaccaccaaaggataatggcgaaggcaatggctcagaccgtggcggcagccccagagggagggagaacagcaggagctgcagccgcagccgcagtccatctggtagtaaccgcagccctgcggccaatggacgtagccggagtcctggaggtgagcggagcccgagtcctggaggtgagcggagcccgagtcctagaggtgagcggagcccgagtcctagggctgaccgtagcccaagccccaatggcaatggtaacaatgatgctgctgctgatgtcgatgctgatgctgctgcccgcagtggctcccccactggaagcaagtcaccctgagcgctggcggtcccagattgtggtggtgcttctcaatgcaatgggcaatcgtattgctattttttgctaccatatcgaagacacaatagctacatcattttcttctctgaaacaaggactttattttgcttgctttgagatatgactcttaccctctcatggataatatatatatgatatgatgcc

SEQ ID NO: 5330 - DNA, 5588 bp, Zea mays
  Clone ID: TF_ZmC27331_11
caccaaatgtggccgttggggagccagtctggtgaatggcgcaccggacagtccggtgcacaccggacatgtccggtgcccctgccacgtcatcagtgccgttggaatatgaccgttggagttctgacttgtgggccacccctgatgtccggtggcgcaccggacagctcctgttcattgtccggtgcgccagtatgggcaaacctgacgtctgcgcgcgctgcggcgcatttaatgcctctgcaggtggggatggacctccgcccgtttttgatggtgacgattttccttattggaaaattcgtatggaagcatacttagaggctatagacattggtgtctacaaagccgccacacaagggttccccgaacctagagatctcacaaatcttgtaggtgatgagttcaattatgagaaatggaatgctaaggccaaaaataccctttttagaggcctttgcaaagatgtgttcaatagagtaaggaatcataaaaatgctcatgatttgtggatggacatttgtgctctacatgaaggaactagaagtgaacgtgaggaaagatatcacatagccatgcgaaagttaaattccattgaaatgcttactaatgaaaatgcaaatgctatgtactcacgacttaatattcttgtagaggaagtcaatggattggggcttactcaaatctcacaaccggatgttgtgaggaagattctcagtgtcctcccaatagacaaatatggacacattgtcactgtgctacatcaaatggatctttcagttaccacacctacacaaattttgggaaagatcaatgcccatgaaatgtacatgcacatcaacgacaaagaagaatcatcttccaaaagaaaggatttggctctcaaagcaaatcatgaaagaaaaggaaaagcaaaaatacaagttgaggaagaatcctcaagtgatgatgaccttgatgcaaacattgccttgatggtaaggaagaccaccaagatgttgaagaagctaaatagagaaggcatcaaatttgattcaagaaagaagaagttcttttccaacaaaagaaagcccatttctgagatggactgctacaactgtggtgagcttggtcatcttgctcatcaatgcaacaagcccaagaagaacaagttcaagggcaagaaggaagatgacagcgatgatgaaaagaaggaaaagaaattcttcaagaggaaggatgggaagcaaaatagattccacaagaagaagaatggaaaggcctatattgttggcgactggctcaccgacatcgaatcatcaagtgggtcttcttcaagtgaagaagagaatgatgaaaaagttgcggccatcgccggggacttctcttcaccaccaccatcgccatcatccactgctcacctatgcctcatggctaggggtgaacgaaaggtacaaaatgatattaatattgatgatgatagtgatagtgatagtgatgaagaatttgcttcaccttcatatgatgagttagctgacttacttaaagaatatactcaaatcattagaaagtcaaaagctaaatgtgataggttgaaaaatgaaaatgaatctttaaatgccaagtatgacatagttataaaggctagtgatgaaataaaagaagaaaataaaactatgtcatcaactgtaaatgagctcacaaactccctaaaagatgctaaggaaaaatatgacaaattaaatgaagctaatagggagttgcaaaatagactagtaaagatcaaggaagactatactcaaattaaatttgatcatgacaatcttcttgttgaaaatgaacttttatcttgcaaaacacatgaggctattaaccctgttgttaagcttgatgtagcaacctcatgtgatgatttgattcaagaagagcaaactagtctacatgctgaattgactgaaaaagttgaagtcctgactttagacaaccaaaaattgaagaattacttgactgatgcaactactagaggaaaagttgctattgagaacaatgatttcaacaatgagttggcagtggataatcaaaggcttaagaatgaggtcaagaaactaaaaagtgaaaatgaacatcttgcaacaagtgtgcaaaagttcaacaagggtcaatacctccaaaatgagctgcttatgaacactgttatgaaaaataacaagagtggtattggatacaatgcttttgtgcaaaagaaagctatcactcaatacaagccaaagcagactcacaagcctatcaaatgctttgagtgtggaaatgaaggtcattttgcccacaactgcaaagctaaaccaccaactcccttgcctaagcactcaagaccatttgctttcaatgctcactatgttctaagaaaggttgtaaatggaaagattaaggtgaactacaagaccggtgggagccattgggttattgacagtggatgcacacaacatatgacaggcaacccacggatgttcacctcactagatgagaatgttgatggtcaagataaaatcacatttggagacaattcaaaaggaaaagtgcaaggacttggcaaggtggcaatctcaaatgatttatcaatatcaaatgttcttctagttgcacccttgagcttcaatttattatcagtgggacaactctgtgatcttggacttaaatgcttattcactccatcagagggatttagatacaacaacctctacttagtggatttcacttcagaagatgcagacttaagaacttgcctcttcaccaaagcttctcttggatggctttggcataggaggcttgcacatgttgggatgagcacactcaagaaggtattaaagaaagatatggttagaggtttaaaggatgtggtgtttgaaaaagacaagccatgcagtgcatgtcaagctggaaagcaagttgctaatacacatcctactaaagctttcatgtcaacatcaaggccactggaacttcttcacatggatttatttggacctacaaattatgtcagtgccggtggcaacctctactgtctagtgattgttgatgacttctcaagatacacttgggtgttctttctccatgacaaatctgaagttgcatctatattcaagaagtttgccaagaaagcacaaaatgaatttgattgcaagattaagaagattagaagtgacaatggcaaagaatttgacaacaccaacattcatgagtactgtgatgaaattgggatcaagcatgaagtatctgccacatatacacctcaacaaaatggagttgttgaaaggaaaaataggaccttgatcacccttgcaagaacaatgattgatgagtataacacaccggagaggttttgggccgaagctgtcaacactgcttgctatgcatcaaacaggctatttcctcaccggctacttgcgaagactccttatgaactgctaaatgggaaaaagccagacgtctctttcttccgggtgtttgggtgcaaatgctacatctacaaaaaacgccatcatctagggaagtttcaaagacgttgtgatattggttttcttttgggttattcattaaagtccaaagcatatcgagtattcaaccatgccactggcgtggtagaagaaacatatgatgtggaatttgatgagactaatggctcccaaggagcacttgaaaatcttgatgatgtaggtgatgagccacttagggaagcaatgaagaacatgcctattggagctatcaaaccaaaagaagatgaagaagaggtgcaaatcattgacaggccttcttcatcaaatgtaccacaagatgatgaaaaagatgagaggcatgcaaatgaagatacatttgtctctcatgaacaagcaagggtacaagccgaagatgttgatgctccaggatcttcttcccaagtggttgacaggagaaactcatcactacttcaagctcatcctcaaaaccaaatcatcgggagtccttcacaaggggttattactcgatcacataaacatgctaattttattgaacatcactcttttgtttcttgtgttgagcctacttgtatagatgacgcgctacaggatccggactgggtgaatgccatgcatgaagaacttaacaacttcacccgtaacgaagtttggaccctggagaagcccccacaagatgcaagaatcattggaacaaagtgggtgttcagaaacaaacaagatgatcaaggtgtgattgtaagaaacaaggcaagacttgtcgcaaagggattctctcaagttgaaggcttagattttggagagacctttgcaccggttgctcgactggaagccatccgtatcctacttgcatatgcatcatgctatgatataaaactttatcaaatggatgtaaaaagtgcatttttaaatggcttcataaatgaacttgtatatgttgagcaaccgcctggatttgaagaccctagatatcctaaccatgcttacaggttgtccaaggcgctttatgggctaaagcaagctccaagggcttggtatgagcgtcttcgcgacttcctcatcgaaaagggcttcaagatcgggaccgtcgacacaactctcttcacaaagaaacataacggtgatattttcatttgtcaagtatatgttgatgatataatctttggctcgacaaatgactatcattgcaaggaatttggtgagttgatgtcgaaggagtttgagatgtcaatgattggtgagctaacatacttcctcggctttcaagtcaagcaaatgaaagatggtaactttctctctcaagagaagtataccaaagacttgttgaaaagattcaacatggagaagtgcaaaccaatcaagacccccatgcctacaaatggacatctcgacttagatgagggaggtaacccggttaatcaaactctctaccgttctatgattggtagtttattgtaccttaccgcatctaggcccgatattatgtttagtgtctgcatgtgtgctagatttcaatctaatcctaagaaagctcaccttcgcgctgttaagagaattctgaggtatctcaggcacaccacaagcgttggtctgtggtatcccaaaggagctacttttgatttaattggctattccgattcggattatgccggttgcaaaattgataggaaaagtacttctagaggatgccatctgcttggtacatcactagtttcatggacatccaaaaagcaaaatagtgttgccttgtcaactgccgaagcggaatacattgccgcaggtgcttgttgcacacagattttatatatgaaacaaactcttctagactatggcgtagttctagaaaaagtacctttgttgtgtgataatgagagtgctgttaaaattgctaataatcctgtacaacactctcgcaccaagcacattgatatccgtcatcacttccttagagatcatgttgctaaaggagatatcattttagaaggagtgaggtcggaagatcaattcgcggatattttcactaagccacttgataagacccgcttttgcatgttgaggaatgaactaaatattcttgatctcagaaattttatgtga

SEQ ID NO: 5331 - DNA, 7536 bp, Zea mays
  Clone ID: TF_ZmC951_441
ctaaacacctgatgtaggaggaggcggcgggggcgcatccggtcgaggtcgaggtagcagagcaaacgccgacggagggtcagagtcagtctcggatccaggatctgcggtagaagctggagctggtactgactcggacgcaggcagcgctgcaggagctaccggaacagaagcagtcacagatactgccacagcggtagtggtaacagcagatgctggtggcactagcggctgtgggcagacagagctgaggaccggagacgtgaacgccaaggtgaccggccggagcggagaggtaacagcagggggtgcagacaagatcgaaggcaccactggagcgtaaagcgaagaaggcggagcagactgaactggaggtgctgagatacccgaatgctgaagcatgagggccatgaatgccctattctctgccctatcctgaataagctgctgctgaagtgaatcctgcctgtcctgcatagtctgaaacattgagagcatcctctcggacatacgggcctgctcggctgccagctgagcctgctgctgagtgagagtctgaagaatcgaagctagagcagggtccatagcctgaggggtagcaggagcagcactagagctcccagcctcatgatcatgtgagcgtggaggcataggaggcggaggcggaggaggaatcccaaaatcatcatcatcatcatcatcagctgctgcaccctgggtgtcaaactgtcgaagtgctgcatcctcggcctgagtgtcaaacacaggagcataagctggtactggaatctctggagcaggacggtaagatccaaacacaaggcgtgaggcctcaagggtgctctgaaaacgaggtggctggatcagctgcgcaaatatgtggcataagtagtgagcatagggtagctgccgccgagcacgaatcccatccagaacagtgtcctcaatctcacagatcagaaagtccacaacatcaaactcagagtgggataccagggcaccaaggagccatagctgaatatgagtagtagcctccctgtatcccatccgaggcaggagagtccgtctgataagctcatataagtactttgctgctgtggtgaaatctgcaggagaacgtcgcgacccatctgagaaaggcgggcggaacagagccgcgacgtgagctgtccctggagctataccgccgtgagggcgacgtggaggatctgaagtgccatagcagagactgtgcaggcgagtcgtcgactcaaggaagccaaatagctgtcggatctgatcggcagtgatcgtgacatcctcgcgctcaaagcggaacctcatccaatgatgatccgggtcaatccaaacagaggcatagaagacgcggacccactcctcaacatatctgccgctgatagtcagaaaggacagaagccctggcaaataggtgagatgtgcctcagactcagcaccggctgctagcaagaaggctggaagatccaataggcggtgaactcgtagcgcaatctgagcagacatctgagccctgaagaaagactcctgaatccgtgtgctgaagagaactcctgctgctgggtctctctgagcaggcaaccaagactccacgggtatgtacctgaaccgacgtacccgggctgcagtagcacgctgaagatcaaacagacgaggatccgaagccagaggacgaacctcagtctcatcacgctcccggaagcgaggtggagggacaggtggagctgaagcgggagcgggggcaggagaagcagtggaagctggcgtggtgctggtagtgggtatggcggtggaggtggatggagcaataggagtgactggggcaggcagagtgggtggtggagtggaagcggaggtatgagtggaggagcgagaccgggaggcgagacgacgagcacggaaagcaatctgatctgaaggaacatccggctgatctccaagtgctgcctgcgcagcggctgctgcagctgctgctgctgcacgagcctctctgtccgaacgccgcttcttgcggccttcctgctgctccagatacacagtcttgcccttcacctgcctgaaggggcgacgagggtcctcatcgtcgccaccccctgatgccgacgcattcttcgtgcgcggcatcttgacctgacgaataaaatttctgagatcaagaatatttagttcattcctcaacatgcaaaagcgggtcttatcaagtggcttagtgaaaatatccgctaattgatcttccgatctcactccttctaaaatgatatctcctttagcaacatgatctctaaggaaataatgacggatatcaatgtgcttggtgcgagagtgttgtacaggattattagcaattttaacaacactctcattatcacacaacaaaggtaccttttctagaactacgccatagtctagaagagtttgtttcatatatagaatttgtgtgcaacaagcacctgcggcaatgtattccgcttcggcagttgacaaggcaacactattttcctttttggatgtccataaaactagtgatctaccaagcagatggcatcccccagaagtactcttcctatcaattttgcaaccggcataatccgaatcggaatagccaattaaatcaaaagtagctcctttgggataccacagaccaacgcttgtgctgtgcctgagatacctaagaattcttttaacagcgcgaagatgagctttcttaggattagattgaaatctagcacacatgcagacactaaacatgatatcgggcctagatgcggtaaggtacaataaactaccaatcatagaacggtagagagtttgattaaccgggttacctccctcatctaggtcgagatgtccatttgttggcataggtgtcttgattggtttgcacttctccatgttgaaccttttcaacaagtctttggtatacttctcttgtgagagaaagttaccatctttcatttgcttgacttgaaagccgaggaagtacgtcagctcaccaatcattgacatcttgaattccttcgacatcaactcaccaaattccttgtaatgatagtcatttgtcgagccaaagattatatcatcaacatatacttgacaaatgaaaatatcaccgttatgtttctttgtgaatagagttgtgtcgacggtcccgatcttgaagcccttttcgatgaggaagtcacgaaggcgctcataccaagcccttggagcttgctttagcccatatagcgccttggacaacctgtaagcatggttaggatatctagggtcttcgaatccaggtggttgctcaacatatacaagttcatttatgaagccatttaaaaatgcactttttacatccatttgataaagttttatatcatagcatgatgcatatgccagtaggatatggatggcttccagtcgagcaactggtgcaaaggtctctccaaaatctaagccttcaacttgagagaatccctttgcaacaagtcttgccttgttccttacaatcacaccttgatcatcttgtttgtttctgaacacccactttgttccaatgattcttgcatcttgtgggggcttctccagggtccaaacttgattatgggtgaagttgttaagttcttcatgcatggcgttcacccagtccggatcctgtagcgcctcatctatacaagtaggttcaacacaagaaacaaaggagtgatgttcaataaaagaagcatgtctatgtgatcgagtaataaccccttgtgaaggactcccgatgatttggttttgaggatgagcttgaagtagtgatgagtttctcctgtcaaccacttgggaagaagatcctggagcatcaacatctttggcttgtacccttgcttgttcatgagagacaaatgtatcttcatttgcatgcctctcatctttttcatcatcttgtggtacatttgataaagaaggcctgtcaatgttttgcacctcttcttcatcttcttttggtttgatagctccaattggcatgttcttcattgcttccctaagtggctcatcacctacatcatcaagattttcaagtgctccttgggagccattagtctcatcaaattccacatcatatgtttcttctaccacgccagtggcatggttgaatactcgatatgctttggaatttaatgaataacccaaaagaaaaccaatatcacaacgtctttgaaacttccctaagtgatggcgtttcttgtagatgtagcatttgcacccaaacacccggaagaaggagacgtctggctttttcccatttagtagttcatagggagtcttcgcaagtagccggtgaggaaatagcctgtttgatgcataacatgcagtgttgacagcttcggcccaataactctccggtgtgttatactcatcaatcattgttcttgcaagtgtgatcaaggtcctgtttttcctttcaacaactccattttgttgaggtgtgtatgttgcagatacttcatgcttgatcccaatttcatcacagtactcatgaatgttggtgttgtcaaattctttgccattatcacttctaatcttcttgatcttgcaatcaaattcattttgtgctttcttggcaaacttcttgaatatagatgcaacttcagatttgtcatggaaaaagaacacccaagtgtatcttgagaagtcatcaacaatcactagacaatagaggttgccaccagcacttacataatttgtaggtccaaataaatccatatgaagtagttctagtggccttgatgttgacatgaaagctttagtaggatgtgtattagcaacttgcttcccagcttgacatgcactacatggcttgtccttttcaaataccacatcctttaatcctataaccatgtctttctttaatacctccttgagtgtgctcatcccaacatgtgcaagcctcctatgccaaagccatccaagtgaagctttggtgaagaggcaagttcttaagtctgcatcttctgaagtgaaatccactaagtagagattgttgtatctaaatcccttgaacaccattgattcatcatccatctttgatacaataacctctgttggagtgaataagcattgaagtccaagatcacagagttgacccactgataataaattgaagctcaaaggtgcaaccaagagaacatttgatattgataaatcatttgaaattgccaccttgccaagtccttgcacttccccttttgaattgtctccaaatgtaattttgtcttgtccatcaacattctcatcaagtgaggtgaacatccgtgggttgcttgtcatatgttgtgtgcatccactgtcaataacccaatggctcccaccggtcttgtagttcaccttaatctttccatttgcaacctttcttagaacatagtgagcattgaaggcaaatggtcttgagtgcttaggcaagggagttggtggtttagctttgcagttgtgggcaaaatgaccttcatttccacactcaaagcatttgataggcttgtgagtctgcattggcttgtattgagtgatagctttcttttgcacaaaagcattgtatccaataccactcttgttatttttcataacagtgttcataagcagctcattttggaggtattggcccttgttgaacttttgcacacttgttgcaagatgttcattttcactttttagtttcttgacctcattcttaagcctttgattatccactgccaactcattgttgaaatcattgttctcaatagcaacttttcctctagtagttgcatcagtcagataattcttcaatttttggttgtctaaagtcaggacttcaactttttcagtcaattcagcatgtagactagtttgctcttcttgaatcaaatcatcacatgaggttgctacatcaagcttaacaacagggttaatagcctcatgtgttttgcaagataaaagttcattttcaacaagaagattgtcatgatcaaatttaatttgagtatagtcttccttgatcttaactagtctattttgcaactccctattagcttcatttaatttgtcatatttttccttagcatcctttagggagtttgtgagctcatttacagttgatgacatagttttattttcttcttttatttcatcactagcctttataactatgtcatacttggcatttaaagattcattttcatttttcaacctatcacatttagcttttgactttctaatgatttgagtatattctttaagtaagtcagctaactcatcatatgaaggtgaagcaaattcttcatcactatcactatcactatcatcatcaatattaatatcattttgtacctttcgttcacccttagccataaggcacaggtgagaagtggatgatggcgatggtggtggtgacgagaagtccgcggcgatggccgcaactttttcatcatcctcttcttcacttgaagaagatccacttgatgattcgacgtcggtgagccagtcgccaacaatataggcctttccattcttcttcttgtggaacctcttttgcttcccatccttcctcttgaagaatttcttttccttcttttcatcatcgctgtcatcttccttcttgcccttgaacttgttcttcttgggcttgttgcattgatgagcaagatgaccaagctcaccacagttgtagcagtccatctcagaaatgggctttcttttgttggaaaagaacttcttctttcttgaatcaaatttgatgccttctctatttagctttttcaacatcttggtggtcttccttaccatcaaggcaatgtttgcatcaaggtcatcatcacttgaggattcttcctcaacttgtatttttgcttttccctttttttcatgatttgctttgagagccaagtcctttcttttggaagatgattcttctttgttgatgtgcatgtacatctcatgagcattgatctttcccaaaatttgtgtaggtgtggtaactgaaagatccatttgatgtagcacagtgacaatgtgtccatatttgtctattggaaggacactgagaatcttcctcacaacatccggttgtgagatttgagtaagccccaatccattgacttcctctacaagaatattaagtcgtgagtacatagcgtttgcattttcattagtaagcatttcaaaagaatttaactttcgcatagctatgtgatatctttcctcacgttcacttctagttccttcgtgtagagcacaaatgtccatccacaaatcatgagcatttttatgattcctgactctattgaacacatctttgcaaaggcctctaaaaagggtgtttttggccttagcattccatttctcataattgaactcatcacctacaagatttgtggcgtctctaggttcggggaacccttgtgtggcggctttatagacaccaatgtctatagcctctaagtatgcttccatacgaattttccaataaggaaaatcgtcaccatcaaaaacgggaggaggtccatccccaccggacat

SEQ ID NO: 5332 - DNA, 5341 bp, Zea mays
  Clone ID: TF_ZmC951_461
taagtgcagtacgtcatgcaatatttcaagaaccaacaattgcatagcaagtaagaatttaagtgctaaaagcttaaaactaagacttgtcaagtttgacccgagttaagctttttcactcgctttgttggcggttatctcaactaggttagacaagccctagatgcaatacaagaaatttaaacatgcaatgcaagcttgacaacaccatttgacattttacattaaatttctgagatcaagaatatttagttcattcctcaacatgcaaaagcgggtcttatcaagaggcttagtgaaaatatccgctaattgatcttccgacctcactccttctaaaatgatacctcctttagcaacatgatctctaaggaagtgatgacggatatcaatgtgcttggtgtgagagtgttgtacaggattattagcaattttaacagcactctcattatcacacaacaaaggtaccttttctagaactacgccatagtctagaagagtttgtttcatatataaaatttgtgtgcaacaagcacctgcggcaatgtattccgcttcggcagttgacaaggcaacactattttgctttttggatgtccatgaaactagtgatctaccaagcagatggcatcccctagaagtacttttcctatcaattttgcaaccggcataatccgaatcggaatagccaattaaatcaaaagtagctcctttgggataccacagaccaacgcttgtggtgtgcctgagatacctaagaattttcttaacagcgcgaagataagctttcttaggattagattgaaatctagcacacatgcagacactaaacatgatatcgggcctagatgcggtaaggtataataaactaccaatcatagaacggtagagagtttgattaaccgggttacctccctcatctaagtcgagatgtccatttgtaggcatgggggtcttgattggtttgcacttctccccatgtgaaccttttccacaagtctttggtatactcttcttgtgagagaaagttaccatctttcatttgcttgacttgaaagccgaggaagtatgttagctcaccaatcattgacatctcgaactccttcaacatcaactcaccaaattccttgcaatgatagtcatttgtcgagccaaagattatatcatcaacatatacttgacaaatgaaaatatcaccgttatgtttctttgtgaagagagttgtgtcgacggtcccgattttgaagcccttttcgatgaggaagtcgcgaagacgctcataccaagcccttggagcttgctttagcccataaagcgccttggacaacctgtaagcatggttaggatatctagggtcttcaaatccaggcggttgctcaacatatacaagttcatttatgaagccatttaaaaatgcactttttacatccatttgataaagttttatatcatagcatgatgcatatgcaagtaggatacggatggcttccagtcgagcaaccggtgcaaaggtctctccaaaatctaagccttcaacttgagagaatccctttgcgacaagtcttgccttgtttcttacaatcacaccttgatcatcttgtttgtttctgaacacccactttgttccaatgattcttgcatcttgtgggggcttctccagggtccaaacttcgttacgggtgaagttgttaagttcttcatgcatggcattcacccagtccggatcctgtagcgcctcatctatacaagtaggctcaacacaagaaacaaaagagtgatgttcaataaaagaagcatgtctatgtgatcgagtgataaccccttgtgaaggactcccgatgatttggttttgaggatgagcttgaagtagtgatgagtttctcctgtcaaccacttgggaagaagatcctggagcatcaacatcttcggcttgtacccttgcttgttcatgagagacaaatgtatcttcatttgcatgcctctcatctttttcatcatcttgtggtacatttgatgaagaaggcctgtcaatgatttgcacctcttcttcatcttcttttggtttgatagctccaataggcatgttcttcattgcttccctaagtggctcatcacccaaaagaaaaccaatatcacaacgtctttgaaacttccctagatgatggcgttttttgtagatgtagcatttgcacccaaacacccggaagaaagagacgtctggctttttcccatttagcagttcataaggagtcttcgcaagtagccggtgaggaaatagcctgtttgatgcatagcaagcagtgttgacagcttcggcccaaaacctctccggtgtgttatactcatcaatcattgttcttgcaagggtgatcaaggtcctgtttttcctttcaacaactccattttgttgaggtgtatatgtggcagatacttcatgcttgatcccaatttcatcacagtactcatgaatgttggtgttgtcaaattctttgccattgtcacttctaatcttcttaatcttgcagtcaaattcattttgtgccttcttggcaaacttcttgaatatagatgcaacttcagacttatcatgaagaaagaacacccaagtgtatcttgaaaagtcatcaacaatcactagacagtagaggttgccaccggcactgacataatttgtaggtccaaataaatccatgtgaagtagttccagtggccttgatgttgacatgaaagctttagtaggatgtgtattagcaacttgctttccagcttgacatgcactgcatggcttgtctttttcaaacaccacatcctttaatcctctaaccatatccttttttaatactttcttgagagtgctcattccaacatgtgcaagcctcctatgccaaagccatccaagagaagctttggtgaagaggcaagttcttaagtctgcatcttctgaagtgaaatccactaagtagaggttgttgtatctaaatcccttgaataccattgattcatcatctatttttgttacaataacctctgatggagtgaataagcattgaagtccaagatcacagagttgtcccactgataataaattgaagctcaagggagcaactaagagaacatttgatattgataagtcatttgagattgccaccttgccaagtccttgcacttttccttttgagttgtctccaaatgtgattttatcttgaccatcaacattctcatctagtgaggtgaacatccgtgggttgcctgtcatatgttgtgtgcatccactgtcaataacccaatggctcccaccggtcttgtagttcaccttaatctttccatttgccacctttcttagaacatagtgagcattgaaagcaaatggtcttgagtgcttaggcaagggagttggtggtttagctttgcagttgtgggcaaaatgaccttcatttccacactcaaagcatttgataggcttgtgagtctgctttggcttgtattgagtgatagctttcttttgcacaaaagcattgtatccaataccactcttgttatttttcataacagtgttcataagcagctcattttggaggtattgacccttgttgaacttttgcacacttgttgcaagatgttcattttcactttttagtttcttgacctcattcttaagcctttggttatccactgccaactcattgttgaaatcattgttctcaatagcaacttttcctctagtagttgcatcagtcaagtaattcttcaatttttggttgtctaaagtcaggacttcaactttttcagtcaattcagcatgtagactagtttgctcttcttgaatcaaatcatcacatgaggttgctacatcaagcttaacaacagggttaatagcctcatgtgttttgcaagataaaagttcattttcaacaagaagattgtcatgatcaaatttaatttgagtatagtcttccttgatctttactagtctagtttgcaactccctattagcttcatttaatttgtcatatttttccttaacatcttttagggagtttgtgagctcatttacagttgatgacatagttttattttcttcttttatttcatcactagcctttataactatgtcatacttggcatttaaagattcattttcattttcaacctttcgttcacccctagccatgaggcataggtgagaagtggatgatggcgatggtggtggtgaagagaagtccccggcgatggccgcaactttttcatcattctcttcttcacttgaagaagacccacttgatgattcgatgccggtgagccaatcgccaacaatatatgcctttccattcttcttcttgtggaacctcttttgcttcccatccttcctcttgaagaatttcttttccttcttttcatcatcgctgtcatcttccttcttgcccttgaacttgttcttcttgggcttgttgcattgatgagcaagatgaccaagctcaccacagttgtagcagtccatctcagaaatgggctttcttttgttggaaaagaacttcttctttcttgaatcaaatttgatgccttctctatttagcttcttcaacatcttggtggtcttccttaccatcaaggcaatgtttgcatcaaggtcatcatcacttgaggattcttcctcaacttgtatttttgcttttccttttctttcatgatttgctttgagagccaaatcctttcttttggaagatgattcttctttgtcgttgatgtgcatgtacatttcatgggcattgatctttcccaaaatttgtgtaggtgtggtaactgaaagatccatttgatgtagcacagtgataatgtgtccatatttgtctattgggaggacactgagaatcttcctcacaacatccggttgtgagatttgagtaagccccaatccattgacttcctctacaagaatattaagtcgtgagtacatagcatttgcattttcattagtaagcatttcaaaggaatttaattttcgcatggctatgtgatatctttcctcacgttcacttctagttccttcatgtagagcacaaatgtccatccacaaatcatgagcatttttatgattccttactctattgaacacatctttgcaaaggcctctaaaaagggtgtttttggccttagcattccatttctcataattgaactcatcacctacaagatttgtgggatctctaggttcggggaacccttgtgtggcggctttatagacaccaatgtctatagcctctaagtatgcttccatacgaattttccaataaggaaaatcgtcaccatcaaaaacgggaggaggtccatccccaccggacat

SEQ ID NO: 5333 - DNA, 7482 bp, Zea mays
  Clone ID: TF_ZmC951_462
ctaaacacctgaagcaggaggaggcggcgggggcgcatccggtcgaggtcgaggtagcagagcgaacgccgacggagggtcagagtcagtctcggatccaggatctgtggtagaggctggagctggtactgactcggacgcaggcagcgctgcaggagctaccggaacagaagcagtcacagatactgccacaacggtagtggtaacagcagatgctggtggcactagcggctgtgggcagacagagctgaggaccggagacgtgaacgccaaggtgaccggccggagcggagaggtaacagcagggggtgcagacaagatcgaaggcaccactggagcgtaaagcgaagaaggcggagcagactgaactggaggtgctgagatacccgaatgctgaagcatgagggccatgaatgccctactctctgccctatcctgaataagctgctgctgaagtgcatcctgcctgtcctgcatgctctgaaacatcgagagcatcctgtcggataaacgggcctgctcggctgccagaagagcctgctgctgggtgagagtctgctgctgctgagtgagagtctgctgctgctgggtgagagtctgaagaatcgaagcaagggcagggtccaaagctggaggaggagcaggggcagcacgggaactcccagcctcatgatcatgtgagcgtggaggcataggaggcggaggcggaagaggaaccccaaaatcatcatcatcatcatcatcatcagcagctgtaccctgagtgtcaaactgatgtagagctgcgtcctcggcctgagagtcaaacacagaagcagaagctggcactggaatctcaggagcagggcggtaagatccaaacacaaggcgtgaggcctcaagagtgctctgaaatcgaggtggctgaatcagctgcgcaaagatgtggcataagtagtgagcatacggtagctgccgtcgagcacgaatcccatccagaacagtatcctcaatctcacagatcagaaagtcaacaacatcaaactcagagtgggataccagggcaccaaggagccaaagctgaatgtgagtggtagcctccctgtatcccatcctaggcaggagtgtccgcctgacgagctcatacaagtacttcgctgcagtagtgaagtctgctggagaacgtcgcgacccatctgtgaaaggcgggcggaacagagccgcgacgtgagctgtccctggagccacaccgccgtgagggcgacgtggaggatctgaagtgccatagcagagactgtgcaggcgagtcgtcgactcagggaagccaaatagctgtcggatctgatcggcagtgatcgtgacatcctcgcgctcaaagcggaacctcatccaatgatgatccgggtcaatccaaacagaggcatagaagacgcggacccactcctcaacatatctgccgctgatagtcagaaatgacagaaggcctggcaaataggtgagatgcgcttcagactcagcacctgctgctagcaagaaggctggaagatccaataggcggtgaactcgtagcgcaatctgagcagacatctgagccctgaagaaagactcctgaatccgagtgctgaaaagaactcctgctgctgggtctctctgagctggcagccaagactccacgggtacgtacctgaaccgacgtacccgggctgcagtggcacgctgaagatcaaacagacgaggatccgaaaccagtggacggacctcagtctcgtcacgctcccggaagcgaggagggggtacaggtggagcagaagcgggagcgggagcaggggtagcagtggaagctggcgtggaactggtagtgggtatggcggtggaggtggatggagcaataggggtgactggggcaggcagagtgggtggcggagtggaagcggaggtgtgagtggaggagcgagaccgggaggcgagacgacgagcacggaaagcaatctgatctgaaggaatatccggctgatctccaagtgctgcctgtgcagcggctgctgcagctgctgctgctgcacgagcctctctgtccgaacgccgcttcttgcggccttcctgctgttccaaaaagacagtcttccccttcacctgcctgaaggggcgacgagggtcctcgtcatcgccaccccctgatgccgacgcattcttcgtgcgcggcatcctgaactgaagtctcactccttctaaaataatatctcctttagcaacatgatctctaaggaagtgatgacggatatcaatgtgcttggtgcgagagtgttgtacaggattattagcaattttaacagcactctcattatcacacaacaaaggtactttttctagaactacgccatagtctagaagagtttgtttcatatataaaatctgtgtgcaacaagcacctgcggcaatgtattccgcttcggcagttgacaaggcaacactattttgctttttggatgtccatgaaactagtgatctaccaagcagatggcatcccccagaagtacttttcctatcaatcttgcaaccggcataatccgaatcggaatagccaattaaatcaaaagtagctcctttgggataccacagaccaacgcttgtggtgtgcttgagatacctaagaattctcttaacagcgcgaagatgagctttcttaggattagattgaaatctggcacacatgcagacactaaacataatatcgggcctagatgcggtaaggtataataaactaccaatcatagaacggtagagagtttgattaaccgggttacctccctcatctaagtcgagatgtccatttgtaggcatgggggtcttgattggtttgcacttctccatgttgaaccttttcaacaagtctttggtatacttctcttgtgagagaaagttaccgtctttcaattgcttgacttgaaagccgaggaagtatgttagctcaccaatcattgacatctcgaactccttcgacatcaactcaccaaattccttgcaatgacagtcatttgtcgagccaaagattatatcatcaacatatacttgacaaatgaaaatatcaccgttatgtttctttgtgaagagagttgtgtcgacggtcccgattttgaagcccttttcgatgaggaagtcgcgaagacgctcgtaccaagcccttggagcttgctttagcccataaagcgccttggacaacctgtaagcatggttaggatatctagggtcttcaaatccaggcggttgctcaacatatacaagttcatttatgaagccatttaaaaatgcactttttacatccatttggtaaagttttatatcataacatgatgcatatgcaagtaggatacggatggcttccagtcgagcaaccggtgcaaaggtctctccaaaatctaagccttcaacctgagagaatccctttgcgacaagtcttgccttgtttcttacaatcacaccttgatcatcttgtttgtttctgaatacccactttgttccaatgattcttgcatcttgtgggggcttctccagggtccaaacttcgttacgggtgaagttgttaagttcttcatgcatggcattcacccagtccggatcctgtagcgcctcatctatacaagtaggctcaacacaagaaacaaaagagtgatgttcaataaaattagcatgtttatgtgatcgagtaataaccccttgtgaaggactcccgatgatttggttttgaggatgagcttgaagtagtgatgagttcctcctgtcaaccacttgggaagaagatcctggagcatcaacatcttcggcttgtacccttgcttgttcatgagagacaaatgtatcttcatttgcatgcctctcatctttttcatcatcttgtggtacatttgatgaagaaggcttgtcaatgatttgcacttcttcttcatcttcttttggtttgatagctccaataggcatgttcttcattgcttccctaagtggctcatcacctacatcatcaagattttcaagtgctccttgggagccattagtctcatcaaattccacatcatatgtttcttctaccacgccagtggcatggttgaatactcgatatgctttggactttaatgaataacccaaaagaaaaccaatatcacaacgtctttgaaacttccctagatgatggcgttttttgtagatgtagcatttgcacccaaacaccctgaagaaagagacgtctggctttttcccatttagcagttcataaggagtcttcgcaagtagccggtgaggaaatagcctgtttgatgcatagcaagcagtgttgacagcttcggcccaaaacctctccggtgtgttatactcatcgatcattgttcttgcaagagtgatcaaggtcctatttttcctttcaacaactccattttgttgaggtgtgtatgtggcagatacttcatgtttgatcccaatttcatcacagtactcatgaatgttggtgttgtcaaattctttgccattgtcacttctaatcttcttaatcttgcaatcaaattcattttgtgctttcttggcaaacttcttgaatatagatgcaacttcagatttgtcatggagaaagaacacccaagtgtatcttgagaagtcatcaacaatcactagacagtagaggttgccaccggcactgacataatttgtaggtccaaataaatccatgtgaagtagttccagtggccttgatgttgacatgaaagctttagtgggatgtgtattagcaacttgctttccagcttgacatgcactgcatggcttgtctttttcaaacaccacatcctttaatcctctaaccatatctttctttaataccttcttgagtgtgctcattccaacatgtgcaagcctcctatgccaaagccatccaagagaagctttggtgaagaggcaagttcttaagtctgcatcttctgaagtgaagtccactaagtagaggttgttgtatctaaaacccttgaataccattgattcatcatccatttttgttacaataacctctgatggagtgaataagcattgaagtccaagatcacagagttgtcccactgataataaattgaagctcaaaggtgcaactaagagaacatttgatattgataagtcatttgagattgccaccttgccaagtccttgtacttttccttttgagttgtctccaaatgtgattttatcttgaccatcaacattctcatctaatgaggtgaacatccgtgggttgcctgtcatatgttgtgtgcatccactgtcaataacccaatggctcccaccggtcttgtagttcaccttaatctttccatttgcaacctttcttagaacatagtgagcattgaaagcaaatggtcttgagtgcttaggcaagggagttggtggtttagctttgcagttgtgggcaaaatgaccttcatttccacactcaaagcatttgataggcttgtgagtctgctttggcttgtattgagtgatagctttcttttgcacaaaagcattgtatccaataccactcttgttatttttcataacagtgttcataagcagctcattttggaggtattgacccttgttgaacttttgcacacttgttgcaagatgttcattttcactttttagtttcttgacctcattcttaagcctttgattatccactgccaactcattgttgaaatcattgttctcaataacaacttttcctctagtagttgcatcagtcaaataattcttcaatttttggttgtctaaagtcaggacttcaactttttcagtcaattcagcatgtagactagtttgctcttcttgaatcaaatcatcacatgaggttgctacatcaagcttaacaacggggttaatagcctcatgtgttttgcaagataaaagttcattttcaacaagaagattgtcatgatcaaatttaatttgagtatagtcttccttgatcttaactagtccattttgcaactccctattagcttcatttaatttgtcatacttctccttagcatcttttagggagtttgtgagctcatttatggttgatgacatagttttattttcttcttttatttcatcactagcctttataactatgtcatacttggcatttaaagattcattttcatttttcaacctatcacatttagcttttgactttctaatgatttgagtatattctttaagtaagtcagctaactcatcatatgaaggtgaagcaaattcttcatcactatcactatcactatcatcatcaatattaatatcattttgtaccttccgttcacccctagcaatgaggcataggtgagaggtggatgatggcgatggtggtggtgaagagaagtccccggcgatggcagcaaccttttcatcattttcttcttcacttgaagaagacccacttgatgattcgatgtcggtgagccagtcgccaacaatatatgcctttccattcttcttcttgtggaacctcttttgcttcccatcctttctcttgaagaatttcttttccttcttttcatcatcgctgtcatcttccttcttgcccttgaacttgttcttcttgggcttgttgcattgatgagcaagatgaccaagctcaccacagttgtagcagtccatctcagaaatgggctttcttttgttggaaaagaacttcttctttcttgaatcaaatttgatgccttctctatttagcttcttcaacatcttggtggtcttccttaccatcaaggcaatgtttgcatcaaggtcatcatcacttgaggattcttcctcaacttgcattttcgcttttccctttctttcatgatttgctttgagagccaaatcctttcttttggaagatgattcttctttgtcgttgatgtgcatgtacatttcatgggcattgatctttcccaaaatttgtgtaggtgtggtaaccgaaagatccatttgatgtagcacagtgacaatgtgtccatatttgtctattgggaggacactgagaatcttcctcacaacatccggttgtgagatttgagtaagccccaatccattgacttcctctacaagaatattaagtcgtgagtacatagcgtttgcattttcattagcaagcatttcaaaagaatttaattttcgcatagctatgtgatatctttcctcacgttcacttctagttccttcgtgtagagcacaaatgtccatccacaaatcatgagcatttttatgattccgaactctattgaacacatctttgcaaaggcctctaaaaagggtgtttttggccttcgcattccatttctcataattgaactcatcacctacaagatttgtgggatctctaggttggggaaacccttgtgtggcggctttatagacaccaatgtctatagcctctaggtatgcttccatacgaattttccaataaggaaaatcgtcaccataaaaaacgggaggaggtccatccccaccggacat

SEQ ID NO: 5334 - DNA, 4809 bp, Zea mays
  Clone ID: TF_ZM4588.C2.o2.fg
atggattggggcttactcaaatctcaaccggatgttgtgaggaagattctcagtgtcctcccaatagacaaatatggacacattgtcactgtgctacatcaaatggatctttcagttaccacacctacacaaattttgggaaagatcaatgcccatgaaatgtacatgcacatcaacaaagaagaatcatcttccaaaagaaaggatttggctctcaaagcaaatcatgaaagaaaaggaaaagcaaaaatacaagttgaggaagaatcctcaagtgatgatgaccttgatgcaaacattgccttgatggtaaggaagaccaccaagatgttgaagaagctaaatagagaaggcatcaaatttgattcaagaaagaagaagttcttctccaacaaaagaaagcccatttctgagatggactgctacaactgtggtgagcttggtcatcttgctcatcaatgcaacaagcccaaaaagaacaagttcaagggcaagaaagaagatgacagcgatgatgaaaagaaggaaaataaattcttcaagaggaaggatggaaagcaaaagaggtttcacaagaagaagaatggaaaggcatatattgttggcgactggctcaccgacatcgaatcatcaagtgggtcttcttcaagtgaagaagagaatgatgaaaaggttgctgccatcgccggggacttctcttcaccaccaccatcgccatcatccacttctcacctatgcctcatggctaggggtgaacggaagttagctgacttacttaaagaatatactcaaatcattagaaagtcaaaagctaaatgtgataggttgaaaaatgaaaatgaatctttaaatgccaagtatgacatagttataaaggctagtgatgaaataaaagaagaaaataaaactatgtcatcaactgtaaatgagctcacaaactccctaaaagatgctaaggaaaaatatgacaaattaaatgaagctaatagggagttgcaaaatagactagtaaagatcaaggaagactatactcaaattaaatttgatcatgacaatcttcttgttgaaaatgaacttttatcttgcaaaacacatgaggctattaaccctgttgttaagcttgatgtagcaacctcatgtgatgacttgattcaagaagagcaaactagtctacatgctgaattgactgaaaaagttgaagtcctgactttagacaatcaaaaattgaagaattacttgactgatgcaactactagaggaaaagttgctattgagaacaatgatttcaaaaatgagttggcagtggataatcaaaggcttaagaatgaggtcaagaaactaaaaagtgaaaatgaacatcttgcaacaagtgtgcaaaagttcaacaagggtcaatacctccaaaatgagctgcttatgaacactgttatgaaaaataacaagagtggtattggatacaatgcttttgcacaaaagaaagctatcactcaatacaagccaaagcagactcacaagcctatcaaatgctttgagtgtggaaatgaaggtcattttgcccacaactgcaaagctaaaccaccaactcccttgcctaagcactcgagaccatttgctttcaatgctcactatgttctaagaaaggttgcaaatggaaagattaaggtgaactacaagactggtgggagccattgggttattgacagtggatgcacacaacatatgacaggcaacccacggatgttcacctcattagatgagaatgttgatggtcaagataaaatcacatttggagacaactcaaaaggaaaagtgcaaggacttggcaaggtggcaatctcaaatgatttatcaaaatcaaatgttctcttagttgcacctttgagcttcaatttattatcagtgggacaactctgtgatcttggacttcaatgcttattcactccatcagaggttattgtaacaaaaatggatgatgaatcaatggtattcaagggatttagatacaacaacctctacttagtggatttcacttcagaagatgcagacttaagaacttgcctcttcaccaaagcttctcttggatggctttggcataggaggcttgcacatgttgggatgagcacactcaagaaggtattaaagaaagatatggttagaggtttaaaggatgtggtgtttgaaaaagacaagccatgcagtgcatgtcaagctggaaagcaagttgctaatacacatcctactaaagctttcatgtcaacatcaaggccactggaactacttcacatggatttatttggacctacaaattatgtcagtgtcggtggcaacctctactgtctagtgattgttgatgacttctcaagatacacttgggtgttctttctccatgacaaatctgaagttgcatctatattcaagaagtttgccaagaaagcacaaaatgaatttgattgcaagattaagaagattagaagtgacaatggcaaagaatttgacaacaccaacattcatgagtactgtgatgaaattgggatcaagcatgaagtatctgccacatatacacctcaacaaaatggagttgttgaaaggaaaaataggaccttgatcacccttgcaagaacaatgattgatgagtataacacaccggagaggttttgggccgaagctgtcaacactgcttgttatgcatcaaacaggctatttcctcaccggctacttgcgaagactccttatgaactgctaaatgggaaaaagccagacgtctctttcttctgggtatttgggtgcaaatgctacatctacaagaaacgccatcacctagggaagtttcaaagacgttgtgatattggttttcttttgggttattcattaaagtccaaagcatatcgagtattcaactatgccactggcgtggtagaagaaacatatgatgtggaatttgatgagactaatggctcccaaggagcacttgaaaatcttgatgatgtaggtgatgagccacttagggaagcaatgaagaacatgcctattggagctatcaaaccaaaagaagatgaagaagaggtgcaaatcattgacaggccttcttcatcaaatgtaccacaagatgatgaaaaagatgagaggcatgcaaatgaagatacatttgtctctcatgaacaagcaagggtacaagccaaagatgttgatgctctaggatcttcttcccaagtggttgacaggagaaactcatcactacttcaagcacatcctcaaaaccaaatcatcgggagtccttcacaaggggttattactcgatcacatagacatgctaattttattgaacatcactcttttgtttcttgtgttgagcctacttgtatagatgaggcgctacaggatccgaactgggtgaatgccatgcatgaagaacttaacaacttcacccgtaacgaagtttggaccctggagaagcccccacaagatgcaagaatcattggaacaaagtgggtgttcagaaacaaacaagatgatcaaggtgtgattgtaagaaacaaggcaagacttgtcgcaaagggattctctcaagttgaaggcttagattttggagagacctttgccccagttgctcgactggaagccatccgtatcctacttgcatatgcatcatgttatgatataaaactttatcaaatggatgtaaaaagtgcatttttaaatggcttcataaatgaacttgtatatgttgagcaaccgcctggatttgaagaccctagatatcctaaccatgcttacaggttgtccaaggcgctatatgggctaaagcaagctccaagggcttggtatgagcgtcttcgcgacttcctcatcgaaaagggcttcaaaatcgggaccgtcgacacaactctcttcacaaagaaacataacggtgatattttcatttgtcaagtatatgttgatgatataatctttggctcgacaaatgactatcattgcaaggaatttggtgagttgatgtcgaaggagttcgagatgtcaatgattggtgagctaacatacttcctcggctttcaagtcaagcaaatgaaagatggtaactttctctcacaagagaagtataccaaagacttgttgaaaaggttcaacatggagaagtgcaaaccaatcaagacccccatgcctacaaatggacatctcgacttagatgagggaggtaactcggttaatcaaactctctaccgttctatgattggtagtttattataccttaccgcatctaggcccgatattatgtttagtgtctgcatgtgtgctagatttcaatctaatcctaagaaagctcaccttcgcgctgttaagagaattcttaggtatctcaggcacaccacaagcgttggtctgtggtatcccaaaggagctacttttgatttaattggctattccgattcggattatgccggttgcaaaattgataggaaaagtacttctgggggatgccatctgcttggtagatcactagtttcatggacatccaaaaggcaaaatagtgttgccttgtcaactgccgaagcggaatacattgccgcaggtgcttgttgcacacagattttatatatgaaacaaactcttctagactatggtgtagttctagaaaaggtacctttgttgtgtgataatgagagtgctgttaaaattgctaataatcctgtacaacactctcgcaccaagcacattgatatccgtcatcacttccttagagatcatgttgctaaaggagatatcattttagaaggaggcttgtctaacctagttgagataaccgccaactaa

SEQ ID NO: 5335 - DNA, 2034 bp, Zea mays
  Clone ID: TF_ZM4694.C3.o20.fg
atgtccggtggggatggacctcctcccgtttttgatggtgacgattttccttattggaaaattcgtatggaagcatacttagaggctatagacattggtgtctataaagccgccacacaagggtttccccaacctagagatcccacaaatcttgtaggtgatgagttcaattatgagaaatggaatgcgaaggccaaaaacaccctttttagaggcctttgcaaagatgtgttcaatagagttcggaatcataaaaatgctcatgatttgtggatggacatttgtgctctacacgaaggaactagaagtgaacgtgaggaaagatatcacatagctatgcgaaagttaaattcttttgaaatgcttgctaatgaaaatgcaaacgctatgtactcacgacttaatattcttgtagaggaagtcaatggattggggcttactcaaatctcacaaccggatgttgtgaggaagattctcagtgtcctcccaatagacaaatatggacacattgtcactgtgctacatcaaatggatctttcagttaccacacctacacaaattttgggaaagatcaatgcccatgaaatgtacatgcacatcaacaaagaagaatcatcttccaaaagaaaggatttggctctcaaagcaaatcatgaaagaaaaggaaaagcaaaaatacaagttgaggaagagtcctcaagtgatgatgaccttgatgcaaacattgccttgatggtaaggaagaccaccaagatgttgaagaagctaaatagagaaggcatcaaatttgattcaagaaagaagaagttcttttccaacaaaagaaagcccatttctgagatggactgctacaactgtggtgagcttggtcatcttgctcatcaatgcaacaagcccaagaagaacaagttcaagggcaagaaggaagatgacagcgatgatgaaaagaaggaaaagaattttttcaagaggaaggatgggaagcaaaagaggtttcacaagaagaagaatggaaaggcctatattgttggcgattggctcaccgacatcgaatcatcaagtggatcttcttcaagtgaagaagaggatgatgaaaaagttgcggccatcgccggggacttctcttcaccaccaccatcgccatcatccacttctcacctatgcctcatggctaggggtgaacgaaaggtacaaaatgatattaatattgatgatgatagtgatagtgatagtgatgaagaatttgcttcaccttcatatgatgagttagctgacttacttaaagaatatactcaaatcattagaaagtcaaaagctaaatgtgataggttgaaaaatgaaaatgaatctttaaatgccaaggagttgcaaaatagactagttaagatcaaggaagactatactcaaattaaatttgatcatgacaatcttcttgttgaaaatgaacttttatcttgcaaaacacatgaggctattaaccctgttgttaagcttgatgtagcaacctcatgtgatgatttgattcaagaagagcaaactagtctacatgctgaattgactgaaaaagttgaagtcctgactttagacaaccaaaaattgaagaattatttgactgatgcaactactagaggaaaagttgctattgagaacaatgatttcaacaatgagttggcagtggataatcaaaggcttaagaatgaggtcaagaaactaaaaagtgaaaatgaacatcttgcaacaagtgtgcaaaagttcaacaagggtcaatacctccaaaatgagctgcttatgaacactgttatgaaaaataacaagagtggtattggatacaatgcttttgtgcaaaagaaatctatcactcaatacaagccaaagcagactcacaagcctatcaaatgctttgagtgtggaaatgaaggtcattttgcccacaactgcaaagctaaaccaccaactcccttgcctaagcactcaagaccatttgctttcaatgctcactatgttctaagaaaggttgcaaatggaaagattaag

SEQ ID NO: 5336 - DNA, 6690 bp, Zea mays
  Clone ID: TF_ZM4875.C1.o2.fg
atggacctcctcccatttttgatggtgacgattttccttattggaaaattcgtatgtgatgagttcaattatgagaaatggaatgctaaggccaaaaacaccctttttagaggcctttgcatagatgtgttcaatagaattttgggaaagatcaatgcccatgaaatgtacatgcacatcaacgacaaagaagaatcatcttccaaaagaaaggatttggctctcaaagcaaatcatgaaagaaaaggaaaagcaaaaatacaagttgaggaagaatcctcaagtgatgatgaccttgatgcaaacattgccttgatggtaaggaagaccaccaagatgttgaagaagctaaatagagaaggcatcaaatttgattcaagaaagaagaaattcttttccaacaaaagaaagcccatttctgagatggactgctacaactgtggtgagctcggtcatcttgctcatcaatgcaacaagcccaagaagaataagttcaagggcaagaaagaagatgacagcgatgatgaaaagaaagaaaagaaattcttcaagaggaaggatgggaagcaaaagaggttccacaagaagaaaaatggaaaggcatatattgttggcgactggctcaccgacattgaatcatcaagtgggtcttcttcaagtgaagaagagaatgatgaaaaagttgccgccatcgccggggacttctcttcaccaccaccatcgccatcatcgacttctcacctatgcctcatggctaggggtgaacggaaggtacaaaatgatattaatattgctgatgatagtgatagtgatagtgatgaggaatttgcttcaccttcatatgatgagctagctgacttgcttaaagaatatactcaaatcattagaaagtcaaaagctaaatgtgataggttgaaaaatgaaaatgaatctttaaatgccaaatatgacatagttataaaggctagtgatgaaataaaagaagagaataaaactatgtcatcaactgtaaatgagctcacaaactccctaaaagatgctaaggaaaaatgtgacagagtaaatgaagttaatagggagttgcaaaatagactagtaaagatcaaggaagactatactcaaattaaatttgatcatgacaatcttcttgttgaaaatgaacttttatcttgcaaaacacatgaggctattaaccctgttgttaagattgatgtagcaacctcatgtgatgatttgagacaagaagagcaaactagtctacatactgaattgactgaaaaagttgaagtcctgactttagacaaccaaaaattgaagaattacttgactgatgctactactagaggaaaggttgctattgagaacaatgatttcaacaatgagttggcagtggataatcaaaggcttaaaaatgaggtcaagaaactaaaaagtgaaaatgaacatcttgcaacaagtgtgcaaaagttcaacaagggtcaatacctccaaaatgagctgcttatgaacactgtcatgaaaaacaacaagagtggtattggatacaatgcttttgtgcaaaagaaagctaccactcaatacaagccaaagcagactcacaagcctatcaaatgctttgagtgtggaaatgaaggtcactttgcccacaactgcaaagccaaaccaccaactcacttgcctaagcactcaagaccatttgctttcaatgctcattatgttctaagaaaggttgcaaatggaaagatcaaagtgaactacaagaccggtgggagccattgggttattgacagtggatgcacacaacatatgacaggcaacccacggatgttcacctcactggatgaaaatgttgatggtcaagataaaatcacatttggagacaattcaaaaggaaaagtgcaaggacttggcaaggtggcaatctcaaatgatttatcaatatcaaatgttctcttagttgcacctttaagcttcaatttattatcagtgggtcaactctgtgatcttggacttcaatgcttattcactccaacagaggttattgtaacaaagatggatgatgaatcaatggtattcaagggatttagatacaacaacctctacttagtggatttcacttcagaagatgtagacttaagaacttgcctcttcaccaaagcttcacttggatggctctggcataggaggcttgcacatgttgggatgagcacactcaagaaggtattaaagaaagatatggttagaggattaaaggatgtggtgtttgaaaaagacaagccatgcagtgcatgtcaagctggaaagcaagttgctaatacacatcctactaaagctttcatgtcaacatcaaggccactggaactacttcatatggatttatttggacctacaaattatgtgagtgtcggtggcaacctctactgtctagtgattgttgatgacttctcaagatacacttgggtgttctttctccatgacaaatctgaagttgcatctatattcaagaagtttgccaagaaagcacaaaatgaatttgattgcaagatcaagaagattagaagtgacaatggcaaagaatttgacaacaccaacattcatgagtactgtgatgaaattgggatcaagcatgaagtatctgccacatacacaccacaacaaaatggagttgttgaaaggaaaaataggaccttgatcactcttgcaagaacaatgattgatgagtataacacaccggagaggctatttcctcaccggctacttgcgaagactccttatgaactgctaaatgggaaaaagccagacgtctccttcttccgggtgtttggatgcaaatgctacatctacaagaaacgccatcacctagggaagtttcaaagacgttgtgatattggttttcttttgggttattcattaaagtccaaagcatatcgagtattcaaccatgccactggcatggtagaagaaacatatgatgtggaatttgatgagactaatggcacccaaggagcacttgaaaatcttgatgatgtaggtgatgagccacctagggaagcaatgaaaaacatgcctattggagctatcaaaccaaaagaagatgaagaagaggtgcaaatcattgacaggccttcttcatcaaatgtaccacaagatgatgaaaaagatgagaggcatgcaaatgaacaagcaagggtacaagccgaagatgttgatgctccaggatcttcttcccaagtggttgacaggagaaactcatcactacttcaagctcatcctcaaaaccaaatcatcgggagtccttcacaaggggttattactcgatcacatagacatgcttcttttattgaacatcactcctttgtttcttgtgttgagcctacttgtatagatgaggtgctacaggatccggactgggtgaatgccatgcatgaagaacttaacaacttcacccgtaacgaagtttggaccctggagaagcccccacaagatgcaagaatcattggaacaaagtgggtgttcagaaacaaacaggatgatcaaggtgtgattgtaagaaacaaggcaagacttgttgcaaagggattctctcaagttgaaggcttagattttggagagacctttgcaccggttgctcgactggaagccatctgtatcctacttgcatatgcatcatgctatgatataaaactttatcaaatggatgtaaaaagtgcatttttaaatggcttcataaatgaacttgtatatgttgagcaaccgcctggatttgaagaccctagatatcctaaccatgcttacaggttgtccaaggcgctatatgggctaaagcaggctccaagggcttggtatgagcgccttcgcgacttcctcatcgaaaagggcttcaagatcgggaccgtcgacacaactcttttcacaaagaaacataacggtgatattttcatttgtcaagtatatgttgatgacataatctttggctcgacaaatgactatcattgcaaggaatttggtgagttgatgtcgaaggagttcgagatgtcaatgattggtgagctaacgtacttcctcggctttcaagtcaagcaaatgaaagatggtaactttctctcacaagagaagtataccaaagacttgttgaaaaggttcaacatggagaagtgcaaaccaatcaagacccccatgcctacaaatggacatctcgacttagatgagggaggtaacccggtcaatcaaactctctaccgttctatgattggtattttattataccttaccgcatctaggcccgatattatgtttagtgtctgcatgtgtgctagatttcaatctaatcctaagaaagctcatcttcgcgctgttaagagaattcttaggtatctcaggcacaccacaagcgttggtctgtggtatcccaaaggagctacttttgatttaattggctattccgattcggattatgccggttgcaaaattgataggaaaagtacttctgggggatgccatctgcttggtagatcactagtttcatggacatccaaaaagcaaaccagtgttgccttgtcaactgccgaagcggagtacattgcccgcagacatcagttcaggatgtcgcgcacgaagaatgtgtcggcaccagggggaggcgatgatgaggatcctcgtcgccccttcaggcaggtcaagggcaagacagtttacttggagcagcaggaaggccgcaagaagcagcgtacggacagagcagcccgtgcagcggcagcagctgcagcagccgctgcgcaggccgagcttggagatcagccgcagactccgtcagatcagatcgcataccgtgttcgtcgtctcgcctcccggcctcgctcctccactcacacctctgcttccactccgccacccactctgcctgctcccgtcacccctgttgcgccatccaccaccacagccatacccgctacctccactacgccagcttccactgctcctcctcccgctcccgctacagctcctcctatccctccacctcatttccgggagcgcgatgagactgaggtacaaccacttgctgcggatcctagattgtttgaccttcagcgtgctacagcagcacgggtacgtaggttcagatacgtacccgtggagtcttggttaccagctaagagggaccctgtggcaggtgacctattcagcacacgtattcaggagtcgtttttcagagcccagatgtctgctcagatagctctgcgagtgcaccggctcttggaccttctagcttttctgctcaccgtcggtgctgactctgaggcgcacctcacatatctgcctggccttctgacccttttgactaccagcggcaggtatgttgaggagtgggtacgagtcttctacgcctctgtatggattgacccggatcatcactggatgaggttttgttttgagcgagaggatgtcaccattactgccagtcagatccgccagctttttggattccccgagtcgacgactcgtcttcacagcctttgctacggcacttctgaccctcctcgtcgccctcacggcggtgtggctccgggtacagctcacgtcgcggccctgttccgcccgcccttctctgatgggtcgcgacgttcaccggcagattttactacagcagccaagtatttatatgagcttatcagacggactcttctgccgaggatgggatacagggaggctaccacacatattcagctctggctccttggtgccctggtctctcactctgagtttgatgtcgtggacttccttatttgtgagatcgaggacaccgttttggataggattcgtgctcgtcgtcagttgccatatgctcactacttatgccacatctttgcgcagctgattcagcctcctcggtttcagggcacacttgaggcctcacgcctcgtttttggattctaccgtcctgcgcctgagactcctgtgccagcttctgctcctgtttttgactctcaggccgaggatgcagctcttcatcagttcgacactcaggctacagcagttgatgatgatgatgatgatgattttggggttcctcctccgcctcctatgcctccacactcacatgatcatgaggctgggagttctagtgctgcccccgctgccccttcggctatggaccctgctctggcttcgattctccagtctatcactcagcagcaggctcacctggcagtcgagcaggcccggttatccgagaggatgctctcgatgtttcagaacatgcaggacaggcaggatgcgcttcagcagcagctactccaggatcgggctgagagcagggcattcatggctcttatgctacagcagtctggtgtctcagttcctccggttcagtctcctccacctcctccgcttcacgctccagttgtgccatcgattctgtcaggaccccctgttggtccttctccgctccggccggtcactttggctttcacctctccggttctcagctctgtctgcccgcagccgccagtgccaccagcctctgctgttaccactactgttgtggcagtatctgtgacctcttctgttccggtagctcctgcagcgcgacctcagtccgagtcagtactagctctagcttctaccacagatcctggatccgagactgactctgaccctccgccggcgttcgctctgctgcctcgaccgtga

SEQ ID NO: 5337 - DNA, 832 bp, Zea mays
  unsure (1)..(832): unsure at all n locations
  Clone ID: TF_LIB5074-003-R1-XP1-D9
cggccgggccgggatacctgttcagaagacacaatcttctaacgtcactcccttggacatttgatacttcggtctcttccccaaaactctaccaaaatggactcttaccaagcacctgctgctggcgccggtggccgtggctgctacaactgcggagactcgtctcaccgcgctgccgagtgccccaccaagggtaccccaacttgctacaactgtggtgagaagggccacgttagccgtgaatgcacttctccccaggctgagaagacgtgctaccgctgcggtggcaccggccacatctcgcgcgagtgcaccaaggacggcggtgcccagatgggtggccgtggcggcggcagccaagagtgctacaagtgtggtcaggtcggtcacattgcccgcaactgctcccagggtggcggctacggcggtgctgctggtggatacggtggcggccgtggaggctacggtggcggtgccggtggctacggaggcgctcgccagaccacctgctactcgtgcggtggtttcggtcacatgagccgtgactgcacccagggccagaagtgctacaactgcggtgaggtcggccatctgtcgcgcgactgcccccaggagacttcatnctgagcgtgtgtgctaccgctgcaagcagcccggccacgtccagagcgcctgccccaactagggtgttccagatgccgttcgatgttttgatctggaacgagtttcgatgcaccgaagcgcttcgttgtaaagcgatgtcggtccttgcgcccacgatgtgacgaatcatcgacatgattacgaattctttttctgatattttcattca

SEQ ID NO: 5338 - DNA, 721 bp, Zea mays
  Clone ID: TF_LIB4759-029-Q1-K1-E9
aaccctctctacatagaagggttccgttaacgagattcttgtgtatggaagggacatgatgcacgttcttcagctgcacgatctttcccgaagtaaacttcagatccaccgtgccagtgccatgaacagaagcatgtgacccattccccattagcacggaagaatcccgggcgccctgataagaagagaacaagttaatgtgagagggcacatgaacattagcaccagtatcaagccaccaactaggtgattgaaatactgagaagatgaaaggtagattaccataccctttgtcttcctcattgctagcgatcactgtgttgacattgccctttttgccacggcgatccgctcgatcaggacaatccttggcaaaatgacccgcctcgccacatgcgaaacatgtcaattcagccttgttcttcttcttcttgaagttggtagttttattgggcttgttagattttggcttccctttgcccttgttgtggtccttctgaaccatgttggcgctggagtggccctcgcctcctttagatcccgtgtccttagcccgagctttcttctcaacatccagagacgctatcagatttatcccccacgccacgctctccaacgccacagcttgcgcccgcaatggcactcgtgtccgcctccttgtactgcaccacgggcgatacgggtgctccccaggaatgggcaatgggccgtcgaactactt

SEQ ID NO: 5339 - DNA, 3881 bp, Zea mays
  Clone ID: TF_ZmC13579_1
atggctgcttttgccgacgcgctgaagccagaaaagtttaatggtatgcactttaagagatggcaagtcaaggccacgctctggcttactgctatgaatgtcttccatgttagtaaaggcagacctgagggtccactgactcctgaacaggagaaagagtacgaccatgccaatactatgttcacgggagccgttcttagcgcccttgttgaccgtctggttgatgcgaatatgcagtacacagacgggaaacagttgtgggatgcacttactactaagtatggtgcatcagatgctggcagtgacctgtatatcatggagagctttcatgattataagatggttgataatcgctctattgtagagcaagctcatgaaatacagtgtatagccaaggagctcgaccaccttaagatagtccttcctgaccgatttgtggccggatgcattattgcaaagttgccttctacatggaggaacttcgccacagctctgaaacataagagacaggagatatcagttgaaaatctgatagcgtctctggatgttgaggagaaagctcgggctaaggacacgggatctaaaggaggcgagggccactccagcgccaacatggttcagaagaaccacaacaagggcaaagggaagccaaaatctaacaagcccaacaaaactaccaacttcaagaagaagaagaacaaggctgaattgacatgtttcgcatgtggcgaggcgggtcattttgccaaggattgtcccgatcgagcggatcgccgtggcaaaaagggcaatgtcaacacagtggtcgctagcaatgaggaagacaaagggtatggtaatttacctttcatcttctcagtatttcaatcacctagatggtggctggaggagtacagggatgttcggatgggtgcggtgcatgtgcacgacgccgccatggcgcatatcctggtgttcgagagcccggcagcgtccgggaggcacatctgcgcccagtccatctcccactggagcgacttcgcggccaaggtcgccgagctgtaccctgagtacaaggtgcccaagttccccaaggatacccagcctgggctggtgcgacagggagccgaggaggggtccaagaagctcgtcgcgttggggctgcacttcagccctctggagaagatcatcagggacgctgtggaggccctcaagagcagaggctacatttcgtagctagccgaccgacggcagctatagtggagtagtatgcctgtcgaatttcgattcccaagtggcaaattctgcaaaacgagttcgccaatatgaacaataaataaagaacgttgtgataaaataaagcagattttctgttgcaaggttctaagtgccatagttgtgtgcagtcgaagcaacctcgaaagcctcataaggctgctgaggagagacacctggcaccactagaactcatacattctgatctttgtgagatgaatggtgtgttgacaaaaggtggtaagagatacttcatgacattgattgatgatgcgtctagattttgctatgtatacttgctaaaaactaaagatgaggctttagactactttaaaatctataaggctgaggttgaaaaccaactagagagaaagatcaaacgtcttagatcagatcgtggtggcgagttctttcccaaagtctttgatgatttctgtgcagaacatggcattattcatgagaggactcctccctattcacccgagtcaaacgggattgctgaaaggaaaaaccgtacgttgactgacctggtgaatgccatgttagacacttgtggtttatctaaggcatggtggggggaggcagtcctgacttcatgtcatgttctgaatagaattcctatgggcaaagaagagaaaaccccttatgagaagtgggttgggagaaaaccatcactttcatacttgcgcacttgggggtgcatggcgaaagtcaatgtaccaattaataaaaagcgcaagcttggtccaaggacagtggattgtgtctttcttggatatgcttcgtgtagcatagcatatagatttttagtagttaaatctgaagttcctgatgtgtatgttgatactattatggaatcacgtgatgctactttctttgagcatatatttccaatgaaagacattcatagcaattctagatactcttctgagataattcctgaacataatacacctattgagagttttgaacagccacatgaaattgtcctagaggaggatgacaatgatgctcctaaaaggagcaagagacaaagggttgaaaaatcctttggtaatgatttcattgtgtaccttgtggacgatactcctactaccattgcagaagcatttgcatctccagatgcagatgattggaaagaagcagttcataatgagatggactctattctttcaaatggtacgtgggaagtcactgatcgaccctatggatgcaaacccgtgggttgtaagtgggtgtttaaaaagaagctcaagcctgatggtacaattgaaaagtacaaggctaggcttgtggctaaaggctatactcagaaagaaggagaagacttctttgatacttactcacctgttgctagaatgaccactattcgagtactactttctttggctgcctcgtatggtctccttgttcatcagatggatgtaaagacagcttttcttaatggagagctggacgaggaaatctatatggaacagcctgatggatttgtagtaaagggtcaagaaagcaaggtgtgcaagttattgaaatctttgtatggtctgaagcaagcaccaaagcagtggcatgagaagtttgacactactctaacgtctgcaggctttgccattaatgaggcagacaggtgtgtatattatcgctgtggtgggggcgaaggagttatattgtgcttatatgttgatgatatattgatatttggcacaaacattgatgtgatcaatgaagtcaagtcttttctatcaaagagttttgatatgaaagatctgggagaagctgatgtgattctaaacatcaagctgattaaggcagatggtgggattactctctcgcaatctcactatgttgaaaaggttttgaagcgatttggcttctctgagtgcaaaccttctccaacaccttatgatcccagtgtgacactgcgaaagaacaagagaattggtttagaccaattgagatactctcagattgtcggttcactcatgtatcttgctggtgcaacaaggcccgatatctcgtttgctgtgagcaaattgagtaggttcatgtcaaaccccgggactgatcattggcatgcacttgagcgggttatgcgctacctgcaaggtacaatgagttatggaattcactattctggtcagcatgcagtacttgaaggatatagtgattcgaactggatatctgatgcagacgagctttatgccaccagtggttatgtctttactattggtggaggtgcggtatcatggaggtcatgcaagcagaccattttgacgaggtcaaccatggaagccgagctagctgcacttgacacagcaaccgttgaggcagaatggttgcgtgaactcttgatggacttgccggtggttgagaaaccaataccagctatccttatgaactgtgacaatcagacagtgattgctaaagtgacgagttctaaggataatggaaagtcatcaagacatgtcaaaagacgattgaagtctgtcagaaagttgagaaactccggagttataagtgtgacttatatttcaacagataaaaatctggcagatccttttaccaagggactaccacgtaatgtgatagaaatcgcatcgagagagatgggtatgagacccgaataa

SEQ ID NO: 5340 - DNA, 243 bp, Zea mays
  Clone ID: TF_ZmC13579_19
atggttcagaagaaccacaacaagggcaaagggaagccaaaatctaacaagcccaataaaactaccaacttcaagaagaagaagaacaaggctgaattgacatgtttcgcatgtggcgaggcgggtcattttgccaaggattgtcctgatcgagcggatcgccgtggcaaaaagggcaatgtcaacacagtgatcgctagcaatgaggaagacaaaggggcgcccgggattcttccgtgctaa

SEQ ID NO: 5341 - DNA, 3567 bp, Zea mays
  Clone ID: TF_ZmC13579_2
atggctgcttttgccgatgcgctcaagccagaaaagttcaatggtatgcactttaagagatggcaagtcaaggccacgctctggcttactgctatgaatgtcttccatgttagtaaaggcagacctgagggtccactgactcctgaacaggagaaagagtacgaccatgccaatactatgttcacgggagccgttcttagcgcccttgttgaccgtctggttgatgcgaatatgcagtacacagacgggaaagagttgtgggatgcacttactactaagtatggtgcatcagatgctggcagtgacctatatatcatggagagctttcatgattataagatggttgataatcgctctattgtagagcaagctcatgaaatacagtgtatagccaaggagctcgaccaccttaagatagtccttcctgaccgatttgtggctgggtgcattattgcaaagttgccttctacatggaggaacttcgccacagctctgaaacataagagacaggagatatcagttgaaaatatgatagcgtctctggatgttgaggagaaagctcgggcaaaggacacgggatctaaaggaggcgagggccactccagcgccaacatggttcagaagaaccacaacaagggcaaaggaaagccaaaatctaacaagcccaacaaaactaccaacttcaagaacaagaagaacaaggctgaattgacatgtttcgcatgtggcgaggcgggtcattttgccaaggattgtcccgatcgagcggatcgccgtggcaaaaagggcaatgtcaacacagtggtcgctagcaatgaggaagacaaagggtatgataatttacctttcatcttctcagtatttcaatcacctagctggtggcttgatactggtgctaatgttcatggcgcccgggattcttccgtgctaatggggaatgggtcacatgcttctgttcatggcactggcacggtggatctgaagtttacttcgggaaagatcgtgcagctgaagaacgtgcatcatgtcccttctatacacaagaatctcgttagcggaacccttctatgtagagatgggttcaagtcgaagcaacctcgaaagcctcataaggctgctgaggagagacacttggcaccgctagaactcatacattctgatctttgtgagatgaatggtgtgttgacaaaaggtggtaagagatacttcatgacattgattgatgatgcgtctagattttgctatgtatacttgctaaaaactaaagatgaggctttagactactttaaaatctataaggctgaagttgaaaaccaactagagagaaagatcaaacgtcttagatcagatcgtggtggcgagttctttcccaaagtctttgatgatttctgtgcagaacatggcattattcatgagaggactcctccctattcacccgagtcaaacgggattgctgaaaggaaaaaccgtacgttgactgacctggtgaatgccatgttagacacttgtggtttatctaaggcatggtggggggaggcagtcctgacttcatgtcatgttctgaatagaattcctatgggcaaagaagagaaaaccccttatgagaagtgggttgggagaaaaccatcactttcatacttgcgcacttgggggtgcatggcgaaagtcaatgtaccaattaataaaaagcgcaagcttggtccaaggacagtggattgtgtctttcttggatatgcttcgtgtagcatagcttatagatttttagtagttaaatctgaagttcctgatgtgtatgttgatactattatggaatcacgtgatgctactttctttgagcatatatttccaatgaaagacattcatagcaattctagatactcttctgagataattcctgaacataatacacctattgagagttttgaacagccacatgaaattgtcctagaggaggatgacaatgatgctcctaaaaggagcaagagacaaagggttgaaaaatcctttggtaatgatttcattgtgtaccttgtggacgatactcctactaccattgcagaagcatttgcatctccagatgcagatgattggaaagaagcagttcataatgagatggactccattctttcaaatggtacgtgggaagtcactgatcgaccctatggatgcaaacctgtgggttgtaagtgggtgtttaaaaagaagctcaagtctgatggtacaattgaaaagtacaaggctaggcttgtggctaaaggctatactcagaaagaaggagaagacttctttgatacttactcacctgttgctagaatgaccactattcgagtactactttctttggctgcctcgtatggtctccttgttcatcagatggatgtaaagacagcttttcttaatggagagctggacgaggaaatctatatggaacagcctgatggatttgtagtaaagggtcaagaaagcaaggtgtgcaagttattgaaatctttgtatggtctgaagcaagcaccaaagcagtggcatgagaagtttgacacaactctaacgtctgcaggctttgccattaatgaggcagacaggtgtgtatattatcgctgtggtgggggcgaaggagttatattgtgcttatatgttgatgatatattgatgtttggcacaaacattgatgtgatcaatgaagtcaagtcttttctatcaaagagttttgatatgaaagatctgggagaagctgatgtgattctaaacatcaagctgattaaggcagatggtgggattactctctcgcaatctcactatgttgaaaaggttttgaagcgatttggcttctctgagtgcaaaccttctccaacaccttatgatcccaagaacaagagaattggtttagaccaattgatatactctcagattgtcggttcactcatgtatcttgctggtgcaacaagacccgatatctcgtttgctgtgagcaaattgagtaggttcatgtcaaaccccgggactgatcattggcatgcacttgagcgggttatgcgctacctgcaaggtacaatgagttatgggattcactattctggtcagcatgcagtacttgaaggatatagtgattcgaactggatatctgatgcagacgagctttatgccaccagtggttatgtctttactattggtggaggtgcggtatcatggaggtcatgcaagcagaccattttgacgaggtcaaccatggaagccgagctagctgcacttgacacagcaaccgttgaggcagaatggttgcgtgaactcttgatggacttgccggtggttgagaaaccaataccagctatccttatgaactgtgacaatcagacagtgattgctaaagtgacgagttctaaggataatggaaagtcatcaagacatgtcaaaagacgattgaagtctgtcagaaagttgagaaactccggagttataagtgtgacttatatttcaacagataaaaatctggcagatccttttaccaagggactaccacgtaatgtgatagaaatcgcatcaagagagatgggtatgagacccgaataa

SEQ ID NO: 5342 - DNA, 1991 bp, Zea mays
  Clone ID: TF_ZmC13579_4
acaggactcctcctcccccttccctccccctaaaagctaaaaacatttggagagagagagagagggagatcgaggggaaaccgagcaaccaagacgcacacgacgatggagcgagaggacgcgtgccgggtggcgctgctggacgcggccggcggcgagggcggcaagaagcagcagcagctcgcggcgcgggtgtgggaggagtcgaggaagctgtgggacatcgtggcgccggccatcttcagccgcgtcgtcacctacagcatgaacgtcatcacgcaggccttcgccggccacctcggcgacctcgagctcgccgccatctccatcgccaacaccgtcgtcgtcggcttcaacttcggcctcatgttgggcatggcgagcgcgctggagacgctgtgcgggcaggcgttcggcgcgaagaagttccacatgatgggcgtgtacatgcagcggtcgtggatcgtgctgttcatgtgcgcggtgctgctgctgcccatgtacttcttcgcggaggacgtgctgctgctgacggggcagccgccggagctggcggcgatggcggggaaggtgtgcgtgtggttcatcccgctgcacttctccttcgccttcctcttcccgctgcagcgcttcctgcagtgccagatgaggaactccgccaacgccgccgccgccgcagccgcgctctgcgtccacctcctcgccagctggctcctcgtctccaggctccgcttcggcctcgcgggcatcgccctcacgctcaacttctcctggtgggccaccggcgccatgctcttcgcctacgtcgcatgcggcggctgccccgacacctggcacggcttctcgctcgaggccttcgccggcatgtgggagttcgtcaagctatcctccgcgtccggtgtcatgctatgcttggagaactggtactaccggatcctcgtcttgttgacgggaaacctaaaagatgcagccattgccgtcgacgctctgtccatatgcatgtcaattaacgggtggcagatgatgattccgttggcgttcttcgccggcaccggtacacagacgggaaacagttgtgggatgcacttactactaagtatggtgcatcagatgctggcagtgacctgtatatcatggagagctttcatgattataagatggttgataatcgctctattgtagagcaagctcatgaaatacagtgtatagccaaggagctcgaccaccttaagatagtccttcctgaccgatttgtggccggatgcattattgcaaagttgccttctacatggaggaacttcgccacagctctgaaacataagagacaggagatatcagttgaaaatctgatagcgtctctggatgttgaggagaaagctcgggctaaggacacgggatctaaaggaggcgagggccactccagcgccaacatggttcagaagaaccacaacaagggcaaaggaaagccaaaatctaacaagcccaacaaaactaccaacttcaagaagaagaagaacaaggctgaattgacatgtttcgcatgtggcgaggcgggtcattttgccaaggattgtcccgatcgagcggatcgccgtggcaaaaagggcaatgtcaacacagtggtcgctagcaatgaggaagacaaaggggcgcccgggattcttccgtgctaatggggaatgggtcacatgcttctgttcatggcactggcacggtggatctgaagtttacttcgggaaagatcgtgcagctgaagaacgtgcatcatgtcccttctatacacaagaatctcgttagcggaacccttctatgtagagatgggttcaaggtagttttggagtccaataaattagttgtgtccaagtctggacaatttattggtaaaggctatgattgcggaggcttgttccgcttttctttgttagatttcaataataagtctgtgaaccatatttgtgctaaaaaaaaaaatcttgcgggtatttggcatt

SEQ ID NO: 5343 - DNA, 1269 bp, Zea mays
  Clone ID: TF_ZmC13579_7
ggtacccccgagctgccgggttactcaacaatccaaaaccttattgtagacaatttcctagtttttcaatggctgcttttgccgacgcgctgaagccagaaaagtttaatggtatgcactttaagagatggcaagtcaaggccatgctctggcttactgctatgaatgtcttccatgttagtaaaggcagacctgagggtccactgactcctgaacaggagaaagagtacgaccatgccaatactatgttcacgggagtcgttcttagcgcccttgttgaccgtctggttgatgcgaatatgcaatacacagacgggaaagagttgtgggatgcacttactactaagtatggtgcatcagatgctggcagtgacctgtatatcatggagagctttcatgattataagatggttgataatcgctctattgtagagcaagctcatgaaatacagtgtatagccaaggagctcgaccaccttaagatagtccttcctgactgatttgtggctgggtgcattattgcaaagttgccttctacatggaggaacttcgccacagctctgaaacataagagacaggagatatcagttgaaaatctgatagcgtctctggatgttgaggagaaagctcgggctaaggacacgggatctaaaggaggcgaggacaactccagcgccaacatggttcaaaggaaccacaacaagggcaaaggaaagccaaaatctaacaagcccaacaaaactaccaacttcaagaagaagaagaacaaggctgaattgacatgtttcgcatgtggcgaggcgggtcattttgccaaggattgtcctgatcgagcggatcgccgtggcaaaaagggcaatgtcaacacagtggtcgctagcaatgaggaagacaaaggggcgcccgggattcttccgtgctaatggggaatgggtcacatgcttctgttcatggcactggcacagtggatctgaagtttacttcgggaaagatcgtgcagctgaagaacgtgcatcatgtcccttctatacataagaatctcattagcggaacccttctatgtagagatgggttcaaggtagttttggagtccaataaattagttgtgtccaagtctggacaatttattggtaaaggctatgattgcggaggcttgttccgcttttctttgttagatttcaataataagtctgtgaaccatatttgtgcgaaaaaaaaaaaaaaaaggggcccttggcattctcgtttgtgtcatattaattttggctc

SEQ ID NO: 5344 - DNA, 2094 bp, Zea mays
  Clone ID: TF_ZM4584.C2.o5.fg
atggagagctttcatgattataagatggctgataatcactctattgtagagcaagctcatgaaatacagtgtatagccaaggagctcgaccatcttaagatagtccttcctgaccgatttgtggctggatgcattattgcaaagttgccttctacatggaggaacttcgccacatctctgaaacataagagacaggagatatcagttgaaaatatgatagtgtctctggatgttgaggagaaagctcgggctaaggacacgggatctaaaggaggcgagggccactccagcgccaacatggttcaaaggaaccacaacaatggcaaaagaaagccaaaatctaacaagcccaacaaaactaccatcttcaagaagaagaagaacaaggctgaattgacatgtttcgcatgtggcgaggcgggtcattttgccaaggattgtcctgatcgagcggatcgtcgtggcaaaaagggcaatgtcaacacagtggtcgctagcaatgaggaagacaaagggtatggtaatttacctttcatcttctcagtatttcaattacatagttggtggcttgatactggtgctaatgttcatgtgtgttctgacattaacttgttctcctcttatcagggtgcccgggattcttccgtcctaatggggaatgggttacatgcttctgttcatggcactagcacggtggatctaaagtttacttcgagaaagatcgtgcagctgaagaacgtgcatcatgtcccttctatacacaagaatctcgtcagcggaacccttctatgtagagatgggttcaagaacatggcattattcatgagaggacgcctccctattcacccgaatcaaacgggattgctgaaaggaaaaaccgggtgcatggcgaaagtcaatgtaccaattaataaaaagcgcaagcttggtccaaggacaatggattgtgtctttcttggatatgcttcgtgtagcatagcatatagatttttagtagttaaatctgaagttcctgatgtgtatgttgatactattatggaatcatgtgatgctactttctttgaacacatatttccaatgaaagacattcatagcaattctagatactcttctgagataactcctgaacatagtacatctgttgagagttctgaacagccacatgaaattgtcctagagaaggatgacaatgatgctcctaaaaggagcaagatacaaagggttgaaaaatcctttggtgatgatttcattgtataccttgtggacgatactcctactaccattgtagaagcatttgcatctctagatgcagatgattggaaagaagcagttcataatgagatggactccattctttcaaatggctttgccattaatgaggcagacaggtgtgtatattatcgctgtggtgggggcgaaggagttatattgtgcttatatgttgatgatatattgatatttggcacaaacgttgatgtgatcaatgaagtcaagtcttttctatcaaagagttttgacatgaaagatctgggggaagctgatgtgattctaaacatcaagctgattaaggcagatgtgagcaaattaagtaggttcatgtcaaaccccaggactgatcattggcatgcacttgagcgggttatgcgctacctgcaagatgagctttatgccaccagtggttatgtctttactattggtggaggtgcggtatcatggaggtcatgcaagcagaccatcttgacgaggtcaaccatgcaagtcgagctagctgcacttgacacagcaaccgttgaggcagaatggttgcgtgaactcttgatggacttgtcggtggttgagaaaccaataccagctatccttatgaactgtgacaatcagacagtgattgttaaagtgacaagttctaaggataatgggaagtcatcaagacatgtcaaaagacgatcgaagtctgtcagaaagttgagaaactccagagttataagtgtgacttatatttcaacagataaaaatctggcagatccttttaccaagggactaccacgtaatgtgatagaaatcgcatcaagagatatgagtatgagacccatataa

SEQ ID NO: 5345 - DNA, 2247 bp, Zea mays
  Clone ID: TF_ZM5107.C1.o13.fg
atggctgcttttgccgacgcgctgaagccagaaaagtttaatggtatgcactttaagagatggcaagtcaaggccacgctctggcttactgctatgaatgtcttccatgttagtaaaggcagacctgagggtccactgactcctgaacaggagaaagagtacgaccatgccaatactatgttcacgggagccgttcttagcgcccttgttgaccgtctggttgatgcgaatatgcagtacacagacgggaaacagttgtgggatgcacttactactaagtatggtgcatcagatgctggcagtgacctgtatatcatggagagctttcatgattataagatggttgataatcgctctattgtagagcaagctcatgaaatacagtgtatagccaaggagctcgaccaccttaagatagtccttcctgcccgatttgtggccggatgcattattgcaaagttgccttctacatggaggaacttcgccacagctctgaaacataagagacaggagatatcagttgaaaatctgatagcgtctctggatgttgaggagaaagctcgggctaaggacacgggatctaaaggaggcgagggccactccagcgccaacatggttcagaagaaccacaacaagggcaaaggaaagccaaaatctaacaagcccaacaaaactaccaacttcaagaagaagaagaacaaggctgaattgacatgtttcgcatgtggcgaggcgggtcattttgccaaggattgtcccgatcgagcggatcgccgtgacaaaaagggcaatgtcaacacagtggtcgctagcaatgaggaagacaaagggtatggtaatttacctttcatcttctcagtatttcaatcacctagctggtggcttgatactggtgctaatgttcatgtgtgttctgacatcaacttgttctcttctcatcagggcgcccgggattcttccgtgctaatggggaatgggtcacatgcttctgttcatggcactggcacggtggatctgaagtttacttcgggaaagatcgtgcagctgaagaacgtgcatcatgtcccttctatacacaagaatctcgttagcggaacccttctatgtagagatgggttcaaggtagttttagagtccaataaattagttgtgtccaagtctggacaatttattggtaaaggctatgattgcggaggcttgttccgcttttctttgttagatttcaataataagtctgtgaaccatatttgtgctaatgttgatgatcttgcgagtatttggcattctcgtttgtgtcatattaattttggctctatgtctcggcttgcaaccatgagtttaattccgaatatcaccatagtcaaaggttctaagtgccatagttgtgtgcagtcgaagcaacctcgaaagcctcataaggctgctgaggagagacacctggcaccactagaactcatacattatgatctttgtgagatgaatggtgtgttgacaaaaggtggtaagagatacttcatgacattgattgatgatgcgtctagattttgctatgtatacttgctaaaaactaaagatgaggctttagactactttaaaatctataaggctgaggttgaaaaccaactagagagaaagatcaaacgtcttagatcagatcgtggtggcgagttctttcccaaagtctttgatgatttctgtgcagaacatggcattattcatgagaggactcctccctattcacccgagtcaaacgggattgctgaaaggaaaaaccgtacgttgactgacctggtgaatgccatgttagacacttgtggtttatctaaggcatggtggggggaggcagtcctgacttcatgtcatgttctgaatagaattcctatgggcaaagaagagaaaaccccttatgagaagtgggttgggagaaaaccatcactttcatacttgcgtacttgggggtgcatggcgaaagtcaatgtaccaattaataaaaagcgcaagcttggtccaaggacagtggattgtgtctttcttggatatgcttcgtgtagcatagcatatagatttttagtagttaaatctgaagttcctgatgtgtatgttgatactattatggaatcacgtgatgctactttctttgagcatatatttccaatgaaagacattcatagcaattgttgggggccttcggcttccgaaggtcctcaaaaacatgatttaacaatgtttctggagtataatgtgtga

SEQ ID NO: 5346 - DNA, 1371 bp, Zea mays
  Clone ID: TF_ZM4454.C3.o3.fg
atggctcgaagaagatcccaaaagaacaagaagaccaaggagaacaaggaggaagaagaagaaaatgaacgatggagaccaaacgatgaatccacctctccaaaaggtttgtcttcccatttcgattcccacatatgttctgtggctaatgaaaatgatagcggaagcacaaatgaggatgatgaggatgaaagaagcttcatgcaactctacgctcatctaagcctagaagataaggcagtcatgctcaaacttctaaaaagagcgagagagcaaagcgaagctcgtcaaatgctagaagatgttctctccatgaaaatgctacactttgacgagttgactaaagaacatgaggagctaaagtgctctcatgttgatttggtccaaaggaatgccttgcttaaggaccaagtagaaaaggtaaaagatgataatctagcttttcaagaaaaatatgatatgcttctatattctcatgaaaatcttatggatgatcatatcatattaaacattgctcatgaggttgtaatagaaaacttaaaatcccaacaacctcactcatgcacatgtattcaaattgaaactatattaccatgtgctaatgcttgttgtccgtcgacaagcaaatcttcctttgagctagaatttgcaggaacaaaagatgatacatatcaaaagctcaaagaagaaaatgagaggctaaagataagcttgacacaacttaaagggaagtgcattgctcaaccttctcaagataaccatgatcacatggtgaagaagcttgagacaggaacaaccgcggcatgcactaaatcccttgaagaaaatgtcaaggacttgaggattgtcaagaggaaggaacaaaagaagaaaatcaatgcctctgacaaaagcgtcaaccatgcctccatgcaaggtaatatccaaggtaataatcaagtcacacttcatactaagagaagtaagaagtgtagtgaatgctttgaaaagggacactcgattaggtcatgtccctatattaaaaatgacttgattactaacaaggatgataaactttgttttaaatgctcaaagaagggacacttaattaagtcttgtccctatttgaaacaaaaaggcatagtgttagaaaagaaaatattaactaaccatgtagcaagcaagaaacaagaaaagaagaaatcttcaaaacttgaagagcgcctttgctacatatgccgaaagaagggacatcaatgcaaggattgtcccattggtaactatcccatctctagcctgtcaattatttcacatgtaactaggcaacccaaaattgcaacttgtgctagaaaggtaatgcgtttaccaaatgctaacacaaaggactcttga

SEQ ID NO: 5347 - DNA, 549 bp, Zea mays
  Clone ID: TF_ZmC2309_4
gttgataaagctcagccacaaggacctggtagagaccgtaatggtgaccgtgattatgaccgcgagcgtggatctcgttatgaacgtggtcgtgactatggtggtgggcgtgcaccgcgaggtggtggtggtggtggtggtggtggtgactgcttcaagtgtgggaaacctggtcattttgctagagagtgcccatctggggatggtgggagaggggacagatatggtgggagagatgacaggtatggtggcggtggcggtggcggtggcggtcgttatggttctgaccgtggtggtgaccgatactctggccgtagccgagatggcggcagctatgggggtggcgatcgctacagccgtgaccgatcaggtccttactgatggccttagttcttgattgagaagtatgtgccatccaggcttctttttggttatttgttcttgttgtggcttggttgatactgtggttctggatttgggtacttgcgtcctatgatcattttattctgaccaattgatccccgaatgccccgagattcttctttgttt

SEQ ID NO: 5348 - DNA, 977 bp, Zea mays
  unsure (1)..(977): unsure at all n locations
  Clone ID: TF_ZmC218_17
ggtcggcctcgccacgccgatcggcggcggcggctacggctcccgcggcggtggcggatctggcggcggcggtcgcagctacggtggtagctggggcggcggccggagatccggcggcgggggcggtcctggcgcgtgctacaagtgcggcgagcccggccacatggccagggactgccctagcgccgacggcggaggctacggcggaggcggctacgggggaggcggctacggaggaggaggaggcggcggtggcggagggaggttcggcggcggcgggggntggaggcgaccgctcctgctacaactgcggcgaggccggccacatcgcccgcgactgtcccacgtgaggtgtgtccgcgtccgtccagccagccagatcggatcggatcgctccaccacctgctggtctgatggcgccgcccccttctagatctcgcttaaaaaaacatccccctctcgctgtgtgtcggagtaccgctttagttttgccgatccgggcacgagtgcccgctgcctctttcctctcatgcgtaagaggatcccgtccgccgttttcagatttcgttcggttcgtagaagaactctcaagttaagttaagttatcatggtgtgtgcttggtcgtcgtccgtcgttcgtcgtcgtcgttaaggttttaagagatgatttggtcctgtgttgccgaggggaagtccaatctgcttttcttttcttttttgtggtttgttccatcagactgaggaaggagatgagatgattattctcccagattaaaaaaaaaaaaaaaaaaaaaaaaaaaaaaaaaaaaaaaaaaaaaaaaaaaaaaaaaaaacaaacaaaaaaaatacaaaaaaaatagactcttctatagtgaaaaaaaaaatataattaaaggggcccccgttttaaaatacccagactgacgaacaccctggtgaaacctaaattattttttttggagcacataaaattaatt

SEQ ID NO: 5349 - DNA, 816 bp, Zea mays
  unsure (1)..(816): unsure at all n locations
  Clone ID: TF_LIB4765-074-R1-K2-E9
gggtacctcgaggccggccgggcccacccggatcgtcggaaccctccaagtccaaaccctctccccgccgcatcgccgccgccggaagcgcctccctcgatccagatccaggagatatgcctcgcaatgatgatcgctatgggaatacacgcttgtatgttggaagattgtctccccgcacccgttctcgtgacctagaataccttttcagcaaatatgggaggtttttcggttttttacacaaccatggaggtgtggtggaagggtgcccttgatggaattggtggccatagttccaataattcgagaagtggagttgaagcgtgactatgcattcattgaattcagtgacccccgtgatgctgatgatgcacagtacaacctagatggcagggacgtcgatggaagccgcattattgttgaatttgctaaaggggttcctcgtggttctggtggttcacgtgattacaacggaagaggacctccaccaggaacaggccgttgttttaactgtggagttgatggtcactgggcaagagactgtcaggctggtgactggaagaacaaatgctaccgttgtggcgaaaggngccatatagaaagaaattgccagaacagtccaaggaacctcaggcgtgagagaagctattcacggtctccatccccacgccgaggacggggccgcagccggagctacagcagaagccggagctatagccgatccagatccccgtctggnatctcctaggggtggacgccgagaccgtgatgagaggagatcagggagtcttagctacagcaggagcgcaagcccta

SEQ ID NO: 5350 - DNA, 2179 bp, Zea mays
  Clone ID: TF_ZmC18109_2
cattcaaacaataatttttccctatgtatattttttaacaatttcatcattatcgttttgtaaaaatgagattttattcacaagatcagatccataaattggattcacaaatcgattcaaagaagatatatgcttcgacatgagtgcatcaaacacttggtaagattttactacttaagaaattgtttaattttcttataccatttcattatttgaaaatataaatattttcctttctactgccaactaataattcaaactggattgttttcagttgatataatttagggtgttacaaaatctacccctctaaaaagaatctcgtcctcgagattagggaaggttagcaagaaaacaaaggtgatacatggtttatttgtaggttcttagttctcattgaactcctccaaacttaaggaacttccttacttctttgctccaaaatgtatactaatcaagcgatcttcatcgtcgtacttatcactggttggtcttctggattattgtttgggtcttgcttggcagctttcttctctagtcggtctagacgcttcttggggcatttgcgaataagatgtccttcgtttttgcagtagtagcaagcacctcttgctttgagttctttgcgagtcaactttgcttgaccaatagggggtgagggttgattgggtgtctgtatctcatgtagctgagcctgacttgatccttcagtttgggtatccatatgttttgtggcttttgcttgtggttgaggtgaactaatcatgtatcgaaacatttttctattccttttgttgttcttcattccattcatcggatatctcggtgactcatttttctcgttcatagtcgttaaggtaggaatattgtcgttgtcaccatttacttcatttccattggggttcatcattttcggacatatgtagttcgctaacactttcctttcaggtgtactgatggtctttcttgatcttaagggacacttgaagataccatactttgttgcaaactgggcactgataagagaatgtgttgtacgaggatcatacaacacggtggcgatggttgtgtgaatgactagtgttccaaaaattactgcatcatcatatggaatggttcctgtcactgcataacttatccttcctgtggactctttccgttgtttattctttgttgatgcatgggtttgagggcgttgtcttttcttttggaccttattgatctccacatccttcttaggacaaccattaacaagatggccgatatcaccacagccaaagcaagtacgacttgataagttacatggtggagttgtctttacgttgttggtagaagtttctgtgcatttttgttcatattccatgtctggagactgaggttgcttcatctcgggggtgtccgatagtgaactcttctcaggacagttacggaagtaatgaccttcacgtccacattgatagcaagcttttcttgaagttatttcttgactctttccatgtttccctttttgtttcttggacctgatgcgacgatggggctgaaactgtgtgcaggtgatagtccatccatcaatgtaacactcctgtgtttcttcttggggctgggcatccttgtgatgtttcctttttggaatactttgcaattcatcaactgacagtgcattaggtatgagagaatctgctataagttgttcttggggagacatttgtctgtttatgccataaaataaaatctggttcttctgttttgtagttttactttcgtttgtactgatctggcgacaaggaattccatagtactcacaacaacaacatgttccaaggtcacttgtttgttggtttggttgtgcatccttttgtgtcttgaaggtctgttcatcagctgtttcatttatagtgttgttttgacttgtcaacacaccacattccttgcatttagtgacatcacttgtagttgacattccaaggtctaacatcaagaagtctggtaatagatccaaaggatccataacaaaacttcttgcggagtggggataagatagagaatagggcatcgtcgatagcttcgagagggtttcttctggcaaacttcgcttcaagttccgcaatcctagcttgatcatcttgtagtgcttttgagtagagtcttttgatagaccaaaatcagacgggctttccat

SEQ ID NO: 5351 - DNA, 4704 bp, Zea mays
  Clone ID: TF_ZM4931.C2.o5.fg
atgtccgatggggatggacctcctcccgttttttatggtgacgattttccatattggaaaattcgtatggaagcatatttagaggctatagacattggtgtctacaaagccgccactcaaggattccccgaacctagagatcccacaaatcttgtaggtgaagagtttaactatgagaaatggaatgctaaggccaaaaacaccctttttagaggcatttgcaaagatgtgtttaatagagttagaaaccataaaaatgttcaagatttgtggatggacatatgtgctctacatgaaggaactagaagtgagcgtgaggatagatatcacattgatatgagaaagttaaattcttttgaaatgcttgctaatgaaaatgtaaatgctatgtactcatgtctcaatattcttgtagaggaagtaaatggcttggggcttacacaaatttcacaaccggatgttgtgaggaagattctcagtgtcctcccaattgacaaatatggacacattgtcacaatgctgcatcaaatggatctttcagttaccacacctacaccgatattgggaaagatcaacgctcatgagatatacatgcacatcaatgacaaggatgagtcatcttccaagagaaaggatttggctctcaaagcaaatcaagaaagaaaaggaaaagctaaagtacaaattgaggaagaatcctcaagtgatgatgaccttgatgctaacattgccttgatggtgaggaagaccaccaagatgttaaagaagctcaacagagaaggcatcaaatttgattcaaggaagaagaaattcttttccagcaaaagaaagcccatttctgaaatggattgctataactgtggagagcttggtcatcttgctcatcaatgtaacaagcccaagaagaacaagctcaagggcaagaaagaagatgacagcgatgatgagaaaaaggaaaagagattcttcaagagcaaggatgggaagcacaagaggttccacaaaaagaaaaatggaaaggcatatattgttggtgactggctcactgacattgagtcatcaagtggatcttcttcaagtaaagaagaaaatgatgaaaaagttgcctccatcgctagggacttctcttcaccaccaccgtcgccatcatcgacttctcacctatgcctcatggctagaggtgaacggaaggtacaaaatgaaaatgatcttactgatgatagtgatagtgatgatgaatttgcttcaccttcctatgatgaactagctgacttgcttaaagaatacactcaaatcgttaggaagtcaaaagctaaatgtgataagttgaaaattgaaaatgaatctttgaatgccaaatatgacatagttatgaaagctaatgctaaggataaatgtgacaagttaaatgaagctaatagggagttgaaagatagactagtgaaaatcaaggaagactatactaagattaaatttgatcatgataatcatcttgttgaaaatgaacttttatcttgcaatacacatgaggctattaaccctgttgttaatattgatgtagcaacctcatgtgatgatttgagtcaaggagatcaaactagtctacatgatgaactgacagaaaaagttgaagtcttgacattagacaaccaaaaattgaagagatacttgactgatgcaactactagaggaacggttgccattgagaacaatgatttcaacaatgagttggcagtggataatgaaaggcttaaaaatgaggtcaagaaacttaagactgaaaatgcacatcttgcaacaagtgtgcaaaagttcaataagggccaatatctccaaaatgaattgctcatgaacactgtcatgaaaaataacaagagtgatattggatacaattctcttgtgcaaaagaaagctaccactcaatacaagccaaagcagacatataagcctatcaaatgctttgagtgtggaaaagaaggtcactttgcccacaactgcaaagccaaaccaccaactcccttgcctaagcactcaagaccatttgccttcaatgctcattatgttctaagaaaagtagcaaatggaaaagtcaaggttacatttcgaggcaacccacgtatgttcacctcacttgatgagaatgttgatggacaagacaaaatcacatttggggataattcaaaagggaaagttcaaggacttggcaaggtggcaatttcaaatgacctatcaatttcaaatgttctcttggttgcacctttgagcttcaacttattatcagtgggccatctctgtgatcttagacttcaatgcttattcactccaacagaggttattgtatcaaaaatggatgatgaatcaatggtgttcaaaggttttagatacaacaatctctacttagtggacttcacctctgaagatgcatacttaagaatttgcctctttaccaaagcatcacttggatggctatggcataggaggcttgcacatgttggaatgagcacactcaagaaagtattaaaaaaggacatggttagaggattaaaagatgttgtgtttgaaaaggacaaaccttgtagtgcatgtcaagatgggaagcaagttgctaacatacatcctacaaaagctttcatgtcaacatcaaggccactggaactacttcatatggatttatttggacctacaaattatgtaagtgcttgtggcaacctctactgtctagtgatagttgatgatttctcaagatacacttgggtgttctttctccataataaatctgaagttgcatctatatttaagaagtttgccaagaaagctcaaaatgaatttgattgcaagatcaagaagattagaagtgataatggtaaagaatttgacaacaccaacattcatgaatactgtgatgagattgggatcaagcatgaagtatctgcaacatatacacctcaacaaaatggagttgttgaaaggaaaaataggacctttatcacacttgcaagaacaatgattgatgagtataacacaccggagaggttttgggccgaagctgtcaacactgcatatgtctccttctgggtgtttggatgcaaatgctacatttacaagaagcgccatcacctagggaagtttcaaagatgttgtgatattggttttctattgtgttattcatcgaagtctaaagcatatcaagtattcaatcatgccactggcgtggtagaagaaacatatgatgtggaatttaatgagactaatggctcccaaggagcacttgaaaatcttgatgatgtaggtgatgagccacttagggaagccatgaagaacatgccaattgtagctatcaaaccaaaagaagatgaagaagaggtgcaaaacattgacaggccttcttcatcaagtgtaccacaagatgatgaaaaagatgagaggcatgcaaatgaagatacctttgtctctcatgaacaagcaagggtacaagccaaagatgttgatgctccaggatcttcttcccaagtggttgacaggagaaactcatctctacttcatgctaacccaaaagaccaaatcattgggagtccttcacaaggggatccggactcggtgaacgctatgcacaaagaactaaacaacttcacccataaccaagtttggaccctggagaagcccccacaagatgcaagaatcattggagcaaagtgggtgttcagaaacaaacaagatgatcaaggcgtgatggttaggaacaaggcaagacttgttgcaaagggattctctcaagttgaaggcttagattttggagagacctttgcaccggttgctcgactggaagacatctgtatcctactcgcatatgcttcatgctatgatataaagctttatcaaatggatgtaaaaagtgcatttttaaatggcttcaaaaatgaactcgtatatgttgagcaaccacccgggtttgaagaccctagatatcctaaccatgcttacaggttgtccaaggcgctatatggattaaagcaagctccaagggcttggtatgagcgtctttgcgacttcctcatcgaaaagggcttcaagatcgggaccgtcgacacaactctattcacaaagaaacataatggtgatattttcatttgtcaagtatatgttgatgacataatctttggctcgacaaatgactatcattgcaaggaatttggtgagttgatgtcgaaggagttcgagatgtcaatgattggtgagctgacgtacttcctcggctttcaagtcaagcaaatgaaagatggtaactttctctcacaagagaagtataccaaagacgtgttcaaaaggttcaacatggagaagtgcaaaccaatcaagacacctatgccaacaaatggacatctcgacctagatgagggaggtaacccggttaatcaaactctctaccgttctatgattggtagtttattgtatcttaccgtatctaggcccgatatcatgtttagtgtctgcatgtgtgctagatttcaatcaaatcctaagaaagctcatcttcgcgctgttaaaagaattattaggtatctcaagcacaccccaagcattggcctttggtatcccaaaggagctacttttgacttgattggctattccgattcggattataccggttgcaaaattgatagaaaaagtacttctgggggtgccatttgcttgggagatcactag

SEQ ID NO: 5352 - DNA, 1183 bp, Zea mays
  Clone ID: TF_ZmC1373_17
ccggccgggctcccaaatccttctcctccgcgccgccacagccgggcgcgcctctcgatcgagatccaggagatatgcctcgttatgatgatcgccatgggaatacacgcttgtatgttggaagattggcccctcgcacccgttcccgcgacctagaatatcttttcagcaaatatggaagaatacgtgaagtggagttgaagcgtgactatgcattcattgaattcagtgacccccgtgatgctgatgatgcgcagtacaacctagatggcagggaagtcgatggaagccgtattattgttgaatttgctaaaggagttcctcgtggttctggtggttcacgtgagtacatgggaagaggacctccaccaggaacaggtcgttgttttaactgtggaatggatggtcactgggcaagggactgcaaggctggtgactggaagaacaaatgctaccgctgtggtgaatcgggccatatagagagaaattgccagaacagtccaaggaatctcaggcgtgagaaaagctattcacggtctccatccccacgtggtggacgtggccgcagccggagctacagcagaagccggagctatagccgatccagatccccatctggatctcccaggggtggacgccgtgaacgtgacgagaggagatcaaggagtcttagctacagcaggagcgcaagtcccaggcgttctgtctcacctgcaaaggaaaaggagcgcagtcgcacacccaatggcagtaggagccccagcccaagggctgaggtgagcccaccactgaaggataatggtgcacgcaatggctcagaccatgaaggcagccctggtggtggagagaacagcaagaggagtcggagcccatctgatggctaccgtagccctgtggccaatgggcgcagcccgagcccgagggacgatcggagcccaagccccaagggcaacaacgaagatgacgagcgccctggttcacctagaggaagtcagtcccccctgaactgagaaattctgatcaaatttgggccgcacgattcggttgtaactgttatattttagtttgagacaacaaactgtatttgctcatttatcatacagtcaggtttatgcttttgagctagaaaacttgtgtaagaatttgttaccttcaagttattcctggtttgtgatatggtaat

SEQ ID NO: 5353 - DNA, 1348 bp, Zea mays
  Clone ID: TF_ZmC1373_27
ctcgaggccggccggagcgagttggattcagagtcagagcaaccctatctcttccccactccgctcctcgctcaccctctcaccaaatccttctcctccgcgccgccacagccgggcgcgcctccccgatcgagatccaggagatatgcctcgttatgatgatcgccatgggaatacacgcttgtatgttggaagattggcccctcgcacccgttcccgcgacctagaatatcttttcagcaaatatggaagaatacgtgaagtggagttgaagcgtgactatgcattcattgaattcagtgacccccgtgatgctgatgatgcgcagtacaacctagatggcagggaagtcgatggaagccgtattattgttgaatttgctaaaggagttcctcgtggttctggtggttcacgtgagtacatgggaagaggacctccaccaggaacaggtcgttgttttaactgtggaatggatggtcactgggcaagggactgcaaggctggtgactggaagaacaaatgctaccgctgtggtgaatcgggccatatagagagaaattgccagaacagtccaaggaatctcaggcgtgagaaaagctattcacggtctccatccccacgtggtggacgtggccgcagccggagctacagcagaagccggagctatagccgatccagatccccatctggatctcccaggggtggacgccgtgaacgtgacgagaggagatctaggagtcttagctacagcaggagcgcaagtcccaggcgttctgtctcacctgcaaaggaaaaggagcgcagtcgcacacccaatggcagtaggagagcccaaggagccccagcccaagggctgaggtgagcccaccactgaaggataatggtgcacgcaatggctcagaccatgaaggcagccctggtggtggagagaacagcaagaggagtcggagcccatctgatggctaccgtagccctgtggccaatgggcgcagcccgagcccgagggacgatcggagcccaagccccaagggcaacgatcggagcccaagccccaagggcaccaacgaagatgacgagcgccgtggttcacctagaggaagtcagtcccccctgaactgagaaattctgatcaaatttgggccgcacgattcggttgtaactgttatatttttagtttgagacaacaaactgtatttgctcatttctcagacagtcaggtttatgctttttgagctagaaaacatgtgtaagaatttgttaccttcaagctattcctggtttgtgatatggtaatacttgaactatttagcttgccaaaaaaaaaaaaaaaaaaaaggcccctagggcc

SEQ ID NO: 5354 - DNA, 643 bp, Zea mays
  Clone ID: TF_ZmC1373_9
cattgggtacctcgaggccggccgggaccaaatccttctcctccgcgccgccacagccgggcgcgcctctcgatcgagatccaggagatatgcctcgttatgatgatcgccatgggaatacacgcttgtatgttggaagattggcccctcgcacccgttcccgcgacctagaatatcttttcagcaaatatggaagaatacgtgaagtggagttgaagcgtgactatgcattcattcaggaattcagtgacccccgtgatgctgatgatgcgcagtacaacctagatggcagggaagtcgatggaagccgtattattgttgaatttgctaaaggagttcctcgtggttctggtggttcacgtgagtacatgggaagaggacctccaccaggaacaggtcgttgttttaactgtggaatggatggtcactgggcaagggactgcaaggctggtgactggaagaacaaatgctaccgctgtggtgaatcgggccatatagagagaaattgccagaacagtccaaggaatctcaggcgtgagaaaagctattcacggtctccatccccacgtggtggacgtggccgcagccggagctacagcagaagccggagctatagccgatccagatccccatctggatctcc

SEQ ID NO: 5355 - DNA, 3240 bp, Zea mays
  Clone ID: TF_ZM4884.C5.o1.fg
atgggccgctccttcagtagtacagcggcgcctgttcggcctgctgcgctcgcggcgccgcccctcctcctcttcctcttgctcgggctcctgggagctgcggctgccaatgtcggggactcctgctccacgagcgcggactgcggcgccggccagtggtgcttcgactgcgagccccagctctccggctcccactgcgtccgctccgccgccaccaaccccttccagctcattaacaactcgttgccgttcaacaagtacgcctacctcacgacgcacaacgcgtacgccatcgtcggggagccctcgcacaccgggatcccgcgcgtcaccttcgacaaccaggaggacacgaacggagtccgggcgctgatgctcgacacgtacgacttcaagggagacgtgtggctgtgccattcgagcggagggaaatgcaacgacttcaccgcgttcgaacctgcactggacactttcaaggagatcgaggcgttccttgcagcaaacccgtccgaaatcgtcacgctgatcctagaggactacgtccacgcgccgaacgggctgacgaacgtgttcaacgcgtctggcctgctcaagtactggttcccggtgtcgaggatgccgccgagcggccaggactggcctctcgtcagcgacatggtcgcgaccaaccagcgcctcctggtgttcacctccgtcagctccaaacagagcgcggaaggcatcgcttaccagtggaacttcatggtcgagaacaactacggtgatgacgggatggatgccgggaaatgctcgaaccgtgccgagtctgctcctctcaacgacaacaccaagtcgctggtcctcatgaactacttcccgtcgctccctgtcaagtttacagcgtgcctgcagcactcccagagccttgttgacatggtgagtacgtgctacggcgccgcggggaaccgatgggctaattttgtcgcggttgattactacaagagaagcgacggaggcggggccttccaggccacggacttgctcaatggtagactgttatgcgggtgccaggacatcagggcatgctcgcaagcattccctaagagcacgtacaacggcattgaatatgttgtccctgagcagccacataagcaacaattaaataaaaaaaatccaacgtggacgctaattaaggagaagagaggcattcggttgtcttttcgtgaggagacaacttcagctcgtgctctaatgtcaagagacgtcaaaaccgtctattcaccccctttagccaatgtcctagatcctacaagtggtattggagccgaggactccattgtttgtggtctaatcatcccggagtggaacaaaatggctagtaacaacaatgtgcatattgggaagccaccacattttgataggaataactacaattattggaaaataagaatgtcaatgcatcttagagcaatgggtggaaaaatttggccaattgtcaaggatagatttgttgtgttgaaagaagatgaaccatccattagtgataatgaaaatattcttacaaatgatcaagccatgaatgtattttatgatgctcttgatataaatgagttcaaccgtatcaagaatctcacaaccgctcatgagatttggattaagctaatggaaattcatgaaggaactacaattgtgaagagtgccaagctatatgtgtgcaaaggaaaatttgagcaattcattatgaaagaagatgaaagtgtatccgatatgttcaaccggttaaatgagatagtgaatgaactcaagggacttggttttaatgtactggatgtggatttcactcataagttccttagatctcttccggagaagtatgagaccattgtgaccatgttagtaagaagtgatctatctacaacttctccaaccgaagtattgggggaaattcttactcaagatatattcaagaaatctcaagccgatgctataagtttggcaaagaaagtgaataatgaatcaattgccctcaaagctaaagcttctaaggcaattgaaaaagaagatagtgatgatgaaaaaaatgaaagtgagagtgatggagatatggctctatttgtaaagaaattcaacaaattcatgaagatgaagagaggtcaatctagaagaagccaaacatcaagaagaaatgctttcaatgatagaaaatgttttgagtgtggggaacccggtcacattgccatgaattgccctaataagaagaagaagggcaaagatgaagatgataagaagaagaagaaattctacaacaagaagaaggatggcaaagcctacctagtagaatgggattcggatgatagctcggatgatgatgatgacgacacctcatccaagcttaatgccggaattgccatcaaggaagctccttcacttttctcatcccctcattgtctcatggcaaatggagatgctaaggtaaaaatcttcaccgatttaaatggtataaatgatgatgatgatgttgatgatgatggctattcatatgatgatcttgttagaatgttaggtgaggtcaatgactacatgcacaaagaaaaagaaaaatttaagactttgaaggaattgtatataaacctccaagtgtcttttgaggagctcaagacctctcacaacgatctaaaagagaattgtgagaagcttgcggaagctcaaaactcatctattgtgcatgaagttgtggtggtcaccgaggatgttggagtcacttgtgacttacttgatagtcctacaagtgaaccactacctactaactctatttgtgataaatgcaaaatttctcttataaatgataatattgctcttgatgaatcacaaatcattattgagaatgaagtgttagtagatagagtaaatgctctaacttatgatctagagaaggcatatggtggaaaggctaaattggatttcatattgggaagtcaacgatgctcacttaaccgtgagggtcttggatatgttcccaagaaaggaaagaatgcttttgtaaagcaaaagacattgtttgtgaaagaatgtgacaaagtgtgtcacaagtgtcacaagaagggacatattaagaaaaattgtcctaagctcaagaatgtatcctccacttgttttgagcattgttatgttctttctcataatgcaaaaggtgttcatgctaaatttgttggtacttcaattgttggcaacaagaagaaagctatttgggtgccaatgtaa

SEQ ID NO: 5356 - DNA, 460 bp, Zea mays
  Clone ID: TF_jC-zmX700430855a1
tacgtaagctcggaattcggctcgagggtctccagcggcatccttctcgtgactcccggagcagaggcatggacaccgacttttaactggaactggggctagagacggagcagaagccagaggctgggtactggaacgtggtgagcgcgcgcgcttgagacacatgcacctcggcgcctgcacggctgcactgtcacacggacgggtcgtcactgtgcccagggtgctacgcccgggcgcacagcgccgggtagcgccacgcgcgcatctaaatacacgagggctgcgagcattcccacggctgcgggacctggcatgccgactaccgccgcgctgtgcgccgcctgcgacgtcgacatccactgagtcaacccgctggcgcgccgacacgagcgcctacccgttgcccctctgttctgcgcgctcgctgacactccgcaaccctttccgagcccggact

SEQ ID NO: 5357 - DNA, 524 bp, Zea mays
  Clone ID: TF_ZmC17423_4
tcccggggtggagctgcacaagtactggggcgtggggggccggcggtgcggcagctgcgagggggccccggcggcggtgcactgccgcacgtgcgttggtggatccttcctctgcacgacgtgcgacgcccggcccgcgcacgcgcgcctgggccacgagcgcgtgtggatgtgcgaggtctgcgagctggcccccgccgccgtcacgtgcaaggccgacgccgccgtggtgccagaggccttcggcggcagcggcagcggcggcgggagctttgagctcgacttcacaaggcccaagcctcaggcctacatgccatacaccgggactccccagagccacagcgtgccatccgcggacgtggaggtggtgccggagcggggagacttggctgcggtgaggccggtgccgctgatgggggagagcagggaggcgcgcctgatgcggtaccgtgagaaaaggaagaacaggcgcttcgagaagaccatccggtacgcgtcccggaaggcctacgccgagacccggc

SEQ ID NO: 5358 - DNA, 380 bp, Zea mays
  Clone ID: TF_LIB143-024-Q1-E1-F4
gggtccacgcacgcgtccggataaatccctgccattagtagcacgcacaaaacaattggaataaggtgcaaccaaaacggttttccacggttcccggttggaaccaaccgaggagattgtcgtcacgctcgattggaggcctgattgggacgtactggggtctggggggaccgctgtgctgggcgtgcagcgggtcgccggcagcggcgcactgccggacgtgcccgggcggcgcgtacctgtgcccggggtgcgacactgggcacgctcgggcggtgcacgaacgggtgtgggtctgcgaagtgtgcgagtgcgcgccggccgccgtgacgtgccgcgccgacgccgccgcgctctgcgccgcgtgcgacgccgacatc

SEQ ID NO: 5359 - DNA, 412 bp, Zea mays
  Clone ID: TF_uC-zmflteosinte79f03b1
ggcccgtctttttctccactccgcagaggcgcagactaccgtctcatcctactactctagcccagtctcacgatccagcactcagtcactaacgtttgtcgtcgccagtacaacggcatgggtgagggtgacgacgaccggcgggacgagttgctgggcgcggggcgggaccatgaaccggagcgggcggacgcggaggaggccaagaaacccgcacccggcgaggcggaggcctgcgccggcgccggcacggaggcggcgacctgcgactactgcgggaccgcggcggcggcggtctactgccgcgccgactccgccaggctctgcctgccgtgcgaccgcctcgtgcacggcgccaacggggtctgctcccgccacgcccgcgccccgctctgcgccggctgctgcgccg

SEQ ID NO: 5360 - DNA, 1436 bp, Zea mays
  Clone ID: TF_ZmC11847_1
ggcgcacgggcacaggcacaggcacgggcgaacaaattgacccgggagccgggacggcgacttccgtggtcagtcggtcctccacgtcgctcgttcgcgccgaagacccgcccgggccgccccacacggccacagctcaaatcatgagcagggtgcgaaagcttggcggagaatcgcttcgtcccgacagccactactaggaattgccgagcgagcgagcttgcgccgtgcgcgatggagggtgacgagaagtcggcgggcggggcccctgcttactggggcctgggcgcgcggccctgcgacgcgtgcggcgccgaggcggcgcgcctctactgccgcgcggacgcggcgttcctgtgcgccgggtgcgatgcgcgggcgcacggcgccgggtcgcgccacgcgcgggtctggctctgcgaggtctgcgagcacgcgccggcggcggtcacgtgccgcgcggacgctgccgcgctctgcgcctcctgcgacgccgacatccactcggcgaacccgctcgcgcgccgccacgagcgcctccacgtggcacccttcttcggcgcgctggccgacgcgcccaagcccttcgcctcggcggcgccgcccaaagcaaccgacgacgacgggagcaacgaggacgaggcggcgtcgtggctcctccccgagcccgaccacgggcagaaagaaggcgccacgacggaggtgttcttcgcggactccgacccgtacctcgacctcgacttcgcgcgttccatggacgacatcaagaccatcggcgtccagcagagcgggtcaccagagctcgacctcgccggcaccaagctcttctactccgatcactccgtgaaccacagtgtgtcatcgtcggaggcagcggttgtgcccgacgcggcgtctggcatggcgcccatggtggcagtggtcagcaggggcctggagcgggaggcgcggctgatgcggtaccgggagaagcgcaagagcaggcggttcgagaagacgatccggtacgcgtcccgcaaggcgtacgcggagacgcggccgcgcatcaagggccggttcgccaagcgcacgcccggggctggggaggacacgctggaggagcacgaggagatgtactcctccgccgctgccgccgtggctgcgctcatggcccccggcggagccgatgcggactacggcgtcgtgcccacatattgatctatgcaattgcaacgccgacatgtacactagttagcctcgtgctctggggctgtaatttttgctgcatgcattgcatgcaaagctcttattgattgcctgtatgattaacggaagccattacaagcaaggacttcctccctccttttcaattcctatgtatattactatcatcatttttgttaacattgatacccgattacacagttctgtttccattttgaagatattaatattgc

SEQ ID NO: 5361 - DNA, 542 bp, Zea mays
  Clone ID: TF_ZmC153_1
tcgggaacagcttccaccatcgaccatccatcacctcacctccaagctccaaggaatctaccctcgttcttctcacaaagcgctgcagcggacagcagcgcagcacgagagagccgagcgcgaggtgcaggaccgcaaaacagaggcgaagcgaaggacctaacctacgtagcaacgctccgctccgcggcgatgggccacgaggggtcgtgccgctgcgagctctgcggcgcgcccgcggccgtgcactgcgcggcggacgaggctttcctctgcgccgcctgcgacgccaaggtgcacggcgccaacttcctcgcgtcgcggcaccgccgcacgcgcctccgcctcgcggccgccgccgacccgccgccggacgacgaggccgggtacgggtccgccgcgagctcctgcgtgtccacggccgactccgcgccgcggccgaggcgtggggcccgcgcgccggcccggagcgtgcgccccgagggcgtgctcgagggctggggccagcggatggggctcggggcgggggggcgcccgcgcgt

SEQ ID NO: 5362 - DNA, 638 bp, Zea mays
  Clone ID: TF_jC-zmshLIB3587P024c06b1
gcctccaaccggttcatgaatgcgacgcctacttcttctgcctggaggaccgcgcgctgctctgccggagctgcgacgtcgccgtgcacactgccaactccttcgtctcggcgcaccggcggttcttgttaaccggcgtccaggtcggccaggagctcgagcctgacgacctctccctggagcagcgagaggcagaggcgtcgtctcccccgccggcgaagagcgagccgaccccgccgctctacagcgagagcgacttcggctgggcggctggcgccggcgccggtgccaccggaagcctcacggactggttggccgtggaggaggagttcgactcccctgccccccgcctcgcggaggtggcgcccagggccacgccgaagcggactccgcgggcgccggctttcggtgccgggcagggccgcatcgccggcggggtcatggattggccactgggcgagttcttccgtggcgttagcgacttcaacggcggcttcagcttcggcgagagcggcaactccaaggccgacagcgggaagctcggggacagcgcgggtggctccccgtactaccgctcgtcggaggaggagcgggacgccaacgagctcttcggccaggtgccggagatccagtggtcg

SEQ ID NO: 5363 - DNA, 1632 bp, Zea mays
  Clone ID: TF_ZmC8680_1
aaagtacacttgggcacttggcatcgcggccgaggtccccgaaaaagagccatgctgggccctaatccagacgtgatattttctcgcgattttgtcacgttagcggccagctacatcctgacgatcctgtcacccgctcgatcggcgggcgctggagcgcgcgcatctagctttgtgcaagtttcacgggatctctagctttgtcggcggcacatgagcagctccaagcacgccgcgggcgccgtaggcggcaaggccgcgcgcgcctgcgacagctgcctgaggcggcgcgcgcggtggtactgcgctgccgacgacgccttcctgtgccagggctgcgacgcctcggtgcactcggcgaacccgctcgccaggcggcacgagcgcctgcgcctgcgcccgacggacccgcactcgacgacgctcgaggccggcgtggcgacggcgacgtggaagaagcgccagcagcaggtcgcgccggcgtggtccaagcgcaaggcgcgcactcggaggccgcacgtcaagagcgtcggggagctcctgtcgaggaagctcgtcgtcgtgcctgaggtgtcccccatcgaatcgtcggaggagcggaaggccgaggaggaggaggaagaggaggaggggcagctgctgtactgcgtgccgacctttgaccgcgccctggccgagctctgctcgccaccgcctccggtcgatgacccgacggcctcatcctgctgcagggatgacgtcgacggcgccgtggagaacaacacaaaggcaccaccggtcgtggtcgcggaatcgcccgtgcagcagctcccggacagctttgccggcttcggccccacggacgccgagctcagagagttcgccgcagacatggaagcccttcttggccagggcctggacgacggcaacgagctggatagatcgttctacatggagagcctagggctaatggcgcagcaggcggaagacgtcggccggataaagatggagcccaacggcatcgtaagctcccgctcccgcggcgagggcgctcccgggtttggccctacggagatgaagccagaggcgtcgtcagctgctgctgaggtgctggacacagacttcaactgctgctcgcccacggtgatgatggataacgaggatgaggacagtttcgaacagaaggcgtcggcgagcaacgctgccgccgccgccgcgggtacgcaattcttgaagaggagcctggatctcagcctcaactacgaggccatcatcgagagctggggaagctcgccgtggaccgatggccaacggccaagcgtccagctcgacgatttctggccccacgcccacctcacggtacgtttatttccaaattcacgctgctcctcctcctcgaccgatcgattgcgagcgctgtcgacgcgtgcttaattatgcttcgacttgcaaagtacaatcgggttcatgtgccaggtttgcgtgcagggctggatggcgggaggaggacggttgggtggggaggcggcggtgactccacggctggggatgggcggcgggcgagaggcgcgggtaacacggtaccgggagaagcggcggacgaggctgttcgccaagaagataaggtacgaggtccggaagctcaacgcggag

SEQ ID NO: 5364 - DNA, 716 bp, Zea mays
  Clone ID: TF_LIB4756-131-A1-K1-D8
cctcgaggccggccggggctgccttcctacactactacgccactctgccttccctcccccaccaccacaagaaccgcttcaccattgccgcgccgcgtccagctgagcctcctcttagccgcgtccagccaggagaaggcgggcgcgcacacctgctgcttggtgaccacgttcgatggagctgcacaagtactggggcgtggggggccggcggtgcggcagctgcgagggggccccggcggcggtgcactgccgcacgtgcgttggtggatcgttcctctgcacgacgtgcgacgcccgccccgcgcacgcgcgcctgggccacgagcgcgtgtggatgtgcgaggtctgcgagctggcccccgccgccgtcacgtgcaaggccgacgccgccgtgctctgcgccgcttgcgactccgacatccacgacgccaacccgctggcccggcgccacgcgcgggtccccgtcgcccccatcggctccgaggccgccgccgcggccgtggaggccatgctgttcggaggttggcgtggtgccagaggccttcggcggcagcggcagcggcggcgggagctttgagctcgacttcacaaggcccaagcctcaggcctacatgccatacaccgggactccccagagccacagcgtgccatccgcggacgtggaggtggtgccggagcggggagacttggctgcggtgaggccggtgccgctg

SEQ ID NO: 5365 - DNA, 1633 bp, Zea mays
  Clone ID: TF_ZmC17423_1
cattgggtacctcgaagtcggcaggggcgctgcctccctccactactacgccagccactctgccttccctcccccaccaccacaagaaccgcttcaccattgccgcgtccagctgagcctcctcttagccgcgtccagccaggagaaggcgggcgcgcacacctgctgcttggtgaccacgttcgatggagctgcacaagtactggggcgtggggggccggcggtgcggcagctgcgagggggccccggcggcggtgcactgccgcacgtgcgttggtggatccttcctctgcacgacgtgcgacgcccggcccgcgcacgcgcgcctgggccacgagcgcgtgtggatgtgcgaggtctgcgagctggcccccgccgccgtcacgtgcaaggccgacgccgccgtgctctgcgccgcctgcgactccgacatccacgacgccaacccgctggcccggcgccacgcgcgggtccccgtcgcccccatcggctccgaggccgccgccgcggccgtggaggccatgctgttcgggaccggcgaggcggccgcttccgaggccgacgagcagcacgcggcggccgagcacgcgcacgcgcacgcgcacgcgctgaacctcaacgtggaggccaaggacatgaagctggactacctcttctctgaactggatccctacctcagcgtcgagatcccgcgcttccagcacgctgacagcgtcgtccccaacggcgccggcgctgccgtcgagctggacttcacgtgcggcatcggcgttaagcactcctcctacagctcctacacggccacctccctcgctcatagcggctcctcgtcggaggttggcgtggtgccagaggccttcggcggcagcggcagcggcggcgggagctttgagctcgacttcacaaggcccaagcctcaggcctacatgccatacaccgggactccccagagccacagcgtgccatccgcggacgtggaggtggtgccggagcggggagacttggctgcggtgaggccggtgccgctgatgggggagagcagggaggcgcgcctgatgcggtaccgtgagaaaaggaagaacaggcgcttcgagaagaccatccggtacgcgtcccggaaggcctacgccgagacgcggccgcgaatcaagggccggtttgccaagcgtgctgaccacgacggggacgccgacgccgacgacgctgaggccgaggccgaggccgccgtgccgatgtcatatgtgctcgacttcggctacggcgtcgtaccgagcttttgatgtgcccgggcccaacacgcgcgcacatggccggccgcgcgcttgaaccggcatggcacgccgctgcgcgcgcgccttgtacttgtatcgatcgatgtatagggaggagtagtaatcccatgtactctctttttgagcaagctcttgcgtaaactagtgatgtataatttgtactactagtaagaaactgcagtagccgctgctaatggatcaccaatctataccgcgcaaaaaaagtcttaatagggccattccgagtgcacgcgtggggggcccggttctcaaaaatacacatcagtttttttaaaaaaatttaaaatcgtgtatctgaagttatatgcagaaaaaaaaaa

SEQ ID NO: 5366 - DNA, 2110 bp, Zea mays
  Clone ID: TF_ZmC460_11
tgattttcttcaaattttttccaatcctgtttaatccatatataacgggattaaccgacaagaccttaattggaagtgtcagctaaatcagacaaatgttctgttaaaacatcagtgtctctcaggctggtattagcatagcaacaaaagtggcttaagatgttcacaattgagcgatactacagtcaaagatgcacaacacatgacactagcttgtacacagtaaaattcttctctggtacacatcaggagaagaaacaaaactcctgcgctctcttatttaaccaagatcagggactatgaggtagtcctcgtcgtcggtgacctcgatccgggccttcttgctctggcgaaccccagcgccgccgccgccggcggctttggccggcctgtagtacgccgcgtcgttcgccgcctggtatccgaaaagctctggcacctccgccaacgtcctgctggctttgggcgcctgctcgtggaagaggtcgatgtcggcgaaccactccagctccttgaacccgagcgtcggctccttgtgcagcttgtcgctggactcgtagtcggagaactgcaggagctcgtcgacggcccagccctgcggcaggaactgcggcggcgagggcacctgctgcaccgcggcggagacggcggcgtgcggcggctcgatggtggccttgggcggggcgtggtggtcggagtcgtgggcgtcgcaggcgtcgctgcaggcggaagcggaggcgaggccgacgcggatgccggtggccaggtagcgctgatggttcccggagagcgtgcccgggacgtggatgggctcgtcgcagtcccggcagaagagcgcccggtcctccacgcagaagatgaacgccgctttctcctggcagacgtcgcagcgcgggagcttggcggagagcgcctcgagcgggaggcgctggtgcttgctggcgagcttgttggcggcgtccccctcgacgtcgcagcgcgcgcacagcgcggcctctaggcgcagcagtttttccctactgatgaccgccccccgatagtaattcaacctagtacgagaggaaccgtttattcccccaattggtcatcgcgcttggtttaaaaaccagtggggcgaagctaccgtgtgccggattatgactgaacgcctttaagtcagaatccaagctagcaaccggggcctttgcttgccgcccgccccgacccacgttagggggtttgcgccccaaggggccgtgccattgggtcagcccgcccggccgacgcgccccggcgggccccctcgaagctccctttccaacggggagtggtggtgaatcctttgcagacgacttaaaacgcgacggggcattgtaagtggcagagtggccttgctgccacgatccactgagatccagccccgcgtcgcacggattcgtctgcgaaggattcagcacgccgcccgtggggaggggagcttcagaccttgcccgggcgcccgctcgcgacggggcattgtaggtggcagagtggccttgctgccacgatccactgagatccagccccgcgtcgcacggattcgtagaacgccgccgccagtcctcactcctcaccatttcccaaaccctacccatacccccgccgccgccgccgccatgccgcccaagctcgacccgtcgcaggtggtggaggtcttcgtccgggtgacgggcggcgaggtcggcgcggcgtcgtccctggcgcccaagatcggcccgctcgggctctccccgaagaagatcggcgaggacatcgccaaggagacggccaaggactggaagggcctgcgcgtcaccgtcaagctcaccgtccagaaccgccaggccaaggtctccgtcgtcccctccgccgccgcgctcgtcatcaaggcgctcaaggagcccgagagggaccggaagaaggtcaagaacatcaagcacagcggcaacatcagcctcgacgacgtcgtcgagatcgccaggaccatgaggaacaggtccatggccaaggagttggccggcaccgtcaaggagatcctcggcacctgcgtcagcgtcgtgcaccgtcgacggcaaggaccccaaggacctgcagcaagagattgatgacggcg

SEQ ID NO: 5367 - DNA, 786 bp, Zea mays
  unsure (1)..(786): unsure at all n locations
  Clone ID: TF_LIB4767-072-A1-K1-F10
cattgggtacctcgaggccggccggggtagcaagatcgttgcacaccgctcggaagagaaatgattgccacgaccggcggcagctcggcgaaggcggcggcggtgggcggcaaggcggcgcgcgcctgtgacgggtgcctgcggcggcgggcgaggtggtactgcgcggcggacgacgcgttcctgtgccaagggtgcgacacgtcggtgcactcggcgaacccgctcgcgcggcggcacgagcggctgcgcctgtgcccggcgtctccgctgcagacgccgccagctcgctcggcggcggcagcgacggcgactaataagcgcgagcgccacgacgaggtggcggtgcccgcgtggttcgggcgcaaggcgcgaaccccgcgcggcgggcacgccaaaagcgtcggccaggtggcgttgtcgcggcgcctcgtcgtaccgcatgcggctggcggggactcagactcacccgatgagcgaaacggcggcgaggaggagcagctgctctaccgcgtgcccatccttgaccccgccctagccgagttctgctcgcccccgcctctcgaggaccccgcgaagccggatcctgcggcgccgctggcccagttctgccccgtcggcggccatttcaacttcggcccgaccgacgccgagctcagggagttcgccgcggacatggaagccctcctcgggcacggnctggacgacggaaacgaggaggaatcgtcgttttacatggagacgctgggcctcctcgaccaatggaagtgggcgacgatgccacgc

SEQ ID NO: 5368 - DNA, 909 bp, Zea mays
  Clone ID: TF_ZmC26880_1
aatgcccacgcgtccgcccacgcgtccgcccgggcgtcaattcggcacgagggtgacaccgacacccgtggcatctctctcgtgactcccggagcagaggcatggacaccgcggcggagctggagctggggctggagttggagcagaagccggcggcggggtactggagcgtggtgggcgcgcggccctgcgacgcgtgcgccgcggagccggcgcggctgcactgccgcgcggacggcgcgttcctgtgccccggctgcgacgcccgggcgcacggcgccgggtcgcgccacgcgcgcgtctggctgtgcgaggtctgcgagcacgcccccgccgccgtcacctgccgcgccgacgccgccgcgctctgcgccgcctgcgacgccgacatccactcggccaacccgctcgcgcgccgccacgagcgcctccccgtcgcccctctcttcggcgcgctcgcggacgcgccgcagcccttcccgtccccggccccggctcagggggaagcggtggcggaagactacgggagcagcgaggccgaggcggcgtcgtggctgctccccgagcccgacaacagccacgaggacagcgccgccgacacgttcttcgcggattcggacgcgtacctcggcgccgacctcgacttcgcccggtgcatggacggcgtcaaggccatcggcgtgccggtcgcgccgcccgagctggacatcggtgccggcagcttttgctaccccgaacactccatgaaccacattttgtcgtcatcctcggaggtggcggtggtaccggacgcgcaggcggccggcctgccggtggtggtggtggtgagcagaggggaggagcgggaggcgcggctgatgcggtaccgtgagaagcgcaagaaccgccggttcgacaagaccatccgct

SEQ ID NO: 5369 - DNA, 835 bp, Zea mays
  Clone ID: TF_ZmC3809_1
ggtctagctaggactagtaagtagcataccattaccatcctccccgcggctagctccggctggctttcacccataccatcccgcccatgcgccgcgcccggttcctgctcaagggcgtgcgcctttaccgcgagcgcgacgcggcgagcccggcgccggaggaggaggtgcaggagaacaggagcggcggcgtggccgccagcgccggcggctcagccgaagatgctgagcctcgtgcggcgtccgcgcccgcccccagccacgggcgccacagccgcagcctctccgagcacctcaccaagacgctgcccgggtggcacgtcgaggacttcctggtggacgaggcggccgccgccgccgcgactgacatcggcgtctccgcagcagaatagacgtctccggacggctaccctgcgtggtgttcggcccgggaggggcgccctgccggcctcgaatggggatgcatcgacgacaagcgggggctcctgcgctgcgaggcgcaccgcgccatcctgtgccgcgagtgccacgtgtcggtgcacaccgccagcgacctgaccatgcgccacgcccggttcctgctcacgggcgtccgcctctccgccgagcccgccgccgcgtgcccggcgccggaggatgaggaggaggaggacgacgagaacagcagcggcagcttctgctgcagcgccggcgacgcagccgcacatcctcctcctcttccgtcgtcggcgcccgccaccagccacgggagcgacagcagcagcatctccgagtacctcaccaagacgctgcccgggtggcacgtcgaggacttcctggtggacgaggcggccgc

SEQ ID NO: 5370 - DNA, 1429 bp, Zea mays
  Clone ID: TF_ZmC460_16
ggggcttagagttatcatgttcacagctgtgcaatactacagtcaaagatgcacgacacatgacactggttgtacacacagcaggagaagaaacaaaactcgtgccctttcttttattttagccgagatcagggacgatgaggtggtcctcgtcgtcggtgacctcggtccgggccttcttgctctggcgcaccccggtgccggcagtggcagtggctttggccggcctgtagtacgccgcgccgttcgcggcctcggttccgaaaagcgacggtagcgttactaacctcctgccggctttccgaagtactcccgccatggcagttatagctggcaaccaggccagcaacaggtcgatgtcctcgaaccactccagctccttgagcccaagagacgagtctttctggaacagcaaacacaaaacagatggaaaaggaaaactgagataagaataagaacctgaaaagcttgtggttgatctcatcatcatcaccgccgacaaaaaaaaagaggttttggatggttaggtccttgccttgtcgctggattcgtagtccgacagctcgaggaggtcctcgacggcccaaccggacggtggcaggaacggcgaggacggcacctcctgcggcagcgcgtccttgaccgtccttgttttggtggtcgtcccggcagctggcgcgctgacgacggccgcgggcttggagctgcccttgggcggcgccggcgggaggccctcggcgctggcgccgcagacggagctgaagccgacgcggatgccggtggcgaggtagcgctggtggttgccggagagcgtgccggggacgtggatgggctcgtcgcagtcgcggcagaggagcgccctgtcctcgacgcagaagatgaaggccggcctctcctggcacacgtcgcaacgcgggaggctggcacctcgaggccggccgggcgttaggtcgttcgcgccggagggcccgtgccattggctcagcccgcccggccgacgcgccgcggcgggccgcctcgaagctcccttcccacgggcggcgtgctgaatcctttgcagacgacttaaaacgcgacggggcattgtaagtggcagagtggccttgctgccacgatccactgagatccagccccgcgtcgcacggattcgttcgcaccaccgccgcgccgcccaaatcgcagccaccgccgccatggcagcctccagccgccctctcgtctccgtgaaagccctggagggcgacatggtcacggacgcccccggcatcgccttgccgcccgtcttcggtgcgccgatccgcccggacgtggtccgcttcacccacaagctgctgtcctgcaacaagcgccagccttacgcagtctcccgccgcgctggccaccagacgtcggccgagtcctgcggtacgggccgcgttgtgccccgtat

SEQ ID NO: 5371 - DNA, 1642 bp, Zea mays
  Clone ID: TF_ZmC9091_1
ccggccgggggactgttcccgttttttttgttaagctctcgcttaacctaaacgccgggagcacaagtgctcggcgaaatgacgagcgccggggcggcgacaggcgccgcgctaggcgcgcggacggcgcggtcctgcgacggctgcatgaggcggcgggcgcggtggcactgccccgccgacgacgccttcttgtgccagacctgcgacgtctccgtgcactcggcgaacccgctcgcgcgccgccaccaccgcgtccgcctcccctctgcgtcctgctcctccccaccgcgcgacccggacgcgccaacgtggctccacggcctcaagcgacggccacgcacgccgcggtccaagccaggggggagcaagagcaacaagcatgaggcgactcccagctttatcgccgcggctgcgtcgtcggcagcggtccccgacctcgaggcggaggagtccggctccggtatcctgggcggtaacgacgaccaccacgggttcctgcaggatgacgacgaagaccttctgtaccgcgtgccggtgttcgaccctatgctcgccgagttctacaaccccgtggccgacgagggggagcagaagccggcctgcagcctgctgatgccgtctctcgcggaaacatcgccggagttcgcctccggcggctcggcggaggcggacgggctctccgtgtcgttccacgtcccggacatggagctcgctagcttcgccgcggacatggagagcctcctcatgggagtcgacgacgacgggtttgactgtttgggtttcttggacgaagagaaacctcaggtgaacgcggacttggacgccatagtagcgccggcgcctgaaccagaggacaagaaacggaagcggccggagatgatactcaagctcaactacgaaggcgtcatcgcctcatgggtccgtgacggcggctcgccgtggttccacggcgagcgtcctcacctcgactgtcacgagctatggtcggacgacttcacgacgggtagccgggaactcctcggcggagccgtgacaccggtgaccggtggcgagcgtgaggcgcgggtgtcgcgatacagggagaagcggcggacgcgactgttcgccaagaagatccggtacgaggtgcgcaagctcaacgccgagaagcggccgcggatgaagggtcggttcgtgaagcgcgccacgcttccgccgctgccaaggccgccgccgccgcagcagcagcagcagcagaagcagctgccacgcgcaccgccacacgtgggcatggtgctcccaccacctccggtatcgaacgggcgcttgtggttttgagaccatatgcatgcatggaagcatgcatgaagcaacgtatgtgcgtgatgcatcgatgcatctatctcgctcgtagcatgcgcatgttctttctactctacttttaattcgtgcgtgcgaattagggcaccccacaagataatgctccctgcttacgactgaaatatatttgtttgtacatgtgcagaatagttaagaaagtatatttatagcctaggtttgttgtttatcttttctagttgttgtaaagaaggatgcactaaatacaaggggaagggtgtagattttgacaaaaaaaaaaaaaaaaaaggcccctagggcc

SEQ ID NO: 5372 - DNA, 692 bp, Zea mays
  unsure (1)..(692): unsure at all n locations
  Clone ID: TF_ZmC323340_1
ttccgacgcttaatcgcttcgcttccgccctccatcgatcacctccaaagatcgagagcggctcgctcgtcaagcgctccatcgagccgtcggtgcaggagccaaatcatatatatataggcggacaggaggaagacccgccgatgggtcaccaccgcggcggctgccgctgcgagctctgcggcgcgcccgcggccgtgcactgcgcggcggacgcggccttcctctgcgccgcctgcgacgccaaggtgcacggcgccaacttcctcgcgtcgcgccaccgccgcacgcgcctcctcctcgcggcgccggacgagtgcgggtacgagtccggggcgagctcctgcgtgtccacggcggtcgactcggcggcgcgggcgctccgggcccacgcccacggcctcgcctccgcgcgcgtcgccatggccgccgcgctgtggcgggaggtggcggtgcgcggcgggaccggcggcggcggccacggtcacggcgaggcgctgcggcggctggaggcgtgcgcgcacgtgccggcggggctcgtggtggcggtggccaagtccatggcgcgcgcgcgcgggcggngggacgaggccgacacggacgccgcggcggagggctgggacgagtgcgcctgggccggtcccaagtccagcccgccacgtccttgatcttttctcgtgctcgctgatgaa

SEQ ID NO: 5373 - DNA, 992 bp, Zea mays
  Clone ID: TF_ZmC460_15
ggcggagtttatgaacaatccaaggtggctgccatccatagttgaagacaggaggcgagctgggtgagctcgaccaccagagagcgagacgcgacgtcggatccacgcgcgcagatcgatgttggggctgacgtcggggctgcacagatcgatgacacagggttgcaaatcgagtcgacgcacgcggcgcggaagaatctgaggcttgctgcttcgtacacgacctcggcttgggttgagcagtgagccggccatgggaaaaacctcgggggggtcgcggccagcgagctggagatggccggagacgcgagcagggagccacgcgcaggagcttggggccgggcagaggagagagacgagcacgcgtgaggggctcggccagagcgctgaggcgagcacaacaaggactcccgagcgcgacgactggagagacaaagctccacgacgagcttggaacacaggagcgccgcgcagagaaggactgggagccgtggtagaggaggacgccgagctcagccagggcgcggtggagaagaaagctgcagaggcgagcgagctagtggccgagagggcgctcggccatggcacaagtacagaccggccatgggcaccggccggcgagcagagagagacgacacgcaagggaggaaaaaaatcaagtgcaggggtggtgctcttcgcagcgcgggagcttggcggagagcgcctcgagcgggaggcgctggtgcttgctcgcgagcttgttggcggcgtggatctcgacgtcgcagcgcgcgcacagcgcggcctcgtcggcgcagcacaccaccgtggcagccgcgccctcgcacgcgtcgcactggatcttcatggccgctccacttctcggtctctactcccagctcgccaacacccagccaacaacaaccagggaggcgagaacgaagaggataacgccactgatgactgtggtggaggaagaagtggacggcaaggtagggaggccgggaggg

SEQ ID NO: 5374 - DNA, 1694 bp, Zea mays
  Clone ID: TF_ZmC460_7
ctgttaaaaacatcagtgtctctcagactggtattagcatagcaacaaaagtggcttaatagatgttcagaattgagcgacactacagtcaaagatgcacaacacttgacactagcttgtacacagtaaaattcttctggtacacatcaggagaagaaacaaaactcctgcgctctcttatttaaccccactcgggcgttgtaagtggctcagtggccttgctgccacggatccgtgagatcttgccctggcgaacccggatgccgccaaagaaaaaaatgatggccgaactgtaatacgccgaaaaaattaaccgactgaaatccgaaaaaaatcggcacctccgccaacgtaaaaaagacctctggcgcaccccggcgccggcagtggcagtggctttggctggcctgtagtacgccgcgtcgttcgcggcctgggttccggaaagctccggttcctcagccaatctcctgccggctttcggcgtctgctcgtggaagaggtcgatgtcggtgaaccactccagctccttgaacccgagcggggactccttgtgcagctgcaaaacacacacacacacaagaccatgcatgagacggtgggtgcacgcaggcaggttgttggtcatggaccggagcttgcgctatcgtcttgccttgtcgctggactcgcagtcggagaactgcaggagctcgtcgacggcccagccctgtggcaggaactgcggcggcgagggcacctgctgcgccgcggaggagacggcggccttgggcggggcgtggtggtcggagtcgtcgtgggcgtcgcaggcgtcactgcacgctgacgaagcggaggcgaagccgacgcggatgtcggtggcgaggtagcgctggtggttcccggagagcgtgcccgggacgtggatgggctcgtcgcagtcccggcagaagagcgcccggtcctccacgcagaagatgaacgccgctttctcctgcgagcgcgcgcggggcggggtggtggcctcgttgttagctcgtgcctgcctgccttgtgccgcgtgtggcgcatgcgcaatgcgctggtgatgtacgtacctggcagacgtcgcagcgcgggaggctggcggagagagcctcgagcgggaggcgctggtgcttgctggcgagcttgttggcggcgtggatctcgacgtcgcagcgcgcgcacagcgcggcctcgtcggcgcagcacaccacggtggcagccgcgccctcgcacgcgtcgcactggatcttcatggccgctccacctctctgtctgcggtctatactcccaggcccagctcgctatcctgtcctgtcgtctcgcaagtcgcaacaacgagggaggcaaggacgaacaagataaggccaccgactgcgatggaggaggacgagcttgcgcgcgcgagcacgcaactggagcaatcagtgagctgccgctgccgggcgagcttgtggtggaggactcgccggggagacttgtggccaggggctcccggctcgtctccccgtgtactagctacacgccggaaccacgcttggacgcgccgattttgatctgatgtgatgtgctcactcggcggaacgggatgatggcctggccgtaagagctttagttggctgatctgatttttgtgaatgtatacatccatatccacgtgtcttaatatatgcacacttttaggctgttgt

SEQ ID NO: 5375 - DNA, 1949 bp, Zea mays
  Clone ID: TF_UC-ZMFLB73069A02_FLI
gtcggctggtccggccccagcgattcggtttggtgcgcctcgtggtccacgtgcgcgggctttgtgctctctcttccctctgtgtgtgtgtcagttcgtcgggtaggttggtggcggcgtgagagatgaagagctgcggcgggggaggagcggacgggcagcagtgcccgtgcgactactgcggggaggcggcggcggctctgcactgccgcgcggacgccgcgcgcctctgcgtcgcgtgcgaccgccacgtgcacgccgccaacgcgctttcgcggaagcacgtgcgggcgccgctctgcgcagggtgcgccgcgcgcccggccgccgcgcgcgtctccctcggcgccgacccggcgttcctctgcgcggactgctgcgagggctgcgccgccgcttccgcggcgcgcgtgtcggttgagggcttctcggggtgcccctcggcggccgagctcgccgcgtcatgggggctcgacctccgccgcgcggccgtggccgtgggcgacgacggcgacggcggcgacgacgacgaccccttcctctcggtgctcgactactccgtgctgggggtgggggtggccgacacggacctgcgcgacctctacgtgccgtgcgacccaccgcgggtgcccgtccccgacgccggcgcgcgcccgctcaggggcgaggcgctgtgcgaccagctcgcggagatggcgcggcgcgacgaggcggacacgtcccacgcgcacccgcactcggatctgagcccgcgcacgcctcgccgcacctccgcggcttccagcggacgcctgccgtcgggcaagatggcgccccccgcggcgctgccggtgccggctcatcctcctcccgccgcgccgcaggaggtgcctctgccgtacacgtccctgctcatgatggcgtccgccaactgcagcgacctcattggcggcggcgaccgggtgggtgataccgacgaacaactgctctgggactgcgctgcgccctcggtgccgcccacccagatatgggacttcaatttaggacggtcaaggcatcacgatgagaaatctgctcttgaagttggatacggttctaaccatggcggctttatgattaagagttacagtgacatgcttaaggacatttcttcggggacaacgaaagatctggaagatatttatgactcaagatactgctcaaccgccgaagatatcatgtcctctaatatctgtcagttgtcatcgaaaaatgtgagcaccgggagcaacaaacggaaggtgaggtcatgtgctgcgtcgacgatggatggaccaacgacctccgggaaccacaaccacgtacccgcttcagcttcaggtccaggagcagcgctcaccagggagatctccttcggggatcagacggtgtccgcccccgcggccgagaccgagaggcctgccgccgtgaggatcgacagcgagacgcttgcgcagaacagggacagcgccatgcagcggtacagggagaagaagaagaaccgcaggtacgagaagcacatccggtacgagtcgaggaagctgcgggcggacacgaggaagcgggtgaaagggcggttcgtcaagtcgaccgaagcactcaacgccgccagatacaacggatgaggcagccatatatatatatatatatgcatggcctgcgggcggatgagtttgctgcgcgcctgcgttattacgtgcggtagttacctcacggagaggtaggtactgctacctggaggtgctacgtatgtatggcgcggccggaatcgctacgcacgcggcccaagtttaattttgcgttgaagctatagcgatcgtggccattgttgggcagtcaactccagagattgcacggtactgcttgtttgtaacagacgaccctccctttccccttttttctctgttgttgccgtcatccccaccagaacagaaagtatgtagcttacctac

SEQ ID NO: 5376 - DNA, 2096 bp, Zea mays
  Clone ID: TF_ZmC13160_1
ctctcgcgtcgtccgctcgtcggctggtccggccccagcgattcggtttggtgcgcctcgtggtccacgtgcgcgggctttgtgctctctcttccctctgtgtgtgtgtgtgtcagttcatcgggtaggttggtggcggcgtgagagatgaagagctgcggcgggggaggagcggacgggcagcagtgcccgtgcgactactgcggggaggcggcggcggctctgcactgccgcgcggacgccgcgcgcctctgcgtcgcgtgcgaccgccacgtgcacgccgccaacgcgctgtcgcggaagcacgtgcgggcgccgctctgcgcggggtgcgccgcgcgcccggccgccgcgcgcgtctcccccaccccgtccccgggcggcgccgacccggcgttcctctgcgcggactgctgcgagggctgcgccgccgcttccgcggcgcgcgtgccggtcgagggcttctcggggtgcccctcggcggccgagctcgccgcgtcatgggggctcgacctccgccgcgcggccgtggccgtgggcgacgacggcgacggcggcgacgacgacgaccccttcctctcggtgctcgactactccgtgctgggggtggggaaggccgacacggacctgtgcgacctctacgtgccgtgcgacccgccgagggtgcccgccccctacgccggcgcgcgcccgctcaggggcgaggcgctgtgcgaccagctcgcggagatggcgcggcgcgacgaggcggacacgtcccacgcgcacccgcactcggatctgagcccgcgcacgcctcgccgcacctccgcggtttccagcggacgcctgccgtcgggcaagatggcgccccccgcggcgctgccggtgccggctcatcctcctcccgccgcgccgcaggaggtgcctctgccgtacacgtccctgctcatgatggcgtccgccaactgcagcgacctcattggcggcgccgaccgggtgggtgataccgacgaacaactgctctgggactgtgctgcgccctcggtgccgcccacccagatatgggacttcaatttaggacggtcaaggcatcacgatgagaaatctgctcttgaagttggatacggttctaaccatggaggctttatgattaagagttacagtgacatgcttaaggaaatttcttcggggacaacgaaagatctggaagatatttatgaatcaagatactgctcaaccgccgaagatatcatgtcctctaatatctgtcagctgtcatcgaaaaatgtgagcaccgggagcaacaaacggaaggtgaggtcatgtgctgcgtcgacgatggatggaccaacgacctccgggaaccacaaccacgtacccgcttcagcttcaggtccaggagcagcgctcaccagggagatctccttcggggatcagacggtgtccgcccccgcggccgagaccgagaggcctgccgccgtgaggatcgacagcgagacgcttgcgcagaacagggacagcgccatgcagcggtacagggagaagaagaagaaccgcaggtacgagaagcacatccggtacgagtcgaggaagctgcgggcggacacgaggaagcgggtgaaagggcggttcgtcaagtccaccgaagcactcaacgccgccaggtacaacggatgaggcagccatatatatatatgcatggcctgtgaagcccgcgagtttgctgcgcgcctgcgttattacgtgcggtagcaacggatgaacggggagctaggtactgctacctggaggtgctacgtatgtatggcgcggccggaatcgctacgcacgcggcccaagtttaattttgcgttgaagctatagcgatcgtggccattgttgggcagtcaactccagagattgcacggtactgcttgtttgtaacagacgaccctccctttccccttttttctctgttgttgccgtcatccccaccagaacagaaagtatgtagcttacctacagcaccgatttaccatgcatgcatgcatctggtcttaacgagctaaaaaaaactacggtcgtccgagcgcctaatgcgttagttcccagtgaagttgttctgttttgatttt

SEQ ID NO: 5377 - DNA, 1154 bp, Zea mays
  Clone ID: TF_ZmC460_17
ggggcagtggccttgcggagagaggcacgcacggtgaaggacctcctgctgaccactgcgcgagcgggcgcggccgtgaaggaaggggcggtgatggcggcagaggagaggaaaaacatggtcgtcagctagctagcgatcgatggatcgatctacgtacgtacgtacgtcctggagcaagctatcagagcaagagaccggcggatagcccagcattaagcaggcacaagaattttttttttttttattagcatagcaacaaaagtggcttaatagatgttcagaaattgagcgacactacagtcaaagatgcacaacacatgacactagcttgtacacagtaaaattcttctctggtacacatcaggagaagaaacaaaactcctgcgctctcttatttaaccaagatcagggactatgaggtaatcctcgtcgtcggtgacctcgatccgggccccggtcggccgcgaaaccccggcgccgccgccgccgggggctttggccggcctggagtcaggcgtcgctgcagccggaagctatggcgaaagcgacgcggatgccggtggccaggtagcgctgttggttcccggagagcgtgcccgggacgtggatgggctcgtcgcagtcccggcagaagagcgcccggtcctccacgcagaagatgaacgccgctttctcctggcagacgtcgcagcgcgggagcttggcggagagcgcctcgagcgggaggcgctggtgcttgctggcgagcttgttggcggcgtggatctcgacgtcgcagcgcgcgcacagcgcggcctcgtcggcgcagcacaccaccgtggcagccgcgccctcgcacgcgtcgcactggatcttcatggccgctccacctctcggtctgtactcccagctcgccaacacccagccaacaacaaccagggaggcgagaacgaagaggataacgccactgatgagatgactgtggtggaggaagaagtggacggcaagggaggggaggccgggaggcgagtggtgcatataagtcgcctgcgcgagcacgcaactcgagcaatcagtgagctgccgcgcgagcttgtggtggaggactcgccggggagacttgtggccaggggctcccggttcgtctccctctgtgtactcggacgcgtggg

SEQ ID NO: 5378 - DNA, 582 bp, Zea mays
  Clone ID: TF_LIB3591-076-Q6-K6-E12
gtcgtcgggaaagggcgctgctcgtgactccgcggcggcgggccagaaacacggcaccggcacgcggtgcgagctctgcgggggcgcggcggccgtgcactgcgccgcggactcggcgttcctctgcctgcgctgcgacgccaaggtgcacggcgccaacttcctggcgtccaggcacgtgaggcggcgcctggtgccgcgccgggccgccgaccccgaggcgtcgtcggccgcgtccagcggctcctcctgcgtgtccacggccgactccgcggagtcggccgccacggcaccggctccgtgcccttcgaggacggcggggaggagggctccggctcgtgcgcggcggccgcgcgcggaggcggtcctggaggggtgggccaagcggatggggttcgcggcggggccggcgcgccggcgcgcacgtgccggcgcggctggtgctgaccgccgcgtcgtggatggcgcgccggccggacgcccggcaggaggaccactaggagggatgggccgagtgctcctgagttcctgatccagacgggcccacgtccgttgctgccgtgccgccgctgcacctgcact

SEQ ID NO: 5379 - DNA, 1396 bp, Zea mays
  Clone ID: TF_ZmC101_1
cccacgcgtccgcccacgcgtccggaccagcccacggtcagtagccatcggccactaccagcctcgggcgctggctgtggcctgtgggctgggcggggcccctttaaatgccggccatacgcgcggcctaaagcctccagagccacgctgcttcccggccgaagcctccgtccgcgcccacggtttccattccatcccccaggcttgcgccgactcgccacttgcaccgccggccggtttcgccgaacgcctcgcgcccacccgcgcgcggagacctgcatataagccggccgcgtgtcgtccggcgctcccgggacaggcgatccgttcgtcatccgctgcaaaccaccaggcaccagctccgcgcgcagaggccggaggactacgaccgacgagggcgacgaacaccaaggctccgaagtccgaggaggcaggaagcgggagacgtcgggaatgggcgctgctcgtgactccacggcggcgggccagaagcgcggcaccggcacgcggtgcgagctctgcgggggcgcggcggccgtgcactgcgccgcggactcggcgttcctctgcctgcgctgcgacgccaaggtgcacggcgccaacttcctggcgtccaggcacgtgaggcggcgcctggtgccgcgccgggccgccgaccccgaggcgtcgtcggccgcgtccagcggctcctcctgcgtgtccacggccgactccgcggagtcggccgccacggcaccggctccgtgcccttcgaggacggcggggaggagggctccggctcgggcgcggcggccgcgcgcggaggcggtcctggaggggtgggccaagcggatggggttcgcggcggggccggcgcgccggcgcgccgcggcggcggccgccgcgctccgggcgctcggccggggcgtggccgctgcccgcgtgccgctccgcgtcgggatggccggcgcgctctggtcggaggtcgccgccgggtgccgaggcaatggaggggaggaggcctcgctgctccagcggctggaggccgccgcgcacgtgccggcgcggctggtgctgaccgccgcgtcgtggatggcgcgccggccggacgcccggcaggaggaccacgaggagggatgggccgagtgctcctgagttcctgatccagacgggcccacgtccgttgctgccgtgccgccgctgcacctgcactgtgtaccgagccggacctccgagatagactcgggagaaaaatgtaacaacgtgtggggctgtgggcgacgtttgtttgtttgttcattttcttcttaatcaaataaatatatcgtaggcgtacgagcgagggtccaagggattgatcgtgtggctggttggctgcctctcgtcaagccgatttgatttgacttgattacacaac

SEQ ID NO: 5380 - DNA, 1642 bp, Zea mays
  unsure (1)..(1642): unsure at all n locations
  Clone ID: TF_ZmC460_5
gtgctacaatagcagaaccgatattgcataggggtcgtgatggtgcaccaaacaaggctatgttttgtttaagcttcaagctacccatggagtgtcttaaggaggacagtgaaaatcgcatcgaatcagttgccaagtaggccatgccatgctgatattgtgctcctgaagnnnnnaatcatccacctgcagnnnnnnnnnggagctttaccaaataaatagcaaatgtgctgatgattctggggtgtcatataaccattgaagatgttggtggatgaatcaagacgctggtaacatctgattcaaagcgtggtgccatcggtttagtttacaggaagttgnnnnnnnnnnnnnncgcggccnnnnnnnnnggaagttccatgtcacctaaagtattgacnnnnnacatggttttgttcttgatttgaagaaaatttggtcagaactcaggaccgtttgtagtacttgtcactcgagctctctgtacccaagtgaaagtgtcaggtgttcgaggaaatgttatgttaaaaacatcaaagtgtctcttagactgctactagcgtagcaacaaagacacaaagtgtgcttagagttatcatgttcacagctgtgcaatactacagtcaaagatgcacgacacatgacactggttgtacacacagcaggagaagaaacaaaactcgtccccccccttttattttagccgagatcagggacgatgaggtggtcctcgtcgtcggtgacctcggtccgggccttcttgctcnnntggcgcaccccggtgccggcagtggcagtggctttggccggcctgtagtacgccgcgccgttcgcggcctgggttccggaaagctccggtacctcggccaacctcctgccggctttcggcgtctgcccgtggaagaggtcgatgtcggtgaaccactccagctccttgaacccgagcggggactccttgtgcagcttgtcgctggactcgcagtcggagaactgcaggagctcgtcgacggcccagccctgtggcaggaactgcggcggcgagggcacctgctgcgccgtgcggtggcgacggcggccttgggcggggcgtggtggtcggagtcgtcgtgggcgtcgcaggcgtcactgcacgctgacgaagcggaggcgaagccgacgcggatgccggtggcgaggtagcgctggtggttcccggagagcgtgcccgggacgtggatgggctcgtcgcagtcccggcagaagagcgcccggtcctccacgcagaagatgaacgccgctttctcctggcagacgtcgcagcgcgggaggctggcggagagcgcctcgagcgggaggcgctggtgcttgctggcgagcttgttggcggcgtggatctcgacgtcgcagcgcgcgcacagcgcggcctcgtcggcgcagcacaccacggtggcagccgcgccctcgcacgcgtcgcactggatcttcatggccgctccacctctctgtctgcggtctatactcccaggcccagctcgctatcctgtcccgccggctcgcaagtcgcacccccctgggggccgaggacgaacaagataaggccactgactgcgatggaggaggacgagcttgcgcgcgcgagcacgcaactggagcaatcagtgag

SEQ ID NO: 5381 - DNA, 2263 bp, Zea mays
  Clone ID: TF_ZmC1299_1
gccggggctaggtctagtctgtctctcctctttcttggtttgaccagccttcccctctcttctctgctctttgcatctctctcttgttcctcccttcctctctaaaaaaagggttctgatccctttctagaagctcctgggtttctgttgccgacccgagctccccaggggcgctcaggaggcgccgagccggcgaccgctccggcggatctgaggagccgccgcggtcgctttgcctccggttccttgtaaactattgattgggaaacactctgaagaagagtttgttggctgcataacatctcctgaagctggtttgaagtttgctgataggaaagatcatgggcgctctctgtgatttctgtggggagcataggtctatggtttactgccgatcagatgcagcatccttgtgtttatcatgtgaccgtaatgtgcattcagctaatgctctttctcggcgtcatacaaggacacttttatgtgaccggtgtgcttcacagcctgctatggtccgctgtctagcagaaaatgcctcgctttgccaaaattgtgattggaatggccacattgcaggatcctcatctgccggacacaaaaggcagactataaattgctattcaggatgtccatcgtctgcagaactttctagaatatggtccttcgtttcagatattcctaatgtagcacctgagccaaactgtgagcaaggaataagcatgatgagcatcagcgacagtggtgtcagtaatcaagataatgctgcaggggacagtattttgttagatatagctagtgcaacacttgtaagtgatattggtacttgtgacaagcttttggtaggttcctcttcaggagctggagtgaacctacttccactggctactggtcaaacagaaacagctggatctgtggattccacaccagataaggttccctatacgccagataaagatatgttcagtaaggacagcatatatgaagatttttgtgtggatgacgctgaccttgctttcgaaaattatgaagaactctttggtacctctcatattcaaacagaacaactctttgatgatgctggaatagacatttactttgaaatgaaggaagcacctgctgggaattccactgagtccaagctgaagcaacctgcaaatagcaatgcggtatctgccgactctgggatgtcgaaccctggagtgaaaggtgattccagtgtttgtacccctttgaggcaggctaggtctagtctgtctctttcctttgctggtttgactggtgagagtagtgcgggagaccaccaagattgtgtggtatcatcattgcttcttatgggtgagcctccttggcagcctcctggccccgagggctcaattgctggaggtagtagagacagtgcactcacacgatacaaggagaagaaaatgagaagaaagttcgacaagaaaatcaggtacgcttctcgtaaggctagagcagatgtgcgaaagagggtaaagggtcggtttgttaaggctggtgaagcatatgactatgatcctctctgccaaacgaggagttactgaagcatatgatctttatccagttttaaattagcaaactgcaaccaaggctcgttgcagctagaacaaaagcactggcaatccaagctattgggccaaactgtgccttcgaaaagaaaaaaaaaaggagaaagctgtcggcatgataaaatatagagaaatatttggatgttgcagaagtttttgggtgaggatcctcctttttcctcctgtacagtggttggaagcggtttgagtctctccatcttttgtgaattagcctgaatccagctaaacagacttgttgcattttgatctccattctgcattcctgctgactgccatcagtctacgtacacgggctggcggctgcggtgtttttggaggtgttcgtccagattagacaagatggctagatgtgatctgtgaaatatccttctattataataatgtaaaatttgctgggacctggatgtttctgctattatcaatgtgcaaataccaggtcgtagccaaactggtcgtcagtttgttctttttaagttggtgatggaacccatccaactggacagtggacaccaactttctgtgctcattctgtccaaaccaacctccaaactgactcgatgttagtactatttgtattatgtgactcctgagcaagtgagcttgtgctcaaacctcaaatacgtcctcttgtaccaaaccacgatatggagggt

SEQ ID NO: 5382 - DNA, 779 bp, Zea mays
  Clone ID: TF_ZmC3762_2
ctcgaggccggcccatcccaccatgtcctctcctctgttcctctccagcccccttttcaacctttgacgctgtagcttgagagcgagattagtgcctaccatattctcctcctgagcgactgagcgctggtctccgataggctcgccatgcaggtgctctgcgacgtctgcggcggcgcgccggccgccgtgctctgctgcactgacgaggccgcgctctgctccgcctgcgaccgccgcgtctaccgcgccgacaagcgccgccgcatcccgctcgtccagccctgcggcgacgactccgccgccgccgccgccgcgccgctctgcgacgtctgcaaggagcggaggggcctcgtgttctgcgtggaggaccgcgccatcctgtgccccgactgcgacgaccccatccacagcgccaacgacctcaccgccaagcacacccgcttcctcctcgtcggggccaagctctccgccgcgctcgtcgaccaggcgcccccctcccctgacgacgacgacgacgacgtcgccgagcccgacgctgtccccgccgcctgcgcggccaaggcctcgtctcttgagtccggcggcggcagcagcatctccgactacctcaccaacatctgcccgggctggcgcgtcgacgatcttctcttggacgactcgtcgttctcagcgccatctaagaccggctacagcgacggccacgatcaggtgccgtccgtggatgccgacctcttccacgtggtggccagcggccggccaggcaagcgcgtcggcgg

SEQ ID NO: 5383 - DNA, 1660 bp, Zea mays
  Clone ID: TF_ZmC3_3
ggccggggtaatcttcagatgaaagacagatcgctaccaatgcacacatagctcaggctcatgtgtgtgttgcatcccacagtctcatgcgcatgtttacttacagaagttcatgaaaagacacgtgcacttgaggcttctggatacttcttctgcctagaggaccgtgcactactttgtagagactgtgatgttgctatacacacagtgaattcctttgtttcagtacatcagagattcctgctaactggagttcaggtgggtcttgatcctgctgatccagttccacctattgctgaaaagcacgttaatgctgctggtggatcagtaaatcaaccagtgagacatcagccaaagagaagcccgacagttcaattttcagttgaagggagtgcttctgttcctactaaaaatgtaacaaatggagattgttcaaggcagaattttgtcccaacagccaggggagaagtggttgattggactatgaataatagtacaattcggtcagtagaatctccgcctaagtacatgtcagaggagagtccaacacttctgcaatctagccagaccacaacagtcttctctaaccaaattaacggcaatagtgatgggacctaccacttgtcattctcaagtggtaatgtgacagacagtctaccagattggcctgtggatgagttcttcagtaactcagaatatgttccaaacttaggcttctccgagcatggttcttctaagggtgataacgctaagctggagagtgctggtggatctctacaatgccgtttagctgaaggctccattgctgaggaactattaggacaggtgcctgggttgatcactgatgattatatgagccgggtacctgagaattcatggacagtacctgaggttccctcgccaccaactgcctcggggctcaattggcatgggaatttgtgtttccctgcatatgacagcacaatgtttgttcctgaaattacatccctccagaactcccaaaatcagttcaccgtaccttcgagtttcaagcgccggagaagagagtattgaggtgacgacaagatcactagacgtccactgtccagtttaggccatcttgagaaaggtttcttgctgtaccaaatgacggagaaaggatatccaggactgggttatcattcaaacttcaactgaactatccaagtagctaggtttgaagtgtgctgcaatgcttcaatgatgttcattttccaaagatctgagcttcgctagtgttggggtctttttctccgccgaaggtcctctaggcaaaaacaccttcggcaagacagtacaaaggcaggtgcaacatgaagatataagtcgaagctacgatcgaaagagcttcggcttggtgtcatgctaaagacgaaggacgataccgacttaaagaggaaaatactgtatagcccttggtagtctgtattatgatcataattagttattaatgacatggatataatttcgtctgggttacgttctgcgcctataaatagatgaacagtaccccgtactattcatgctgcatggtaatcgttcctgcgtctctcacattttcatcatttgtcgaactgaatgtatcaatgaagcataaatattatgagcatttatttatgtttataagaggaaatgggaatat

SEQ ID NO: 5384 - DNA, 1813 bp, Zea mays
  Clone ID: TF_ZmC22615_1
ccggccgggacgatggtcgcatttgtgcggccgtgaggcctcgacgcctcgtccaacaggagccggcgacgtcgcccccttcgtcccctccgctgcgcccacgccacgaatccattccattcccattcctccccacgccgcgcgcctccataataccacaccgccacccccatgccgctcgcccaccaccacaatccccagccctcacgcgccattggaattgacattcgattcccagcgcagctatcgagctccctttccccgccttgttggcgcgcgttagagcgcgagagagaaccggctaacccccggcggcgaagaagttcatgaaggtgctgtgcagtgcatgcgaggcggcggaggcgagcgtcctctgctgcgccgacgacgccgcactctgcgcgcgctgcgaccgagaggtccacgcggcgaaccgattggcaggcaaacaccagcgcctgcctctcctcgcccccggcggccaaggcgccgccgccgtgtcgccgcccaagtgcgacatatgccaggaatgcgacgcctacttcttctgcctggaggaccgcgcgctgctctgccggagctgcgacgtcgccgtgcacactgccaactccttcgtctcggcgcaccgccggttcttgttaaccggcgtccaggtcggccaggagctcgagcctgacgacctctccctggagcagcgagaggcgtcgtctcccccgccggcgaagagcgagccgaccccgccgctctacagcgagagcgacttcggctgggcggccggcgccggcgctaccgggagcctcacggactggtcggccgtgcaggaggagttcggctcccctgccccccgcctcgcggaggcggcgcccagggccacgccgaagcggactccgcgggcgccggctttcggtgccgggcagggccgcatcgccggcggggtcatggattggccgctgggcgagttcttccgcggcgttagcgacttcaacggcggcttcagcttcggcgagagcggcaactccaaggtcagcgcagacctctgtttttttggatcgtagatcgtgtttactgtctagtcgtctttctgacattctgccgtcgcgtttcctgtcatctcggcaggccgacagcgggaagctcggggacagcgcgggtggctccccgtactaccgctcgtcggaggaggagcgggacgccaacgagctgttcggccaggtgccggagatccagtggtcggtgccggcgctgccctccccgccgaccgcgtccggcctccactggcaacacggcggccccgacagcggcgccttcgtgccggacatctgcaccccggacggcgccggccgctgcttcccgaccgccagtggcgccgcgaagcgccagaggaaccgctagctccgcgaggacaaaggaggttcatactaccggtcgctatgttccagatcgttcttgcagctaagctaagcaacaggagatcacagtgaatgctcctactagtgaggagtacgtcgcaccgcgtcgtcgatcacatccctgatccaaggtgaaggccttgagctcgtgcgcctgtttaacggatgcatcagatctggacgatgctagaaacaacttgtgctagtgctacctagcctttgacttccaatgacgctttgaaagattgaaactgatgcgctaaccgatagcttagacattggacagtagtatgatgctgatgcttcgttttcttgtccgttcaatcaatgtaacaaagagaagttggggatgccaaaaaaattcaaaaaaaagctggtgatatgctatctaatcagtttgcctc

SEQ ID NO: 5385 - DNA, 954 bp, Zea mays
  Clone ID: TF_ZmC18754_1
tggagatcgtgcgaggctgtactacctgtacgcctccatcgtcgcctcgcaccatcaatcctgtgcggtgccagatcctccccgggtcttgtcttgtcgcaggtggaagccatgtccgccgcggacgcagccggcggcaaggaggcggcgccggcgtgcgactcctgcacgggcatgccggcggtggtgtactgccgggccgactccgcgaggctgtgcctgccgtgcgaccgccacgtgcacggcgccaacaccgtgtccactcgccacgcccgggcgccgctctgcgccgggtgccgcgcagccgctgccgctgcggcccgccacgcgcggcggcttcctctgcgccagctgccgcttgggggaggagaaggatgagcgggacggcggtggcgccgccgacagtagtagcgacgacggtggcgcggtggaagggtacgccgggtgcccctcggtcgccgatctcgcgaccatcctgggcgccggctccgcgtgggaggagccccagacgctccgcttggagagccggagctccggcggcgagctggctgacgaggtcatccgccagctggtggagctcgccaggtcggaggcggcggctcgcgctgagatggagcagcttactccatggccgtcgccggagcttgctgccattactggacagtacgccgacttcggggctctcgacgctgacaccgcctggcatgatgatgcagcagccatcgcggcagcagtagtgccttccactgaggaggagcagcaagcgtggatcgcggccggctgcgacgtcggcgcgtgccggacggaggagaaggcgcgcgagaacgacgctgctctggccgagccgtgtctgtcctcgttcgtggagatgtcagagatctgccccgccagcgtcgtcgtcaccctcagccacggcggggacgagggcgtcgacagcagcggcaagacagcccc

SEQ ID NO: 5386 - DNA, 1873 bp, Zea mays
  Clone ID: TF_ZmC300_43
aaacggaagtgaacagggcccgtctcttccaccactccgcagaggcgcagactaccgtctcatcctactactctagcccagtctcacgatccagcactcagtcactagcgcttgtcgtcgccagtacaacaacggcatgggtgagggtgacgacgaccggcgggacgagttgttgggcgcggggcgggaccatgaaccagagccggcggacgcggaggaggccaagaaacccgcacccggcgaggcggaggccggcaacggcgccggcgcggaggcggcgacctgcgactactgcgggaccgcggcggcggcggtctactgccgcgccgactccgccaggctctgcctgccgtgcgaccgcctcgtgcacggcgccaacggggtctgctcccgccacgcccgcgccccgctctgcgccggctgctgcgccgccggggccgtcttccgccgcgcctcgacctccgccttcctctgctccaactgcgacttcgggaggcaccgggatggcggtgacccgccgctccacgaccgctgcgccgtgcagccctattccgggtgccctccggcgagcgacctcgccgcgctcctcgcggtgcccctcttcgacaagccggccgccgaagatggtgcctggtggaacatctgggaggagccccaggtgctgagtttggaggatctcatcgtgcccaccaccccttgccatggattcgaacccctcctaacgccgccctcgcccaagaaccggagcatctcgccggaccggaaggtgaacgaggagattcttcggcagctgggggagctcgcagagtctgatggcggtatgcaggcatcagcaggtcgtgaggaggcagagcaagctggtggagaccagttcccttcctgggcgtcaccacagtatgccactggacatggcaattttggaacagaggacaaccatgagaatggcagatggaacaacagtgaatatcatgatctaaatgatgcatgtaagctcgaggtcacatatgatcaggctccagtcaactcggctgaaccgtgcttgtcttcatttgctccactgtcggaaatctgccccagcatgagcaatggtagcagtaaggaagataaccaccaggctaatcctggcattggcatgccaatgcaaggtctacccaaaaggagtggatttgatgttgtcccatgccctgaccgtgactcggtcatttcgcgctataaagcgaagaggaagacaagaagatttgacaggcaggtccggtatgagtcgcgcaaagttcgtgctgatggcaggctcaggatcaaggggcgttttgcaaaggcaaaccagacatgaacctaaatctgcagttctgcactatcctaagcatctttcctcaagaaatatgctaagtatcttccaacacgaagaagaaaactggtcaggggcgatgataatgcaaaaatgtgccagaattttgtttgccttcagttcaatagctgataaccatagctccatatacagttgaattgaatgacgtgtgtatatattgctgtcatgtgactagtagctacattgctttgagagatcaaaacctgtatatgcacctacacatgtgattttgccatgacggacataataatagaaccactgcgtttgattgatgtagttattaacttattttgcaatttgatttccaatgcaaaagcttctttcactgatgagcaataaacaccgttgtgatgcaagaactgagaaatgatgtttgctaagggcccgtttgtttgattggaattgggctgaattggaatttaattcttgggctgatttgtttggcaaactatagaattggaaactaactttccatccatttcttaggcctgaattagagtctctgaa

SEQ ID NO: 5387 - DNA, 604 bp, Zea mays
  Clone ID: TF_ZmC2446_2
acccacgcgtccggtggcggcgcactgccggacgtgcccgggcggcgcgtacctgtgcggggggtgcgacgcggggcacgcgcgggcggggcacgagcgggtgtgggtctgcgaggtgtgcgagtgcgcgccggccgccgtgacgtgccgcgccgacgccgccgcgctctgcgccgcgtgcgacgccgacatccacgacgccaacccgctggcgcgccgccacgagcgcgtccccgtgcagcccatcggcgccgccgctgatcccgccgcggagaaggcggcgctgctgttcggccttgccgcggaagggaaggacggcggcgacgcggccaaggtcgtcgtcgacgccagtaagctggacctcctgttcgcggacgacgtggtcgacccgttcctcgcccaagacttcgccaggttcccgcacgccgacagcgtcgtgccgaacgatggatccaactgcggcgccgctgtggacttcgactttggtggcggcgtcgccgtcgccgccaagcagccgtcctacagctcctacacggcggcgtcgctgggccacagcggctcgtcgtcggaggtcggcctggtcccagacgtgatgtgcggccgc

SEQ ID NO: 5388 - DNA, 914 bp, Zea mays
  Clone ID: TF_ZmC2446_1
ctcgaggccggccaggccgggagcttcgcaagctttcggctaaatccctgccattagtagcaagcaagaaagcagtggtagtaggtgccacccacacggttttcacggctgccggctgggagcgaccgaggagatcgtcgtcacgctcgatggaggccctggtggggaggtactggggtctggggggacggcggtgcggggcgtgcggcgggtcgccggcggcggcgcactgccggacgtgcccgggcggcgcgtacctgtgcgcggggtgcgacgcggggcacgcgcgggcggggcacgagcgggtgtgggtctgcgaggtgtgcgagtgcgcgccggccgccgtgacgtgccgcgccgacgccgccgcgctctgcgccgcgtgcgacgccgacatccacgacgccaacccgctggcgcgccgccacgagcgcgtccccgtgcagcccatcggcgccgccgctgatcccgccgcggagaaggcggcgctgctgttcggccttgccgcggaagggaaggacggcggcgacgacgacgcggccaaggtcgtcgtcgacgccagtaagctggacctcctgttcgctgacgacgtcgtcgacccgttcctcgcccaagacttcgccaggttcccgcacgccgatagcgtcgtgccgaacgatggatccagctgcggcgccgctgtggacttcgactttggtggcggcgtcgccgtcgccgccaagcagccgtcctacagctcctacacggcggcgtcgctgggccacagcgtaagcgtgcctttttagtgaagtggctctgtcaccgtgcccgtgattattgtttttctattcctaatcttcgtttcggctttggttttggtcgagcagggctcgtcgtcggaggtcggcctggtcccagacgtgatgtgcggccgc

SEQ ID NO: 5389 - DNA, 1260 bp, Zea mays
  unsure (1)..(1260): unsure at all n locations
  Clone ID: TF_ZmC1611_3
cattgggtacctcgaggccggccgggacttagggaaaaaacacaaagcacaattgcacaaacgcaagaagctcaacaagacaagaaactgaggcaagaccaagaagaagaggaggaagaagaaaaaggcctagaacaagatgggaggcgaaggcagcacaagcccagcgcctgggggagccgcctgcgcggtctgcggcggcgccgcggtggtgtactgcgtggcggacgctgcggcgctctgcagcccctgcgatgccgctgtccacgccgcaaacctgctggcgtcgcgccatgagcgcgtgcctctttccatggccgccgtgccgtccgcatcaggcgcgtacgacgacctgttcgcgcccgacgacgtcgacgcggcggcgcccgcgcaggcgcaggggctgggcagcccccggaacggcagctcgtcggcgagcttcaccaccagcggcgacagcggcgcggagggcagcagcctgtttgacttcgacctgctgtctggcgtggacctcgcggcctgtgtcacggacggcgtggcgcccctccaccacgacgacgctgcaccgctgtgggcgcagcctggcctggccgtcgcgtgggcgaccgcgtggtctccggcggactccgccgccgccgtagtcgccgcggcggcggagcgggaggcgagggtgcagaggtaccgcgagaagcgcaagaaccgcaggttccacaagaccatccgctacgcgtcccgcaaggcctacgccgaggcgcggccgaggatcaagggccgcttcgtcaagcgcgccgccggnacctcctcctccctctcctcggccgccggaacaccccgacgacggcaacgacgccacgggcgccgctgccaagttctggctctccttctctgacgacgccagggacggcttctacgtggacgccggggcctacggggtcgtgccaagcttctagagagttcgttccgaacaactcacaagaaatccttggaaatggtcaccgcaggctcacatcgcttctggcggtggcgttcgcgcagcttgaaacaagctaagaaatgggcgcgcgccaatggcgccatcgttcttgttttgtgtcgtgccgtcagcccgtcattcatgcgggtagcattcgtggtgaaattcggccatcgctatttttttaatgatggctcggaatttcgaccccattttaatgtctatatatgtagctgtgttcatccattgtttgagtttttaatttctactccaagatcaattccatg

SEQ ID NO: 5390 - DNA, 1899 bp, Zea mays
  Clone ID: TF_ZmC13160_3
cggcggcggctctgcactgccgcgcggacgccgcgcgcctctgcgtcgcgtgcgaccgccacgtgcacgccgccaacgcgctttcgcggaagcacgtgcgggcgccgctctgcgcagggtgcgccgcgcgcccggccgccgcgcgcgtctccctcggcgccgacccggcgttcctctgcgcggactgctgcgagggctgcgccgccgcttccgcggcgcgcgtgtcggttgagggcttctcggggtgcccctcggcggccgagctcgccgcgtcatgggggctcgacctccgccgcgcggccgtggccgtgggcgacgacggcgacggcggcgacgacgacgaccccttcctctcggtgctcgactactccgtgctgggggtgggggtggccgacacggacctgcgcgacctctacgtgccgtgcgacccaccgcgggtgcccgtccccgacgccggcgcgcgcccgctcaggggcgaggcgctgtgcgaccagctcgcggagatggcgcggcgcgacgaggcggacacgtcccacgcgcacccgcactcggatctgagcccgcgcacgcctcgccgcacctccgcggcttccagcggacgcctgccgtcgggcaagatggcgccccccgcggcgctgccggtgccggctcatcctcctcccgccgcgccgcaggaggtgcctctgccgtacacgtccctgctcatgatggcgtccgccaactgcagcgacctcattggcggcggcgaccgggtgggtgataccgacgaacaactgctctgggactgcgctgcgccctcggtgccgcccacccagagctcgggcttcaatttaggacggtcaaggcatcacgatgagaaatctgctcttgaagttggatacggttctaaccatggcggctttatgattaagagttacagtgacatgcttaaggacatttcttcggggacaacgaaagatctggaagatatttatgactcaagatactgctcaaccgccgaagatatcatgtcctctaatatctgtcagttgtcatcgaaaaatgtgagcaccgggagcaacaaacggaaggtgaggtcatgtgctgcgtcgacgatggatggaccaacgacctccgggaaccacaaccacgtacccgcttcagcttcaggtccaggagcagcgctcaccagggagatctccttcggggatcagacggtgtccgcccccgcggccgagaccgagaggcctgccgccgtgaggatcgacagcgagacgcttgcgcagaacagggacagcgccatgcagcggtacagggagaagaagaagaaccgcaggcacggatccatgagctgatcttgatgacccttacctacctagcttgcctgctgcgacttgtgcggtattaagaataggctgttacatgttgtgtcccatcatatcgttcgtgtccgcaggtacgagaagcacatccggtacgagtcgaggaagctgcgggcggacacgaggaagcgggtgaaagggcggttcgtcaagtcgaccgaagcactcaacgccgccagatacaacggatgaggcagccatatatatatatatatatgcatggcctgcgggcggatgagtttgctgcgcgcctgcgttattacgtgcggtagttacctcacggagaggtaggtactgctacctggaggtgctacgtatgtatggcgcggccggaatcgctacgcacgcggcccaagtttaattttgcgttgaagctatagcgatcgtggccattgttgggcagtcaactccagagattgcacggtactgcttgtttgtaacagacgaccctccctttcccctttttttctctgttgttgccgtcatccccaccagaacagaaagtatgtagcttacctacagcaccgatttaccatgc

SEQ ID NO: 5391 - DNA, 1978 bp, Zea mays
  Clone ID: TF_ZmC460_4
ctgttaaaaacatcagtgtctcagactggtattagcatagcaacaaaagtggcttaatagatgttcagaattgagcgacactacagtcaaagatgcacaacacttgacactagcttgtacacagtaaaattcttctctggtacaccgtacacatcaggagacgaaacaaaactcctgcgctctcttatttaaccaagatcagggactatgaggtaatcctcgtcgtcggtgacctcgatccgggccttcttgctctggcgaaccccagcgccgccgccggcggcggctttggccggcctgtagtacgccgcgtcgttcgccgcctggtatccgaaaagctccggcacctccgccaacgtcctgctggctttgggcgcctgctcgtggaagaggtcgatgtcggcgaaccactccagctccttgaacccgagcgtcggctccttgtgcagcttgtcgctggactcgtagtcggagaactgcaggagctcgtcgacggcccagccctgcggcaggaactgcggcggcgagggcacctgctgcaccgcggcggagacggcggcgtgcggtggctcgatggtggccttgggcggggcgtggtggtcggagtcgtgggcgtcgcaggcgtcgctgcaggcggaagccgaggcgaggccgacgcggatgccggtggccaggtagcgctggtggttcccggagagcgtgcccgggacgtggatgggctcgtcgcagtcctggcagaagagcgcccggtcctccacgcagaagatgaacgccgctttctcctggcagacgtcgcagcgcgggagcttggcggagagcgcctcgagcgggaggcgctggtgcttgctcgcgagcttgttggcggcgtggatctcgacgtcgcagcgcgcgcacagcgcggcctcgtcggcgcagcacaccaccgtggcagccgcgccctcgcacgcgtcgcactggatcttcatggccgctccacttctcggtctctactcccagctcgccaacacccagccaacaacaaccagggaggcgagaacgaagaggataacgccactgatgactgtggtggaggaagaagtggacggcaagggaggggaggccgggagcgcagacccagcgggggcgagtggtgcatataagtcgcctgcgcgagcacgcaactcgagcaatcagcgctctgccgggcgggagcccggccccggccacgtggatgggctcgtcgcagtcccggcagaagagcgcccggtcctccacgcagaagatgaacgccgctttctcctggcagacgtcgcagcgcgggaggctggcggagagagcctcgagcgggaggcgctggtgcttgctggcgagcttgttggcggcgtggatctcgacgtcgcagcgcgcgcacagcgcggcctcgtcggcgcagcacaccacggtggcagccgcgccctcgcacgcgtcgcactggatcttcatggccgctccacctctctgtctgcggtctatactcccaggcccagctcgctatcctgtcctgtcccctcgcaagtcgcaacaacgagggacgcaggtgcgaaccccacgcgtccgcccacgcgtccgcccacgcgtccgcggacaaacgacaggcggggcaccacggacgtaattggagaggggggaagccatgccgggtacaacaacaggggaaatgggggaagcaaaaggaacccggacccgggggcaaaggattcaacacgccccccggtgggaagggggcttcgagggggccccccggggcgcgttggccgggcgggctgaaccaaaggcacgggcccttggggggcgaaccccctaacgggggtcggggcgggcggcaaacaaaggcccccggtgctaacttggattctgacttaaagggggtcaagcataaaccggcacacgggagcttcgcgccactgggttttaaaccaagcgcgaagaccaattgggggaaacaacgggtcccctcgga

SEQ ID NO: 5392 - DNA, 543 bp, Zea mays
  unsure (1)..(543): unsure at all n locations
  Clone ID: TF_LIB4732-095-Q1-K1-B12
ccaaacccccgctgcttgcttcccggccgaaggttcctcgtatataaaggcggcggcgtgtcgtccggtctggtgctccgtgctcctgtgagacctgatcacctggagcctggagggtgcaagggagggaggcggtcgaatccgtcatccactgagcaccgccagccccgcacgcggaggtcggagggctacgctccggagtccgaggggaaggcagaggaggcaagcaggcaggatgggtgccgctggtgacgccgcggcagcgggcacgcggtgcgagctctgcgggggcgcggcggccgtgcactgcgccgcggactcggcgttcctctgcccgcgctgcgacgccaaggtgcacggcgccaacttcctggcgtccaggcacgtgaggcgccgcctgccgcgcnggggcgccgactccggggcgtccgcgtccagcggctcctgcctggtcacggncgactccgcgcagtcgaggggcggcgccgccgccagggatagggagaagggagggagggcgccgccgcgcgcggaggcggtgct

SEQ ID NO: 5393 - DNA, 893 bp, Zea mays
  Clone ID: TF_ZmC101_2
cggacgcgtgggcggacgcgtgggcggacgcgtgggcctggagggtgcaagggagggaggcggtcggactagttctagggcggtcgaatccgccagcgcatccgctgagcaccgccagccccgcacgcggaggtcggagggctacgctccggagtccgaggggaaggcagaggaggcaagcaggcaggatgggtgccgctggtgacgccgcggcagcgggcacgcggtgcgagctctgcgggggcgcggcggccgtgcactgcgccgcggactcggcgttcctctgcccgcgctgcgacgccaaggtgcacggcgccaacttcctggcgtccaggcacgtgaggcgccgcctgccgcgcgggggcgccgactccggggcgtccgcgtccagcggctcctgcctgtccacggccgactccgtgcagtcgagggcggcgccgccgccagggagaggcagagggaggagggcgccgccgcgcgcggaggcggtgctggaggggtgggccaggaggaagggggtcgcggcggggcccgcgtgccgtcgtcgcgtcccgctccgcgtcgcgatggccgccgcgcgctggtcggaggtcagcgccggcggtggagcggaggctgcggtgctcgcagttgcggcgtggtggatgacgcgcgcggcgagagcgagacccccggcggcgggcgctccggacctggaggagggatgggccgagtgctctcctgaattcgtggtccggcagggcccacatccgtctgcaacaacatgtgggcgacgttagtttgtccttttcctccctaattattttagtaattaacgagatcgatcgtgtggtggtggtgtcgttggcttcctctcgtcgtccgattaacaaaagccggttcgatttgattac

SEQ ID NO: 5394 - DNA, 810 bp, Zea mays
  unsure (1)..(810): unsure at all n locations
  Clone ID: TF_ZmC613005_1
ccggccgggaggcttcacttctaatggctggataaagatgaactcaacagctacgctacgccctcgggaaggagagaaaagacagggaaggaatgtccagctggaggcttccgcggccagtagtgggactgggagcgaagcgcatccgcagaggatcctcggttcggttggagttggaggcccaaaagacctcccgcacccaacaaaactccagcctcacatctctccctctccctctccctcttcctctctgcggtccaaacaatctctccctctctctctctctctctctcttcttcctctctgcgctccaaacaatctcgccctctccttctctactctccaaaacaaacgaaacgaagcaagaaaccgagaaatctccctcccctgtggctgtggcggtggcggtggcggcgaggatcatgtcggcggctgcggcagcggaagtggggaaggagaagggcgccgccacccccggccccggccccggccccggtggcgcgtgcgagctgtgcggcgccgcggccagggtgtactgcggcgccgacgaggccacgctctgctggggctgcgacgcgcaggtgcacggcgccaacttcctggtggcgcgccacgcgcgctcgctgctgtgccggggctgcgcgcgccccacgccgtggngcgccgcgggcccgcgcctcgggcccaccgtctccctctgcgtccgctgcgtccgccgcggccccgngcgggccgtggcccgccgcggccacgaggacatgcgcggagcggccgaccgagacgccgacgatgccccccactaggaccacc

SEQ ID NO: 5395 - DNA, 858 bp, Zea mays
  Clone ID: TF_ZmC519810_1
tcgagggccgcttctttttccgcaagcaagccatatatacacgcattatctcttcttcttcttgtaggtagcagcgcctaccaagctcttttccatcggtgaccattccagtcgtccatcacatggatcaggacgagcgccagcatccagagccgccggccatggagaaggagctctctgccgacgcgctagcctgcgactactgcagcggcccacaggcggtcgtgtactgccgggccgacagcgccaggctctgcctgccgtgcgaccgcctcgtgcacgccgccaacgcggtctgctcccgccacctgcgcgccctgctctgcgccgcatgccgcgcaaccggggccgtcttccgccacgctggtaccgaattcctctgctccaactgcgacttcgggaggagccgggacgccgagctgccgctgcacgaccgctgcacagtccaggggtacacgggacgaccctcggcgcacgacctcgccgctcttctcggggtccccgacttcgacaagccctcggccggcaaagccgacgacggttggtgggccatctgggaggagccccaggtgttccgcctggaggatctcatcgtgcccaccacttcttgccatggcttccagcccctcgtgacgccgtcctcgcccaagatccacaactcacccgatggaaagaccaacgatgaggtcatacggcagttacgtgagctcgccgaggtcgacatgggcagcggtcagataacacctcgtgaggaggcagagcaagctgctcatcagttgccttcctggacagagtcacagcacaccactgggaaatggcgattttcgcatagataacagccacggagttgcaaccatg

SEQ ID NO: 5396 - DNA, 651 bp, Zea mays
  Clone ID: TF_LIB4829-058-R1-N1-D7
ccggccgggagtcgcttcgctgccacatctctcctcgtccaaagactccaagctcctgtgcggcctgtgttctgctgccgcctctggtccacatctccccgccgccgccccgtcgtctgccgacacctttagcgctgggaaggatcacaggggatcggcgcgaggcgggggacctgcggtttttgtcgcccggatggcggcggagcgatgacactggcgtcgggagcggcgcggcgttgggatgcggacgatctgcgatgtgtgcgggagcgcaccggcggtgctcttctgtgcggccgacgaggcagcgctttgccggccctgcgacgagaaggttaattccgctccctactccctctgacccgcggaggtcgtcgtccctctcgcagatcggacgagggtgctgtttcgattggggtggcgggcgggcacggtggtctttattacctccgtcctagttggtgcggtcggtctctgtcgtgttcccattttctccatttcgacgaatcgacgttcgacgatcctgcgtctgtttcgatctagcatggggttcgtaaccgtactagttcaaattgataagatcccgacggaggaaaatggaacattctagcatttgacagtggcaaaaaaaaaaaaaaaaaacccgcggcc

SEQ ID NO: 5397 - DNA, 2208 bp, Zea mays
  unsure (1)..(2208): unsure at all n locations
  Clone ID: TF_ZmC3_2
gttgcatcccacagtctcatgcgcatgtttacttacagaagttcatgaaaagacacgtgcacttgtaagttgtaaccaccttgaagaagctaaagtaaaacaacatgtgttttctctaattacaacacattatgttctatcattttattgtaaccttcacattttctgattttgaaaacctggtaaatgcgtcaaccatcaaactgtaaatttactaatcccagtccatgtatagtgatgccattattttgtgtcaacctaagttatgagtactgtgaacagataaatttatttgcctggtgtgtttctgcaagttgcatttgttttacttctggttgctagatgaaaacccttgtttctgcactaagggctgctgtagtgctgttgggtaggtgtaccttctgttactctacattgttgtacttatgaaggtcgaatcactgtctggatgatgagtgaactacattttacattttttagtttgttgagttatattgtccgtggacaagctgtatctggatgtggccaaccggcttcaggggctcatgcggctggcacaaggagcaaacaagcaacaaccttatcctgagttgctatcattatttgttagttagctactagatccatttggtagtattttatcatcttgctgctagtatgtggttagagagggcatgtgatcattagttggaacttggcagactagaagaatatcaatcaatattgtcctagtcccattctcctacccttacccttgtggtgtggttgccggctatcagcgatgtcatgctgctgaggttcagggccatctagaccagagtttatcacaacgatatagttcgctactgtgacacagtttgttttgtagtgtatcgaatcctcctgcaagacccttctcatgtttatccttactgcaggaggcttctggatacttcttctgcctagaggaccgtgcactactttgtagagactgtgatgttgctatacacacagtgaattcctttgtttcagtacatcagagattcctgctaactggagttcaggtgggtcttgatcctgctgatccagttccacctattgctgaaaagcacgttaatgctgctggtggatcagtaaatcaaccagtgagacatcagccaaagagaagcccgacagttcaattttcagttgaagggagtgcctctgttcctactaaaaatgtaccaaatggagattgttcaaggcagaattttgtcccaacagccagggcagaagtggttgattggactatgaataatagtacaattcggtcagtagaatctccgcctaagtacatttcagaggaaagcccgacacttctgcaatctagccagaccacaacagtcttctccaaccaaattaatggcaatagtgatggggcctaccacttgtcattctcaggtggtaatgtgacagacagcctaccagattggcccgtggatgagttcttcagtaactcagaatatggtccaaactttggcttctccgagaatggttcttctaagggtgataacgctaagctggggggcgctggtggatctccacagtgccgtttggctgaaggctcagttgctgaggaactattagggcaggtgcctggattgatcaccgatgaatatatgagccgagtacctgagaattcatggacagtgcctgaggttccctctccaccaacagcctcggggctcaactggcacgggaatttgtgtttccctgcgtatgacagcaccatgttgttcctgaaattacctcccttcagaactccgaaagtcacttcaccgtaccttccagtttcaagcgccggagaagagagtactgagaggcgacaagaagatcactagacaccactgtccggtctaggctatcttgagaaaggcttcttggtgggctaaatgacgaaagaaaatatccaggactgggtggtcattcaaacatcaactgagctatccagtagccaggttttaagtgtgttgtaatgcttcaatgtgtttcattttccaaagacctgagcttcgcttgtgatttgttccgagctgtacggtgtcgattttgtgtatataatataatataacgaaataaagggtacccagtatttcgttatattatattatatacacaaaataaagggtacccagtatgagtcaagttaccatatatacattnnntttcttatctttttgcctctctttc

SEQ ID NO: 5398 - DNA, 1637 bp, Zea mays
  Clone ID: TF_ZmC460_6
ggccgcttatttgtttttttttttcgttatttttattttttttttttttttttgttaaaaacatcagtgtctctcagactggtattagcatagcaacaaaagtggcttaatagatgttcagaattgagcgacactacagtcaaagatgcacaacacatgacactagcttgtacacagtaaaattcttctctggtacacatcaggagaagaaacaaaactcctgcgctctcttatttaaccaagatcagggactatgaggtaatcctcgtcgtcggtgacctcgatccgggccttcttgctctggcgaaccccagcgccgccgccgccggcggctttggccggcctgtagtacgccgcgtcgttcgccgcctggtatccgaaaagctccggcacctccgccaacgtcctgctggctttgggcgcctgctcgtggaagaggtcgatgtcggcgaaccactccagctccttgaacccgagcgtcggctccttgtgcagctgcaaaacacattaaacagagcaagaacgtgagacgggatccggtgggtgcacgcggacatggaccggagcttgcgctatcgtcttgccttgtcgctggactcgtagtcggagaactgcaggagctcgtcgacggcccagccctgcggcaggaactgcggcggcgagggcacctgctgcaccgcggcggagacggcggcgtgcggtggctcgatggtggccttgggcggggcgtggtggtcggagtcgtgggcgtcgcaggcgtcgctgcaggcggaagccgaggcgaggccgacgcggatgccggtggccaggtagcgctggtggttcccggagagcgtgcccgggacgtggatgggctcgtcgcagtcctggcagaagagcgcccggtcctccacgcagaagatgaacgccgctttctcctgcgaccgcgaagcaaggttagcttgcttgcgccgtacgtcgtgcgtgtagcgcatctgcgcatgccgccgccgcatgcgctggttagctaaatactagctagtgcgtgacgacgtacgtacctggcagacgtcgcagcgcgggagcttggcggagagcgcctcgagcgggaggcgctggtgcttgctcgcgagcttgttggcggcgtggatctcgacgtcgcagcgcgcgcacagcgcggcctcgtcggcgcagcacaccaccgtggcagccgcgccctcgcacgcgtcgcactggatcttcatggccgctccacttctcggtctctactcccagctcgccaacacccagccaacaacaaccagggaggcgagaacgaagaggataacgccactgatgactgtggtggaggaagaagtggacggcaagggaggggaggccgggagctatggtcatcgcaagagcgctggcaggaattttgggagctcatgagtgtccgccctcatattatgttgctatccgattttttaatttttctgtagctagtattagttgtagtatttcttttttcggacgcgtgggcgcgacggggcattgtaagtggcagagtggccttgctgccacgatccactgagatccagccccgcgtcgcacggatccgtctgccaaggattcagcacgcccccacgcgtccgcggacgcgtgggcggacgcgtggg

SEQ ID NO: 5399 - DNA, 493 bp, Zea mays
  unsure (1)..(493): unsure at all n locations
  Clone ID: TF_LIB4756-104-R1-K1-D9
ttgggtacctcgaggccggccgggccgtttttccctcctgcaaacctcacatccctccctctcctctcctctccctcttccctctctacgccccaaacaaacaaagctaaggaagaaaccgagaaatctccctcctgttgtcttggcggtgaggcaaggtccaacggtgaggatcatgtctgcggcgtgggaaggcgggaaggagaaaggcgcggccacccccgcccccgggggcgcgtgcgagctgtgcggcgccatggccagggtgtactgcggtgccgacgaggccacgctctgctggggctgcgacgcgcaggtgcacggcgccaacttcctggtggcgcgccacgcgcgcgcgctgctgtgccggggctgcgcgcgccccacttcgtggcgcgccgcgggcccgcgcctcggcccctctgcctccctctgcgaccgctgcgtccgccgcggntcgggtgccgtcggcacgggcggtgacgtggagatg

SEQ ID NO: 5400 - DNA, 1144 bp, Zea mays
  Clone ID: TF_ZmC460_13
gtgtgttttttttttttttttttttttttttttttttttttttttttttttttttttttttttttttttttttggacgaaaccgggcgacgcggggctggatctcaggggatcgggggaaaaaggccactttgccacttacaatgccccggcgggttttaaggcgtctgcaaaggattcaacaccccccccgttgggaagggagctttgagggggccccccggggggcgttggccgggcgggctgagccaatggcacgggcccttggggggcgaaccccctaacgtgggtcggggcgggcggggaacaaaggcccccgttgctagcttggattctgacttaaaggggttcaatcataatccggcacacgggagcttcgcgccactggcttttcaaccaagcgcgaagaccaattgggggagagaacgggtcctctcggggccgggcgaagtactcggaggggtcgtgggcgtcgcagggaaaactgcacgctgacgaagcggaggcgccgccgacgcggatgccggtggcgaggtagcgctggtggttcccggagagcgtgcccgggacgtggatgggctcgtcgcagtcccggcagaagagcgcccggtcctccacgcagaagatgaacgccgctttctcctggcagacgtcgcagcgcgggaggctggcggagagcgcctcgagcgggaggcgctggtgcttgctggcgaagtggcgagcttgttggcggcgtggatctcgacgtcgcagcgcgcgcacagcgcggcctcgtcagcgcagcacaccacggtggcagccgcgccctcgcacgcgtcgcactggatcttcatggccgctccacctctctgtctgcggtctatactcccaggtccagctcgctatcctgtcctgtcgtctcgcaagtcgcaacaacgagggaggcaaagacgaacaagataaggccactgactgcgatggaggaggacgagcttgcgcgcgtgagcacgcaactggagcaatcagtgagctgccgctgccgggcgagcttgtggtggaggactcgccggggagacttgtggccaggggctcccggctcgtctccccgtgtactagctacacgccggaaccacgcttggacgcgccgattttgatgtgatgtgctc

SEQ ID NO: 5401 - DNA, 883 bp, Zea mays
  unsure (1)..(883): unsure at all n locations
  Clone ID: TF_ZmC3_4
gcacgcctgcgctttgaccaccgcttcgtctgtcgtctcattcttctcccccgatccctaccggaagcccggaagcaaccgccaaccgtaccgcacccccaccaagcgcgcacctactcaaaacgcaacagcgctcgcttcctcgcagccaggtatctcacccctcgccaagtgcgcacgtactcaaaaagctctagctcacagacacgagccgtgcgggagagggagggagagagagagaaaggggaccccgatccaatcccagtcctctaaaaccctagcggggagccggggatgaggatccagtgcaacgcgtgcggggccgcggaggcgcgggtgctgtgctgcgcggacgaggccgcgctatgcgtcgcctgcgacgaggaggtgcacgccgccaacaagctcgccgggaagcaccagcgggtgcatctcctgacggactccgccaccgccgccgcctcccccgcgccggccgtgcccaagtgcgacatctgtcaggaggcttctggatacttcttctgcctagaggaccgtgcactactttgtagagactgtgatgttgctatacacacagtgaattcctttgtttcagtacatcagagattcctgctaactggagttcaggtgggtcttgatcctgctgatccagttccacccattgctgaaaagcatgttaatgcttctggtggatcagtaaagcaatcagtgagacattctgcctaggagaagcctgggagttcaattntcagttgaaggcagtgcttcttgttccgagccaaaatgtatcaaatgggagattattcaaggcagaaattctgttccaacagccanggcagaaatgngttgattgggacttagaacaatactcaattcagtcagt

SEQ ID NO: 5402 - DNA, 1293 bp, Zea mays
  Clone ID: TF_ZM3541.C1.o2.fg
atggaaattgtaaagactgatttgaggaataagatggggagtgactggctcaatcataggatggtctgcggtctgattcgattgttgatgcagaaacaagaagctaagtggaacaaatacaataattcttcatcgattagttccgccactggccccaagggcaccctcttccccatgtgcggcatgaacctcgccttcgaccgcgacctcatcggccccgccatgtacttcggcctcatgggcgacggccagcccattggacgctacgacgacatgtgggctggatggtgtgtcaaggtcatctgcgatcacctgggtttgggcgttaagacagggttgccctacatctggcacagcaaggccagcaacccgttcgtaaacctcaagaaggagtacaagggcatcttctggcaggaggacaccatccccttcttccaggccgtcgtgctgcccaaggactgcgacatcgcgctctcgcaacaggtcaaggagaagctcggcaagcagaggcggatctctgttatgggcagctggggccatggctctactcacccacagaattcttttgcaaactttgatgaagataaatcaatagaacttgctcaaatttatgttgttgatttcacccaatatgattgcattgtccttcgcaaccaacttgagatgtttgttaatgatgcaacatgttgcaatgaccttggagatcttgctataaagatggtgcagactgatagacatacaacatttcctttggtctatcgtcttgttgagttggctttgattttgccggttgctactgccacagttgaaagagctttctcagcgatgaaaattgtaaagactgatttgaggaataagatggggagtgactggctcaatcataggatgatatgctatattgaacgagacattttttcaagtattccaaatgataagattttataccagtttcaagaaatgaagtctcgtatgaaaatgttgcctaaacaacatcaggctactagtgttaatgtctgtgctaaattttttttgaatggccctggtcctgtcgtgagcaaagttccgccactgtcggcaaggtcggcccctacttcaccaagctccactaccggaatttggctctttgccgagtgccatattctttgccgagtgttttattttgggcactcgcaacaggtcaaggagaagctcggcaaggtcgacccctacttcaccaagctcgccgacgccatggtcacctggatcaaggcctgggactcgcttaacgccgccaacggcaagcccaagaagtga

SEQ ID NO: 5403 - DNA, 524 bp, Zea mays
  Clone ID: TF_LIB4730-019-R1-K1-B3
cacggccgctgcggcggagccgtagacccgtagggtactggtgctgctacgtcatgtcagccgttgggggatgcgcacgccgagccgtttcccgttttcctcactgtggctgctgctgctcctcctgagcgtcgccgacggcggcaaggagccagcggtctaccggcacgcactgcaccttgtgcgcgcgcttccagtccagcgcctggcacgcgcgggagcagtagttggccgcgccgcacacggagcaccgccggaactcgtgccgccgcgtctcgcgccgcccgcaccgcacgtgggagcacagccggagctccgcgccgtcgccgtccacgcctctatcgccggttatcttcccgcccgcctgggcgccgcagcggtcggaggcccaccaccagtccaccatgaactggttcgccgcgtggggctccgcctcggggaggctccacccgaagtcggacaggagcgggcacccgccgccgccgccgcctccgacgacgacgccgcccgcggcgtggcgcgag

SEQ ID NO: 5404 - DNA, 1242 bp, Zea mays
  unsure (1)..(1242): unsure at all n locations
  Clone ID: TF_ZmC1511_5
tctgtgcacactcctcaccagnacccaagccagctccgtcgggcgccgtggggaactgctgggaggggcggtcgaccggcggtgcctctgcttcgggttctccgtaccggcgtcggaggggatcggatggcataagctcctgaatgccactggtgtggtacctggaaaggtgataaaatatgtagtagcagcaagaaagcaaggtactgttctgagaaacatcaggcactgcattggcgtactggtcataaaaatgattgcctccagataataagttctgctgcttcaaatttagttctgccagctgtaggaatagggtttgtccgctggtttgctaaggcaagcaacgtacatagactgctcgtcttggatccttcaggtttgtatagtgtgttgctttatgatcaattgaccattcattaccttcgcctgatggcccttattaacaacaataagaactaagaatgtgcgctaagatttttcttgctatctgaagtggtaaatttgttaatcctaattctttgttgaatgggtatgggggtttntgtgggtgctggatggtgttgtgggaatgagatcctttagattgtgttttgttggacattactgtttatgtgctttgttcctacaatctgtctattagttgttgttgttggtaattgagctttacttgtcccgtggctgtcaaagggttaatgttactaaattctttcaaatgcctaaatatttgttgccagcccatgtatgccactggtgtggtacctggaaaggtgataaaatatgtagtagctgtaagaaagcaagatactgttctgagaaacatcaggcactgcattggggtactggtcataaaaatgattgcctccagataataagttcttccgctgcttcaaattcagttttgccaactgttggaaaagttcctgctaacacttcttggccagaatttgagataaaaatagactatgaaggtatatttgattccgatagtggtgatgagaataactcgaagttgttggtgatgcaaagacatgggaaacctgatgctatgatgcagtcatggatggatcaatttgaggttttgggtccattttctttcagaataacctctgttggacttctgcttatgcatcaatcattatatttatttaatgntgnctgggtaggccgattctgacaacaaatgctggacatcttttcaagagcgggtctcaagagcaccaaatcaagtgttgaggtatt

SEQ ID NO: 5405 - DNA, 963 bp, Zea mays
  unsure (1)..(963): unsure at all n locations
  Clone ID: TF_ZmC312728_1
aattcggcacgaggggctcgcagtctggttgggctcggatggtcggtgccggacgccgggcgcggaaccctaaccctaggggccggctacattagatgctggggggcggcgccggaggcggtggcgcgggcgcgggcttgggactggacctttcggcggtgatccaagcggcggtcgtcgggctcgtgctcttctccgcggccgtcgttgccgtgcgccgcgccgcctcgcgctacttcgtcgtcgacgccgcggggtttgccgcctcctacgacgatcaccaccacagctcgcccgcctccccgatgtcgtccaaggggaaccggtcggagcagggggccgccgcagcggacctcacggggccctgcgccgcgtgcggtgtcgtcacctccaagaagtgctccgggtgcaagcgcgtgcggtactgttcccaagaatgccagacaaagcattggcaaattgatcacaaattcaagtgcaaacaaatgaaatcattggatcttgccgacaagttatcctgtggaggtgaggccaacagtaagaaaacatcaggtttcggtcgcatctcattggtgcctgcctgtaaaaagataagcaagggtcaggtcctctttccttatgatgagttcttaaagttgtacaactggaaagaccttgatgttgtaccttgtgggcttatgaactgtggcaacagttgctttgctaacgtggttttacaatgtctctcatgcacgagaccacttgtggcctatctgttaggaaaggaccatagcagggaatgttctgtgaggcatgaagattggtgtttttttgtgtgagctacaatgtcatattcagagagctagtggnaagtttgcacccatttgctcctacaaacattctttctcatctgccaaatattggtggcaatctttggcgttggtaggcaagaggatgctcatgaattcatgaggtttgcaattg

SEQ ID NO: 5406 - DNA, 1823 bp, Zea mays
  Clone ID: TF_ZmC2175_1
cattgggtacctcgaggccggccgggctggttttctctgcgcggggaagaatggcgtcgtggttggagcagctgcagcgcgagctcgccgcccgcggcctcacagtcgcctccatccccggcaagggaaggggtctcatcgctacttgcaccttcttcccaggggatgtcattctcaatcaggaaccttacgcttctacacctaacaagattttagttggatcgagctgtgaccactgtttcacctctggcaacctgaggaagtgctctatgtgtcgagttatgtggtactgcagcagcaactgtcagaaagaagaatggaaactacatcagcttgagtgtagagcaatggcagcacttacagaggatagaaagaagatgcttactcctacaattcggttgatggttcggctggcactcaaaaggaaattacaaaatgagaaggtcattccatcctcaagtatagataactacaatctggttgatggcttggagtctcatatatcgaaggttgatgaaaatcaacttgtgctctatgctcagatggccaatcttgtgagcctgattcttccttttattgagcttgaccttaaggaaattgcacaaactttttctaagtttgcctgcaatgcgcataccatatgtgaccctgaacttaggcctcttgggactggactgtaccctgtcatatccattattaaccacagttgtgtaccaaatgcagttttgatatttgatggtaggacagcatatgttcgtgcattgcaaccgataaataaagatgaagaggtatctataagctacattgagactgcggcagtcaccaagaagagaaacaatgatctgaaacagtacttcttcacctgcacatgtccacgctgtgtaaagggttttgatgaggatgcactacttgaggggttcaggtgcaagaaccaagcatgtgatggctttctgctgcccaactcaggtaaaaaggcttatacatgccaaaaatgtggtgcttctagagatgtggaagagataaaaaatatgagaagcgaaatactacagttatcggataaagcatcttcatttctttcatcaggaaataaggctgaagcaggttctatctacaagataatcgaacagttagagagaaatctgtaccatgctttctcaactactttgctgcacacgtgcgaaacactattgaagatatatctggaattacaagattggtggactgcgttgacatactgtagattgacaattcctgtttatgaaagagtttatccaccttttcatccgatgattggattacaattctatacttgtggaaagcttgaatggttgcttgagttcacagaggatgcactaaaatctttaaccagagcagcagatatacttaaagtaacacatggcgtaaaatcccagttcatgaaagagctctttggcaagttagaggaagcaagagctgaagtttcgtttagactatcctccagacatggacatgatgagtaattttcataactgcaggccagttatgatggaaaataatatattgaaattatgcttctactgttgggatcatatttcaaggtacaataaaaaatgtggagactttgtaggcaaagaattagcactgttgtaaaacgattatgtgccgacacaaaataggccctaatttgttgtataaaaaatacaatttggaatttaatggtatatcatgtggtaggttgaactccaaaaaaaggtattgaacacaattttgaatttaaaagaaaaaaaaaaaaaaaaaaaaaaaaaggcgccgctcgcgatctagaactaggttctagatcgcga

SEQ ID NO: 5407 - DNA, 719 bp, Zea mays
  Clone ID: TF_ZmC56_1
ggtggcgtacgcccacgtggtcggcaaccccgggtgcctcaccagcgagctcggctgcttcaccaccgtgccggccagcctgcgggggtgggcgcacccggccaaccggttcctgtgcgactggttctcggcgaacccgctgccgttcccgccgcggcgcctgctgctcatgtgctccatgcccacctgcggccgcccggagacgcggggcctcgagtaccgccgctgccccgtctgcggcatcgcgcgctactgctcccgctcctgccagtcgctgcactggaggatgggccacacgcgggagtgcgtccccacgcaccagtggctcatggaagccattgccaaccacgccgtcgtcaatgccgacgacggcgccaatgctgctgctatgcccgctgtcaacaataatagcgccactcaccacaacaatctcggtggtgctgctgctgatgctcctgctcctaagtagacatgcgtcgacgagccggcccgctagctattcaccagcgctagctactacacctctcctatcctatgttctcagttaactttctgtcagacagtagttttgttttccttcgtgtaatcgcctagatatatatatttccatttctaaaatatatacctgtgagttttctatatatgctactagttttagtttattatgcttggaaaaaaaaaaaaaaaaaaaaaaaaaaaaaaaaaaaaaaaaaaaaaaa

SEQ ID NO: 5408 - DNA, 603 bp, Zea mays
  Clone ID: TF_ZmC1168988_1
cgtttcggcgatggagtgcgcggcgaagggactggccgcggagccgtgcgccggcggcgtcgccgatcggcggtgcggcggctgcggagccgtcgcctactgctcccgcgtccaccagattatacattggagggttcacaaagaagaatgtgaaaggtttgcagaacaaatgaggcacatcgatgcgctgagccagtttccgttcacattcttggaacctcctgctctgaaccatgaattcccaagtgcaaggtgcttatttttgcaatcaatcaaacttcaccaaaaaggactctggaaatctgaatgtatatgtggccgagatgttgctcctttgaagggcttaagcgtagaagctgaatggaacttgcaaagctccctctgcccttgtgcagagcctaaaaatcctgtgtcttcagccctggcaagctgggaagcatattatcagtggagatcccttcccctgcattcacctgttgctgttttacttcattggccacttactctatatcattgtgttcaactctgtcggacccaaactccaagatatgatgggcaggacaccctatgcattcactatttaaggcctgagaaggagctact

SEQ ID NO: 5409 - DNA, 498 bp, Zea mays
  unsure (1)..(498): unsure at all n locations
  Clone ID: TF_LIB4756-044-Q1-K1-D6
cattgggtacctcgatgccggccggggcacgaggtcaataggaggtccgtgtgcggcgcggtttctactgctcccgcgcgtgccaggcgctggactggaagcgcgcgcacaaggcgcagtgcgtagcccatggaccgctggctcctcgccggcgttgccgttggcggcggcgtcgaggcgcagcagcaccagcagtgagcgaggaaacggctcggcggctgacatgacgtaccagcaccgagtcccctacaggcccacggctccgctgcgtggaccgggcgtagcggaaagcggcgcaaggaggggaaggcgtttcggctgttttctctttctttttgcctctttttcacctgctgatgaattgaatgaggtgtatctcgctggcgctgcctgccgttcagatgcgcattttctactaagtagcaccagggaagcaaagagccaaagagcagtggagatccangatgncgcgcgcctctccttttctcttatgttctt

SEQ ID NO: 5410 - DNA, 799 bp, Zea mays
  Clone ID: TF_ZmC1511_10
tgttagagcggttcttggccagtcgtacgatagcgcgagctcgatggccaggcgtaggacacacgtcacaccgggtggcaactggcagggcaatgcccgatcaggtctccgtcgtcgattcgtctgaacagctatcctcatcatattttaatgcctcgtgcataatacggagtacatatctatatttacgtcagcgttattgcaacgccctctctctgtggtctcttcttctacatactataatagtagtacattagtactaacaatgtggttggccatggcatgcttgcttcgagatcaacatgaacaatggaagcacaagtacgagaatccatgtagaagcgtgaagattttccggtgccaattgccacagaataatgccttctactcagctcaacctccaaagcatgatggctctgacaaaccactctgtccaggagctcctgtatgccactggtgtggtacctggaaaggtgataaaatatgtagtagctgcaagaaagcaaggtactgttatgagaaacatcatgcattgcattggcgtactggtcataaaaatgattgcctccagataataagttcttctgcttcaaattcagttctgccagctgtaggaatagggtttgtccgctggtttgctaaggcaagcaacgtacatagactgcacgtcttggatccttcatgtttatatagtgtgttgttttatgatcaattgaccattcattacctccgcctgatggcccttattaacaacaaaatggaattgagggtatccatggagatgcatgtagctgaactc

SEQ ID NO: 5411 - DNA, 919 bp, Zea mays
  Clone ID: TF_ZmC1511_9
aaacccccacgcgtccgctgttttgtcgccacaacactcccgccgaccccctcgccgccgccgggaatggagaccagcactaagaagcttagcagccttcgtatcacctccctggatgacgatgacgaagagaccgagatcccgcaccagccccctcaagcaggcctctcccccgctggagcggattatgaggacgacgacgatgaggaggaagaagccgaagtgactcttggtgtccttagcaaaccgaagcacccaggcttcctcctccgccacttgttccccagcaaggccggcggcatcccggcgtggctagacccggtgaacttgccgtcgggaaagtccagctactgtggtttctgtggcgagcctctgcagttcgtcctccagatttatgcaccaattgaagataatgtagcagccttccaccgaacgctgttcatgttcatgtgcccatccatggcatgcttgcttcgagatcaacatgaacaatggaagcacaagtacgggaatccatgtagaaggtgatgaaaatcttgtatctgtaatggtttttgttcagatatcttctgattttgatggtttgcagtggattgttttccagcgtgaagattttccggtgccaattgccacggaataatgccttctactcagctcaacctccaaagcatgatggctctgacaaaccactctgtccaggagctcctgtatgccactggtgtggtacctggaaaggtgataaaatatgtagtagctgcaagaaagcaaggtactgttatgagaaacatcaggcactgcattggcgtactggtcataaaaatgattgcctccagataataagttctgttgcttcaaattcagttctgccagctgtaggaatagggatttgtttggcttccaaatggttttgttatcctaa

SEQ ID NO: 5412 - DNA, 612 bp, Zea mays
  unsure (1)..(612): unsure at all n locations
  Clone ID: TF_LIB4073-003-Q1-K1-E9
cggacgcgtgggttttttttgaaacctcaactccaaagctccattacaaaatggcttggaaattggaattctactagtactccgcttctagcttttagaaataccagaagattacaaaaacaaaagaggatctctactgctttttcctagtagaatacgtacatctgacaaagacgacacccgggcccaaacggcagcgagaaacctcattcaattcatcagctggtgcggtggaaagagagaaaaaaacagccgtgaaacgccttcctcctcctgcgcgccttttcgctacgcccggtctacggtgggccgaccggcacggccgctgcggcggagccgtggtccggccccggtttaggggagtgctggtacgtcatgtcagccgttgggagaaacggcgtttcctcactgctgcggttgcgggacctcgccgccgccgccaacgccggcgaggagccaccggtccatgggcacgcactgcgccttgtgcgcgcgcttccagtccagtgcctggcacgcgcgggagcagtagttggccgcgccgcacacggagcaccgncggaactcgtggcgccgngtctcgcgccgnccgcaccgtacgtgggagcacag

SEQ ID NO: 5413 - DNA, 1142 bp, Zea mays
  Clone ID: TF_ZmC18797_1
gggtcacgtttacgcgcttcgcgagctgggccactgcctccaggacggctacggcgtgcggcggtgaccccgctgaaggccgccgcctcctggtcgccgcgaacgcccgcgagctcaccctcgcactctccgcggcgaccgcctcgcgccacgccgtcaccgcgctacccttcgccgcggctgctgctgctggcgtcgtcgtcggtggcggcggcggcggcgggtgccccctcctgtccgacttcgggtggagcctccccgaggcggagccccacgcggcgaaccagttcatggtggactggtgggcctcccgctgcgccgcccaggcgggcggtaagaagcgcggcgacggcagcggcgtggacggcgacggagatggcgcggagctccgtctttgctcccacgtgcggtgcgggcggcgcgagacgcggcggcacgagttccggcggtgctccgtgtgcggcgcggccaactactgctcccgcgcgtgccaggcgctggactggaagcgcgcgcacaaggcgcagtgcgtgcccatggaccggtggctcctcgccggcgttgccgttggcggcggcgtcgaggcgcagcaccatcagcagtgaggaaacggctcggcgggcgcatcccgcagcggctgacatgacgtaccagcaccgagtcccctacaggcccacggctccgctgcgtggaccgggcgtagcggaaagcggcgcaggaggggagaaggcgtttcggctgttttcttttctttttgcctctttttcacctgctgatgaattgaatgaggtgtatctcgctggcgctggctgccgttcagatgcgcattttctactaggtagtactccctccttttctttttatttgtcgttggacagtgtaattttgcactatccagtgacaaataaaaagaaacggagggagtaccagggaagcaaagagccaaaaagcagtggagatccaccagccgcgcgcctctccttttattttattttcttgtaatgttctggcatttccaagctaggaagcgtagaattccaatttccaagccgttttgtaatggagctttggagctgagggttttcaaaaaaaaaaaaaaaaaaaaaaaccctccagggcggccactcgcgatctagaacaag

SEQ ID NO: 5414 - DNA, 609 bp, Zea mays
  unsure (1)..(609): unsure at all n locations
  Clone ID: TF_LIB3596-053-Q6-K6-D7
cacaatttcttcgtcccgattcctccgccgacgcccacgctgcggacaaatcagccgccgtcgccctctcgggatcgctggctcccctgcctctgtgcacactcctcaccaggacccaagccagctccgtcgggcgccgtggggaactgctgggaggggcggtcgaccggcggtgcctctgcttcgggttctccgtaccggcgtcggaggggatcggatggcataagctcctgaatgccactggtgtggtacctggaaaggtgataaaatatgtagtagcagcaagaaagcaaggtactgttctgagaaacatcaggcactgcattggcgtactggtcataaaaatgattgcctccagataataagttctgctgcttcaaatttagttctgccagctgtaggaatagggtttgtccgctggtttgctaaggcaagcaacgtacatagactgctcgtcttggatccttcagaaatgaaattgagggtatccatggagatgcatgtagctgaactcagtcaagtttcttccattantgtgtgtgtgcacgcttatttggcatcgtgttcttccttttatggggaatataaaagctatggggaactatgtat

SEQ ID NO: 5415 - DNA, 1660 bp, Zea mays
  Clone ID: TF_ZmC1511_2
gtttgtgtaccgcaacacccccgccgactccctcgccgccgccaggaatgtagtccagcgctaagaagcttatcagcctccgtatcacctcacttgatgacgaaaccgaggaaaccgaggacccgcatcagccccctccagcaggaccctccgccgctgcagcagattctgatgacgacgatgaagaggaagaagtggaagtgactctcggtgtccttagcaaaccgaaacacccaggcctccttctccgccacttgttccccagcaaggccggcggcatcccggcgtggctagaccccgtgaacttgccgtcggagaagtccagctgctgcggtttttgtggcgagcctttgcagttcgttcttcagatttatgcagcagttgaagacaatgtagcagccttccatcgaactctgttcatgttcatgtgcccatccatggcgtgcttgcttcgagatcaacatgaacaatggaagcacaagcatgggaatccatgtagaagcgtgaaggttttccggtgtcaattgccacggactaatgccttctactcagttcaacctccaaagcatgaccggtctgacaaaccactgtgtccaggagcccatgtatgccactggtgtggtacctggaaaggtgataaaatatgtagtagctgtaagaaagcaagatactgttctgagaaacatcaggcactgcattggcgtactggtcataaaaatgattgcctccagataataagttcttccgctgcttcaaattcagttttgccaactgttggaaaagttcctgctaacacttcttggccagaatttgagataaaaatagactatgaaggtagatttgattgcgatagtggtgatgagaataactcgaagttgttggtgatgcaaagacatgggaaacctgatgctatgatgcagtcatggatggatcaatttgaggctgattctgacaacaaatgctgggcatcttttcaagagcgggtctcaagagcaccaaatcaagtgttgaggtattgtcgagaaccaaatgctaaacctctctgggcgttatcttctgggtgtccatcaaatgctgatatcccatcatgtagctactgtaaaggtccattatgctatgaatttcaggtaatgccacaattgctatatttctttggtgtgggaaatcaaccagactcccttgactgggcaacaattgctgtctacacgtgtcaaggggcatgtgaccaaagtgttagctacaaagaggagtttgcttgggttcaattgtaccctacaacaactacgaggcaataataatgtttgcctattccttgctgtccaatgctgcaggtgtcaaaaagtttgcagaaagtcagaaacaattcagtaaatacccccaccagaagaattggaggttgggatgctcgaggcagtgagtagtgagagcttcttgattcccattattgcacttatgccgagtatagatattttaagtttcacttgttctacattttaggtgcctgattttttttttgttcaggcaataggcaatgttgttattgtttgaatataaaaaaaacatgaattgtctcttgtgagttatctttttaattgtactagttggttgtataagattgttgcatgctcaaaacgcaggcacttgaaatatagtaactctc

SEQ ID NO: 5416 - DNA, 1857 bp, Zea mays
  Clone ID: TF_ZmC1511_3
gttctattttgtagctcaaagctcaaaggtgaggctagggtttctttgcgccaaaccagcgaggcagcgactgctttgtcgccacaacactcccgccgaccccctcgccgccgccgggaatggagaccagcactaagaagcttagcagccttcgtatcacctccctggatgacgatgacgaagagaccgagatcccgcaccagccccctcaagcaggcctctcccccgctggagcggattatgaggacgacgacgatgaggaggaagaagccgaagtgactcttggtgtccttagcaaaccgaagcacccaggcttcctcctccgccacttgttccccagcaaggccggcggcatcccggcgtggctagacccggtgaacttgccgtcgggaaagtccagctactgtggtttctgtggcgagcctctgcagttcgtcctccagatttatgcaccaattgaagataatgtagcagccttccaccgaacgctgttcatgttcatgtgcccatccatggcatgcttgcttcgagatcaacatgaacaatggaagcacaagtacgggaatccatgtagaagcgtgaagattttccggtgccaattgccacggaataatgccttctactcagctcaacctccaaagcatgatggctctgacaaaccactctgtccaggagctcctgtatgccactggtgtggtacctggaaaggtgataaaatatgtagtagctgcaagaaagcaaggtactgttctgagaaacatcaggcactgcattggcgtactggtcataaaaatgattgcctccagataataagttctgctgcttcaaattcagttctgccagctgtaggaatagttcctgctagcatttcttggccagaatttgagataaaaatagactacgaaggtacttttgattctgatagtggtgatgaaaataactcaaagtcattggtgatgcaaagacatgggaaacctgatgctatgatgcagtcgtggatggaccatttccaggctgatgctgacaacaaatgctgggcgtcttttcaagagcgggtctcaagagcaccaaatcaagtgttgaggtattgtcgagaaccaaatgctaaacctctctgggccttatctttcggatgcccgtcagatgctgatatcccatcatgtagctactgtagaggtccattatgctatgaatttcaggtaatgccacaattgctttatttctcttggtgttggaatcaaccagactcgcttgattgggcaacaattgttgtctacacatgtcaagggtcatgtgaccaaactgttagctacaaagaggaatttgcttgggttcagttgtaccctacaacaaccacgaggcagtaataatgtttacctattcctcggagtaactactgtccaattctgcaggaatcataggcaagtgcataccaccacctttgggcactagaattttgagatatgctgtggcttcaatgtttccactttccaagtctattgctcgtgcagggagttaagcatcttccgaccgtggcccaatgcttggtgctcgttacagtgcctttgatccatttaggcactacccttgggcccacgtagacgtgatggcaaatagttgcatacttccattttgtggtggccaccattttcggtttaattgtcatcatcacatcattaaaaagctttgttgttttttgttatctaaaaggatcattggtctcagaaggtgctcgcattcatgtaaacatttccttcatcggctaaagttttgatgttggttttgattttaaatggaacattattatgttaatattccagtggtgttttcaccccacgagcgcgctcctgggacttt

SEQ ID NO: 5417 - DNA, 1178 bp, Zea mays
  Clone ID: TF_ZmC25699_1
ctcctttgtggcaaccattattgtacaaaatcttgccatgtgttagaagtcccattgaatcatcctgaaggagatcgtacaacatctatcagtaaagtgaacgcacttgctatgccttgtgaacaatgcaatcttccttgtcaaagggttagggagcctccttgttcacatccttgccctttgccatgtcatctgaacgattgtccttcttgtaaagtccttgttaaaagaccatgccattgtggtgctatggtgcatgcttttgaatgtgtgttttataacatcttaaatgcaaaggatcagattaaaataagatcttgtggtggcccatgtcatagaaagctaccaaattgcccccatctgtgttcagaagtatgtcaccctggtgtatgcccatcggttgatcagtgcatgaaaaaggtcaacacccgttgtgcatgcagcactctgaaacaagagtggcgatgtcaagatgtcctcaaggaataccgtaagtctggccgggatccaaaagaagtacctaaaagtcagtttggagttggcttacttgcctgcggtgaagattgcaagaagaagctgaaggctccagattcagagttgcatctccggaaaagtcaggagaacaagatccctgctgtggaagtcgtaaatgcacccaaacgcaggaagcggcgtgaccgtggacaagaagttaaaatttcgaaattccaggaagtgaagacttttgtgctgagagcgctactgattattttgctgtcaataatcgttgctgctggtctgtacctgttgtggaaaggtattttctggctttctgactggatgaatgaaatggaagagcagagggcgagtcaaaggtatccgaggggtgcaatgttgtaaaaaaaaagagataaaacaattactttgagcctaataatcggtattgacatgtggattaattaatggttgttagggattcagttttgcaggatcataaacatgtcaccgttttctcactttttgtcactataaactagaaattgtatgcgtaatgtattgttgtattttcattttgctactctgcattgttaagtgaacaaacgatacaattactacatgattcatcgcttatatctgttgcgggcaacggggtaaaaaaaaaaaaaaaaaaaaaaaagaaaaaaaaaaaagggcgaccg

SEQ ID NO: 5418 - DNA, 870 bp, Zea mays
  unsure (1)..(870): unsure at all n locations
  Clone ID: TF_ZmC521910_1
tgggtgcctgcaggccgggcagtcctcacagatcgcgcgcgcaccagcaccaccactgccgtctccggcgacgaccacgccgccggccatgccgtcctcctacgctgccgctgcagccggatcctcttcccgcaagccgaatcgcacctccagcgctgccgcacccactcttcgcccaccagcaccctcaccgtcgccggcacccgctcccctggcggtgaaccctagcgtcatctctgattccgacccctcctcctactcatcttcctctgcggatgaggccgatttcgccgcctccgactccgcaactgcctctgttgtctctgcctacctctcggttgctggcgagggggccgacctctcgaaagttggcattttcctctcatccgccgcgcgccgccgatcgccgccgtgccttatctgcttcgatcctatacgcccctctgacccggtgtggtcatgctcttcatcctgctttgccatcctccacctcccctgcatccagtcatgggcgcaccagtcagcatccgggcccgccgtgccgtgcccaacctggggatgccccaagtgccgcttcgcctaccccaagtccgagatcccctcctcctacgtctgcttctgctccaagaccatagacccggctccggacccctggatcctcccccactcttgtggcgacgtctgtggccgccgtcttgatgcgaatctcgactccggctgtgagcatacctgcctgctgctgtgccacccagggccatgcccgccatgccccggncgttgtccctaaagcgacgtgcttctgtggagcgcaccggnagccccgacgatgcgcacatcagcggtactctttgtgnnggaaatgcacaaacg

SEQ ID NO: 5419 - DNA, 794 bp, Zea mays
  unsure (1)..(794): unsure at all n locations
  Clone ID: TF_LIB4757-062-Q1-K1-H6
ccggccgggtgtgctctgaaaggattttccagtgcaagagggagtgtggtgggatgctagattgcgggaagcataagtgtgagagggggtgccatgggggaaagtgtggggaatgcccactccgaggtcgacgcacttgcccgtgtgggaagaaaaattatccaaggttggagtgtgatgcagaggctgccacatgcggatcaacttgtgagaaggtgcttgggtgtggacgacacaggtgccctgagcgctgccatcgtggtccatgtgatgggacttgccgtcttgtggttactaaggcctgccgttgcggggggttgaagaaggaggtgccctgctaccaagaattgacgtgtgaaagaaaatgtcaacgtttgcgaaactgtggtcgccatgcttgtaaacgacgttgctgtgctggagattgcccaccctgctctgagacttgtgataagaaactcagatgtggcaaccataaatgtctctcaccatgccacagaggcgcttgttcaccttgtcctctgatgaagaccatttcttgcgcctgtggaaaaacatgttttgaggttccttgtgggactgagaagaatcagaaaccacccaaatgctcaaagaaatgcaatatacctcgcctttgccgacacaagcttgaatgccggccccacaaatgccactatggagcctgcccaccttgcaagctgatctgcggngaaagatttccatgtgngcacacgtgtaaagaaaggtgtcatggccctatttctcctccaactccgagntcacactgaaaccga

SEQ ID NO: 5420 - DNA, 2814 bp, Zea mays
  unsure (1)..(2814): unsure at all n locations
  Clone ID: TF_ZmC9977_1
accggtccaagaactcccggggcatttgctcncgatcgaccttgcccctgcgggnaagnagatcatcgggcggcggtgtgcggaccggagcacgcctgttacctgtggccgcccttgtgaacagctgctgccttgcaaaaggcatcgctgcgagaaggtttcccacgcgtccgctggttcttgcggggattgcgctgttctcatctctgtgtgttgcttctgccggaataagaatgagacattgctatgtggagacttgatggtaaagggggagctgtctgaggaggacggggtgttttcttgcaatgaggtatgtggccgcacgctcgcctgtggcaaccatgcttgcaaggatatgtgccacccagggccttgtggggagtgtgagctcatgccgaggaaggtcagtacatgtcattgcggcaagaccaggctgcaggagaggagggcgagctgcttggacgcaatccccacctgcgataagatatgcgataagaaactgccatgtggggtgcacaagtgcaaggtcaattgccatgagggagaatgcccaccttgtttggtgctcgttgagcagaagtgccgttgtggctcatcaggtcagatggtggagtgtcacaagttctcaatggaagagtttcgctgcaagaagccttgtggtctcaagaagaactgtgggagacatcggtgcagtgagatctgttgtccactgtctaggaaagttgcacaccttgaaggtggcaactgggatcctcatctctgccagatatcatgtggcaagaagctccgatgtgggcagcatgcatgccagctactctgccacagtggtcattgcccaccctgcttggagactatattcactgatctcacgtgtgcctgtggcagaacttctctcctgccacctctgccttgtggaacaccaacaccatcttgtccacatcagtgctcagttccccagccttgtggacatcttgcctcacattcatgccattttggggactgttcgccttgtatcgtgccagtaatgagagaatgcattgggggacatgtgatgctgaggaatatcccttgcggatcgaaggatatcaggtgcacccaaccatgtgggaagaatcgccaatgtggaatccatgcttgcaacaggccttgccatcctcccccttgtgatcagacacctgcaaatggcgatgctagctcaagctctggtggcaaggcttcttgtggacaggtatgtggcgccgtgaggagagaatgcaagcatacatgcactgcctcatgccacccatcgtccccatgcccagatttgagatgtgaattttctgtgcctattacctgttcttgtggccgaatcactgcaactgttccctgtggtgctggtggatcctccatgggtgataatatgtttgaagtctccatcatacagaagctgccaatgcctcttcagtcagtggaatcaaatgggagggtacctcttgggcagaggaagctttcttgtgatgaggagtgtgcaaagatggagaaaaagagggttcttgctgaagcatttgacatcactccacccaatttggatgcattgcattttggtgagaattcaagttcatcggatttggtttctgacttgttccggcgtgaaccaaagtgggtgctggccatagaagagaggtgtaagttccttgtacttggcaaggtgagaggcagttcttcaagcaatctgaaactgcatgtcttttgccccatgatgaaggacaagagagatgctatcagtctaattgcaggccggtggaagctttctgttcagtcggcttgtcgggagcctaggtgctttgttaccatccatgtcacatccaaatcaaaaccgcctgctcgcatcctgggatccaaggctggtgtacctgttacagctgcccatccttactttgatccacttgttgacatggatccgaggctggtcgtcgccatgcttgacctgccacgggatgctgatgtcaatgctctagtcctaaggtttggtggtgaatgtgagttggtctggctgaatgacaagaatgccatagctgtattcaatgatccagctagagcagcaacagcactgaggcggctggattatgggtctgcttaccagggcgctgcgatgtttatgccaagcagcgctcaggcatcttcttcaggcaatgtttggattggagagcagaaggatggggggttcgccgctaggaacaatccgtggaagaagcctgcttctgctgctgagcctgatccgccctctggagactggactggtgttgctggccatgctccagcaccaggacggagaggcgtcaacaccgcctctcaagtcatggggactacaaaccgatggaatgttctggaatcagacgctgctgcaagctctggtccaggcgacgagcggaagcctgctcagcgcatggatactgcatacagcgcaataccaaatgttgggaatgctgggccatcgatgaccaagctgcagcctgacgcagaggtggaccactgggaagaagcttgtgaatgaggtagcaagtagcatcgggaagttgggtccagattttttttttgggttcttaaatctggttataggtcgctctgcttagctggtataccgagcctctatgttctagcacattttaaattagtttggtgatttcctggtggactgttgggtcagtgtcagaagtgtttgattttgttacgcaggccaatgagccggcaaatgaatatctgtaaggctgctgattattttagcaggtcttcttttgagttcagaaggtattaccatatgtttttaggtttttc

SEQ ID NO: 5421 - DNA, 887 bp, Zea mays
  unsure (1)..(887): unsure at all n locations
  Clone ID: TF_LIB4746-096-R1-K1-A6
cattgggtacctcgaggccggccgggaagcttagtcacacctcttcctccccacacttgcttcgacacaagcatggataactcaaagctcaggctgcgcgaagaccgtcagcaccagacttctgcaagcgatcaagacagagtctcgaactggctgagggatgcaagtcttcaagagcacgacgacgtgagcgagatcggcgacagcgcgcctcgagagccagccacgccgccaccgggacgctcgcttttggtacagtattgcgaggaagtatcacccaccaacaccaactttacaagtgactgggcttcggtcttcgatgaaccagatactcagtgcgacgcgtggatcgaagaccccttcggcaacgatgttccagatgccagccctacgcatgaagagctccataattcacaaaccaaggtcatgcgaagcagcgcgaggtcagacttgacagttctcaataccggtcgttcggttgccgccagctatgactcgaccgaagtcgcagagaccctgggtgaagaaggtgcaaacatcttagcggaggcagctacggcacccatcgacccgaacaaaccgcgcatcacacaaatcaattcgtgcacacaatgcacagtggctgatttgaaatgctccagaagcgtgcccagctgttcgcgctgcaaccgcaaaggtcagggcagtctgtgtctccttcagcgtgcaaggtataggggggaacttgactcagacctgccctgctcatcaacggttctactanagctgaaagatgacgacgagtcgatctggcagcagaaggtgaatttgagcaaagagcttgaagacttgtggcgtgctcaagaggatagaaaagactgggtcttggcttcgcttgatgttccgcg

SEQ ID NO: 5422 - DNA, 818 bp, Zea mays
  unsure (1)..(818): unsure at all n locations
  Clone ID: TF_LIB4757-011-Q1-K1-G6
ccggccgggacactgcggcctaaaccgacccgtaaccgacgctatggaagacgacgacatggatgagtcgcccgatcggggcatgtctaagcgcgcatgcgatagctgtcgcacgcgtaagatacgctgtgaccgtgccgtaccttgctctaactgcaaggcaagcaaactagcttgcaaaacgactgctccccaacagaaagctcaacgccaaagagtccacatttctgagcaatatgaaaggaagattgaccgaatagaagatcgattagcaggaatcgagaatgttcttgctaacctttcgtcaaaactcggcaatatggatcttgccaaagacagccccgaaacaggcagtcagtcacgttcgagtcgagtaggaagaagtccaggtagtggcttacaggaagcccctacaccggcgccattcgagggcgaaagctcaatcagcattcaatccgtctatgctcgtgagatgctagctcaggtaattgacagcacaccgtcaattggccagaatgaagaagtcaagatggcacttactgctctttccgagatggtatcgcaaccaagccagactatggctccaagcaaccgattgatcaatcgctcccttgccgaagtggatcccactagacttgagcagcctccatgnggtggaggtctgcaatgcgttggacacagctatgaagtattcaacaatgacatttgcccgtgatcttttccgttcctcaagatgccaaacctgagggaaattttcgatgacgcgtaccacaaccctggcacctgtagcgctgcccgacgcgtgcttacctatggca

SEQ ID NO: 5423 - DNA, 614 bp, Zea mays
  Clone ID: TF_LIB4829-017-R1-N1-F9
ccggccgggagactcttaccttcgttatcctactttcgccatatcaaatcatcattcttcatttcaattgtttaatttctcgctatttcaatcattgaagcgagaaacggtgacggtcatgtctctcaccgcgcgtgaacgccgcaacccgccaactcggcggaaatcctgcgccgcctgtacaaaggccaagcggcgttgtgactttgccataccagcatgtcttcgatgttcacaaagacgtatccactgccagtacccgagccgagtgatgagagagcagttttcttcatcagaagcatcagtggccgtgtctcctgactatcttaccactgatgactcgtctcctcaactggcagagagtcttccaagcgatacaccaataattgaagatttcaatgcagtcatttcgggacttgatgcatgctctgaagatcttggggtattggaatttccattggaagacaataccttgaaatttgttgaacagccatggacattgactgcgccttcaacacaagacttttcgcatgttccacaacgcattttgaaccgtcttcaatgggcgacagatgaaataaagcgagctcccgaaaaaatggttctttgagaac

SEQ ID NO: 5424 - DNA, 3666 bp, Zea mays
  unsure (1)..(3666): unsure at all n locations
  Clone ID: TF_ZmC9324_1
gataaaaccatggtanttggagaatactatagtattttttccaagagatgtttggatatcttgtaaaaaaaactctgttttgaataccatagtttagtagttacaattataattttttggagtatttaaaactccactacaacctaaagtttttgtctatgagactgactagcttcttgcacatgtatactaaataccatagtttgagatattttgtctccaaacaagtattatttggtgtgatgtaaaaaatactatggttgtgccataatattttaaaaccatagtattctaaaaccatggtttgaaatactttgcttccaaacatgtcctaagccttgctagttgctacactagtaccgcgtgtattttttccctgattgaccagctcaccagcatgagagtaaatatttttgatgttctgtgttacgtattccctcaatcctgctaaaggtgtttgtgataaattgcattgccccttatccattttcagttgactctctttttctatatattggctatcttgcggacaacgaacagcagaggtaggagagtaaggagaggaggaagagcactgccagtgctaggggcagtcggcaggcgcggcgcgttcccctcagtccccttccccggctggtcttgccgggagtaaggggaacgaagccaccggagcggcatggagcccaagccgtcttcggcggcgcatgctgacgcgccagcggtcgaggccccccgccgccgtggcggcggcggcaagcgcaagtcggccgggtcctcgttcacgccgtcgaagcgtcaggccaaggagcggaacgcttccttccacgtgcccccgcatcttctgcacagcgggccgcccacccgcgccgcgcgccagtcgccgcacaagctctcgggcacgccgtcggagtcggtgccagcgtcgtcggcggccgcaactggggacggggtgagcggcgggcaggcggtggttgatgcgatccggcccgagacagaggaaacgccggccccggagctgccgctggtagacgagatgttcgaggccgtccgatcccgtggcgctggcgtccatgtggtccctacctttgctggatggttttcgtggaaagaaatccacccagttgagaagcagaccttgccttctttttttaatggaaaatctgagaagcggacacctgaggtatatttggcggttagaaattcgatcatgatgaaatttcatgccaatcctcaattgcatctggagtccaaagacctggctgagttgtcaatcggggagaccgatgctcggcaggaaatcttggaattcttggatcactggggcttgataaatttccaccctttcccaccagatggacatgaggagagtaagccagaggagacccaagacaattctaatgacgagaaagcttctttgatcgagcaactgtttaagtttgaatcagttcaatcatatatgacgcctttaccaatgaaagaagatgtgagagctccgcctcctctgcctagcttgattcctgaatctgtactcattcaagatgtggttgcagcagctgagccttctgttgagtaccactgcaattcctgttcagttgattgctcacggaagcgctatcattgtcggacccaggcagattttgacctctgttgtgattgctataatgaagggaaatttgatccaggcatggccaaaaccgatttcatcctcatggattctgcaggagtttcaggtgctagtggtactagttggacagatgaggaaacattacttaagagatcaatgagaaagaaggtaagtctttatctgtggaaaagaaaaacaattcatccatgtcacaacatgaccaccaagaatcaggcattaagagcgtctcaagtgatgattgctccttagtggagccaaaaaccaataatgctaaggagtcaggtgattcaactgctattggggacaagagtgcaaccgaaactacaaaagaaaatggaagttgaagataaagtggaaggaagaggtactgtggatgaaaaggcctgacagaaaacagagggaaactgtgaagaaacaaaaactgaaaatgccagtgttgttgtaaataaagatactcagaattcagatggcagagattcaggtgcatctccaagcactgaagagccaaagcaatcttctgatgagcaacctgtagtaaaggaaaattctgcagatgtagatacttctggtgaaaaactatcaaatgttgctattgatatcttaaaatgtgcatttgaggctgctggtcacagcccagaatatgaaggttcatttgcggatgcaggaaatccagttatggcactagcagcgtatttagctggtcttgtggaagatgataacaccaccacttcattccgtagttcactaaaatctgtatctgatgtgtctcctgcactccaattatcaagtaggcactgttttattcttgaggatccaccagatgaactcaaagacatttgtgctagtgtaagtaagaaaaatagagatgctgatcaaaaacaagatgaggatatgattcaaaattcaattgatactgagaaaaaagagatcaatgagaaagaaggtaagtctttatctgtggaaaagaaaaacaattcatccatgtcacaacatgaccaccaagaatcaggcattaagagcgtctcaagtgatgattgctccttagtggagccaaaaaccaataatgctaaggagtcaggtgattcaactgctattggggacaagagtgcaaccgaaactacaaaaggtaatactgaacaagtgaatgacttgccaagtgttgaggtggaggctcctgatgattcatcttcaaaaggtaaggatgagctcaataagactaaagatgcagtggcgacaccagctaccgtacaggaacagaaacacagccaaacattgggaaatggggatagggaagaacctaacaacattgaaagtgtagttgtcgatgaagagaagggctctgtagtgactgccaaccgacctgattccatagctaggctcaaaagagcagcagctactgctgtttcagcagctgctgtgaaagctaggtttctcggtgatcaggaggaatatcaaattcgaaggctgacagcacttgtaatcgaaaagctgttccaaaaaatagaagtgaagatgtcgttgttttcagagattgagcaggtggtctttcgaacgagagagtacaccgagaagaccagaaagaagctcctgaaggaacgaaatgcgattattgcagctcggatgggcgcattgccgtctaggccaaaccagccaggtgtagccggaaacaggttaccacctgggtatggcaaccctcctgtaaggcctccaaacgcaatgcctcggcccaccagctgaggaaattccggattccggacacccagtgatctataccccattcttttagaagcataccccaaagactcaaacctgccagcttgttgtagcattttttagaaagtacattgtacaattgtctgtataactgcttctatgaaaattcaccaaacctccacaactgttttaaacattccatcagataggaaaattacatttctctacaaaaaaaaaaaaaaaaaaaaaaaaaaaaaaaaaaaaaaaagaaaaaaaaaaaaaaaaaaaaaaaaaaaaaacacccgaag

SEQ ID NO: 5425 - DNA, 690 bp, Zea mays
  unsure (1)..(690): unsure at all n locations
  Clone ID: TF_ZmC50613_4
gcgtccgcccacgcgtccggctcgaaatgcatggggagtccgaccctaccatggnatggggacacggaattcttatagatgttcggtgatccggattggggatttgggatcctgagcactctggtgaagctcgaagagagtgaccacatacgccatggtagccacacatgctccatctgccggtaccctatcattgggtcacggtttaaggaaacaaaacactcattcagcctgtgcaaccggtgctacagtgaagggaaggttccttcggccttcaagttggaggagtacaggttcaaagaatacggtaacgagtcagaggccctcattgataagtgcatgtgcttcaatttacattctaagaagctggaaaccgatgcctgatcattcaaacttggatttcaagtgctcaaagcatgaatctgtgtatttcctaggtgcaaagatgtctagtcagctctcccactctcttgtaaacaaaggtgccatcattcggagtttctctaaatgtgtcccagttactaataaccctgatgtgctagctggtgttttaagtgtacggaaacgagtaaatgggaattccatacactctgttaccccagtccaatacaaccttgctgacccttgcatatttttgtttgagcaagaacaattttggggttctcttcaatgctttttgcctttcgtctc

SEQ ID NO: 5426 - DNA, 3175 bp, Zea mays
  unsure (1)..(3175): unsure at all n locations
  Clone ID: TF_ZmC50613_1
tcctcggcacgaggcacctggtattgtgctgtcgccgcagctgtaccgtactgcctcccctcgtgccggtcgtgcccaccagatgaccgtcatccctagcatcgtctcctctcgttagcagtcgcaagtagccagcagtccagcacacgactccgccgccgctatccactccgccctcccctcctctctgctattgggccccggcgggccgacccggcattcttgaacttccccttccccgcatcaaatcccctacccgtgccgtcgctgcgcccgcgctgcgtgtccgaattttcgccgtaatccggctggtttttcccgtgcgcagcgggccgtaatggcgctgtccgcgtccgcggcgtcggccggccgggggtcgcgggcggagaaggtgaggaggatcttcgagcgcttcgacaccaacggggacggcgggctagaccggaacgagatggccgccctcgtcgtcgccgtcaacccgcgggtcaagttcagcgaggaccagatctccgccatcctggacgaggtgttccacacctacggcgaattcatcctccccgacggcaggggcctctccctactagggctgcttcgcacctacgatgacggcgccggggacgtcgaccgcgactttctcgcgctctccctacccgccgtcgactccgacgcctcctccccggacatcgccgcaggggacgctgccgcccactcctccccgccctccggggctgccgccgccgcatcgctgctcgacgaccacgccaagccgctcggcgccggcggcgctgcgccgtcggtcagctcccgcgccgccgtcgccgcgccggcttgggcgacctcgcccaaccacggcatcgccttcgactcctcctggggactcctcgacgacctggagatactcgtcaagcgcctccgctcaaagcagctgcggaagggctccatcgacggcgccggcaacaacaacttcgactccttctccgaggccgggtggtccagggagatctccggcgcggcggattccgcatccaccgccgctccgtgggacgagacgagccgcgactacctcaccttcgtcaaggaactcgccgtgctccgcacgcgcgccgacgcctcccgctcgcgcgaggaggccttcgacaaccacatgatcatcggccgggcgctttccgagcaccgcctcttccgagacgccctagccagcttccgccgcgcctgtgagctgcagcccactgacgtccgtccccacttccgcgcggggaactgcctgtacggcctcggtcgctatgctgaagccaaggaggagtaccttcttgcccttgaagccgcggaggctggtggctcacagtccgcggacatcctcccgcagatccatgtcaaccttggtattgccatggaggccgaggggatggtacttggtgcctgtgagcattaccgagaagctgccatactgtgtccatctcatgccagggcactcaagctcctggggagcgctctctttggcgttggggagtaccgagctgctgagaaggcactggaggaggccatcttcctgaaggaagactatgctgatgcgcactgtgaccttgggtccgctctgcatgcagtaggggaggatgaccgtgccatccaggagtttcagacagcaattgatcttaaacctggccatgttgatgccttatataatcttggtggattgaacatggatgctggtcgttttgtacgggctgcggagatgtatactcgtgtgctgagcatccgaccaaaccattggcgtgcacagctaaacaaggcagtggctttgcttgggcagggtgagtctgaggaggccaagaaggcactcaaggatgcgtttaagatgacacaaagggtggaagtgtatgatgctatctcacatttgaagacattgcaaaagaagaagccaaagccttccaaaggaaaagatgacggtcaaggggagcaggcttatgttgttgtggaggcatccaagttcaagagggttgggaggaagactaccttgcggcaggatttggccaatgctctagatataagggcctttgagaggatgacaaaactaggtcactgcgatgtggagcttcttagaaaagagatgaatgagactgatgtccctgtatcttactcgggcaccggcatccctgagaagtcaatacgcaaagcagctcttgaggttattctccgcaggctcctctcttttctcaagccagacacctttcagggtgctattaaggcaatcaacgaaagaattctctctgtccttgatgcttctggctctggtcgtgttgatctgggcatgttcttcgccaccattgctccaatctgttctggccctgtggatatgcgcaagcgtatcgtctttgatgcactcctttggcgtcctgctagcgaaggcagcaatggccagataaggaggagtgatgcgttaacctacattaagcttcttcgagctgtttatatacccacgcatggggctagtgacatgctcgaaatgcatggggagtctgaccctaccatggtatcatacacggaattcttagagatgttcaatgacccagattggggatttgggatcctgagcactctggtgaagcttgaggagagtgatcacatacgtcacggtcgccacacatgctccatctgcctgtaccctatcattggttcacggtttaaggaaacaaaacactccttcagcctgtgcaaccggtgctacagtgaagggaaggttccgtcagcgttcaagttggaggagtacaggttcaaagaatacggtaacgaatccgaggccctcattgataagtgcatgtgcttcaatttgcattctaagaagctggaagctgatgcttgatcattcaaactttgatctcgagtgctcaagcatgaatctgtgtatttacctaggtgcaaagatgtctagttagctctcccactcccttgtaaacaaagttgctgccattcagggtttctctagatgtgtcccggttactaatatatgaccgtaatgtgttagctgttgttttaagtgtacgggaacgagtaaatgtgaattccatacactctgtcgccccagtccaattcagccttgttgaaccttgcatatttttgtgtgagcaaaaacaattttgggagtcaaatttccgngggggggacccggtacccatat

SEQ ID NO: 5427 - DNA, 3336 bp, Zea mays
  Clone ID: TF_ZmC1346_1
cctcgaggccggccgggattcacgaccttatcccaccagcagattcgaaattcacggacaggcccatggacccggcgaaagccagcggtggttcagcccctgacgtgcgggtcccactctccagccgcaccgcctagagaggcagaggcacctcgtggccgggagggaaacgaggcgtgataaagtggggctcctcggtcccggcgttggccgcatcgacactcgccgcgcaccaccaccaccgctgcggctcacggctacgcagcccgctctcccgacccccccgtgccctcctctttttgctactagcacatagagtttcgcccgaatcgatcgccgactgactccgctagggttcggcccgatcgccgcttcgtcctcccggctcccgcggggaccccgccgagatgtctgactggagctcgccggctgcgccgacgttcttcccttttggcccgcaggccgaggggtgggacgtcaccttcaaggtcaaatatggtgatacacttaaaaggttttatggttgtgccaatgggagtcattttgacatgaatttatctgctctacgggcgaggattgatactgcctttaagtttggtcctgacgttgactttgttctgacttacaccgatgaggatggtgatattgtcatgctagatgatgatgatgacttgcgtgatgcagctctccgtcagagattaaaccctctcaggattactgttcaactgaagaaaaatcaaccaactgaaaaaaaagatacttctgcaccagtgaaatccgctgctcaggatccactatcccagttaatgtcagctattgaaggtttgaagcctgttcaggaagatagtctggcccatataaaatcagctattggtgaagcaatcaagtctatcccagagccaatacctgatgcccttgcaaaactttctcatgaaatacttgatgcagcaccaccaccattagctgagctgatgaaaccttttgcacaattgatggcaccaaacaataatggcaatgggccatctgatgtgcatgctgaggggtcatctagctcttccagtgcacaggtgccagctgaagctaaaaatgagcccaaagttaggccaagtttgggtcttaagaccgtgttgaaagaggctgctggacctgttcctaatgctggagcttctcaggttcaacagccattaatgtatccatctgttgaggagatgctgttcccctgtaattcagtcgacaaatctgtttgcaaagggaagattgatgctcaaagtaagggaaaatctgttacgtcctcaggcatccaacctgctcctcattctcttcgtactcatgccccacctccaccacatccgtgcatttcagaatggtcccgagcacaaagaagccaacaccgtcaattgaaatttgaagacaatgcaaaaaccactaatgattctagatggcgcattccgatgtataaaatgccctatgcaccaccacctccagcagtgccacccccaggctatgtaccttctccacattttccttatccaggccgcctcttatcttctgggcatccatacggagatctcgctggtaacatggaaaactcagcaccacatagtctgcatagatggattcagtgtgatggctgtggagcgcaaccaattgttggtccacgttataaatctaatgtgaaggaagactatgatttatgtgattcctgtttccagcgcatgggaaatgaaatggagtacaccaaaatagacaagcctattttaccccacaggtttctaagagatccccatgtgtaccggaaggtgcaccatccacgggttctaatgaagtcaagacgggagaaacttgaaagtcgcttcattttggatgtgactgttcttgatggaacactgatgacaccttctaccccgttcactaagatttggcgcatgcataacaatgggtctgttgtgtggccacggggcacacagcttgtctgggttggtggagatcagtttgcattgcagacatctgttccattagagattcctgtggatggttttcctgtggacaaagagattgatgttcctgttgattttgtggcacctacaaggccagggaggtacatatcttactggaggttggcttccccttctggtcagaaatttggtcagcgagtttgggttcatatccaggtggaagacccttcttttgttaatgacaataacaggaatgctgctattaacctgaatctgcctccagagagctatagttcaaacacaaccaacttaattgatgtgaacattgagcctgctgactcagcccttagtgcacatgctaagcgcacaaaggagttccatttctgttcaactgattttcctgaacccagtaagtctgtgccttttacgttggccactacctctttgtctgcagcagctcctacaaaccaaactggtgatgttcccatgtccagtacacctgctgctgcttgtttgccctctgttaatgtgcctatgcatgaagtcgttactactcatacaccgtcacctattacgcctgtcttgcctacaactatacacttttcagccccagtatctgctcctgcaattgcccctgagcttgcatcaggggctgttggtgtgcctccacctgttagtgctgtggtacctgagctgtcagaactggatgttcacaatgaggagaagttgctgagggagctggaggaaatgggttttaggcaggtcgatctcaacaaggaaatcctcaggcagaacaattacaatctggagcagtctgtcgatgacctatgtggcgtcaatgaatgggatcctctccttgcagagctggaagagatgggatttgatgacacagagatgaacaaggagctgcttgcgaagaatgagggaagcatcaagcgagctgtgatggagctcattgccagggagaagaaggacaagtgaagatcgtgtgctatctaagtatatattcgtaaataatgagacggctgtgccactgcggtgcagccctggtgcgtctcagagcttgcttatggtgaactcttcgtgttaggtttcttccttatatctgtcgtgtctgcggtgtcgatgaactatctagtatgtggagcgtgtgcgtctcagcagttaccctgccatgccacgtggactggctgtcgtgcctactgtctgttaccatgtatatatataaaaaatgatgcgtggaccaatgtttgatgctggcgctcttgccctcgtgataatgtattagcggttggcttgttgcttgctaaaaaaaaaaaaaaaaaaaaaaaaaaaaaaaaaaaaagcaaaaaaaaaaaaaaaaacttaacttccccttcct

SEQ ID NO: 5428 - DNA, 818 bp, Zea mays
  unsure (1)..(818): unsure at all n locations
  Clone ID: TF_LIB5117-021-A1-PF1-B6
atctgctgggcgtctgatgggaatcttggtaataacagtgagaggtcaccacgaatttcacataggtggattcagtgtgatggttgtggagtacaaccaattgttgggccacgctacaagtctaatgtgaaagaagattatgatctgtgtgatacctgcttccgtcgtatgggcagtgaggttgagtacaccagaatagacaagcctatcctgccacacaagttatctcgcgaccctaatttgtgccggaaaatccattcacgtgcttcgatgaagtcaaagcgtgagaagcttgaaagccgcttcattttggatgtaacggtgctggatggcacacttatgtcaccttcaagcccgttcactaagatttggcgcatgcacaacaacgggtctatcatgtggcccttgggcacacagctaatttgggtcggtggtgatcaatttgcactgcagacctctgtcccactagagattccattgaatggatttccggtggatcaagagatggatgttgctgttgattttgtggcacctgcaaggcctgggaggtatatatcttactggagactggcatcaccttctggtcaaaanatttggtcagcgagtttgggttcatatcccaggtggaagatccatcttttgtcagtgacaacaggactgctgctgttaacttgaatcagcctcaggaaagcaacatcacaaacacaagtagtctgcctcaggaaagcaacatcacaaacacaagtagtctgcctcaggaaagcaacatgacaaacacaagtaattttgattgatgtcaacatggagcctgctaacca

SEQ ID NO: 5429 - DNA, 1476 bp, Zea mays
  Clone ID: TF_ZmC326_17
cacgcatttgccgagcttctgcgttttgagcatcacggtcagcagctgatggatggttcgttaacttgtgaggatgagtaaccactcctttttggaaacaagagttgcacacatcaaaatctggacaaatctcgcaccgccagccttgaccagtttcaatatcatgactgcagacattgcacgtagtgacaaatgctggcgcagttggattgtgtaggtggtatagcaccatcattgacgaatgctttgcgcgtcgaagtgtgtcatactgataatggtttccttggcaaaggctaaggaatgcctgcctggtgtcaaagaactcgctttctaagatgtcatctctatctttggtatctttgggcaccccaacaatatcaaccggatggagcatatgtgtgtctctactattacacgggtgcctctccctgtcttcaagttgctgttctgcgtcataacacttgtcacagatgtaaaaacttctgcattgatgacaaacccaacgtcttccagacaccataagggtacagcagtgactacatgaatactgcaaatggaccataatgaaatcttccttcataggatatatggtttcaccaagcttttgcatcaacatagcatccttggaagcattcccgctgagatcggtgtggccagcagctttaagagctctttttgtaataatcttctttgtcttactctttttctggagtttacggtcatcttcttcttgtcggagttgattgatcatatcttctgcagctcctggccaataatctccatcaaagtatggcaagcgagaagcagtcaccttagccttgcattcccccatagtaaggaagaaatggtcatatagatttgtgagctcaacaacaatttcctccttagaagctttccgaagcatagatagataccactcacgcagtttatcagatttcggagtcttttgaatctcaggatggcaatataagatgtaatcttcacccttcaaaggtggacaagcccatatgtaacaacttgtgaatccccgcagtttacagtattcaagatatcctatcagaatttcatgatacacaaatgtacgcaaggcttctccagatactgttttaatctcaggtctgaagtacttaacagaatccaagtatgacaaataaacacgacgctggttcgggaaagagcattcagcaccaaattcttgaacatacattccaaatagacatacttccacaccttctattttctggaacaagagaacagccttggacttgtaagggaactctgtagggtagttgtcttcttgaaaaatttctaaaaaacgtggtttaacctccagctttttatccactgatgaaacaactctgacaacaagtccttccgctccaggaatctcatcaatatttttgccagcaggcagctgcacggtcctgtttctcctgcttaagtcgtttaaatcccacgcgtccgcggacgcgtggg

SEQ ID NO: 5430 - protein, 62 aa, Zea mays
  Clone ID: TF_LIB3180-007-P2-M1-H1.pep
SRVGFGSQDPLRHRNRVTGRAAGDSDSATRARPGRRHVAVGADPGGERVHGQACGASGAVPG

SEQ ID NO: 5431 - protein, 237 aa, Zea mays
  unsure (1)..(237): unsure at all Xaa locations
  Clone ID: TF_ZmC261_27.pep
MSMTKLSIRYVLFHLIILGCLYFTSEFSCFNIFVSLMQLLLHPESDDSAQLSXIETEKLLAQLVETEMNRRLKEDTYKGKKFNAFCHFLGYQARGALPAKFDCDYAYVLGHVCYHIIAAGLNGXGYMTTVTNLKNPVNKWRCGATPISYYYFIRLMGRKASHVALECALQSHPNMVKFSPLIQPLLRQFPASAVCSLQSLRAASPAKSELAEIVPQEKSPKDSIQPMSPSPRYSTSR

SEQ ID NO: 5432 - protein, 66 aa, Zea mays
  Clone ID: TF_ZmC74_176.pep
GVFGLAFGFGFCPLKAKSQPKGWIQEAAFSKSRLSRSAKLKAPLDLLLVAFGWNCENVYRRTFNDF

SEQ ID NO: 5433 - protein, 89 aa, Zea mays
  unsure (1)..(89): unsure at all Xaa locations
  Clone ID: TF_LIB4725-004-R1-K1-B3.pep
NMIQAFILQNRLYKMETISSVLCILTTSSFHIHCGVSSTWSFTNETKFKSKGRGAVPPCRHRRYPWMLHLQLVLMSTMLSCPSEAAXPR

SEQ ID NO: 5434 - protein, 98 aa, Zea mays
  Clone ID: TF_LIB4763-041-A1-K1-A8.pep
SQVLLTRRSSRWRSETSCLCLQERHRTPPRLMAHHLLHRAEAEGRGMRTSNTHKINRARLNCLARSGLAIPNLLETHLCCRHPPPPGGQRSSTSPMEG

SEQ ID NO: 5435 - protein, 177 aa, Zea mays
  Clone ID: TF_LIB4740-096-A1-K1-E7.pep
PSHPRISSSRSQLYPFSQLHSLFQLRICTSLPSSSYRIPLTREQWKTTLDESHASLQYPPTSSQLNLIFSPIILAVSYSILIASHLLLMLNRLLFHVILTLLPPLSFFYASHIIFPSSSSVLLPLNHLICLLHYFNPFLVSLLLLRALRETAERKGIWGRRRRSGSGGGRRWRRRSR

SEQ ID NO: 5436 - protein, 102 aa, Zea mays
  Clone ID: TF_LIB3136-048-Q1-K1-H1.pep
LTKICDGILKLLETHLGPTSTDDQFNVFYVKMKGDCYRFLDVFKTGAVRQDAVLNTIVAYIAAHDIALAELATTHPIGLGLALNFSVFYYEILNAPDPHLHV

SEQ ID NO: 5437 - protein, 290 aa, Zea mays
  unsure (1)..(290): unsure at all Xaa locations
  Clone ID: TF_ZmC74_212.pep
RSPSPTGYHQHAPPPPLISSPRCFPARPRIGAAAPRSSPPKSTPPSSGSTQSRRGSTCCRHRLRAVVRIERHPPQAFRAGAVREVRRLRRGHKLGGVELRGERAGGGCLALVVWWEGEENLDSEKYEELIEFMEKVAKTVDSEEHYVLSIAYKIVXGTQCASWCIISSIEXGEEGRVNVDCVTLIEDYHNKIEVELSKICDGILKLLDSHRFXSLTAAESKVFYLKMKGDYYGYLAEFETGSRRKDAAXNTMDIALEELAPTHPIRLWLVLNFSTRLTMRPCLQSRQIGP

SEQ ID NO: 5438 - protein, 142 aa, Zea mays
  unsure (1)..(142): unsure at all Xaa locations
  Clone ID: TF_LIB4720-012-R1-K1-B9.pep
MLQMKGDYYXYLSLYKTGXQRKDAANYTISTXKDTNYINYCDLHATYCIRLQLKLYLPQVYYEKHSXLDYAWSFKQHALYYCMWVLHTLAEECYMDTTLMMNILIHHWMLWTIDISEAPAEDIRWAPNHHCCEGKEDLSYMP

SEQ ID NO: 5439 - protein, 109 aa, Zea mays
  unsure (1)..(109): unsure at all Xaa locations
  Clone ID: TF_LIB189-022-Q1-E1-E2.pep
QGQRKENPVRNKNNLNLTRENVPKFKAKLSNICNGILKLLDSHLVPSFTAAESKVFYLKMKGDYHRYLAEFKTGPERKESAESTMMAYKGAQXIARVNLEPTHPIRLGL

SEQ ID NO: 5440 - protein, 60 aa, Zea mays
  Clone ID: TF_LIB4742-038-R1-K1-B11.pep
RAHDSSCRYLEMQADYYTIPRLALTGTERLDASDNTMVRYQAVHDIALVELAPTHPSRVV

SEQ ID NO: 5441 - protein, 98 aa, Zea mays
  unsure (1)..(98): unsure at all Xaa locations
  Clone ID: TF_LIB3245-475-P1-N1-F12.pep
ALLLLXPLXSPXCPLCSXXVLXXXXXXXPFFXXXXXVXPXXXLLVFXXFVXPLRLLGXLGXXXXLLPLLLLLRRRSPPXPSPWAGVPLSSPSXXXXRA

SEQ ID NO: 5442 - protein, 107 aa, Zea mays
  Clone ID: TF_ZmC25776_1.pep
MGEVKHLCLAKFKEGVVVDDVLKGMTDLAAGMDTVKSFEWGQDVLNQEMLTQGFTHVFSLTFASAADLAAYMAHDSHTAFAATFMAAIDKVLVVDFPVVVAKPPPSA

SEQ ID NO: 5443 - protein, 65 aa, Zea mays
  unsure (1)..(65): unsure at all Xaa locations
  Clone ID: TF_jC-zmX700102161b1.pep
SDEILRWAFLSRCLFIHATGEDMLELDGAGAECPKDSTPIMQVFDHNVNXWTYDMQDDGGNQMPY

SEQ ID NO: 5444 - protein, 60 aa, Zea mays
  Clone ID: TF_LIB4338-018-R1-K1-H6.pep
RASSVGGGGSLILMLLTEICNWGPLVPHGAISPPSSIRSSPVRMRIMLSDHGVPPRPAAS

SEQ ID NO: 5445 - protein, 101 aa, Zea mays
  Clone ID: TF_LIB3067-047-Q1-K1-G7.pep
LSVHERNLSFVAYNNVIGTRRASWRIGSSIEQKEESRKNEEHVNLIKEYRAKIEALLCYILYVILNLLYSHLVPSSTAAESMVFYLMTMVYYQRYLAEFKT

SEQ ID NO: 5446 - protein, 126 aa, Zea mays
  Clone ID: TF_LIB4185-048-R1-K1-F7.pep
VPRPLSRVFFFFFFFFFFFFFFFFFFWIRNSPDSLCVDKKNSFPWGYKDAFEAQKKKKKAPTDLEAHQFKPLKHLVGGDGLQDQTRAKRGEQTDLKKKTRDGQKLQKNTQGSFEFRGKKNLGTQVR

SEQ ID NO: 5447 - protein, 74 aa, Zea mays
  Clone ID: TF_ZmC261_38.pep
EEAKGFWLKLYQVKFSPLIQPLLRQFPASAVCSLQSLRAASPAKSELAEIVPQEKSPKDSIQPMSPSPRYSTSR

SEQ ID NO: 5448 - protein, 51 aa, Zea mays
  unsure (1)..(51): unsure at all Xaa locations
  Clone ID: TF_LIB3594-021-Q6-K6-C1.pep
ILNHLLIPSACYSQLGHVNMSXPRQLLKEQITXGAGLXLGPARNECGXGNR

SEQ ID NO: 5449 - protein, 188 aa, Zea mays
  unsure (1)..(188): unsure at all Xaa locations
  Clone ID: TF_LIB4758-090-R1-K1-A10.pep
LLNVEDTYVLSAAYRNVLECERAACRMISSMEQTKLDAGNERXTTLIRDYRGEIXFDLPLSAMRVLQFALRPSSSPASTRPRSQGPLSPTEGDYYTYLAXEVKSGPDTQDAADNKCGYSCQLARXLSTPLLVGLHYFQVYYXRLTDPPAVLQSRLFDEAISELDTXLSEESYKDXTLIMQLLRDNCTY

SEQ ID NO: 5450 - protein, 132 aa, Zea mays
  unsure (1)..(132): unsure at all Xaa locations
  Clone ID: TF_LIB3150-041-Q1-N1-A4.pep
HSLNVYMAKLPERAYRHEEMVYFMENVTKTDDSHELTVEEHYLLSAAYKNVIAVRSALXHMISFIEQHDQGQGAEDTRHTLKGQYXGSTETELTKICDGEMKLVXCELVPSYIVPEIKALYLKMKGDYYRYT

SEQ ID NO: 5451 - protein, 110 aa, Zea mays
  unsure (1)..(110): unsure at all Xaa locations
  Clone ID: TF_LIB3150-041-Q1-N1-A4.F2.pep
MTVLGNEDTVTLINDYRGKTDTELTKICHGMLKLVESHLCAXSSTAPESTVLYLKMKGDYYRYLAEFKTGSDRKDADDNTMVXAYTAAHDIALAELAPTHPIRLALALNF

SEQ ID NO: 5452 - protein, 144 aa, Zea mays
  unsure (1)..(144): unsure at all Xaa locations
  Clone ID: TF_LIB4602-006-R1-K1-A7.pep
TLFRRTRVSRLTRNAVKTPPPNGISTTLTGRKWVHGLTSPTIHRGAKKWFSQWITYGKLVTSRGRGEKHSLLSVVYKNVFGTPRCWWRLIYSIVQEEEGLRIDDXATTVLDYPGGDEDDLTMICDWVLALVDSHLVTSFTGPEC

SEQ ID NO: 5453 - protein, 85 aa, Zea mays
  unsure (1)..(85): unsure at all Xaa locations
  Clone ID: TF_LIB4148-012-Q1-K1-E3.pep
MRELAPTHPIRLGLASNFSVCYYXILNSPDRACSLAKQAFADAIAQLDTVGGEPYKDRTVIMQLVRDSLTLWTSDMPVCSLSILI

SEQ ID NO: 5454 - protein, 95 aa, Zea mays
  Clone ID: TF_LIB4605-012-R1-K1-A3.pep
NVYTIIIATQVGTFKNMVNLLVRISRTVDWGELTTEELNLLTVQYQIVTADHLTSRSMFYSVQHQGEGSGIEVRDTMTLVFRDKTDTELTIMCPE

SEQ ID NO: 5455 - protein, 69 aa, Zea mays
  Clone ID: TF_LIB3118-029-P1-K1-H11.pep
IYKREENVYINKLAEQYQRHEENVAILRRRLTLNMWNMLLLRTETFRWSHTKMRVALAELDGATRLVLN

SEQ ID NO: 5456 - protein, 88 aa, Zea mays
  Clone ID: TF_ZmC772117_1.pep
EMPFEQKEEYPMNKEHCECYPYNIIVEDRRHDADSVYCDGILELHRLPPTCLFLLLVTHVAFHSQEEGQSITSIWRNLRLLLRGRNLL

SEQ ID NO: 5457 - protein, 90 aa, Zea mays
  unsure (1)..(90): unsure at all Xaa locations
  Clone ID: TF_700029541H1.pep
RNLLSVAYKNVIGARRXSWRIVTSIEQKEESKGNESQVTLIKEYRQKIETELAKICEDILEVLDKHLIPSAQTGESKVFYHKMKGDYHRY

SEQ ID NO: 5458 - protein, 111 aa, Zea mays
  Clone ID: TF_LIB3591-080-Q6-K6-E7.pep
KKKKQGKTKRKKVLNNKVKQHNVKKRDLSENYSLKQNKESEGIHENQKRKNHELENSEKQHKMGNKQLKNKMTKICDGSLKLLETHLEIEDLGLGGSGRRHKMGPGRPDRN

SEQ ID NO: 5459 - protein, 96 aa, Zea mays
  unsure (1)..(96): unsure at all Xaa locations
  Clone ID: TF_LIB3608-027-Q6-K2-D4.pep
TVRWHQLELFREENVYMANLVEQAERYXEMVEFMEKVPNTVDSEELTVDDRNLLSVAYKNVIGARRASWRIIYSIEQNEEGRRNEDRVTLINDYRG

SEQ ID NO: 5460 - protein, 143 aa, Zea mays
  unsure (1)..(143): unsure at all Xaa locations
  Clone ID: TF_LIB3592-001-P1-K6-H4.pep
YAGGRSLTSTSRILLDRGRSRLVSFCRHAFWYEEMVECMEKVSMTVDSEELTVEEGSLLFVAYKNVIGARRDLLGIIYFSELEEVGLGNEDLVILIKDYRGXIETELTQDCDGILKLVETYIVSVFTFXEFKXFYVKMKGDYY

SEQ ID NO: 5461 - protein, 87 aa, Zea mays
  Clone ID: TF_LIB3152-012-P1-K1-D11.pep
LAEQAERVEEMVEFMEKVFKTVDLEELTVEERNLLVVAYNNFIGARRSLWRIIFFIEHKEDGQGLDVLVSLIKDYFGKIDTELIIDL

SEQ ID NO: 5462 - protein, 104 aa, Zea mays
  unsure (1)..(104): unsure at all Xaa locations
  Clone ID: TF_LIB3150-049-Q1-N1-C9.pep
KLNCKTASTELYREENVYMAXKLAEQAKRYEEMDEFMXKVTNTVYWXELTVEERNLLYXAYKNVIGARRASWRIIYSIEQKEEGRSNEDRVTLIKDYRGKTETE

SEQ ID NO: 5463 - protein, 108 aa, Zea mays
  unsure (1)..(108): unsure at all Xaa locations
  Clone ID: TF_LIB3075-028-Q1-K1-D9.pep
VQSCTPEVGSFVNDSEWHPACLEHYVRRDLSPTHPIKLVLALNFSVFYYQILNFRDLSCNPAKQVFDXQSLSYTACDXEFYKDMTLIMQFLHDNSTLLTSYTYYDGCN

SEQ ID NO: 5464 - protein, 75 aa, Zea mays
  Clone ID: TF_LIB4171-050-R1-L1-G6.pep
ERCSRNSSCVIPQESEDLPYSSHAAPIPLAFDEAISQLDTLGEDSYKDSTLIMQLLRDNLTLWSADSTTLTNRST

SEQ ID NO: 5465 - protein, 178 aa, Zea mays
  unsure (1)..(178): unsure at all Xaa locations
  Clone ID: TF_LIB4758-089-R1-K1-A5.pep
MCLSSIIAEQVLSDQKMVDVLCKVICIADSLDLTEMEHLLLLGAYMNAIAARRAFRFLVSSIILRDDIRGIVPRKTLIKDYPLEIVTALNDISAAILKMLEMHLAAAPTALKLQAVYLYRLLDYFSYXAECNSGDAIKDLAENTMEKYKAAHDIALPVACSRLTLLRLHSNINFSVLY

SEQ ID NO: 5466 - protein, 93 aa, Zea mays
  unsure (1)..(93): unsure at all Xaa locations
  Clone ID: TF_LIB3245-170-P1-N1-A6.pep
DFYRYLAENKTGAERKEAXAENTMEAYKAGQDIALAELAPTHPIRLGLALNFSGGYYESPNSPDRACRLGKQAFDEAISELDTPSEGGRQGQD

SEQ ID NO: 5467 - protein, 162 aa, Zea mays
  unsure (1)..(162): unsure at all Xaa locations
  Clone ID: TF_LIB4827-032-A1-N1-B4.pep
PAGXKVTRALAPVRRPPRRGVRSAALPAHPPPNPPPVPVQPHAPSSSPGAFSVNQTRPAVPHPCDSRSAGPSVTSASSPSLRPYPSSPHPPSYALSAWPPHPGVLRFWGASLCPLRSAPPESGPAERTTTQIGSRPSLSSSPEPPPAHPATDLQHLMRLLLR

SEQ ID NO: 5468 - protein, 164 aa, Zea mays
  unsure (1)..(164): unsure at all Xaa locations
  Clone ID: TF_ZmC5000_20.pep
NLTQKFSLEIQVDFEKYEGMIKVMEKVVIQLILWSSLEEHYLLPVACKNVIGIRCASWRIVSSIEYREXGCVNMDRATLIEGYHNKIEVELNKICVGILKLFASHLPPSLIVPKSKVFYLKMKGDYYRILLWRSWPPYPIRLWLMLNLSTLLILLVVSPNRFGF

SEQ ID NO: 5469 - protein, 76 aa, Zea mays
  Clone ID: TF_LIB4742-139-Q1-K1-E4.pep
LSREENVHMAKLAEYAQRYQEMLEVMEKGPKTVDSEELTVEERNLLSVAYKNAIGARRASCRIISSVHNKEERPRT

SEQ ID NO: 5470 - protein, 221 aa, Zea mays
  unsure (1)..(221): unsure at all Xaa locations
  Clone ID: TF_LIB5116-030-A1-PF1-H7.pep
MSPAEPTRDESVYMAKLAEQAERYEEMVEFMERVAKATGGAXKEEGRGNDAHAATIRSYRSKIEAELAKICDGILALLDSHLVPSAGAAESKVFYLKMKGDYHRYLAEFKSGGERKEAAESTMNAYKAAQDIALADLAPTHPIRLGLALNFSVFYYEILNSPDRACNLAKQAFDEAISELDSLGEESYKDSTLIMQLLRDNLTLWTSDTNEDDVDEIKEAP

SEQ ID NO: 5471 - protein, 112 aa, Zea mays
  unsure (1)..(112): unsure at all Xaa locations
  Clone ID: TF_ZmC374965_1.pep
RPTELCRTPVLPLHKRTCAELLSYVNLIKEDGRSIGAELTNTCEGILNLLVSHLKPSSTAAESQXFYRKNTGDYHRNLAEFNTAADRKESAENTLADYNADQDIALAELAPT

SEQ ID NO: 5472 - protein, 68 aa, Zea mays
  unsure (1)..(68): unsure at all Xaa locations
  Clone ID: TF_LIB3150-097-P1-N1-B9.pep
MAREENVYMAKLAEQAERYEEMVEYIENVAKTVYVEELTCEERNXLLSGAYKYFIGASFVLCCIVISI

SEQ ID NO: 5473 - protein, 62 aa, Zea mays
  Clone ID: TF_ZM4633.C5.o3.fg.pep
MDCVTLIEDYHNKIEFELNKIYDGILKLFASHLPPSLTVPKSKVFYLKMKGDYYRYLAEFET

SEQ ID NO: 5474 - protein, 109 aa, Zea mays
  unsure (1)..(109): unsure at all Xaa locations
  Clone ID: TF_LIB4760-023-R1-K1-E2.pep
LLETHLVSVFPAPDPGLLCKMKGDYXYRYLAEFKTGAERGGAAENTMVAYKAAQDIALAELAPTHPIXLXLGLDKAXFYYXTLNSPNRGGSLXXXXWGPAPPRPAPPPP

SEQ ID NO: 5475 - protein, 88 aa, Zea mays
  unsure (1)..(88): unsure at all Xaa locations
  Clone ID: TF_LIB4725-021-R2-K1-H11.pep
MANSRQAQRTRKGRVMEKVAKTGDSDELTGEERNLLTVVFKNXIGARHASWRIIYSIEHKEEGRGNDDRDTLIKDYRGKIETEHTKDC

SEQ ID NO: 5476 - protein, 236 aa, Zea mays
  unsure (1)..(236): unsure at all Xaa locations
  Clone ID: TF_LIB5075-004-R1-XP1-A10.pep
MATERESKTFLARLCEQAERYDEMVTYMKEVAKIGGELTVDERNLLSVAYKNVVGTRRASWRIISSIEQKEEAKGTDKHVGIIREYRQKIELELEKVCEDVLSVLDESLIPKAETGESKVFYHKMKGDYHRYLAEFASGDKRKSAATAAHDAYKNATDVAQTELTPTHPIRLGLALNFSVFYYEILNSPDRACHLAKQAFDDAIAELDSLSEESYRDSTLIMQLLRDXLTLWTSSD

SEQ ID NO: 5477 - protein, 91 aa, Zea mays
  Clone ID: TF_700028918H1.pep
ARAARGSSPAPETQPRAKTKFALLSIWRGTRHVYMAKLAEQAVRYEEMVEYMEKVAKTVDVEELTVEERNLLSVAYKNVIGARRASWRIVS

SEQ ID NO: 5478 - protein, 195 aa, Zea mays
  unsure (1)..(195): unsure at all Xaa locations
  Clone ID: TF_LIB4743-076-R1-K1-E9.pep
MALPRAFPRGKCVHGEALPSRHRGNQEMVESMENAATTADSDELIVDERTLLTAGYINEIRARRASSIIMXSSSRTMRGRGRQDRVTLIKDYRYMIETALTKICDGILKLLESHLVPAYTAPECKGFYLKMKGDYYRYLAEFKTGAERKDAAENTMVAYKAAQDIALAELAPTHPIRLGLALNFSVFYYEILNLP

SEQ ID NO: 5479 - protein, 91 aa, Zea mays
  unsure (1)..(91): unsure at all Xaa locations
  Clone ID: TF_14202479.pep
GLPAVSISIQFSXXTXPXTXXXXPXXXXRRRRRRHPGGDGLHGQASXQXGRYEEMVEFMXXXXAAAELTVEEXNLLSVALQERHRRAPPCL

SEQ ID NO: 5480 - protein, 70 aa, Zea mays
  unsure (1)..(70): unsure at all Xaa locations
  Clone ID: TF_LIB3354-005-P1-K1-E2.pep
MWPAEPTREESVYMAKLAEQAERYEEMVEFMERVARYAWGRRWQEXLSVEGLNLMSSAHMNVMGLRCAWW

SEQ ID NO: 5481 - protein, 256 aa, Zea mays
  unsure (1)..(256): unsure at all Xaa locations
  Clone ID: TF_13150965.pep
MSREENXYMAKLAEXAERYXEMVEYXEKVAXTVXVEXLTVEERNPXSXAYKNXXWARRASXRIVSSIEQXEEXRKNEEHVNLIKEYRGKIXAXXSXXCXGILKXPXSHXVPXSXXAESKXFYLKXKGDYHRXLAEFKTCXERKESXXXTXVAXXAAQDXSLAEPAXTHXIRLGLAXNFSXFYYENXNXPDKACNLAKQXFXEXISXLDSLCEEXXKDSTXIMXLXRDNLTLWTTDLTEDGAEEGKNAXKXEAGEGQ

SEQ ID NO: 5482 - protein, 115 aa, Zea mays
  unsure (1)..(115): unsure at all Xaa locations
  Clone ID: TF_LIB3075-048-Q1-K1-C12.pep
MSREENVYMAKLADQAERYEEMVEYMEKVAKTVDVEELTVEERNLLSVAYKNVIGARLAXWRIDSFIEQKDECRKNEEHVNLIKEYRVMIDAELINFWDXFLKLLDFHLLPSYTA

SEQ ID NO: 5483 - protein, 132 aa, Zea mays
  unsure (1)..(132): unsure at all Xaa locations
  Clone ID: TF_LIB143-064-Q1-E1-A12.pep
YLRAQEQPRAKKKFGPLTISSRKEMFKMANLLNKAKRYKEMVNXMKKVVKTVNVEELNVXERKPSVCLHTKNVIGXARRASWRIVSSNEQKXESRKNEEHVNLIKEYRGKIEAELSNICDGILKLLDSHLVP

SEQ ID NO: 5484 - protein, 119 aa, Zea mays
  Clone ID: TF_LIB3227-018-P1-K1-F4.pep
HPCASPGPDEGQEENSIFNNVNGDVNDYIDQAARHAERYEDMDKDIETVDMTEHTEELTDLVRDLYTNAYKTVIAAWRTVCCIEHYVEHKEDYQHIDLLVDYIKEFHAKINAVLNSIWD

SEQ ID NO: 5485 - protein, 214 aa, Zea mays
  Clone ID: TF_ZmC744_7.pep
MSREDNVYMAKLAEQAERYEEMVEYMEKVAKTVDVEELTVEERNLLSVAYKNVIGARRASWRIISSIEHKEESQSKVFYLKMKGDYHRYLAEFKTGAERKEAAESTMIAYKAAQDIALAELASTHPIRLGLALNFSVFYYEILNSPDKACNLARQAFDEAISQLDTLGEDSYKDSTLIMQLLRDNLTLWTADSTTEDSIEEGNEASKGDAGEGQ

SEQ ID NO: 5486 - protein, 489 aa, Zea mays
  unsure (1)..(489): unsure at all Xaa locations
  Clone ID: TF_UC-ZMFLMO17248F03_FLI.pep
MEEREKLVCLAKLAEQAERYDDNDYEEQANLYSEETGNRYNEDPADSYQEEQENAFSGGINQQDNLQVNNVDDNKWPGWPGESVFRILVPAQKVGAIIGRKGEFIKKMCEETKARIKILDGPPGVPERAVMISAKDEPDAPLSPAMDGLLRVHKRITDSSDGESSQPQRSAGNIGPTRLLVPSSQAGSLIGKQGATIKSIQDSSKSIVRIVENVPPVALNDDRVVEIQGEPLGVQEAVELISSHLRKFLVDRSVLPLFEAHMKMHGMPREQPVPPPQHWGPPQTWIRPPNIPPGGPGFGGNPQFMHPRPQDSYYPXPDVPHMEKQPHYGISAYGREAPPSGASATGNQPPSHAGSQVAHDMHIPLAYADAVIGAAGASISYIRRHSGATVTIQESRGAPGEMTVEITGTAAQVQTAQQLIQNFMAEAAPPPPGPAPASNPPAPPVDPSYGSYPPPYGAAPSYGSSAAAGPPQYNGGNYGGPTYPPSYGY

SEQ ID NO: 5487 - protein, 90 aa, Zea mays
  unsure (1)..(90): unsure at all Xaa locations
  Clone ID: TF_700552665H1.pep
GKIDAELSNICXDGILXSCIDSHXVPXFVLLLESKVFYLXMKGDYHRYXLAEFKTGAERKESAESTMVAYTAAQDIALAELAPTHPIRLG

SEQ ID NO: 5488 - protein, 105 aa, Zea mays
  Clone ID: TF_LIB4758-050-R1-K1-E5.pep
ETAYMCQSGTGSKMPRGDGVVHAARRELPTQDLPKIGNVPEEARHDVHDLQERDTIPDGVMVDLLIHLGDIKGIHKLRLLRADPEIAVLDHNRGLTYLKLDFQPD

SEQ ID NO: 5489 - protein, 158 aa, Zea mays
  unsure (1)..(158): unsure at all Xaa locations
  Clone ID: TF_LIB4742-030-R1-K1-A3.pep
LSRNPSLLVLCITDRLPCTSAAPASIVPLISSIHPNEEGRGHEERVILXRDYRXAISETDLTKICDCILKLLKCHSFVSLPLHPRVRRPFYLKMTGDYYTYFADLRLHLIRKTLISTPMADIQRCPGIAXSELCSTHPITLSLTLYFCLIYYEILNSR

SEQ ID NO: 5490 - protein, 86 aa, Zea mays
  Clone ID: TF_LIB4979-021-A1-K1-G9.pep
WRMALMRESPNYTELGQDYYKDRTLIMLFLRDNWTLWTSNTNYDLQTSRSKNHLLPPQNPAPRDSKTHPISPADECLLMAARLPRL

SEQ ID NO: 5491 - protein, 112 aa, Zea mays
  unsure (1)..(112): unsure at all Xaa locations
  Clone ID: TF_LIB143-057-Q1-E1-F11.pep
REENVYMVKLADXAARYDEMVEFMDNVPKTVDSEELTVHERNLLSVAYRNVIGARRTSWHIISSIEQKEDGRSNXDRVTLIKDXRGKIETELTKICDGILRLLESHLVPSST

SEQ ID NO: 5492 - protein, 90 aa, Zea mays
  unsure (1)..(90): unsure at all Xaa locations
  Clone ID: TF_LIB3076-026-Q1-K1-B8.pep
FNLINEYHAKGESELSNISDGILNLLDSHLVPSSTAAXSKVFYLKINGDYHRYLAEFNTVPEIKESSYNSIIYYFASHDITLTYLLPTHP

SEQ ID NO: 5493 - protein, 76 aa, Zea mays
  Clone ID: TF_LIB3150-017-Q1-N1-B11.pep
SVTYVTMMCDVVVKLRDTHLVPGFTAGVSNVMYLKTNGNYSRYRDECKTGPGIKVLDDNMLVAYNDSNDIVLAKLG

SEQ ID NO: 5494 - protein, 247 aa, Zea mays
  unsure (1)..(247): unsure at all Xaa locations
  Clone ID: TF_ZmC261_29.pep
NCRYNNSSCDRCSLPIHRSEMQTDIIYEHWDILXPPKQIKDPETKKPEDWDDKEYIPDPEDKKPEGYDGIPKEITDPDAKKPEDRDNEEDGEWTTHLLXHSQPKYKGPWKQKKIKNSNYQGKXKAHMIDNLDFKDDPYIYAFDSLKYIGIEMWQVKXGTLFDNTIITDDLALAKTFAEETWGKHKEILCSYAWSEDGCHSALAVCSLQSLGAASPAKSELAEIVPQEKSPKASIQPMPPSPRYSTSR

SEQ ID NO: 5495 - protein, 220 aa, Zea mays
  Clone ID: TF_ZmC2299_3.pep
MAAAAAGTREEMVYMAKLAEQAERYEEMVEFMEKVAAAAELTVEERNLLSVAYKNVIGARRASWRIVSSIEHKEETRGAAAVDARVFYLKMKGDYHRYLAEFKTGAERKDAADSTLAAYQAAQDIAVKELPPTHPIRLGLALNFSVFYYEILSSPDRACSLAKQAFDEAISELDSLGEESYKDSTLIMQLLRDNLTLWTSDMQEDGGDEMRDANKPDEEQ

SEQ ID NO: 5496 - protein, 107 aa, Zea mays
  unsure (1)..(107): unsure at all Xaa locations
  Clone ID: TF_jC-zmXLIB3526P040cf06b1.pep
TKTVYEEELTVEERNLLSGAYKNVIGARRASWRIGNSIEQKEESLKNXYPVDLIKEYSGXIEAXLSNICDELLKLLDSHLEPYCNAAESNVFYLKMKGDYHTSLTEF

SEQ ID NO: 5497 - protein, 68 aa, Zea mays
  unsure (1)..(68): unsure at all Xaa locations
  Clone ID: TF_LIB3227-010-P1-K1-E12.pep
PVLSLEENVYLAKLAAQAKRFEEKLEFMVNATKPVDSKDLTVQERNLLYDAYTNVIGARPAXWRIISS

SEQ ID NO: 5498 - protein, 91 aa, Zea mays
  Clone ID: TF_LIB3227-010-P1-K1-E1.pep
HASGWYYGLKRRKCCKRAVKSRPNPRNYYRCSAVGCGTKKLIVRNSEYLCYVLTTYYGMHKHAKSCDCYLCPPPAARSADHYSSPTAERRW

SEQ ID NO: 5499 - protein, 187 aa, Zea mays
  Clone ID: TF_LIB4757-019-Q1-K1-A3.pep
MATERESKTFLARLCEQAERYDEMVTYMKEVAKVAGELTGDERNLLSVAYKNVVGTRRASWRIISSIEQKEESKGTEKHVGTIRDYRQKIETELEQVCQDVLNVLDDSLIPKAESGESKVFYHKMKGDYHRYLAEFASGEKRKVAATAAHEAYKTATDVAQTELTPTHPIRLGLALNFLVFYYEILN

SEQ ID NO: 5500 - protein, 79 aa, Zea mays
  unsure (1)..(79): unsure at all Xaa locations
  Clone ID: TF_LIB4739-044-Q1-K1-D9.pep
MASAELSREENVYMAKLAEQAERYEEMVEFMEKVAKTVEGGGLTVXEXNLLSVAYKSGIGARRASWXIIFFIGRXVDGR

SEQ ID NO: 5501 - protein, 91 aa, Zea mays
  Clone ID: TF_700575123H1.pep
VFYLKMKGDYHRYLAEFTSGAERTDAVEITMDAYKAAQDIALVDLAVRHPIRVVVALRFSVLYDVILDLPDIVFMLAIQVFYDAIPVVGSL

SEQ ID NO: 5502 - protein, 82 aa, Zea mays
  Clone ID: TF_uC-zmflteosinte083a02b1.pep
MSREENVYMAKWAAQAERYEVMAEYMEKVATTVDVVELTVEERNLMYVAYKNVIGARRASWSTVPCMEQIEEFRRIEKHVHL

SEQ ID NO: 5503 - protein, 69 aa, Zea mays
  unsure (1)..(69): unsure at all Xaa locations
  Clone ID: TF_LIB3136-055-Q1-K1-A9.pep
MSREENVYMANLAEQAERYEEMVEYMEKGAXTVDVEKLTGEEPDLLSGAYKNGNGACRASWGIGSFIEQ

SEQ ID NO: 5504 - protein, 71 aa, Zea mays
  unsure (1)..(71): unsure at all Xaa locations
  Clone ID: TF_LIB4665-002-R1-N1-G12.pep
GLGLLLTSPVFYYEILNSPAKXNLAKQGFYETISQLNPLGEGSYKKSPLIMQLLRGNLTLWTFSPPEDGVY

SEQ ID NO: 5505 - protein, 232 aa, Zea mays
  unsure (1)..(232): unsure at all Xaa locations
  Clone ID: TF_LIB4756-120-R1-K1-F6.pep
MGYEDSVYLAKLAEQAERYEEMVENMKAVASADQELSVEERNLLSVAYKNVIGARRASWRIVTSIEQKEESKGNEAQVGLIKEYRQKIEAELAKICEDILECLDGHLIPSAESGESKVFYHKMKGDYHRYLAEFAVGDKRKTSADKSLEAYKAATEVAASSLAPTHPIRLGLALNFSVFYYEILNSPDQACQXGQQAFDDAIAELDTLSEESYKDSTLIMQLLRDNLTLWTS

SEQ ID NO: 5506 - protein, 180 aa, Zea mays
  unsure (1)..(180): unsure at all Xaa locations
  Clone ID: TF_LIB4767-042-R1-K1-H10.pep
MPSDQLSRDENEHMXAKLADQAQTDYDRARFMDQXASTVDSEELTAYDRNLLSVAYNNVIGARRTSWRIISSIEQKEEGLSHDDRATLIKDYRGKIDTDLTNICDGILKLLETHLVPSSTAPESKGFYLXCMVHYYTYLAEFXTGPERKDAADNTMVVYYAAQDIALSAIAPTLPITVGL

SEQ ID NO: 5507 - protein, 88 aa, Zea mays
  Clone ID: TF_LIB3245-537-P1-K1-D7.pep
LVAATVAPGVALDALHVLNHLLVPLRVLSEVVHVHALLPRGLRRLHVFDRGWYGSADRDGRRHGRSHGYAGAQDPVERKRRVCAGRVG

SEQ ID NO: 5508 - protein, 74 aa, Zea mays
  Clone ID: TF_LIB4171-051-R1-L1-B6.pep
ALIHTTTKAASSSKITQRRKYLMYELCVSYVFSNLYAVAPHGHITIDKLCWQQKQFGIHYFCGHALMKSTQYRK

SEQ ID NO: 5509 - protein, 210 aa, Zea mays
  unsure (1)..(210): unsure at all Xaa locations
  Clone ID: TF_LIB4738-097-Q1-K1-A9.pep
SNEESRKNEEHENLIKEYRAKIEAELSNICDGILKLLDSHLEPSSTAAESKVFYLKMKGDYHRYLAEFKTGPERKESADTTMMAYKDAHDIALDELAPTHPIRLGLALNFSVFYYEILNSPHKDCNLAKQALDEXAISQLHTLAEESYQDSTLIMQLLRDNLTLWTSDLTEDGADEGQQAPKGEAGDVQKGTAILGEHILLEPIDLDALC

SEQ ID NO: 5510 - protein, 69 aa, Zea mays
  Clone ID: TF_LIB3069-008-Q1-K1-A8.pep
TTRPKTEHLVELTDEERNVLAVAYKNVIAARRASWRIEPSIEQKEDSHKNNKHVNLIKEYRAKIEALLN

SEQ ID NO: 5511 - protein, 211 aa, Zea mays
  unsure (1)..(211): unsure at all Xaa locations
  Clone ID: TF_LIB3069-008-Q1-K1-A8.R2.pep
TTREKTEHTEEESDHERDVYNNVYENVMXAWRTVCCIEYYVEHRENYQHNKHNVNFIKEYGAKMNAKLNNIWDRIDNQLESHLTASYTDAESQVMNVNINGDYDKYNTESKTDAYRKNTVESSMAAYNVAQDIVVPNHATTHAIRLKLALNYXEIYNETDNSPHKANHLSNEAIYESNCHLDSLCEDVYMDMPLLMHLLTDNXTLLTYDLT

SEQ ID NO: 5512 - protein, 138 aa, Zea mays
  unsure (1)..(138): unsure at all Xaa locations
  Clone ID: TF_LIB4742-110-Q1-K1-B10.pep
NIQQESRTNQQHVHLITEYPAQIEAELRNICAGILKLLDSHLEPSSTAAESXLFYLKMKGDYHRYLAEFKTGPERKESADSTMMAYNAAQDIALAELAPTHPIRLALALNFSGGHYETLNSPHKLATLQNSAXFDEAI

SEQ ID NO: 5513 - protein, 90 aa, Zea mays
  unsure (1)..(90): unsure at all Xaa locations
  Clone ID: TF_LIB3159-007-Q1-K1-E7.pep
TLTLFQSQRYEEMVDFMDIVAGAVDSEELTVKDRILLYDAYKNVIVTIRASXRIISFIDHMEEDHANVDHVTLINNYLPTIESDLNTYLL

SEQ ID NO: 5514 - protein, 91 aa, Zea mays
  unsure (1)..(91): unsure at all Xaa locations
  Clone ID: TF_LIB3075-042-Q1-K1-C4.pep
MQEKHRDTTVLNGVIDVLEYHLVQCTARGKYQVLYLKMNDDYHMDLAEFKTSAKRKDTFYSTMNAYTNGHDIGLGKMGXPHPIKLGLGFNL

SEQ ID NO: 5515 - protein, 142 aa, Zea mays
  unsure (1)..(142): unsure at all Xaa locations
  Clone ID: TF_ZmC5000_11.pep
MVVGKRQWSATYSEQKIFNCGTRGAVVGNAVMLSEIINYVQSLQXQVEFVFMKLATVNPQVDLNSLPNVLPKDVHQSCGPPHFSLETLGAPLSYLSQPHHGSPLGCMDNQSCMHPLDTTFCLAINPQYHFLNGVSDASSQLI

SEQ ID NO: 5516 - protein, 40 aa, Zea mays
  Clone ID: TF_LIB3597-059-Q1-N6-A7.pep
ACIVAKQAFDQAMSELESLGEDSNKDIPLINRPIRDNLTI

SEQ ID NO: 5517 - protein, 283 aa, Zea mays
  unsure (1)..(283): unsure at all Xaa locations
  Clone ID: TF_ZmC3397_8.pep
MALLPSRSYTRILQLKTNHFIESRKGQATSTAQHSTSTPSVLGRRGEGNPGPGRVVGRGSAAEEMEEREKLVCLAKLAEQAERYDDMVEFMKNLARMDVDMSAEERHLFSVGFKNTIGAKRASWRIICSHEQKVAADRQTGVMIDAYKKKVEEELRXKGDYYRYLAEFSTGTEKKAASDQSLMAYQHAMVVASSELSPAHQIRLGLALNLSVFFYEIMNSHERACQVAKQAFDEALTEINSGEGGYKDSTLMMQLLKDNLALWTSELTGGEASKGNDDVDMEG

SEQ ID NO: 5518 - protein, 132 aa, Zea mays
  unsure (1)..(132): unsure at all Xaa locations
  Clone ID: TF_LIB3076-006-Q1-K1-H5.pep
RVRVIVARRASCLIISSIEXKEGVLGSEEGFTLIKDYRGMIETELTKICDGILKLLXSHLVPSSTDPESKVFYLKMKGDYYRYLAEFKTGAXRKDAAENTMVGYKAAQYIDLAVLXPTHPTRLGLALNFLSV

SEQ ID NO: 5519 - protein, 85 aa, Zea mays
  unsure (1)..(85): unsure at all Xaa locations
  Clone ID: TF_LIB3066-035-Q1-K1-A7.F24.pep
KGDYFRYXLAELKTGPERKESVESTMMAYKAAQDIALTELAPTHPIRLGLALNLSVYYYEILNSPDKACNLAKHAXDETVYEVNT

SEQ ID NO: 5520 - protein, 153 aa, Zea mays
  unsure (1)..(153): unsure at all Xaa locations
  Clone ID: TF_LIB4758-032-R1-K1-H2.pep
QPTREDSGNMGKLANQARAXDEVGGSSSCERVARSAMGNGRGEELSXEERNLLTISYNNVIRGRLASWRILSSIXQKDEGRGNEAHAASIRTYRSEIKIEVDHICDGILGLLDSHVIASDDADKTKVFYLKMKGDYRRYLGEIKSGEEMKDAA

SEQ ID NO: 5521 - protein, 74 aa, Zea mays
  unsure (1)..(74): unsure at all Xaa locations
  Clone ID: TF_LIB4605-003-R1-N1-A4.pep
MALPQLFCKEDVYMRTSLLRXLQRYHEMVHVLEKVAKTVDSVELSDEERNLLHGAYQNVSGARLASLRMIFSIQ

SEQ ID NO: 5522 - protein, 124 aa, Zea mays
  unsure (1)..(124): unsure at all Xaa locations
  Clone ID: TF_LIB3632-045-Q6-K6-B10.pep
ARRWPQESSPAEEYVYMDNLGEQAERHEEMVLLMDKVATTVDSEELTEEERNLLSGAYRNVIGASRASWPIISFIEQKEEGRCNEDRVTLFEDVRGKIESXLTQICDGILKLLETHLEPSSTAP

SEQ ID NO: 5523 - protein, 60 aa, Zea mays
  unsure (1)..(60): unsure at all Xaa locations
  Clone ID: TF_LIB4665-011-Q1-K1-H11.pep
MSREENVYMAKLAEQAERYEEMVEYMEKVAKTXXXXEXIVVGGRLILVVYWTLDLVPCRV

SEQ ID NO: 5524 - protein, 73 aa, Zea mays
  Clone ID: TF_LIB4701-005-R1-K1-G1.pep
QQFKGLRISTSPGCSAPRLKRGGSARPCTEASHVGSTPNFSGDSHSKSRAQESRCQIALHSVIRQQQTLASSL

SEQ ID NO: 5525 - protein, 39 aa, Zea mays
  Clone ID: TF_LIB3632-025-Q1-N6-H2.pep
ALLELDPLNGESYKGSPFFIQLLCYNLALWAFSLSEDPS

SEQ ID NO: 5526 - protein, 447 aa, Zea mays
  Clone ID: TF_ZmC19578_1.pep
MAAVDATTKEMDALHVGQNDETKERLIKEDKAANSNHSVVAAQSLPPEDDDDDEAQADGPSQDGAAAVKKKKKKNKSKKKKGPLQQTDPPSIPVDELFPSGEFPEGEIQQYKDDNLWRTTSEEKRDLERLQKPIYNSVRQAAEVHRQVRKYMRSIIKPGMLMVDLCETLENMVRKLIKENGLQAGIAFPTGCSLNWVAAHWTPNAGDKTVLQYDDVMKLDFGTHIDGYIVDCAFTVAFNPMFDPLLQATRDATNTGIKEAGIDARLGDVGAAIQEVMESYEVEINGKVFQVKSVRNLNGHSIGPYQIHAGKSVPIVKGGEQTKMEEGEFYAIETFGSTGKGFVREDLECSHYMKNFDVGHVPLRLAKAKQLLGTINHNFGTLAFCRRYLDRLGETKYLMALKNLCDNGIVQPYPPLCDVRGSYVSQFEHTILLRPTCKEVISRGDDY

SEQ ID NO: 5527 - protein, 81 aa, Zea mays
  Clone ID: TF_700336508H1.pep
PEHDARRSAEISDTASIENCIVRWHQQSLSRDENVYMAELAEQAGMYEQMDEFMDNVQRTVESEEVTVDERNLLSDGYKNV

SEQ ID NO: 5528 - protein, 183 aa, Zea mays
  unsure (1)..(183): unsure at all Xaa locations
  Clone ID: TF_LIB4977-003-R1-K1-F12.pep
MAREENVYMAKLADYRRKXYEEMVDHMHNVPNTVDVEQLTVEERDLWSGAYXNVIGGRRASWXRIVLLLSETELTEXRNEPQSIDEPLSTEYRAQIEAELINIRDGLLXVLDSLLVASSTGAVPKVFYLKMNVDYHRDLAESTTVPDRKESADITMMVYYAAHDIASTEMRPTHPISLAIAPN

SEQ ID NO: 5529 - protein, 242 aa, Zea mays
  unsure (1)..(242): unsure at all Xaa locations
  Clone ID: TF_LIB4740-122-A1-K1-B7.pep
MAAAQLSRDENAHMGKLAEHAQRYEEMVDLLHNVPNTGDSDELAVQERNLLSAAYHNVIGARRASWSIISSIEQNEEGRGYEDRATLLTDYRGKIETELTNICDGILXVLETLLVPSSTGPELKVFYLEMNGDYYRYLAEFKTEAERNDAAENTMVAYKAAHDIALAELAPTHPIRLGLALNFSVFYYEILNSPDRACSLAKQAFDEAISELDTLSEESYKDSTLIMQLLRDNLTLWTSDIS

SEQ ID NO: 5530 - protein, 51 aa, Zea mays
  unsure (1)..(51): unsure at all Xaa locations
  Clone ID: TF_700171261H1.pep
MASAELSRYVNVYLSXLAEQAERYDVMVDFMEMVAKTVDSEELTVEERYLL

SEQ ID NO: 5531 - protein, 231 aa, Zea mays
  unsure (1)..(231): unsure at all Xaa locations
  Clone ID: TF_ZmC680455_1.pep
MGHEDAVYLAKLAEQAERYEEMVENMKIVAGEDRDLTVEERNLLSVAYKNVIGARRASWRIVTSIEQKEESKGNSSQVTLIKEYRQKIEAELAKICEDILEVLDQHLIPSAKSGESKVFYHKMKGDYHRYLAEFAIGDRRKDSADKSLEAYKAATELPXNPSFLPPTPIRLGLALNFSVFYYEILDAPXPACHLAKQAFDDAIAELDTLSEESYKDSTLIMQLLRDHLTLW

SEQ ID NO: 5532 - protein, 123 aa, Zea mays
  unsure (1)..(123): unsure at all Xaa locations
  Clone ID: TF_LIB3592-005-P1-K6-B2.pep
FQDVDSEELXVESEPLSVAYKNVIGALRASWRIICYIVHIEEGRGNVDPLTLIKDYRGXIETELTKICDGILMLFETTLEPXSMAANAKXFYIRMEGDGYIYLDEFKTGAERKDAXENTMVKF

SEQ ID NO: 5533 - protein, 105 aa, Zea mays
  unsure (1)..(105): unsure at all Xaa locations
  Clone ID: TF_700622808H1.pep
DGILKLLETHLVPSYPAPESKVFYLRLPGDYYGYLAEFTTGAENQDAAETTMVAYKAAQDIALXELARTHPIRLGLALDFSVFYYEILNSPDRACSLAXAAFDEA

SEQ ID NO: 5534 - protein, 93 aa, Zea mays
  unsure (1)..(93): unsure at all Xaa locations
  Clone ID: TF_LIB3075-002-Q1-K1-B12.pep
PHTNSSLTTTEYSPNFNTTSTPSHNCTRIKIFYLNIKGNYHQYLAXIKSYSYTKHSSYSTINPYKNAHDIALSYSTTTHPIKPSPSLNILNFY

SEQ ID NO: 5535 - protein, 92 aa, Zea mays
  Clone ID: TF_LIB4764-001-R1-M1-A2.pep
PPPLPLRLGLFFNFPMFFIEVLTSPDKAFTLSKRGFFKVFSPFTPLGGGFSKDCPLFMQLLGATFPLWAFAPPEVGFFRGKKAPKGWVGAGH

SEQ ID NO: 5536 - protein, 165 aa, Zea mays
  Clone ID: TF_LIB4729-013-R1-K1-D2.pep
MPPPPCDRPCRRRSISGDPCQAQSHHVTPGADAAGEREHGQPCRAGAAKRGDGRVHGAHEALHRRSRKKKGKNSVETYKIYIFKALKQVHPDIGISSKAMSIMNSFINDIFEKLAAEAAKLARYNKKPTITSREIQTSVRLVLPGELAKHAVSEGTKAVTKFTSA

SEQ ID NO: 5537 - protein, 43 aa, Zea mays
  unsure (1)..(43): unsure at all Xaa locations
  Clone ID: TF_LIB3137-033-Q1-K1-C6.pep
ENDDFMEKVTKTVHSDELTVXEPNLLSFAYKNLIGTLRSSCHI

SEQ ID NO: 5538 - protein, 47 aa, Zea mays
  Clone ID: TF_LIB3150-039-Q1-N1-D12.pep
LYHTQIPQPLGVTTREECAYFFIHIIYMAREENVYIANLAEHAERSE

SEQ ID NO: 5539 - protein, 99 aa, Zea mays
  Clone ID: TF_LIB3689-247-Q1-N6-F5.pep
RATTTGQAESLGTELLEMVPSREEEIKLKEYREDAVSTFVVDDYVRLEFKGSTFSGSWKSFSSPKISSTFLVVIAIVSNEIVVRVARVLTLLYIVKLSG

SEQ ID NO: 5540 - protein, 330 aa, Zea mays
  Clone ID: TF_ZmC3397_1.pep
MLGRISHYGLQHMVSPPGALTCSPNPANSARGETEPSGPKSRKGQATSTAQHSTSTPSVLGRRGEGNPGPGRVVGRGSAAEEMEEREKLVCLAKLAEQAERYDDMVEFMKNLARMDVDMSAEERHLFSVGFKNTIGAKRASWRIICSHEQKVAADRQTGVMIDAYKKKVEEELRKVCNEVLSVIAIHCLPLASTGENIVFFYKMKGDYYRYLAEFSTGTEKKAASDQSLMAYQHAMVVASSELSPAHQIRLGLALNLSVFFYEIMNSHERACQVAKQAFDEALTEINSGEGVYKDSTLMMQLLKDNLALWTSELTGGEASKGNDDVDMEG

SEQ ID NO: 5541 - protein, 113 aa, Zea mays
  unsure (1)..(113): unsure at all Xaa locations
  Clone ID: TF_LIB3117-032-P1-K1-E1.pep
NAFVLDSHLVPSDDTGVSKVXYLKMKGDYHRYLAGFKTGADRKEAADNSLLAYKSAQDIAMADLAPTHTIWLXLALNFFVFYYKILNSPDRACNLIKQAFDEAIFNLFSFMRG

SEQ ID NO: 5542 - protein, 140 aa, Zea mays
  unsure (1)..(140): unsure at all Xaa locations
  Clone ID: TF_LIB4668-011-R1-K1-A10.pep
VEVNQLQKTTTKIAQLSHDLRTEFLHKDSQLHRSHGTPPYVSIEETMHHEARRTPITFSHATIKRXRSPTMGSSQFTVITPLQHKLSHLLKPPGPGPLIPQVYILLPCHTHDIDKRTVLLQARGCVYGPGGTTDASGAAV

SEQ ID NO: 5543 - protein, 66 aa, Zea mays
  unsure (1)..(66): unsure at all Xaa locations
  Clone ID: TF_LIB3606-053-Q1-N6-E11.pep
WACSFGKQGFXEAILELDPLKEESFKGSPFVMQVLCXNLTLRTFDISEAPWEKIREGPKPDLKEGQ

SEQ ID NO: 5544 - protein, 169 aa, Zea mays
  Clone ID: TF_ZmC7516_38.pep
HPTPYENYQDSIPPQRSLLASLSDSSSVRMSPSRTGPLTFLMMRRFWSSNSIRKLPRHYSASTQPPSLPLRLEQCEDVSLANRSLDVPHDETVLVIQELHSDLGNLTPGAGPSHHLHHNSKLHLGVHTLASRAESRTEDDGLTKETGAAAAAMTALEEEGNPDAWADAW

SEQ ID NO: 5545 - protein, 71 aa, Zea mays
  unsure (1)..(71): unsure at all Xaa locations
  Clone ID: TF_LIB3597-043-Q6-N6-F3.pep
SLNSPDKACNVAEQAFDXALSELVSSGEESSKDSPMFMQLLKNNMWLGSRDRSENGAEEGKHAPKGDAGEV

SEQ ID NO: 5546 - protein, 95 aa, Zea mays
  unsure (1)..(95): unsure at all Xaa locations
  Clone ID: TF_LIB3355-009-P1-K1-D8.pep
GGGFSIPGGAPXVRDIVEYIQNVAITEXIQNGTGVEPNVVGVAYRNVIGARRASWRIGSSIEQKGEARKNEXDGNLIKGYRAEIEAXLSNICDGI

SEQ ID NO: 5547 - protein, 172 aa, Zea mays
  unsure (1)..(172): unsure at all Xaa locations
  Clone ID: TF_LIB4740-105-A1-K1-H11.pep
ETREIVYTSRTTADSPQLTVKERNLLSAAYNTPIVARPTSWPIISSFKNNEEAPCSFFLVTLINXDILAQIETDLTKICDVIXELLETHLAPSSTAPESKDFYLKMKGDYYRYLAEFKTGAERKDAAENTMVAYKAVQDIALAELAPTHPIRLGLALNFSVFYYEILNSPDR

SEQ ID NO: 5548 - protein, 93 aa, Zea mays
  unsure (1)..(93): unsure at all Xaa locations
  Clone ID: TF_LIB4975-043-A1-K1-E3.pep
MSPSEPTREESVYMAKLAEQAERYEEMVEFMERVARSXGGAGXXXXXXXXXXXXXXXXXKNXXGARRAAGRXXXTXEQKEEGRGNEAHAAASR

SEQ ID NO: 5549 - protein, 84 aa, Zea mays
  Clone ID: TF_LIB4703-004-R1-M1-F4.pep
LLDCCRKGDYYRYLAEFSTGTEKKAASDQSLMAYQHAMVVASSELSPAHQIRLGLALNLSVFFYEIMNSHERSLIFNALFLPFY

SEQ ID NO: 5550 - protein, 183 aa, Zea mays
  Clone ID: TF_ZmC2299_2.pep
SSPAGAGTGIPLWPLPCLPFPSPSSSPHPPTNPPTQSFPQPTAAVDARVFYLKMKGDYHRYLAEFKTGAERKDAADSTLAAYQAAQDIAVKELPPTHPIRLGLALNFSVFYYEILSSPDRACSLAKQAFDEAISELDSLGEESYKDSTLIMQLLRDNLTLWTSDMQEDGGDEMRDANKPDEEQ

SEQ ID NO: 5551 - protein, 134 aa, Zea mays
  unsure (1)..(134): unsure at all Xaa locations
  Clone ID: TF_LIB4740-080-R1-K1-A9.pep
PSSAHTRRIRSQDPLRHRNRVTARAAGDPDPPTRPSPARSHVAVGADAGERNLLSVAYKNVIGARRASWRIISSIEQKEEGRGNEAHAASIRAYRSKIEAELARICDGILALLDSHLVPSAXGAEXKXFYLTMK

SEQ ID NO: 5552 - protein, 160 aa, Zea mays
  unsure (1)..(160): unsure at all Xaa locations
  Clone ID: TF_LIB4666-010-Q1-K1-A7.pep
AGPLCWGAYPSRVWFTIDTNGFLNVHGEDNTAXQQNNITVSTDTGGLCREENEGVGHDAVQVGGRDAQHEGKSPRHXAGEHNSTTLRYTIKARXITSKLTAVDQTKNXDAPDSAISWAGRQPAPRGGTSSETRMKDLESLXCNPIIPNMYTGRGCPHGEG

SEQ ID NO: 5553 - protein, 52 aa, Zea mays
  unsure (1)..(52): unsure at all Xaa locations
  Clone ID: TF_LIB3279-037-P1-K1-D2.pep
EELIGEDQNLLFVEYKNVIGAGRAXWPIISSINQKEEGRGNEDRLPLIKDNR

SEQ ID NO: 5554 - protein, 71 aa, Zea mays
  unsure (1)..(71): unsure at all Xaa locations
  Clone ID: TF_LIB4667-011-R1-K1-E4.pep
RRPPLDPQFPAPERNPAPEKFVLYRYYRYGREENVYMXKLAEQAERYEEMVEYMEKVAKTVDVEELTGEER

SEQ ID NO: 5555 - protein, 75 aa, Zea mays
  unsure (1)..(75): unsure at all Xaa locations
  Clone ID: TF_LIB4740-011-R1-K1-C5.pep
MSPSEPTREESVYMAKLAEQAERYEEMVEFMERVARYAGGAGGGGGLSVXERXLLSVAFXXRLGARXASWRFLSS

SEQ ID NO: 5556 - protein, 82 aa, Zea mays
  Clone ID: TF_LIB3279-053-P1-K1-D2.pep
PRVRKESAESTMVAYKAAQDIALAELPPIHPIRLGLALNFSVFYYEIQNSPDKACNLAKEVGVHLSFYCCTGFLSYNYLRCC

SEQ ID NO: 5557 - protein, 83 aa, Zea mays
  unsure (1)..(83): unsure at all Xaa locations
  Clone ID: TF_LIB4729-017-R1-K1-B5.pep
MSESFVVGYRTRAGTTCASWCIIXCFPQRADSRGTDDRPTFIKDYRGKIETELTKICDGILXCLRPHLVPSSTATDXRAFYLK

SEQ ID NO: 5558 - protein, 48 aa, Zea mays
  unsure (1)..(48): unsure at all Xaa locations
  Clone ID: TF_LIB3236-088-P1-N1-C9.pep
EAIWEMETLKKESXKERPLIMKLLCDKLTLWTFEISEDPAEKIREGPK

SEQ ID NO: 5559 - protein, 199 aa, Zea mays
  unsure (1)..(199): unsure at all Xaa locations
  Clone ID: TF_LIB4979-021-A1-K1-B8.pep
TVPWQHQSFPDEDNVTWQKLAQKADRYHEMSESHXQKVPRTADSKELTGEERNLLSGAYKNAIGARRASWRIISSIQQKEEGRRYDDRPTLLXDYRAKTETEPXPICDGILKLLDTHLVPSSTAPETTVFYLWMTGDYYTYLAEFTTGGERSDSAENTMMRYPVAHDIALGELAPTHPIRIGLRLNFSMCYYETLNVPD

SEQ ID NO: 5560 - protein, 181 aa, Zea mays
  Clone ID: TF_ZmC290_20.pep
MSPSEPTREESVYMAKLAEQAERYEEMVEFMERVARYAESKVFYLKMKGDYHRYLAEFKSGAERKDAAESTMNAYKAAQDIALADLAPTHPIRLGLALNFSVFYYEILNSPDRACNLAKQAFDEAISELDSLGEESYKDSTLIMQLLRDNLTLWTSDTNEDGGDEIKEAAAAPKESAPEGQ

SEQ ID NO: 5561 - protein, 165 aa, Zea mays
  unsure (1)..(165): unsure at all Xaa locations
  Clone ID: TF_LIB3960-019-Q1-K6-F10.pep
GRSNVYMAQLAEHAXRCEEMGVVYXEKVANTVYGEELTVEERNLLWAAYKNVIGARRASWSIASSIEQKEESRLNEXMLTLCKEYRANIVAELINICDGILMLGDSHLLPSSTAGESNVFYLKMKGDYHRYLAEFKTGPDRNECAGSTMMDYMAAPDIALAELAP

SEQ ID NO: 5562 - protein, 179 aa, Zea mays
  Clone ID: TF_ZmC3397_4.pep
ATSSPSAPLSILFFLSSPSPWPRRLVFRKGTRALAPVRRSPRRGVRSAALPVHPPPKPPPVPVQQHAPSSSPGAFSVNQTRPAVPHPCDSRSAGPSVTSASSPSLRPYPSSPHPPSYALSAWPPHPGVLRFWGASLCPLRSAPPESGPAERTTTQIGSCPSLPALQSLRRRIRRLICSI

SEQ ID NO: 5563 - protein, 420 aa, Zea mays
  Clone ID: TF_ZmC290_29.pep
MAEAWGKLHLPSHPQIVTAQASPPHVPRPHLVHAANTISTQPELLTCSTVHPPPSHNADHTYSLPHRTPRRAPRSFGRHVIPLTCGPRTRCPGFASSSNAPTRPPIASPTSAQTRRFRSTGSSAPPTTVRPSVLPATPIRRPVPSHHTLPPLAAMSPSEPTREESVYMAKLAEQAERYEEMVEFMERVARSAGGAGGGEELSVEERNLLSVAYKNVIGARRASWRIISSIEQKEEGRGNEAHAASIRAYRSKIETELARICDGILALLDSHLVPSAGGAESKVFYLKMKGDYHRYLAEFKSGAERKDAAESTMNAYKAAQDIALADLAPTHPIRLGLALNFSVFYYEILNSPDRACNLAKQAFDEAISELDSLGEESYKDSTLIMQLLRDNLTLWTSDTNEDGGDEIKDAAAPKESAEGQ

SEQ ID NO: 5564 - protein, 41 aa, Zea mays
  Clone ID: TF_LIB3150-026-Q1-N1-F5.pep
MAREENVYMAKLAEHALRFEEVVEYMDEAASTCKFARRLQI

SEQ ID NO: 5565 - protein, 109 aa, Zea mays
  unsure (1)..(109): unsure at all Xaa locations
  Clone ID: TF_LIB3159-019-Q1-K1-C2.pep
KIYAYLSIFSRGILKLLEGGLMASSTATKSDAFYLMMKGDYHRXLMHLILAADRKESAESTVVAYTAAHDIALSDPSPTHPIRLGLALNFSVFYYEIMYSPDKACNLAK

SEQ ID NO: 5566 - protein, 126 aa, Zea mays
  Clone ID: TF_LIB3061-001-Q1-K2-D4.pep
RIICCIEQNEEGRGNDDRVTLIKDYRGEIETELTTICDGILKLLESHLEADFTAPESNVYYLKMNGDYYRYYDEFKTEAERKDATENTMVAYMAAHDIAQDDLAATHAITLGLTLNLSVIYYEILN

SEQ ID NO: 5567 - protein, 258 aa, Zea mays
  unsure (1)..(258): unsure at all Xaa locations
  Clone ID: TF_LIB4744-110-B1-K1-G10.pep
IGYLEAGREPPFHLLRSDRTTRQGTRVSRLLHFPENSQPPTSHPSRFPWLTNVSTASLAEQPHTYEEMEVXLDIVTDTVDSEEXTGDALNLSELLVYXNVPRYPRRASRLLISSIHQKEQVQHDEXQAALIRDYQDTIDXLHLTNISRWRSSSSLETHLEATSSAPESQDFYLMMKGDYYLYLAEIKTGAERQDAAENTMMAYKAAHDIALAELAPTQPIRLGLAXNFSAVYYEILNSPDRACSLAKQASDEDISELD

SEQ ID NO: 5568 - protein, 155 aa, Zea mays
  Clone ID: TF_LIB4172-011-Q1-L1-B7.pep
MEKTELIQKAKLAEQAERYDDMATCMKAVTEQGAELSNEERNLLSVAYKNVVGGRRSAWRVISSIEQKTDTSDKKLQLIKDYREKVESELRSICTTVLELVDKCLIANATNPESKVFYLKMKGDYLRYLAEGACGDDRKRTMENWRGAYQEAFGV

SEQ ID NO: 5569 - protein, 217 aa, Zea mays
  unsure (1)..(217): unsure at all Xaa locations
  Clone ID: TF_LIB4979-042-A1-K1-B4.pep
SLNICARDENVYMDKVAEQAEQDEEMAEYMXNAAKTAHVQHLTXQDRNLLSXAYKNVTAARRASWRIASXSIEPQEEPRTNQQHENLIKEYRGKIEAELSDICDGILKLLDSHLEPSSTAAESKVFYLKMNGDYHRYLAXFKTGAERKESAESTMEAYHAAHDIALAELAPTHPIRMRLALNISVFDYDSLNSPYKAGNLAKQALDEAISELYRLGD

SEQ ID NO: 5570 - protein, 69 aa, Zea mays
  unsure (1)..(69): unsure at all Xaa locations
  Clone ID: TF_LIB3354-052-P1-K1-C9.pep
MSPSEPTREESVYMAKLAEQAERYEEMVEFMERVARYAGGAXXGDKLYWEERNLLDDASCTSFAPTGPG

SEQ ID NO: 5571 - protein, 133 aa, Zea mays
  unsure (1)..(133): unsure at all Xaa locations
  Clone ID: TF_LIB3062-057-Q1-K1-B12.pep
HKEETRSAAVHADVARGYRARVEAELSGICAGMLRLLDERLVPAAAAVDARVFYLKMKGDYHRYLAEFKTGAERKDAADSTLAVYHAAQDISVKELPTTHPIRLGLALNFSVFYYEILSXPDRACSMAKHALD

SEQ ID NO: 5572 - protein, 68 aa, Zea mays
  unsure (1)..(68): unsure at all Xaa locations
  Clone ID: TF_LIB3066-020-Q1-K1-G3.pep
RRCFIGNIDLARDENEHMAKLDEQAXKVXELVETMVKVAKTVXLVDLSDEQRKLLTDVYQNAIGALTT

SEQ ID NO: 5573 - protein, 79 aa, Zea mays
  unsure (1)..(79): unsure at all Xaa locations
  Clone ID: TF_LIB3180-012-P2-M1-C12.pep
LLSRVREKVAKTVYVEERTCXERNLLSVAYKNVIGARRASWRIXSSIVQKEVSCXNVEHVYLIKEYLGMIVVCTCLYMI

SEQ ID NO: 5574 - protein, 53 aa, Zea mays
  Clone ID: TF_700618362H1.pep
ILNHLFRPFGLLSQLGHVDILLRRHIDNIDERAGLLLARGCVSGAGELRLEPN

SEQ ID NO: 5575 - protein, 79 aa, Zea mays
  unsure (1)..(79): unsure at all Xaa locations
  Clone ID: TF_LIB4742-006-R1-K1-G4.pep
MSPSEPTREESVYMAKLAEQAERYEEMVEFMERVARYAGGAGGXXVLSILERNLLSVDYYKRLXTRRSWWRIMSSSCFR

SEQ ID NO: 5576 - protein, 233 aa, Zea mays
  Clone ID: TF_LIB4729-103-Q1-K1-F4.pep
RAGRETPHKRVASAPQDPLRHRNRVTARAAGDPDPPTRPSPARSHVAVGADAGGERVHGQACGAGVAVRGDGRVHGARRALRRGRRRSRARVATLQSLAALAPGDAITAARILVLASDGEYLMEMGIGTPTRYYSVILDTGSDLIWTQCAPCLLCVDQPTPYFDPARSATYRSLGCASPACNALYYPLCYQKVCVYQYFYGDSASTAGVLANETFTFGTNEDPGRPAGHLVSG

SEQ ID NO: 5577 - protein, 195 aa, Zea mays
  Clone ID: TF_ZmC787_5.pep
MASAELSREENVYMAKLAEQAERYEEMVEFMEKVAKTVDSEKLLESHLVPSSTAPESKVFYLKMKGDYYRYLAEFKTGAERKDAAENTMVAYKAAQDIALAELAPTHPIRLGLALNFSVFYYEILNSPDRACSLAKQAFDEAISELDTLSEESYKDSTLIMQLLRDNLTLWTSDISEDPAEEIREAPKHDSSEGQ

SEQ ID NO: 5578 - protein, 61 aa, Zea mays
  unsure (1)..(61): unsure at all Xaa locations
  Clone ID: TF_LIB3180-017-P2-M1-F3.pep
ADLYREEKWYMPMLAEQAXMYHEMAAFMEKASKTVDMAELTEDDRNLQSDAYKNVIGAPSA

SEQ ID NO: 5579 - protein, 83 aa, Zea mays
  unsure (1)..(83): unsure at all Xaa locations
  Clone ID: TF_LIB3069-008-Q1-K1-A8-TGA.pep
DILSSPQKAFSRENRAFDGSILELNTLGGESYKKSSLIMHLMRYILAFGTXPLKEDGFDEVKDALKENAGEGQLSWEGGAKLF

SEQ ID NO: 5580 - protein, 70 aa, Zea mays
  unsure (1)..(70): unsure at all Xaa locations
  Clone ID: TF_LIB189-013-Q1-E1-G10.pep
VDRRVREMIEYMDKVTKTVATEEHTVEDPIDESVAXTIVIGTLRASWRITSSIEPTDEGQGDDDRITDIM

SEQ ID NO: 5581 - protein, 129 aa, Zea mays
  unsure (1)..(129): unsure at all Xaa locations
  Clone ID: TF_LIB4764-052-R1-K1-H2.pep
MSWEDNAYLHKLDAQVERHEXMVDHMENVAKTVYVEELTVDEHNLLSVDYHNVIGDRRASWSIISSIXHKEDSRNNEEPVIQIKEYRGKIGAEMSNICDGILKVIDSHLVTSSTGAEAKVVYLLMKGDY

SEQ ID NO: 5582 - protein, 40 aa, Zea mays
  unsure (1)..(40): unsure at all Xaa locations
  Clone ID: TF_LIB3059-008-Q1-K1-C8.pep
ENVYMAMLAYLSERYEXMVEYMENVSNTVYVEVLTVEERN

SEQ ID NO: 5583 - protein, 101 aa, Zea mays
  Clone ID: TF_LIB3206-083-P1-N1-C10.pep
MGLQQSKEELLYQQVNYGNVDGIRTLRGQGAGLEWIDKEGKTPLMLACMRPDLFDVAKVLIELGANVNAYRPGSHCGTALHHAAKKGLQQTVHLLLSHGGI

SEQ ID NO: 5584 - protein, 154 aa, Zea mays
  Clone ID: TF_LIB4740-081-R1-K1-E4.pep
MGHGVSCARTGDEHDYFRAAQVGDLEALDALLDADPSLARRATLYDRLSALHIAAANGRPEVLSMVLDHGVPPDVVNRHKQVRCGIPSPSTLFFFLSSFLSILCRSQGSLVGYPLQKSHLFFSYPLQSNQQGKKSHLSTGLLCLFFSVQTPLML

SEQ ID NO: 5585 - protein, 187 aa, Zea mays
  Clone ID: TF_ZmC1188865_1.pep
LEIHAECGCQLPDIAYCILFVLHFIQRLHNPGQIGAQLLGRLELFSKCTEITSRISGCVGLGRSAGCLLLPLFDGGGKPHDVAAHSEGPSGFIPFGLDSDVHALVLQERLGHLSPAACCRVHQGRPAILILLVDIYLRTGEEERQQLGKLLLGPPFIRTKVPLHRITEAMERGQAHRFINLARVGSE

SEQ ID NO: 5586 - protein, 67 aa, Zea mays
  Clone ID: TF_uC-zmroteosinte086c03a1.pep
SEPITETNDDITPLLFAVIVGSSFPCLKILIQAGANPNMRAGGATPLHVAVGSASIEVIRLLVEVLK

SEQ ID NO: 5587 - protein, 315 aa, Zea mays
  Clone ID: TF_ZmC1339_1.pep
RLEAGKRQSGKDATGKVAHSAGSSLRRYNEAALKKVLNLMLVDFYVCSKSKCLSLFFRCLSFLFALLQEVQELIVSWKSYFETCVCAFIYAPSRNRQMLFDGEKTQSVIQSCDVRPVPLTVHRPTMKEAKRVYCNLTQLYYEMECSTTDETLPDAGSVKNVEQGQGKKNEVTADPGESISDLSARLELLNKNEAATIPSSKNETTPLHEAAKCGNAQLTLELLEQGLDPCVKDARGKTSYSLASDKEVRNTFRRFMALNLDKWDWHAADVPSALTKEMEESQAAKQADKDAKRKARAKELKKLKKKKKKGGRLAI

SEQ ID NO: 5588 - protein, 112 aa, Zea mays
  unsure (1)..(112): unsure at all Xaa locations
  Clone ID: TF_LIB3115-030-P1-K1-C7.pep
HTRPEGAPEDLGKFLAPGGEVNMGDPEGGTPLNWVVDRGHLSVVGVLAKLNAALIAKATEGQTELHSAVVGERENIXKLLVKHHASFKIRDEVGTTEQDLCLPSCVLLNRPN

SEQ ID NO: 5589 - protein, 225 aa, Zea mays
  Clone ID: TF_ZmC503_2.pep
MTLSIWMNGELNDLESNLVGKKTGRSLPATMLAAELIVPPAQEIKEFFAITEASRTNVSLPQMFRFQVRLYCPDCDELLDTRGRNFLHTAIEHKKWKVVWRFSGTADLGRMANVMDSEGNTPLHLAIKNADQMIVSLLMATNSVLPNIVNNQGLTALDLAVLATDKGISYTMVIILRCLAWTGAVLSPRRLDHFIDDFGIGKTSGNELKKFTNIAQKKHGIVFIF

SEQ ID NO: 5590 - protein, 161 aa, Zea mays
  unsure (1)..(161): unsure at all Xaa locations
  Clone ID: TF_LIB4829-021-R1-N1-F4.pep
MIEPSIRVRRAIHANDATLLRRILKTHPSYLLNPDSSPSGLSNSNMHLAASLGHHEVCAVLLKLGHEDPCPALNESHQTALMLAAAGGHTEVVQILCEHDKTCILRRDVRGRDAVMEASLGGHDTILQLLLTXVPGGLYDAVRRADVEGDTALHFASGTET

SEQ ID NO: 5591 - protein, 682 aa, Zea mays
  Clone ID: TF_ZmC912_1.pep
RRRLFSFDSLVFLEGDEGRFRRARTDAAMAGVDAARYAHSPAHHAVAARDHAALRRVLDALPRARRPEEIRTEADSVAEEARAEAVSAVIDRRDVPGRETPLHLAVRLCDPTAAEMLMAAGADWSLQNEQGWSALQEAICTREEALARVIVRHYQPLAWAKWCRRLPRVVAAMRRMRDFYMEITFHFESSVIPFISRIAPSDTYRVWKRGSNLRADMTLAGFDGFKIQRSDQTILFLGEGSEDGKVPPGSLCMINHKDKEIMNALEGAGTPASDAEVQQEVAAMSQTNIFRPGIDVTQALLLPQLTWRRQERTEAVGPWKAKVYEMNHVVVSVKSRRVPGAMTDEEFFSSCNDNDIESEGFDDVLTEEEKKQLEAALKMDSPDAGGEDQSDSFAGPRHSCFEPREREVPIEDMSVSGNGEGKHDKKGWFSNWGKRSQVSKSEGVKKMASPRNSLCVDDKVSDLVIESPSNVQTRPGRHSVDVVRPDDNRRIRERDSRRHVASAENGHRRKEGSKESEYKKGLRPVLWLSPNFPLRTEELLPLLDILANKVKAIRRLRDLLTTKLPPGTFPVKVAIPVVPTIRVLVTFTKFEELQPLDEFTTPPSSPDNSKSPAVQPSSSSWIQWIKAPYLQNLSTAPGPSSRVEDIQDPFAIPSNYVWTTPEEKKKKTQENKNKSKKGRSGA

SEQ ID NO: 5592 - protein, 820 aa, Zea mays
  Clone ID: TF_ZmC489_1.pep
MLTILRDLLPLYPHLRMVLMSATIDAERFSQYFNGCSVIQVPGFTYPVKSFYLEDVLSILQSAEQNTEVYNYQHSETGITPLMVFAMKGQLGDVCMLLSFGVDCSAQDHDGKSALDWAQQENQQEVCEVIKKHMECSSEKSTEDNELLNKYLASINPEHIDTLLIERLLRKICVDSNEGAILVFLPGWEDISQTRERLFASPFFQDSSRFLVLSLHSMIPSSEQKKVFKRPPVGVRKIILSTNIAETAVTIDDVVFVIDSGRMKEKSYDPYNNVSTLHASWVSKASARQREGRAGRCQPGTCYHLYSRFRASSLPDYQIPEIKRMPIEELCLQVKLLDSNCRIADFLKKTLDPPIPETVRNAIAVLQDLGALTQDEQLTELGEKLGSLPVHPSTTKMLLFAILMNCLDPALTLACAADYRDPFVLPVAPDERKRAAAAKVELASLYGGFSDQLAVVAAFDCWRHAKDRGQDSQFCAKYFVSSNIMNMLSSMRKQLQNELSQRGFVPADASACSLNSKDPGIMRAVLMAGAYPMVGKMLPPRKNARKSVLETASGAKVRLHPHSCNFNLSFSKSSGNPLLIYDEITRGDGGMYIKNSSVVGSYPLLLIAAEMVVAPPDDDSDEDEEDSSEDEAEESTLVQHKEEIMSSPDSIVSVVVDRWLRFDATALDVAQIYCLRERLASAILFKVKHPQDVLPPALGASMYAITCILSFDGLPSMVPPNDLSANRGSGQDLAEASKFSQGRRAGYIPPSGFLMSLLADRTHNAPSFQNSSNHPGGGSAHTRPSRAPVGRFDRSRRPFRNSGPGSSAPRSFKRQRDAPR

SEQ ID NO: 5593 - protein, 632 aa, Zea mays
  Clone ID: TF_ZmC16049_1.pep
MDDVSKYAHSPAHLAVLRRDHAALRRLVAALPRLPRAGEVATEEESVAGEAVADAVSAVIDRRDVPRRETPLHLAVRLRDPVAADILMSAGADWSLQNADGWSALQEAVCTREEAIATIIARHYQPLAWAKWCRRLPRILASISRIRDFYMEISFHFESSVIPFIGRIAPSDTYRIWKRGAALRADMTLAGFDGFRIQRSDQTFLFLGDGARPEDAGGKELHPGSLIVLAHKDKEITDALEGAGVQPTESEVAHEVALMSKTNMYRPGIDVTQAELVPHLNWRRQERTEAVGQWKAKVYDMLNVLVTVKSRRVPGAMTDEELFAMDGEEKNGRGAELDAELDEVLTAEERKQLDSALRMGNNEEESEERGDEGDAGADHTDASGVTKDKKGWFGWGAKKGAKGDDKPSKVGSKDETSDPGKQKEKGSGKKKKGGSSAESVKHESEYKKGLRPVLWLTPDFPLKTDELIPLLDVLANKVKAIRRLRELLTTKLPTGTFPVKIAIPIVPTIRVIITFTKFEELQPLDEFATPPSSPTQFQDAKAKEPEGSGSWYSWVKGGRGTQSGDSGDGRNWKDEVDPFHIPSDYTWVDATEKKRRMKAKKAKSRRTTARKQSSKNTSSEGGHRPMMDGFEE

SEQ ID NO: 5594 - protein, 633 aa, Zea mays
  unsure (1)..(633): unsure at all Xaa locations
  Clone ID: TF_ZmC16049_2.pep
MDDVSRYAHSPAHLAVLRRDHAALRRLVAALPRLPRAGEVATEEESIAGEAVADAVSAVVDRRDVPRRETPLHLAVRLRDPVAADVLMSAGADWSLQNADGWSALQEAVCTREEAIATIIARHYQPLAWAKWCRRLPRILASISRIRDFYMEITFHFESSVIPFISRIAPSDTYRIWKRGAALRADMTLAGFDGFRIQRSDQTFLFLGDGARPEDAGGKELHPGSLIVLAHKDKEITDALEGAGVQPTESEVAHEVALMSKTNMYRPGIDVTQAELVPHLNWRRQERAEAVGQWKAKVYDMLNVLVTVKSRRVPGAMTDEELFAMDGEEKNGRGAELDAELDEVLTAEERKQLDSALRMGNNEEESEQRCDEGDTGAGHMDEHAAAKDKKGWFGWGGKKGAKGDDKPSKMGSKDETSDPGKQKEKGSGKKKKGGSPAESLKHESEYKKGLRPVLXHELTPDFPLKTDELIPLLDVLANKVKAVRRLRELLTTKLPTGTFPVKIAIPIVPTIRVIVTFTKFEELQPLDEFATPPSSPTQFQDAKTKESEGSGSWYSWVKGGRGTQSSDSGDSRSWKDEVDPFHIPSDYTWVDATEKKRRMKAKKAKSRRGPARKQSSKNTAEGAHRPMMDGFEE

SEQ ID NO: 5595 - protein, 323 aa, Zea mays
  Clone ID: TF_ZmC119_1824.pep
LTLVAKLALNVRDKKGNTALHIATRKWRPQMVQLLLSYESLEINAINIQNETAMDLADKVPYGESKTEIIEWLTEAGAKNARNVGKIDEASELRRTVSDIKHNVQAQLSENAKTNKRVTGIRKELQKLHREAIQNTINSVTMVATLIASIAFVAIFNLPGQYFQDVNSGGDIGEAQIAKLTGFRVFCLLNATALFISLAVVVVQITLVAWETGAQKQVIKIVNKLMWTACLSTGAAFISLAYVVVGPQHAWMAFTVSAIGGPIMIGTLLFLAYLLLRPRFKFGEDRQRRIKRASGSKSFSWSLHDGFSDLEAFSDHEKKIYAL

SEQ ID NO: 5596 - protein, 130 aa, Zea mays
  Clone ID: TF_ZmC145468_1.pep
HAYACLHIACIYGHERFCRDVLALTTNSQQSPAAAPLLVTINADGETPLLAAVASGHVSVALFILGRCREERLSEAILTQDKRGFNALHHAIRNGHRGLALQLVDAEPGLSKAVNKHDESPLFIAVMRNY

SEQ ID NO: 5597 - protein, 105 aa, Zea mays
  Clone ID: TF_ZM4878.C14.o1.fg.pep
MQGRPDYVQVPRQHIIASGRSQWGPRLHPENARLGCGSSLEGLNRPLTDSQASDAELCCICFEQACTIEVQDYGHQMCAACTLALCCHSKSYPATLTPPSLDCPF

SEQ ID NO: 5598 - protein, 762 aa, Zea mays
  Clone ID: TF_ZmC912_2.pep
SGSNTTEPNRGRRERAREHKEARQGSRDRLQDWGRLVGKKGSSSFSSITGRLISAAILSAQFLAAADKSEEQRRCFLSPIPSASCGVVGCVATKGGSPGRGRTPAMAGVDVARHAHSPAHHAVAARDHVALRRVLEALPPARRPEEIRTEADSVAEEARAEAVSAVIDRRDVPGRETPLHLAVRLCDATATEMLMAAGADWSLQNEQGWSALQEAICAREEALARVIVRHYQPLAWAKWCRRLPRVVAAMRRMRDFYMEITFHFESSVIPFISRVAPSDTYRVWKRGANLRADMTLAGFDGFKIQRSDQTILFLGEGSEDGKVPPGSLCMINHKDKEIMNALEGAGAPASEAEVQQEVAAMSQTNIFRPGIDVTQAVLLPQLTWRRQERTEAVGPWKAKVYDMNHVLVSVKSRRVPGAMTDEEFFSSSNDNDTESEGFDDVLTEEEKKQLEAALKMDSPDAGGEDQSDSFAGPRHSCFEPREREIPIEGMSVSGNVESKHDKKGWFSNWGKRAQVSKPERVKKMAPPRSSLCVDEKVSDLLFESPSNAQTRPGRHSVDVVRADDNRRIRERDSRRYVPSAENGHRRKEGSKESEYKKGLRPVLWLSPNFPLRTEELLPLLDILANKVKAIRRLRDLLTTKLPPDTFPVKVAIPVVPTIRVLVTFTKFEELQPLEEFGTPPSSPDKSKSPAVQPPSSSWIQWIKAPYYRQMNLFTAPGPSSRVEDIHHQDPFAIPSDYVWTPPEEKKKKTQENKNRSKKGRNG

SEQ ID NO: 5599 - protein, 225 aa, Zea mays
  Clone ID: TF_ZmC605702_1.pep
MAPLFAESLRARNNRGERGLHEAVRRGNTEAVESLIWMDENVDGGRTSRTPSLVQRVDYQGVSPLYLATTLRRGDIVGILTHPSQNHYSPSFSGPGGKTAMHAAVLAKGDAKVLTKKLLEWTTSKNYPGGARDLICMGDKSGSTPLHLLASEGGASVAELLLSPDARELSWARRLLSKICPCTSPAGNAASADDDDDDTREGGSCTAAALKKTPMAGFPYMSLRR

SEQ ID NO: 5600 - protein, 85 aa, Zea mays
  Clone ID: TF_700102367H1.pep
LKKMLHQQLVPRVVLVEQMKAQRDTAALHGDEQRRLAVVVGGGEQRRRAGTMETRLLRQDLAAEVLVAAESGDVEAGVPFFSCLV

SEQ ID NO: 5601 - protein, 225 aa, Zea mays
  unsure (1)..(225): unsure at all Xaa locations
  Clone ID: TF_ZmC176290_1.pep
YRSSPPSPLNENANAPCDHYPTACAQDLASRPHPLCRRRRPRTPRRWRCCWSWRRRTTSWGSGAPWRATKPQPWTTRVTGTARPPRPPAASACASRRALRPWWPRSTAARRCWRTCCPPRRRRPRAPRPRTAPRRSTSPRPAARRAPSRPRTCSWPLARPPTRSLSRASAPATSSRAPTPXPTGTARSACSSSPPRRRRRPRPRSPPRXHRRRRELRRRSRRRST

SEQ ID NO: 5602 - protein, 68 aa, Zea mays
  Clone ID: TF_701171021H1.pep
QQKSHLFFSYPLQSNQQGKKSHLSTGLLCLFFSVQTPLMLAAMHGKTDCVLKLLQAGANVSGNLLLLF

SEQ ID NO: 5603 - protein, 249 aa, Zea mays
  Clone ID: TF_LIB4829-068-R1-N1-B10.pep
MSLQDEELGQQLYLQMRQRQQIALRAQQMAASQRQQAVNQMGGQMGNTMNQMNATTIHQMGSPFDDIPVQAPEDNNILYQRNVSPEVASFFSACKAGDMSTIQSIVTSQPRSPVFLHRGLINALESGNVDVARYLLQSGAPISRQTPGIVLKAPADRQIALFEALAEHGWTVNTPSYYGEVLLTRLIRSNNEHLIDWFLAQGANPNLGRQHDQRDRLGGPDTNSCQALELAASHGSVNLVQKLLAGAEI

SEQ ID NO: 5604 - protein, 254 aa, Zea mays
  Clone ID: TF_ZmC885_2.pep
EGKVPLWEALCEKHNAVIELLVESGAELSSGDTALYACIAVEENDAELLLEHGADVDKQDSNGWSPRDLADQQGHDDIQALFKSRKAHRKHASNGRVAPMLIGRFNSEPSMPDMSHENARVRSEVVPQKLLRKRVSFQNSLFGVISSSHAHQDTGRLLSKGLAGTEGPNCRHDSLIRVTISCPEKGGNAAGKLVRLPRSMAELLELGAKKFGIKPGKVLTVGGAEIDEVELIRDGDHILLVSDEWVPDVEQIRP

SEQ ID NO: 5605 - protein, 274 aa, Zea mays
  Clone ID: TF_ZmC353_2.pep
TSETDTSLAPFNMWRFRNLGVFAMEREWCAVIKMLLDFLFIGLVDVGSRSAEEMVLSENLLHAAVRRKSVNMVRFLLRYKPNKNSKGTAQAYLFRPDALGPSKITPLHIAAATSDAEDVLDALTHDPGLIGISAWSNARDETGFTPEDYARQRGNGAYLNLVQKKIDKHLGEGHVVLGVPSSICPVITDGVKPGDVSLEICRAMSASVPGCLLCSRQARMHPSSTARTFLYRPAMLTVMGVAVVCVCVGILLHTFPRVYAAPTFRWELLERGPM

SEQ ID NO: 5606 - protein, 110 aa, Zea mays
  unsure (1)..(110): unsure at all Xaa locations
  Clone ID: TF_jC-zmX700157144b1.pep
TPARAPARNPGGDTTRAFSLHMGKQEAELTLRGNSAASYGELTSCKXLIRAVADGKDTGYNDRSALHFAGCXRYEGVAQVLINQGVDMDHTDQLWNTPLLEAAKQGHQRG

SEQ ID NO: 5607 - protein, 99 aa, Zea mays
  Clone ID: TF_700614359H1.pep
GNTPLHLACEQGCLASVGVLTQSCTTPHLHSILKATNYNGHTCLHLASIHGYLGIVELLVSLGADVNAQEPCNGRTALHLAVDLQNPDLVSLLLKCGAD

SEQ ID NO: 5608 - protein, 123 aa, Zea mays
  Clone ID: TF_LIB4171-014-R1-L1-H4.pep
LAPSLVFPAQCKCNRPTGDGGYLFRFKVSKADSLSGRTALHVAAAGGHVRCARLLLAGAGSGRSKLVNRAASGGGGGVTALHLAALHGHADCVHLLVDERADVAARTLPCAAPSMACGGAGSA

SEQ ID NO: 5609 - protein, 324 aa, Zea mays
  unsure (1)..(324): unsure at all Xaa locations
  Clone ID: TF_ZmC17166_2.pep
MAGDWQDLGQAAAIGLLFAFLLAKLISTVIAFKEDNLRITRSPPSSPTAAAPAPATSPLPSQHDAAIGSGSDSDWEGVESTELDEEFSAASAFVAASAASGTSVPEEAQLRLYGLYKIATEGPCTGPQPSALKLKARAKWNAWHKLGAMPTEEAMQEYITIVQELFPNWDAGTSAKRKDEESITSASASKGPMGPVFSSLMYEEDEGNDSELADIHVLAREGATEDIVKFLAAGVXVNMRDTEGRSPLHWAVDRGHLSAVEVLANANADLNAKDNEGQTALHYAAVCEREDIAELLVKHHADLRITDEDGNTAHDLCPSRAGLL

SEQ ID NO: 5610 - protein, 153 aa, Zea mays
  Clone ID: TF_ZmC2253_1.pep
LVELLVEQGAAVNMQNFVGETALFIASSLGLNLICLFLLENGGDTRISTLEGSSPLHAASACGHLSVIKSLVSHGAFVNSTDEEGDTPLHYAVREGKKEAVGLLVQLGAQLIKNEDLESPLDLAEEFDETWMVDLLSNHFPSLRSDSEHGFCF

SEQ ID NO: 5611 - protein, 468 aa, Zea mays
  unsure (1)..(468): unsure at all Xaa locations
  Clone ID: TF_ZmC54251_2.pep
GLYVAAEKGHAEVVREILRSVXVQTAGIKASNSFDAFHIAAKQGHLEVLKEMLQALPALAMTTNSVNATALDTAAIQGHVDIVNLLLETDASLARITRNNGKTVLHSAARMGHVEVVRSLLNKDPRIGLRTDKKGQTALHMASKAQNAEIVVELLKPDVSVIHIEDNKGNRPLHVATRKGNIIIVQTLLSVEGIDVNAVNRSGETAFAIAEKMDSVELVNILKEAGGEAAKQHKXHPPNSAKQLKETVSDIRHDVQSQFKQTRQTKMQVNQIKKRLEKLHIGGLNNAINSNTVVAVLIATVAFAAIFTVPGNFVEELSQAPPGMSLGQAYVASNPAFIVFLVFDALALFISLAVVVVQTSLIVVERGAKKRMVFVMNKLMWLACLFISVAFIALTYVVVGRDDWWLAWCTMGIGAAIMLTTLGSMCYCIVAHRQCFVSPEAAPWHAAPHQSSSTKGTGGPPGRPRGTQ

SEQ ID NO: 5612 - protein, 244 aa, Zea mays
  Clone ID: TF_ZmC36749_1.pep
MAAAMDVDEAGGEERRPSEKELFRAAESGDAAAFASLAPADLSLRNEDGRSLLHVAAAAGHPQVVLALAQCGGDAAASVLNAQDEEGWAPIHSAASSGNSQIVDILLERGADVNLVTDGGRTALHYAASKGRLNIAEKLIAHGANVNKKDKFGCTPLHRAASTGNAELCEFLIEEGAEVDAVDKTGQTPLTHAVICENKGVALLLIRHGADVDVEDKEGYTALGRASNSFRPALIDAAKAMLEG

SEQ ID NO: 5613 - protein, 222 aa, Zea mays
  Clone ID: TF_LIB4756-028-Q1-K1-G7.pep
MALPPPTIDLLLNLIDTRPQSILTSLAQHPQVSSARDAHGYSLVHAAASYNQLAVLRDLIQKFNADVNILDEDGETPLFAAEKIEVAKCLVEELGADTSIRNGDGQTAEDKIGEEEGEAHGVYQYLRSRRTGSEPIPAGLVETESVHPPPPLPGGVKVNMGTMEEDAAEAPDPEIRRRIEELAARDDYNSEEVQSQLRELVQDVVSGIGGEDGGRSVKRRVD

SEQ ID NO: 5614 - protein, 153 aa, Zea mays
  Clone ID: TF_LIB5117-063-A1-PF1-D9.pep
MEEELSQMEPGAKVTLQRQASSGSLTQGPSGELRRQTSLESSPRSGRGGNRHLFGRQSSMDPNRRRGRSQSPVGSQADQDLAVPDNLDSTMQLLFLACQGDAPGVEALLRGGVDVNSINLDGRTALHVAACEGHREVVSVLLDWEANIDARDR

SEQ ID NO: 5615 - protein, 198 aa, Zea mays
  Clone ID: TF_LIB3689-243-D10_FLI.pep
TSTLPSINSLARWFGEPVRAAILQTEAFLTNAKGYPCLSKRHQSLLTGFFKHSVQVIIYGRSNHNVFPSYAEDSRVRHALTPYLEYIAYLYQKMDPLPEQERIEINYRDFLQSPLQPLMDNLEAQTYETFEKDVVKYTQPENFQSKMFGEQDAEKVKSCNDKAKKMFPKVPSKISFNIVLSQLLKTMMISRNCCLPSL

SEQ ID NO: 5616 - protein, 179 aa, Zea mays
  Clone ID: TF_ZmC14231_3.pep
TSTLPSINSLARWFGEPVRAAILQTEAFLTNAKGYPCLSKRHQSLLTGFFKHSVQVIIYGRSNHNVFPSYAEDSRVRHALTPYLEYIAYLYQKMDPLPEQERIEINYRDFLQSPLQPLMDNLEAQTYETFEKDVVKYTQDSRRIFKVKCSVNRMQKKLKAATIRQKKCSQRCPQRSAST

SEQ ID NO: 5617 - protein, 707 aa, Zea mays
  Clone ID: TF_ZmC6144_2.pep
MERSCYFPLRWESTGDQWWYASPIDWAAADGHYDIVRQLLHLDPNLLIKLTSLRRIRRLEALWDDDARFADAARNRASVARSLLLECECRNHRPAAPGAGENTLLRAGYGGWVLYAAASAGDAAFVRELLERDPLLVFGEGEYGVTDMFYAAARGGSADVFRLLLDHAMSPRCSTSCRNGEASARRSSVFRLEMMSRAVHAAARGGSVEMLRELLEESSVSTYLDIRGSTVLHAAAGRGQLQVVKYLVASFDIINSTDNHGNTALHVAAYRGHQPVVEALVAASPSTLSVVNNAGDTFLHSAVTGFRTPGFRRLDRQLELMRYLIRERTADIQKIINLRNDAGLTALHLAVVGCAHPDLVELLMATPSIDLNAEDANGMTALALLKQQLRSATSDRLIKQIVSAGGVLNSSILRTRSAIASQIKMQGGIASSPGTTFKVSDAEIFLFSGMGAAESLRPSSCSSNGKDDDPTHADADCAENRGSSEKRLSSASRAKDRLKMMLRWPRHKDKTPKKSEDSSPLGSISRLNEHGAETPAPLRQKFTKTTALNGKRTLAVKSSTPSSSSTKKKLNTKLIHGIMEAMPQLAPSTARSASPTDTFLRSSVSSTPQPLAKLKDICLDDEISMVTPPAGRLKDSDDAMEDPSCSNNSSMDDGCGAGTAESAARKHGCGNGRLINICFGAQGLTVEDSASGQQTSKMFKQQCLRVS

SEQ ID NO: 5618 - protein, 211 aa, Zea mays
  unsure (1)..(211): unsure at all Xaa locations
  Clone ID: TF_ZmC621414_1.pep
MGHVLSCSRDGADLFRAVQHGDLDALLAVDPELARRATTIYDRLSLLHIAAANGQLQVLSMLLFDDGGAGGNVDVLNRKKQTPLMLAAMHGRTDCVLSLLDAGANILMFDSVHARTCLHHAAYYGHAHCLQAILSAAKTTPVADSWGFARFVNVRDEHGATPLHLAARQGRXQCVRHLLHAGAIVSAPTASYGFPGSTALHLAARRGKLDC

SEQ ID NO: 5619 - protein, 299 aa, Zea mays
  Clone ID: TF_ZmC35644_1.pep
MLVWAATASPPSTPSAVPFAPPHRAAAPRPPPPLCRSLPGLLCAGLIPPPRAAASDGDVFWEEPDDGSGSDYEDDGPEQRRALRFPSSSPSSRLEASAQQEQDLRREIELLLTPEEKATLDQHETPDVTRISSPKWHPLHSYALALQIPLMDKLLDSGVDINLVDRDGFTSLHKAVIGKKEAVISHLLRKGANPHVRDRDGATPLHYAVQAGALQTVKLLIKYKVDVNVADNDGWTPLHLAIQSRNRDIAKVLLVNGADKTRRTKDGRTALDLSLCFGRDFKSYDLAKLVKLIPANRGA

SEQ ID NO: 5620 - protein, 58 aa, Zea mays
  unsure (1)..(58): unsure at all Xaa locations
  Clone ID: TF_ZmC5306_3.pep
TPLHHCILKGRHRHAXLLLSRGADSQAMDRDGRTALQYAINGGTSDEDILALLQDHSR

SEQ ID NO: 5621 - protein, 241 aa, Zea mays
  unsure (1)..(241): unsure at all Xaa locations
  Clone ID: TF_ZmC154413_1.pep
IRHEGRGSAELVEAPVAYQENVDILDKDEDPPIVFALAAGSPRCVRALVGRSASINSRLREGLGPTLAHVCAHHGQPECMQELLMAGADPNAVDGEGESVLHIAVARRYTDCAIAILENGGCRSMGISNSQHKTPLHLCVETWNTAVVRRWVEVASLEDIAEAIDVPSPVGTALCMAAALKKEHEKEGREVVRILLAAGADPTAQDDPHCRTALHTAXMINDVELXKIILESRVDVNIRNA

SEQ ID NO: 5622 - protein, 519 aa, Zea mays
  unsure (1)..(519): unsure at all Xaa locations
  Clone ID: TF_ZmC11952_1.pep
MGLQQSKEELLYQQVNYGNVDGIRTLRGQGAGLEWIDKEGKTPLMLACMRPDLFDVAKVLIELGANVNAYRPGSHCGTALHHAAKKGLQQTVHLLLSHGANPFIPNDDCNTALELAREKGHVNVVRAIEGRLCLFCGWMRENYAPAFLDAIAPQFMTRKXFGLVVLPREVRTPTRPLKLEIAIYPELQASKPRSVLKLWKCQIEQPKLNQADPSIIIFDKGTKTRYKILPAYEGDKQQLQWFYNACCGMAQVLNTAPVAPANLPMPNPAPAISSVAPSEQSAPSKEDVELAMAINASIQSAIAEGVSVPNVQPNASTPNNNGWAAPPSNSHNGWGPPATPAPSKTSGQSQVRVDAPSSSTYNGWDVPGTSSSQSSSKPHQTQTNPPPVLIPQEALQALPTPTAPPFAEETFYNGPVHYPSIDSTPVDVTMPATTGGGSTTVIATAAPTEQLENEADASDSGKTPSGTCVICLDAPVEGACIPCGHMAGCMSCLKDIESKKWGCPICRATINQVVRLYAV

SEQ ID NO: 5623 - protein, 175 aa, Zea mays
  Clone ID: TF_ZmC16578_2.pep
MGHGASCSRPSEEVDFFGAAQCGDTARLAAALRSRPTLLARTTLFDRLSALHIAAAHGHLQVVSLALDLCVHPDVVNRHKQTALMLAAMHGKTDCVRRLLDAGANIVMFDSSHRRTCLHYAAYYGHADCLRTILSAAKSAPVSESWLAFPSPRRHRRLAAAALWPLANAFSAVEV

SEQ ID NO: 5624 - protein, 153 aa, Zea mays
  Clone ID: TF_ZmC1087_1.pep
MGVELAQPTAAAAAVTTAEQAQDLIDAARYDDLEDVVALFSAGVSLDSTDSQGRTALHMASANGHLAVVEYLIQNGANVNATNMEKNTPLHWACLNGRIEVIRALISAGASVSALNSHEKTPMDEAVTTGKMDVIDAIGAAVAQAELDAVTVS

SEQ ID NO: 5625 - protein, 267 aa, Zea mays
  Clone ID: TF_ZmC586314_1.pep
MGTRALPLPCQLELLLGEDRGRWPPEARFIEAAHLGDVRRIKEIAKELDVRGHGIPVTVASTSYMGMNALHAAGGRGRLPAYQYLVEEVKMDINKPDTSQDYSPVEHAVTYGNLPAVRYLLDHGADLHQQRSGNITLLHSAAARGHSEIVKYLLSRGVDIDAQSIIGTPLAFAAQKGHATVVKILLQHNADPNKGTLILGPLDMALHKSNVSCAKLLIQGGANVSGAGPCYNPLVTAAEKGLTEAIKCLLEAGANPNVLLTGLVDCQ

SEQ ID NO: 5626 - protein, 191 aa, Zea mays
  Clone ID: TF_LIB4756-001-QB-K6-H8.pep
MADHHDGASPRELVLEACRRNNTELLEETLADLNAAAKKSDKKPADYVADILNNARDGLGNGCLHIAATYGSFEVIDMLLDQEGLEIDEIDRMEQDTPLHKAVRYVNSLEKDVWPHGQSIVAMLLDAGCDPRIRNKAKLKPVELVDPRNTELKSMLQKGEFAIQAGGDIVEDDDDGHAGSGSESRCSNNIT

SEQ ID NO: 5627 - protein, 112 aa, Zea mays
  unsure (1)..(112): unsure at all Xaa locations
  Clone ID: TF_uC-zmrob73012e01b1.pep
WGRVGSATGRWLRRCCCSDAHVYKVDSLSGRTVLHVAAAGGHVRCARLLLAGAGSGRSKLGNRAASGGGGGVTALHLAALHGHSCXVHLLVDXRAFVVSRTLSCAVPTMAFV

SEQ ID NO: 5628 - protein, 1080 aa, Zea mays
  unsure (1)..(1080): unsure at all Xaa locations
  Clone ID: TF_ZmC6921_1.pep
METSISPPGTSKQSAVRKPSPGGSLKDLCLVSKQGSIAEVESALALLKKSGGNIDGRNAFGLSALHLATWRNHLPIVRRLLDAGADPDARDGESGWSSLHRALHFGHLCIAGVLLQFGASLALEDTKGRTPVDLISCPVSQANGDFPDAVATEVFSWGSGTNYQLGTGNAHIQKLPCKVEALHGSYIKTVAASKFHSVAVSSNGELYTWGFGRGGRLGHPDIHSGQTTAVITPRQVTVGLGRKRVNAVAAAKHHTVIATELGELFTWGSNREGQLGYPSVDTQPTPRRVGSLKQRIISVAAANKHSAAVADTGEVFTWGCNKEGQLGYGTSNSASNCIPRMVEYLKGKVLRGVSAAKYHTIVLGADGEVFTWGHRLVTPRRVVVARCLKKGGNTNLKFHRMERLQVISVAAGTTHNTALTADGALFYWVSSDPDLKCQQIFSMCGRNIVNISAGKYWTAVATSTGDVFMWDAKKRKDETPIFTRVHGVKRATFVCVGETHMLVLSSIYHPEYPPKPKSQGLKSMLEWNGGTPPLGEDILFDEVXSNSGLSGSSGEMSKGRPSSTSGGEKRPWRIVTDGTHTPPLXHADSLEAKELKKHCEDLAIRNLDYIFTVGASSIMNASSEILVNLEKLLDEKSSEPWSQHRLPTMTATYPAVIDSDVEEDEAREFPKTRKCGKSASRPSAMSSDDSFLQKDCTAEQAVSKQIRALRKKLQQIEILEAKQLAGHQLDSQQVAKLESRAALEGELAELGIPSEIYSTSSACPAEGRTNRKPEVSKKQKRKNKQSTQTPSVKNEPGQQIPITELQVLQVNVSAEKXEAYAADPIKPMEAAAFSNTKDTASPPEKKPSQPTPSKKKNRKGGLSLFLSGALDDTPKPSLPAPAVPATPKPEGPAWGGVKITKGPASLRDIQTEQSRTNEPASAKAKDRHENSPDSAGRATRLSSFIPDARSSPVAVVAPARAAAAPPSSEGDRSTPPWSSSATSPNVSQPSLRDIQQMQQKRHHGGVSHSPKTQTSGFSIPPHSGAPEAAGGGGVKDNVPNRWFRPETDAPSSIRSIQIEEQAMKDFRRFYSSVRIVKPQV

SEQ ID NO: 5629 - protein, 187 aa, Zea mays
  Clone ID: TF_LIB5116-047-A1-PF1-F2.pep
MDGVSTEPRHPLLQAVLDGDLRLLKEMAGVVAADVGVWARALTVAVMEGRLDICRCLVEDHGVDVNQRTFTGDTPLAISATYGTPAITRYLLDRGADPTLAGALWPPLHAAASFGQCEIVELLLSTGIDVDHFDSEYGTALHVAATNAQDGSMNILLQHRADPNKVYRLDSTPLRLAMISESLECVK

SEQ ID NO: 5630 - protein, 471 aa, Zea mays
  Clone ID: TF_ZmC127800_1.pep
MESKPHAPASGLATPRFRLGKQSSLAPERGGEGGGAGSADGSAEANGVMSFQLMYLAHEGSAEGIRELLDGGVDPNFRDSDGRTALHIAACEGHAEVVELLLQSGAEAAVEDQWGSTPLADAMHYQNHDVIKIFEKHGSKHKIAPMHVNNVREVPEYEIDPAELDFSNGNDLSKGTFRKATWRGIPVAVKKLDDDLIADGSKVQAFRDELDVLQLIRHPNVVQFLGAVTQSNPMMIVMEFMRKGDLRTHLSKKGALPPSYAVKLALDIARGMNYLHEHKPQAIIHRDLEPSNILRDDTGHLKVADFDLCKMLKWRRKVREDKAVTSPGNACKYVAPEVLRNEEYDTKVDVFSFALILQEMIEGCLPYYDKKNDEIEKAHNSKERPPFRAPPKHYAHGLRELIEQCWSENSADRPDFRVIINRLSAIQNEIAHRNRWKARPLKCFLSIEGMWKKDRNEGSTTRSSRSSRSYF

SEQ ID NO: 5631 - protein, 255 aa, Zea mays
  Clone ID: TF_ZmC9440_1.pep
MGRRHSGGGGGRGRGRGRGRGRDEEEDLPLHKAARSGDAAAVESVCESNPLAVNSRDRLSRTPLHLAAWAGHVDVVRCLCKHKADVGAAAMDDTAALHFASQKGHVEVARELLASGASVKAKNRKGFTALHFAAQNSHLDLVKYLVKKGVDVTAKTKGGQTALHVAEDDEVRAFLKECEQSLKKGAELPSEKDDSAEKEGDSKSSGEVMKDEEDAEQGEKRKSELVGASSLSGVKKAKVSLGHLVCENDMDEEEE

SEQ ID NO: 5632 - protein, 562 aa, Zea mays
  Clone ID: TF_ZmC19180_1.pep
MEKQPSVRHGALEKLKSFRGMEKQRSFKFLSMEKQQSFKRNKDSPGKRGDTALHLAARAGSVAHVQKILAECDPELVVELAGRTNQDGETALYVSAEKGHVEVVCEILKASDVQSAGIKASNSFDAFHIAAKQGHLDVLKELLHAFPSLAMTTNSVNATALDTAATQGHIDIVNLLLETDASLARIAKNNGKTVLHSAARMGHVEVVTALLNKDPGLGFRTDKKGQTALHMASKGQNAEILLELLKPDVSVIHVEDSKGNRPLHVATRKGNTIMVQTLISVEGIEINAVNRAGETAFAIADKQGNEELVNILREVGGGTAKEQVNPPNPAKQLKQTVSDIRHDVQSQMKQTRQTKMQFQKIKKRIQKLHIGGLNNAINSNTVVAVLIATVAFAAIFQLPGNFLEDMTQAPDPDMTLGQALIASDPAFIIFLVFDALALFISLAVVVVQTSLIVVEQKAKKKMVFVINKLMWLACLCISAAFIALTYVVVGRDDEWLAWCTMAIGTVTMVATVGSMCYCVVAHRMEEKSMRKIRRTSMSQSWSISIDSEAELMNSEYKKMYAL

SEQ ID NO: 5633 - protein, 456 aa, Zea mays
  unsure (1)..(456): unsure at all Xaa locations
  Clone ID: TF_ZmC2241_1.pep
MADATAALSARSKVQAFLEAARAGDLQSLKNLVAALDEDGTGAASVAAAVRDANKRTALHFAAIGCRTDVCEFLIGELGLPVDPKDDDGETPLIHATRQGHLDTVKYLLDHGADPSLATSLGATALHHAAGIGNTELMKLLLSKGVDVESESDAGTPLVWAAGHGNQDAVKLLLQHNAKLESXSRWLPTSLLSAVAAGSLPCLEVLIEAGANPNVKAGGATPLHIAADSGNIEVIKCLLKAGADPNTCDDDELKPVQVAAWRNNREAVELLLPLTSPIPGVSNWNVDGIIEHMLPKEYEEKSQLKEAASLKSGLTQTIEVSSEAKKRSLEAKSRGDDAFRRKDYLVAVDAYTQATELDPTDATVLSNRSLCWLRAGQAERALEDAKACRALRPDWAKACYREGAAHRLLQRFEEAANAFYEGVQLEPENTELVNAFREAIEAGRKFHGVNTPNSTQ

SEQ ID NO: 5634 - protein, 415 aa, Zea mays
  unsure (1)..(415): unsure at all Xaa locations
  Clone ID: TF_ZmC32119_4.pep
EKQVKEKLYYWLIHKIHDDGKGPNVLGKEGQGAIHLVAALGYDWAIKPIVAAGVNINFRDIRGWTALHWAACCGRERTVGALIASGAASGALTDPTQQYPSGRTPADLASENGHKGIAGFLAESALTSHLSALTLKESPSGNVEEICGLTAAEGFAASSSSQLACVNSQEESLKDSLGAVRKSTQAAARIFQAFRVESFHIRLEIEYGDDDCGLSDERTLSLVSLRNPKSGHGDSHSAAVRIQNKFRGWKGRKEFMLIRQKIVKIQAHVRGHQVRKNYRKVVWSVGIVEKVILRWRRKGRGLRGFQPEKQLEGPSWQIQPAKAEAEDEYDFLXDGRKQATGRLDRALARVRSMNQYPEARDQFRRLQACVNSLRESQAMQDRMMADSPGPDGGDFMTELEELCRDDGDAPMSTIS

SEQ ID NO: 5635 - protein, 175 aa, Zea mays
  Clone ID: TF_LIB4171-023-R1-L1-H6.pep
MDGEGERRMVDSEGQIHMDPALYMAATQGKVSILKQLADPEEPSVLSATTPQLNTALHLAAVHGHAEFAGEVLGMNEELLVTRNGDGDTPLHLAAKAGKLEVARLLVNRAIAWPEDKKSPLIMTNKAGNTALHEAVQYRKGALGGGPARRRPQPAARPQRADGVPAAHGPPRGPR

SEQ ID NO: 5636 - protein, 161 aa, Zea mays
  unsure (1)..(161): unsure at all Xaa locations
  Clone ID: TF_LIB4704-004-R1-K1-A6.pep
MNGMPISASSAASVDSGAVAAGTPMKNATAADALAEMARHLTVDTEDTFAGLLELAADDDAEGLRLALERAPPAAADEAGLWYGRRKVLEHRTPLMVAATYGSLAALRLLVSISYVDVNRRSGTDGTTALHCAXSGGSRTAVESVKLLLGAGADANTMDDA

SEQ ID NO: 5637 - protein, 232 aa, Zea mays
  Clone ID: TF_ZmC19180_3.pep
MEKQSSTRHGALEKLKSFRGIEKQRSFKFLSMEKQQSFKRNKDSPGKRGDTALHLAARAGSVAHVQRILAECDPELLVELAARQNQDGETALYVSAEKGHVEVVCEILKASDVQSAGIKASNSFDAFHIAAKQGHLALDTAATQGHVDIVNLLLETDASLARIARNNGKTVLHSAARMGHVEVVTALLNKDPGIGFRTDKKGQTALHMASKGQNAEILLGVVKPDISVIHVE

SEQ ID NO: 5638 - protein, 149 aa, Zea mays
  Clone ID: TF_LIB5116-069-A1-PF1-E4.pep
MVRPRHVFAYADGTPQLELLCAATTGDLAHLERMVRKLDGGRGRLAEAVEAVKDHGAGALHLAASGQNLEVCEYLVEDVGVNVDAVDEAGRTPLVWAIIVKGGQVDIVKYLLDHGANPDNADRTGITPLHEAVERGHCEVVELLLSRGP

SEQ ID NO: 5639 - protein, 546 aa, Zea mays
  Clone ID: TF_ZmC13193_1.pep
ILEHGADINAVDHTGQTALHWSAVRGHIQVAELLLKEGAKVDATDLYGYQATHVAAQYGQTAFIYHIVAKWNADPDIPDNDGRSPLHWAAYKGFADSIRLLLFLDAYRGRQDKEGCTPLHWAAIRGNLEACTVLVQVGKKDDLMVKDKTGLTPAQLAADKNHRQVAFFLDNARRVHGKGCGANTRFGKLSKLGLAPLLWCTIIGMVITYTHSVISGQYAMTTKAPFGKFAWSGVFLATAGLVMFYKCSRKDPGYININARGSQNQRDDEPLLKMELENPALLSGNWSQLCITCKIVRPVRSKHCSTCDRCVEQFDHHCPWVSNCIGKKNKWEFFMFLTLEVFAMIITGSAAIIRIVRDPNSPSSFGAWIHYSAFQHPGVVSFLALDCFLFFGVAVLTVVQASQIARNITTNEMANSMRYAYLRGPGGRFRNPYDHGIRKNCSDFLLNGYNEDTERLEQTLPTDEEMGMIQMTSAVSQQNGDNHLHHGNGTDHSCAVSQANSKPHSQVGSSQCCDHSKRTDRTPLGLGLGLGRNSASRQYVRSLIPL

SEQ ID NO: 5640 - protein, 167 aa, Zea mays
  Clone ID: TF_ZmC10492_3.pep
PPGKTPLHVAAEMVCPDMVAVLLDHHADPNVRTVEGVTPLDILRTLTSDFLFKGAVPGLAHVEPNKLRLCLELVQSAAMVMSREDAHTAVNPAAAPMYGEPSGGGAVYSASGTSSSMVNLSLDNRMVYLNLGMDAQFGKMDDGGDGDDGGGRGQGGPPSLFSPHGYH

SEQ ID NO: 5641 - protein, 227 aa, Zea mays
  unsure (1)..(227): unsure at all Xaa locations
  Clone ID: TF_LIB4171-052-R1-L1-H12.pep
NSARGSTPPGTSPPPTPARTRHTMASLEAAETSPPSTPTTSASPCPTPRPLATAPPTMGAALLRAARSGDERQLVKALLADPAAPDLETAATAGGNTLLHVAAAGGHVDLALLLLRRAPRLLTARNAALDTPLHLAARAGAHKVVALLAASSSSSSSSPACSLRALTRATNRRGETALHDAVRXGHEAAARALATADPGLGGMCGGAGRRRFTCVGGWVLXDAAHAL

SEQ ID NO: 5642 - protein, 326 aa, Zea mays
  Clone ID: TF_ZmC10492_1.pep
LPKQLAGMVEKASIEDVMKVLMASRKQDLHQLWTTCSHLVAKSGLPPEVLAKHLPMDVVSKIDELRLKSSLSRRSPFLAHHHHPAPGGGMEASSAADIDDHHKIRRMRRALDSSDVELVKLMVMGEGLNLDEALALHYAVENCSREVVKALLELGAADVNHTAGPAGKTPLHVAAEMVCPDMVAVLLDHHADPNVRTVEGVTPLDILRTLTSDLLFKGAVPGLAHIEPNKLRLCLELVQSAAMVMSREDAHTAVNAAPMYGEPSGGGGCGVYSASGTSSTSLVNLNLDNRMVYLNLGMDAQFGKMGDGDDGGGRGPSSLFSPHGYH

SEQ ID NO: 5643 - protein, 431 aa, Zea mays
  Clone ID: TF_ZmC12227_1.pep
MTPPSIFHHHRCLVSLPSASPTWTSSRRLIHQLAKPTVLSLHLRPVLSSSFAVAAVGDDEDVVVGDCLVFDDDAFEEPDLDLPSSPWPSASASRHGRRSEAGESDSLVPERWRHAEEEINLTKKDKRRIAHGLRFGSRLERRAPPAVAAPDEFRAYRKGMLSAEREHVSHVYRGPLERTPPPEVKEHPPPEPEPGTRVAPRNPRMGMGVGTLDDIDEFFRSREYVQDEMEDSKSPKGRQKLFSNEEKILLNKRVPDLETATSSKWLPLHTLAASGDFYLLNSLLKHNVDINALDKDGLPAIHKAILSKKAAIINYLLRNSANPFIQDKDGATLMHYAVQTACSQTIKTLLLYNVDINRPDDYGWTPLHLAVQTQRTDIVKLLLIKGADRTIRTQDGLTPLELCLRLGHDVRTYELIKLLKSFRGQKQHDLV

SEQ ID NO: 5644 - protein, 169 aa, Zea mays
  Clone ID: TF_LIB3958-013-Q1-N6-A12.pep
EAIKGGDVKGVKKLLTQGVDSNYCDKQGFTLLHLAALFNQTEIALILMDHGANVESKNGQGVTSSAVTLPWHPPTLSGARQVVRMAGLHGYVGRGGASLPRVPRFVSLGSSCGATGGLLHHRANHLRRKLGLVAVLVVFTTVTGVVIIGPATGCNRGSIYTVENLYYPI

SEQ ID NO: 5645 - protein, 83 aa, Zea mays
  unsure (1)..(83): unsure at all Xaa locations
  Clone ID: TF_700344979H1.pep
RCTGLPPEDTCLPSSCWSPRGPRWIRGTPWASHPCITPLGKATWRLPAACWTGVPRWMLPAGSARPPYTWLQSEGXGVPWGFC

SEQ ID NO: 5646 - protein, 145 aa, Zea mays
  Clone ID: TF_LIB5116-012-A1-PF1-A2.pep
MGMQQSKEELLYQQVNYGNIEGIRNLRAQGAGVEWIDKEGKTPLMVASMRPDLLNVAKALIELGANVNAYRPGSHAGTALHHAAKKGLDPTVHLLLSHGANPFITDDDCNTALDLAREKGHVNVVRAIEGRISLFSGWMREKYGP

SEQ ID NO: 5647 - protein, 141 aa, Zea mays
  Clone ID: TF_ZmC119_1900.pep
HLSKESCTLLSWGCDLYIVKDHLDVVNAILDTDDSCIRIVRKNGKTSLHTAARIGYHRIVKALIERDPGIVPIKDRKGQTALHMAVKGKNTDVVEELLMADVSILNVRDKKGNTALHIATWKWENFGIMKHRRRGFDETEA

SEQ ID NO: 5648 - protein, 801 aa, Zea mays
  Clone ID: TF_ZmC9687_1.pep
MNVIKMLLMGNVDVNEADSEGNTALHWCLSGASCTKEPRIVWLLLKNGARVFQGNKLGLTPVHSAAAKGNYKALQSLLLHAQDCVDIPTKTKETPLFFAVKNGSVDCAKLLLRFGADTKARNLRKQRPIDVATSQDMRFILSSANVLLFSGNHNSPQKNRVMRKEIYKELGDEFDDFDKDSCDESYTGLKTSVGQRDFCSSNLSAQGPKSKSQYVPKQAQGSKFVPRNNHWPKHDYTRKIFVGGLPPSVDSEYLIEFFNAEFGPVEEAVVIGIPIGNRVQSRGFGFVKFEREEDMISAKEAHHVYMLGKRVEVKDAVARAYLPLEDQRYTSLRQFIKERPKIHRVLDGELTEEHNIQKRRPLPEKCLPSWFAGFRKWLPGFLEDETARLRGERYPLSSLKGDFRATCRMELDHTALGYPKLSDFIRSLPGICRMCVVPVGSGPATHMVLLPPLSRPKYVPLLEPCSFDHDELAESVSDQHSPRSPLNTNIADDSPRNTDSQQGDDACSETNVQIQQVDDACSETCVQSQHDYGKSQQDGSSSDNGSLLDDIPASTTKLDLIESVTSVKPALIEPVLPRKPDLIDSVPPSKPDLVECVPPRPKLIESGFLPQKNESGPVQKPNLLGFGPSRNLELIESRPSACFIDSPFERTAVTPSSCEGEMRFSFFQSQWDKYLAPYPRSDSCIICRSCEAGMQLVPCFHKICVACMMRCNVRACMVCGTSVSGVKSSPAVDATYRYMGLTERVLDLRCQLMVVCRGAEAIVRCSPCMHTIACRGCFLASVTLLKSCTTCGCMVEHFKIV

SEQ ID NO: 5649 - protein, 243 aa, Zea mays
  Clone ID: TF_ZmC16077_1.pep
MGFLSLVGNSFGCSASGERLVSAARDGDLQEARALLQYNPRLARYSTFGGRNSPLHYAAAQGHHEIVSLLLESGVEINLRNYRGQTALMQACQYGHWEVVQTLILFNANVHRTDYLNGGTALHFAALHGHARCLRLVLADYVPSVPNFCTLVNHKSSEEDSAADFDHDALVKMVNQKADGGLTPLHMAALNGHVECVQLLLDLGASVSEVTIEDGTTIDLIGITFAFLVAYSCCKCLTLVRTL

SEQ ID NO: 5650 - protein, 412 aa, Zea mays
  unsure (1)..(412): unsure at all Xaa locations
  Clone ID: TF_ZmC30397_1.pep
RPGADRQGQFAENLIKGNAYXWLLNKVGMGGKGPSVLDDEGQGVLHLAAALGYDWAIRPTLAAGVNINFRDIHGWTALHWAAFCGRESTVVALIALGAAPGALTDPTPDFPGSTPADLASSNGQKGISGFLAECSLTSHLQVLNLKEANMAQISGLPGIGDVTERDSLQPPSGDSLGPVRNATQAAARIYQVFRVQSFQRKQAAQYEDKGGMSDERALSLLSVKPPKSGQLDPLHSAATRIQNKFRGWKGRKEFLLIRQRIVKIQAHVRGHQVRKHYRKIVWSVGIVEKVILRWRRRGAGLRGFRSQEGSVESSSGGTSSSSIQNKSSGDDYDFLQEGRKQTEERLQKALARVKSMAQYPEARDQYQRIFTVVSKMQESQAMQEKMPEESAEMDMSEFKELWDDDAPIPGYF

SEQ ID NO: 5651 - protein, 154 aa, Zea mays
  unsure (1)..(154): unsure at all Xaa locations
  Clone ID: TF_LIB4073-023-Q1-K1-E8.pep
XIVKFLVELGCDVNAQDSDGWTPLHCAASCNNLAMVRFLVDNGACIFATTLSDHETAAEKCEEDEEGFDGCSEYLYSVQEKLGIMNSGLVYAVFSYTAARSDELTFETGGRLHVLRKGDDSEREWWWCRDDAGNEGYVPRNLLGLYPRVTTQQD

SEQ ID NO: 5652 - protein, 850 aa, Zea mays
  Clone ID: TF_ZmC13638_1.pep
MKKNNSSIESTGGGVGGSGGTVSGSGSGSFNLRNLSKVILPPLGGPSGGQSQSHGGSDKWVVSPLDSRYRWWDTFMVVLVAYSAWVYPFEVAFMNASPKGGLEVADIVVDLFFAVDIVLTFFVAYIDGRTQLLVRDRKKITLRYLSTFFIMDVASTIPFQGLAYLITGEVRENAVYSMLGVLRLWRLRRVKQFFTRLEKDIRFSYFWIRSARLVAVTLFLVHCAGCLYYLIADRYPDRQKTWIGAVIPNFRQASLRIRYISSIYWSITTMTTVGYGDLHAQNNVEMIFNIFYMLFNLGLTAYLIGNMTNLVVEGTRRTMEFRNSIRAASSFVGRNHLPPRLKQQILAYMCLKFRAESLNQQQLMDQLPKSICKSICEHLFVPVVKDVYLFRGVSREMLLSLVTKMKPEYIPPKEDVIVQNEAPDDVYVVVSGEVEVILFDGIYEQVQATLGARDIFGEVSALSDRAQAFTFRTRTLSQLLRLKQATLKEAMQSRPEDSVVVIKNFLKHQVEMHGMKVEDLLGDNTGEHDDDANVLTVAAMGNSGLLEDLLRAGKAADVGDAKGRTALHIAASKGYEDCVLVLLKHACNVNIRDAQGNTAMWNAIAAGHHKIFNLLYQFGRASNPRAGGDVMCLAARRGHLGALQELLKLGLDVDSEDHDGATALRVAMAEGHADAARFLILNGASVDKASLDDDDGSGSGSGSGAARLAMSPTELRELLQKRELGHSITIHDSPAVVPNGGSSGHSRPGRLQSTSSDSQRWPRVSVYKGHPFLRNRTSEAGKLINLPGTMEEFKVIVGEKLKVDAEKALIVSDEGAEIDSIDVIRDNDKLFMVTEEDLRRLASMDWLSCE

SEQ ID NO: 5653 - protein, 163 aa, Zea mays
  Clone ID: TF_ZmC35644_2.pep
HASGYALALQIPLMDKLLNSGVDVNLVDRVNGFTSLHKAVIGKKEAVISHLLRKGANPHVRDRDGATPLHYAVQAGALQTVKLLIKYKVDVNVADNDGWTPLHLAIQSRNRDIAKVLLVNGADKTRRTKDGRTALDLSLCFGRDFKSYDLAKLVKLIPANRGA

SEQ ID NO: 5654 - protein, 446 aa, Zea mays
  Clone ID: TF_ZmC16578_1.pep
MGHGASCGRPSEEVDFFGAAQSGDMARLAAALRSRPTLLSRTTLFDRLSALHIAAAHGHLQVVSLALDLCVHPDVVNRHKQTALMLSAMHGKTDCVRRLLDAGANIVMFDSSHGRTCLHYAAYYGHADCLRTILSAAAKSAPVSESWGFARFVNVRDDTGATPLHLAARQGWRRCVHVLLENGAIVSASSGAFGFPGSTPLHLAARGGNLDCVRQLLSWGADRLQRDSVGRIPYEVAAKRGHVACAALLNPSSAEPLVWPSALKFISELEPDAKSLLEAALMEANRERERRILKGAKNALPSPSHPDDGAHDTAIAEASDAEVCSICFEQACSIEVRECGHQMCSACTLALCCHAKPNPATQSQPLPTCPFCRGGIARLVVATRTRAGDDEERCKLESPRHCRSRRSMNLSGDAGSTSTLMGSIASSIGKMGRRRTESSEQVDDKP

SEQ ID NO: 5655 - protein, 165 aa, Zea mays
  Clone ID: TF_ZmC3009_1.pep
DVVKALLELGAADVNCRAGPTGKTALHLAVEMVSPDMVSVLLDHHADPSARTLDGVTPLDVLRGLTSEFLFRGAVPGLTHIEPNKLRLCLELVQSAVMVTTRDDDAGAGGGGSDAADDSLVSLTMNSTLMYQGQEIAGAMAGEARKGSGGGRGSPSNLYFPTAFP

SEQ ID NO: 5656 - protein, 447 aa, Zea mays
  Clone ID: TF_ZmC26105_1.pep
VAALPKAACLCVDEDACAHVGCRPAVAFMAQVLFAASTFDVAELTNLFQRRLLDVLDKVEVDNLPLVLSVANLCSKSCVKLLERCLDVVVRSNLDMISLEKKLPPDVEKEIVDARVSLGLVSPEDKGFPNIHVRRIHRALDSDDVELVRMLLKEGKTNLDDAYALHYAVEHCDSKITTELLDLALADVNHRNPRGYTVLHIAAMRREPKIIVSLLTKGARPSDLTFDDRKAVQISKRLTKHGDYFGPTEDGKPSPKDRLCIEVLEQAERRDPQLGEASVSLAIEGDSARGRLLYLENRVALARILFPMEARVAMDIAQVDGTLEFTLVSSVNLPAEIQRTVDLNDTPFTMKEEHLARMRALSKTVEVGKRFFPRCSKVLDTIMDDEAEMASLGRDTSAEKKRRFHDLQDLVQKAFSEDKEENDRSAARSPSSSSTTTTSIGAVRPRR

SEQ ID NO: 5657 - protein, 135 aa, Zea mays
  unsure (1)..(135): unsure at all Xaa locations
  Clone ID: TF_LIB4980-056-A1-K1-B8.pep
MGLQQSKEELLYQQVNYGNVDGIRTLRGQGAGLEWIDKEGKTPLMLACMRPDLFDVAKVLIELGANVNAYRPGSHCGTALHHAAKXGLQQTVHLLLSHGANPSIXNDDCNTALELAREKGHVNGVRAIEGRLCLF

SEQ ID NO: 5658 - protein, 131 aa, Zea mays
  Clone ID: TF_LIB4729-023-R1-K1-C10.pep
MGVELAQPTAAAAAVTTAEQAQDLIDAARYDDLEDVVALFSAGVSLDSTDSQGRTALHMASANGHLAMVEYLIQNGANVNATNMEKNTPLHWACLNGRIEVIRALISAGASVSALNSHEKTPMDEAVTTGK

SEQ ID NO: 5659 - protein, 153 aa, Zea mays
  Clone ID: TF_LIB4764-089-A1-K1-G1.pep
MGVELAQPTAAAAAVTTAEQAQDLIDAARYDDLEDVVALFSAGVSLDSTDSQGRTALHMASANGHLAMVEYLIQNGANVNATNMEKNTPLHWACLNGRIEVIRALISAGASVSALNSHEKTPMDEAVTTGKMHVIDAIGAAVAQAELDGVTVS

SEQ ID NO: 5660 - protein, 704 aa, Zea mays
  Clone ID: TF_ZmC6144_1.pep
MERSCYFPLRWESTGDQWWYASPIDWAAADGHYDIVRQLLHLDPNLLIKLTSLRRIRRLEALWDDDARFADAARNRASVARSLLLECECRNHRPGAGENTLLRAGYGGWVLYAAASAGDAAFVRELLERDPLLVFGEGEYGVTDMFYAAARGGSADVFRLLLDHAMSPRCSTSCRNGEASARRSSVFRLEMMSRAVHAAARGGSVEMLRELLDESSVSTYLDIRGSTVLHAAAGRGQLQVVKYLVASFDIINSTDNHGNTALHVAAYRGHQPVVEALVAASPSTLSVVNNAGDTFLHSAVTGFRTPGFRRLDRQLELMRYLIRERTADIQKIINLRNDAGLTALHLAVVGCAHPDLVELLMATPSIDLNAEDANGMTALALLKQQLRSATSDRLIKQIVSAGGVLNSSILRTRSAIASQIKMQGGIASSPGTTFKVSDAEIFLFSGMGAAESLRPSSCSSNGKDDDPTHADADCAENRGSSEKRLSSASRAKDRLKMMLRWPRHKDKTPKKSEDSSPLGSISRLNEHGAETPAPLRQKFTKTTALNGKRTLAVKSSTPSSSSTKKKLNTKLIHGIMEAMPQLAPSTARSASPTDTFLRSSVSSTPQPLAKLKDICLDDEISMVTPPAGRLKDSDDAMEDPSCSNNSSMDDGCGAGTAESAARKHGCGNGRLINICFGAQGLTVEDSASGQQTSKMFKQQCLRVS

SEQ ID NO: 5661 - protein, 458 aa, Zea mays
  Clone ID: TF_ZmC1084_1.pep
MELPMQSVSSLLLAGPSPSSPEAAETTPPPMQPLQCQHERLVGNMCPSLYLAVYRGRIADVTALLLEQPAVAIDCQATTTPGIKGTAIMHGQCDILELTAERNTALHVAAEQGHHELIRELYFRFSDQGLLNRLNSALDTPLHSAARAGHVRAVAVLFELARDRGVNILGCKNEAGDTALHLAARHGHGAAVEVLISAAAEPAAELNNAGVSPLYLAVISGSVQAVRAITTCKDASSLGPGAQNALHAAVFQSSEMVHLLLEWRPALADQVDSGGSSPLHFASSDGDRTIVKAILRASPPSTVYKKDSDGLSALHVAARMGHRRVVKDMLRSYPDAAELRDGNGGTFVHAAARERRSSVVSLAISNSMLRGVLDAQDRDGNTPLHLAVAVGSTGDVEALLREGKVRADVLNNDGHTALDLAARSNAGFFATINLVVALVAFGARLRPQRQDRLEQWGG

SEQ ID NO: 5662 - protein, 186 aa, Zea mays
  Clone ID: TF_LIB5116-067-A1-PF1-D8.pep
VPSYCFFYEGDCEMIELLLAKGAYVDPIAEEIGTPLHLATKEQQVGAMKTLLEHNADCNKTYMSYGLYPMTPLFQAVNVSSLQCVKLLVEAGAVINPDCIETVSLDSAMGNDSSTECLNFLLKAGAKRNASNDAAVHASARGRVAGTARRSGRGRGRDQGPRQQQEQHVACGEEVEVKVNPKVLIG

SEQ ID NO: 5663 - protein, 440 aa, Zea mays
  Clone ID: TF_ZmC13193_2.pep
AYRGRQDKEGCTPLHWAAIRGNLEACTVLVQVGKKDDLMVKDKTGLTPAQLAADKNHRQIAFFLDNARRVHDRGCGANTRFGKLSKLGLAPFLWCTIIGMLITYVHSVILGQYVMTMTAPFGMFAWSGVFLATAGLVMFYKCSRKDPGYISINTRGSQNQRDDEPLLKMELENPALLFGNWSQLCITCKIVRPVRSKHCSTCDRCVEQFDHHCPWVSNCIGKKNKWEFFMFLTLEVFAMIITGSAAIIRLVRDPDSPSSFGAWIHYSAFQHPGVVSFLALDCFLFFGVAVLTVSQASQIARNITTNEMANSMRYAYLRGPGGRFRNPYDHGIRKNCSDFLLNGYNEDTERLDQTLHTDEEMGMIQMTRAVSQNGDNHLHHGNGTEHSCADSQASPKPHSQVGSPQCCDHSKRTDRTLLGLGLGLGRNSASRQYVRSLIPL

SEQ ID NO: 5664 - protein, 400 aa, Zea mays
  Clone ID: TF_ZmC12604_6.pep
MGHGVSCARTGDEHDYFRAAQVGDLEALEALLDADPSLARRATLYDRLSALHIAAANGRLEVLSMVLDHGVPPDVVNRHKQTPLMLAAMHGKTDCVLKLLQAGANILMFDSQHGRTCLHHASYFGHVGCLQAILTAARTTPVANSWFPGSTSLHLAARSGSLDCTRKLLAWGADRLRRDVARRIPYAVALKRNHEACAALLNPSAAEPMVWPSPFKFISELEPEAKALLEAALTEANREREEKILRGTKHSPHPPTWDHASDAADADAIDDAASDAELCCICFEQASTIKVQDCGHQMCAACTLALCCHSKPNPATLTPPSPACPFCRGSISRLLVARASPDADDDDKAAAAWSPQLVRRRSPNLKWAAATAWTSPSPTCDRHLMLGVAEQTAEPAHFKS

SEQ ID NO: 5665 - protein, 345 aa, Zea mays
  unsure (1)..(345): unsure at all Xaa locations
  Clone ID: TF_ZmC4298_1.pep
EKNSGSGYFEHSPRLAQHHRTSMMKPDKPIDLLRKVAGNNCCADCGASEPDWASLNLGILLCIECSGVHRNMGVHISKVRSLTLDVRVWEQSVINLFQSIGNTFANSVWEEMLPSSSCVDHGDISRAVGLENMLFGFASALFWEKFIHAKYAEKDFVRKHGMDGIQLAEQMWDNVSSNNKKGVYSLIVGSNADVDFSYGHTSFNSALTLAKSSPPTRAISLSHLTEALDVLTAIHSTQGXGDSICPARLAGRTLAPYCKSSSTMPRSAARHARWSKDNPSTDSRGRTPLHHSIMKGRHVYAKLLLSRGADSQAADRDGRTALQYAIDSGTIEDEEILVLLEDPSR

SEQ ID NO: 5666 - protein, 409 aa, Zea mays
  Clone ID: TF_ZmC2014_1.pep
HGLLLQRRLLNFVDKTLVEDVIPILEVASHSGLTQVIDKCIQRIARSDLDDISLDKELPPEAVDEIKNLRKKSQTADGDTFISDPVHEKRVRRIHRALDSDDVELVKLLLNESDITLDDANALHYAASYCDPKVVSELLDLAMANLNLKNSRGYTALHLAAMRREPAIIMCLLNKGANVSQLTADGRSAIGICRRLTRAKDYNTKMEQGQESNKDRLCIDILEREMMRNPMAVEDAVTSPLLADDLHMKLLYLENRVAFARLFFPAEAKVAMQIAQADTTEEFGGIVAVAASTSGKLREVDLNETPVTQNKRLRSRVDALMKTVELGRRYFPNCSQVLDKFLEDDLPEGLDQFYLQRGTADEQKVKRMRFCELKEDVLKAFSKDKAEGSVFSGLSSSSSCSPPQKYAQR

SEQ ID NO: 5667 - protein, 418 aa, Zea mays
  unsure (1)..(418): unsure at all Xaa locations
  Clone ID: TF_ZmC2014_3.pep
RAGGSFRPRAPSLFQRRLLNFVDKTLVEDVIPILEVASHSGLTEVIDKCIQRIARSDLDDISLDKELPPEAVDEIKNLRKNSQTADGDTFISDPVHEKRVRRIHRALDSDDVELVKLLLNESDITLDDANALHYAASYCDPKVVSELLDLAMANLNLKNSRGYTALHLAAMRREPAIIMCLLNKGANVSQLTADGRSAIGICRRLTRAKDYNTKMEQGQESNKDRLCIDILEREMMRNPMAVEDAVTSPLLADDLHMKLLYLGNRVXFARLFFPAEAKVAMQIAQADTTEEFGGIVAVAASTSGKLREVDLNETPVTQNKRLRSRVDALMKTVELGRRYFPNCSQVLDKFLEDDLPEGLDQFYLQRGTADEQKVKRMRFCELKEDVLKAFSKDKAEGSVFSGLSSSSSCSPPQKYAQR

SEQ ID NO: 5668 - protein, 588 aa, Zea mays
  Clone ID: TF_ZmC1587_1.pep
MAENSDAAAAVTARLLELAADNDSTALGDLLAVHPSLADEPAPWYSPARGAEPMTPLMVAAAYGSVACIDVLLSPPHLTDPNRASPSSLSTALHLAAAGGASAAPAAVSRLLAAGADPTLLDHLHRRPSDLVALPPNSLPLKNHLLSLLGGRKEWPPDPSLPDIKNGAYASDDFRMYSFKVRACSRAYSHDWTECPFVHPGENARRRDPRKYHYSCVPCPEFKKGAGCRRGDMCEYAHGVFESWLHPAQYRTRLCKDGLACARRVCFFAHTPEELRPLYVSSAGSRSAMGMGLPSPGASFTPPLSPSGGGSGVAGAWPQPNVPALCLPGSAGNLQLSRLRTLMSARSMAVDELLASADYDGLVGSPASLRSARGKTLVPSNLDDLFSAEMAGAAASHSPRYADQGGSAFSPTRKAAMLNQFQQQQSLLSPRATVVPEPVSPMSSRLLSALAQREKMQQQTLRSMSSRDLGSGASVLVGSPVTSSWSKWGIPPSTPDWGADAEELGRLKRSSSFELRSGANGDEPDLSWVNTLVKEPTPEKPSINGTAAKESIASLSQAASHEGIGGEDDTAGVIGGWLEQLQLDEMVV

SEQ ID NO: 5669 - protein, 618 aa, Zea mays
  Clone ID: TF_ZmC11259_1.pep
RILLPCKTSSQGSQITELAIHGHFEPFSREDTTISLGQTNKFTIREVSPEWAFSYEITKVIITGDFLSDPSNLCWAVMFGDNEVPVEIVQPGVLRCHTPLHSNGNLRICITSGNREVCSEFKDFEFRSKPTSSSFTDIAPSSRHLKSSEELLLLAKFARMLLSGNGNREVPDGDPQSGQCPKLKTNEELWDRLINELKVGCENPLSSVDWIVEQLLKSNLQQWLSVKLRGFNGTDFLSKQEQGIIHLISALGYEWALSPVLSAGVGLNFRDSNGWTALHWAAYFGREKMVAALLAAGASATAVTDPTAQDPVGKTAAFLASERGHTGLAGYLSEVSLTSYLASLTIEESDVSKGSAEVEAERAVEGISQRNAQRHGGTEDELSMKDSLAAVRNAAQAAARIQNAFRAFSFRKRQQKTARLRDVYGMTQEDIDELAAASRLYHQAHASSGQFYDRAAVSIQKKYKGWKGRKHFLNMRRNAVKIQAHVRGHQVRKKYRTIVSTVSVLEKVILRWRRKGHGLRGFRAEQQPMVEAIEEDDEEDDDFDDDEAVKVFRRQKVDQAVKEAVSRVLSMVDSTEARMQYRRMLEEFRQATAELEGSNEVTSIFDSDLELLGINNFM

SEQ ID NO: 5670 - protein, 229 aa, Zea mays
  unsure (1)..(229): unsure at all Xaa locations
  Clone ID: TF_LIB4765-073-R1-K2-C9.pep
YVFIDIVKVLLDHDPSLGKTFGQSNVTPLITAAIRGHIEVVNLLLERVSGLVELSKANGKNALHFAARQGHVEIVEALLHADTQLARRTDKKGQTALHMAVKGTSPEVVQALVNADPAIVMLPDRNGNLALHVATRKKRSEIVNVLLLLPDMNVNALTXDRKTAFDIAEGLPLSEESQEIKECLSRAGAVRANDLNQPRDELRKTVTEIKKDVHTQLEQARXTNKNVYG

SEQ ID NO: 5671 - protein, 275 aa, Zea mays
  Clone ID: TF_ZmC49809_1.pep
DAWVTVDSSNTTALNTAATQGHMDVVRLLLEVDGSLALIARSNGKTALHSAARNGHVEVVRALLEAEPSIALRTDKKGQTALHMAAKGTRLDLVDALLAAEPALLNQTDSKGNTALHIAARKARHEIIRRLVTMPDTDVRAINRSRETPLDTAEKMGNTDAAELLAEHGVQSARAISPGGGGGGGNKQARELKQQVSDIKHEVHSQLEQTRQTRVRMQGIAKRINKLHEEGLNNAINSTTVVAVLIATVAFAAIFTVPGEYVQDPGSLAPGHDLG

SEQ ID NO: 5672 - protein, 598 aa, Zea mays
  unsure (1)..(598): unsure at all Xaa locations
  Clone ID: TF_ZmC2160_1.pep
MGVGGVLLKCFPWDAVYRGCGSKEEVRYLLWIRLTRVTKGTEFFWGVEKDIRMRXGFTXIVXLIVVELYCAHTGACVFYYLGTTLPESMEGYTWIGSLQLGDYKWAHFRGIDLAKRYITXVYFAIVTMGTGGYGDIHAVNIRGMIFIMIYGSFDMILGAYLIGNMTAGIGKFGSSLDKMKEVIRYMNRNKLGKEIREQIKGHLRLQYESSYTEASVLQDIPISIRAKISQTLYKPYIESIPLFKGCSAEFIQQIVIRLQEEFFLPGEVILEQGSAVDQLYFVCHGALEGVGIGEDGQEETLLMLEPESSFGEISILCNIPQPYTVRVCELCRLLRLDKQSFTNILEIYFVDGRRILSNLSESEYGGRVKQLESDITFHIGKQEAELTLRVNSAAFYGDLHQLKSLIRAGADPKNTDYDDRSPLHLAASRGYEDVVQFLINEGVDIDLTDQFGNTPLLEAVKQGHERVAALLFAKGAKLSLKNAGSHLCTAVAKGDSDFIRRALAYGADPNCRDYDHRTPLHIAAAEGLYLIAKMLVEAGASVFTTDRWGTTPLDEARKCGGRSRGALLEEARASELSMFPERGEEVRDKVHPRRCSVF

SEQ ID NO: 5673 - protein, 157 aa, Zea mays
  unsure (1)..(157): unsure at all Xaa locations
  Clone ID: TF_LIB3069-022-Q1-K1-C8-3Aa.pep
AATKGHNEIVGLLLENGADVNSLNYCGQTALMQACRYGHWEVVQTLLLFRCNVTRADYLSGRTALHFAAVNGHARCIRLVLADFLPRDKLNSLSETGVVTAKNKSEQSALSKFVNKAADGGIXTAIHKAGLDGLFDCVQLLLDLEANVFDGTFYFGT

SEQ ID NO: 5674 - protein, 153 aa, Zea mays
  Clone ID: TF_ZmC1087_2.pep
MGVELAQPTAAAAAVTTAEQAQDLIDAARYDDLEDVVALFSAGVSLDSTDSQGRTALHMASANGHLAVVEYLIQNGANVNATNMEKNTPLHWACLNGRIEVIRALISAGASVSALNSHEKTPMDEAVTTGKMHVIDAIGAAVAQAELDGVTVS

SEQ ID NO: 5675 - protein, 107 aa, Zea mays
  unsure (1)..(107): unsure at all Xaa locations
  Clone ID: TF_ZmC518296_1.pep
MVQLRSSLSMTRARTRSDSDDADDRGWSQLHVAARKGNLKEVRRLLNEGMNVNAPTWGPKSPGATPLHLAAQGGHVKIMDELXXRGANIDARNKGACGWTPLHICCK

SEQ ID NO: 5676 - protein, 465 aa, Zea mays
  Clone ID: TF_ZmC9395_1.pep
IGRDALVPVLGYLYTGRLKPPAQDATVCMDDACGHGTCRPAIDFVVESMYAASGFQISELASLFQRRLSDFVCEALDEDVVPIIHVASTCDLQDLLNLCIQRVAVSALDSRYLDKELPADIYNKIKEIRRQPENAIILDPEHDKRVRNILKALDSDDVDLVGLLLKESTVTLDDAFAIHYAAAYCEPKVFAELLKLDSANVNLKNSGGYTPLHIACMRREPDIILSLVERGACVLERTLDGRDALTICKRLTREKDCNRKLDKYEEKSKAYLCIDILEQELKRKSFVLDPISISIEESIATPLLVDNFHMRLINLENRVAFARIFFPSEAKLVMRIAQADSTQEFAGITNFSRLKEVDLNETPTMQNRRLRERLDALTKTVELGRRYFPHCSDVLDKFLNEESTDPIFLETGTPEDQQVKRMRFSELREDVRKAFTKDKAAVAAIASSASSSSSPRCRRPNRKSR

SEQ ID NO: 5677 - protein, 230 aa, Zea mays
  Clone ID: TF_ZmC119_798.pep
PRAGRESRPRKARDNWPPAAGLLVAAYYGDIRRLKEIAKIIDIEGKGLQDTLANTHFLGMYALHATCDSGCMPALQYLVEDLKIDVNKADTMRGFTPVMHAVLYGNLPALRFLVDHGADLHHQHKGMSLLHSAAESGRPEIAKFLLSKGVRVDVESSVLTPLIIATFRGYPSIVKILLEHGADPNERLNDKVTPLSMALKHSSVPCLKLLVQAGANGDWVLDLIIPWQEL

SEQ ID NO: 5678 - protein, 78 aa, Zea mays
  Clone ID: TF_ZmC1239_2.pep
LENGRGGSSLLRAGAVELLLDMGADANARTRRGATPLQMAEAMGYEAIAQLLCARGAEVAAASALCAASSSSSSISCA

SEQ ID NO: 5679 - protein, 223 aa, Zea mays
  Clone ID: TF_ZmC36749_2.pep
MAAAMDVDEAGGEERRPSEKELFRAAESGDAAAFASLAPADLSLRNEDGRSLLHVAAAAGHPQVVLALAQCGGDAAASVLNAQDEEGWAPIHSAASSGNSQIVDILLERGRLNIAEKLIAHGANVNKKDKFGCTPLHRAASTGNAELCEFLIEEGAEVDAVDKTGQTPLTHAVICENKGAALLLIRHGADVDVEDKEGYTALGRASNSFRPALIDAAKAMLEG

SEQ ID NO: 5680 - protein, 652 aa, Zea mays
  Clone ID: TF_ZmC853_1.pep
ETVKVPDGSNVLTNEQLDAYVVNPSLSQDQLFSILDVSPSCAYIGTNTKVSVTGTFLVNKEHVESHRWSCMFGDVEVPAEVLTDGTLRCYAPAHQSGRVPFYVTCSNRVACSEVREFEYRDSEAHYMETSRSQANGVNEMHLHIRLEKLLTLGPDDHQMLVISSGNEKYEIMNAINSLMLDGKWSNQESSVKEVVSTARVQSLKKLVKEKLHQWLICKVNDDGKGPNVLCKEGQGVIHLVAALGYDWAIRPIMIAGVNVNFRDAHGWTALHWAASLGRERTVSVLIANGAAAGALTDPTSEFPSGRSPADLASVNGHKGIAGFLAESALTSHLSALTIRESNDSTVEACGLPFAEDLTGIDSVHLAGEGPDAESLEGSLSAVRKSTQAAARIFQAFRVESFHRKKVVEYGDDTCGLSDECTLSLVSLKNVKPGQHDTHLHSAAVRIQNKFRGWKGRKEFMIIRQRIVKLQAHVRGHQVRKNYRKVVWSVGIVEKVILRWRRKRPGLRGFRPQKQLEGPSQIQPAKAEDEYDFLHDGRRQAEARLQRALARVHSMSQYPEAREQYHRLTTCVAEMKQSRVCFRSLLQDVFYFPSGFDHDLMLATLEQMMQDEMLSQAAGGADDFMAGLEDLICIDDAPPRCLPFGEAEPFYIR

SEQ ID NO: 5681 - protein, 221 aa, Zea mays
  Clone ID: TF_ZmC2138_1.pep
TAAHFAAGLGSEECLRALGAAGADVGRRERAGGGLTPLHMAVGYGRAGAVRALLELGADPEAPDGQGRTPLELVQEVLARAPKGNPATFQLRQGLEAAQKELEKAVYEWAEVEKVIDGRGEGKWREYLVEWRDGGEREWVKAAWVAEDLVSDFEAGLEYAVAEAVLDKRQAATATAEGEDSWEYLVKWVDIEEATWEPAENVDTELVQKFEQQQSGSAGGD

SEQ ID NO: 5682 - protein, 409 aa, Zea mays
  Clone ID: TF_ZmC16856_1.pep
MGNALGCAGLGERLAASARNGDAAEVRRLLEENPGLARCAAVGSSLNSPLHLAAAKGHHERIAALLLENGAEVNARNLSGETALMQACRFGHWEVVQTLLVFGCNVSKVDSLSGQTALHLAAAGGHATCVRLLLAGAGAGRNKLVNRAASGGVTALHLAALHGHADCVHLLVDERADVAAPTLPCTAAPMAAIGAGSAPLHYAAAGGEVRCCQILVARGADRAAANCNGWIPVDVARTWGCQWLEHVLSPESHLRIPRFPPSAYLSSPLASALALARDCRLLLNTAQLDSGGADACAVCLERPCDVAAEVCGHELCAKCALDLCSVVKSYDVPGIAGTIPCPLCRSAIASFRMRAAADESEPDVNDAGGGRRGAGDRQAAASSPEKKRSTDSEQDVVLPFYCAPLAVPS

SEQ ID NO: 5683 - protein, 165 aa, Zea mays
  unsure (1)..(165): unsure at all Xaa locations
  Clone ID: TF_ZmC1087_4.pep
RTAIPGLSYSPGDGGRLAQPSAGAAAVTTAEQAQDLIDAARYDDLEDVVALFSAGVSLDSTDSQGRTALXVGSANGHLAVVEYLIQNGANVNATNMEKNTPLQWACLNGRIEVIRALISAGASVSALNSHEKTPMDEAVTTGKMDVIDAIGAAVAQAELNAVTVS

SEQ ID NO: 5684 - protein, 293 aa, Zea mays
  Clone ID: TF_ZmC4298_2.pep
NMGVHISKVRSLTLDVRVWEQSVINLFQSIGNTFANSVWEEMLPSSSCVDHGDISRADGLENMSHGFAPKKPKQSDSIAVKEKFIHAKYAEKDFVRKHNMDGIQLAEQMWDNVSSNNKKGVYSLIVGSNADVNFSYGHTSFNSALTLGKALLLQEQSASPSNGSSRCFDRNPLEKGCTGDSVSPASTSARTDGPDDYVEGLSLLHLACRAADLGMVELLLQYGANVNSTDSRGRTPLHHSIMKGRHVYAQATAFQGRRSQAADRDGRTALQYAIDSGTIEDEEILVLLEDPSR

SEQ ID NO: 5685 - protein, 568 aa, Zea mays
  Clone ID: TF_ZmC37480_1.pep
RGKYLDDDISLDDIPSSGILPTEQVTGEIPFQITEISSEWAYCTEDTKVLVVGCFHENYRHLAGTNLFCVIGDQCVDANIVQTGVYRFIARPHAPGRVNLYLTLDGKTPISEVLSFHYRMVPDSQNLAEDEPQKSKLQMQMRLARLLFTTNKKKIAPKLLVEGSKVSNLLSASTEKEWMDLSKFVTDSKGTYVPATEGLLELVLRNRLQEWLVEKLIEGHKSTGRDDLGQGPIHLCSCLGYTWAIHLFSLSGFSLDFRDSSGWTALHWAAYCGREKMVAALLSAGANPSLVTDPTHDVPGGQTAGDLAAGQGYHGLAAYLSEKGLTAHFEAMSLSKGKRSTSRTESLKRNTKEFENLSEQELCLRESLAAYRNAADAASNIQAALRERTLKLQTKAIQLANPENDASAIVAAMRIQHAYRNYNRKKMMRAAARIQSHFRTWQIRRNFMNMRRQAIKIQAAYRGHQVRRQYRKVLWSVGVVEKAILRWRKKRKGLRGIATGMPVAMATDAEAASTAEEDYYQVGRQQAEDRFNRSVVRVQALFRSHRAQQEYRRMKVAHEEAKVEFGRK

SEQ ID NO: 5686 - protein, 417 aa, Zea mays
  Clone ID: TF_ZmC805_1.pep
MPALSDVALQAAIAGNLRLLKLVASKMNLREAKDAAGRNALHLAAEMGRLEVCRFLVEESGFEVNFACAEGGSPVHCAAAGGSESVLGYLLDHGGDPVMPDSMGSTPLHDAAEEGHCAAVRMLLSKGVDVDPHGCRGTPLHLACSNDRDQVVRILLEHGADPNKVVGHVLPPLMMAYCGGSLRCMKLLIEAGADVNLIAPSGVILAQAVCDGSTEIVKFLLEVGADPNIPDEDGKIPIMYPAFNGHRELVEILFPKTRPVSSLPDWSVDGIIRSMKDLFFKPQDAAVVEKKIADAKSQGKEAFARGEYPAAVYFYTMVLENDLDATAFANRSLCWLRLREGAKALLDAQQCKMIRPRWSKAWYREGAALSLLKDYQGAVNAFTEALKLDPASLEIKKALREATDSLANVGRSGEQNP

SEQ ID NO: 5687 - protein, 259 aa, Zea mays
  Clone ID: TF_ZmC5707_4.pep
MASDPNKDSKSEGLSEAKKGASPTAGAGLPSPFDFSNMSSLLNDPSIREMAEQIASDPVFNQMAEQLQKSAQGAGEQGVPNLDPQAYMETMTQVMQNPQFMSMAERLGNTLMQDPAMSSMLENLTSPAHKEQLEERMARIKDDPSLKPILDEIERGGPSAMVKYWNDPEILQKIGQAMSLNFPVDAATSTVLSGPQETDEEGEDDDESIVHNTASVGDAQGLKKALDGGANKDEEDAEGRRALHFACGYGEVSESVKLC

SEQ ID NO: 5688 - protein, 221 aa, Zea mays
  Clone ID: TF_ZmC1239_1.pep
RGDCGELRRLGPEALAARDREGRTVLHAVAAAGEAEAVAVLVDMGADTSAVDARGRTPLDVARDKGYQEVVDVLERWELVMTAARRGDLGSLESLLSKRAGVRGRDQYGLTALHLAAIKGHGDAIALLAGPGCMDVECEDVEGHRPLHLAVEGGHAEAVELLLDMGADANARTRRGATPLQMAEAMGYEAIAQLLCARGAEVAAASALCAASSSSSSISCA

SEQ ID NO: 5689 - protein, 248 aa, Zea mays
  unsure (1)..(248): unsure at all Xaa locations
  Clone ID: TF_ZmC791614_1.pep
SRSKPPTLASPLPTFLRPGLMAEIEVVSEGGRRDEDEERRRQQQQGAGEPDPVVDVYSAAAYGDLERLRGFVEQGGAATALREPDGNGYHALQWAALNDYPHVALYIVEHGGDVNATDHARQTALHWAAVRGSTSVADVLMEHGARVEAADVNGFRAVHVASQYGQTAFLHHIISKYGADFDALDIDGRSALHWAAYKGNADTIRLLLFMDANQVRQDKNGCTPLHWAAIRGNLEVCTVLVHTGTXEE

SEQ ID NO: 5690 - protein, 140 aa, Zea mays
  Clone ID: TF_LIB4740-025-R1-K1-G6.pep
WYPSPAGFCLLRDWRLTPLIIATFRGYPSIVKILLEHGADAGANVNGFGSYNPLARAAEKGLTEAIKCLLEAGANPNVPDTFGRLPIELAAEYGTWEDVELLFPVTSKIPTVADWSVNGVISHVHMEVTQLETSVRSRVI

SEQ ID NO: 5691 - protein, 259 aa, Zea mays
  unsure (1)..(259): unsure at all Xaa locations
  Clone ID: TF_LIB4748-002-R1-M1-F5.pep
MLEPESSFGEISILCNXPQPYTVRVCELCRLLRLDKQSFTNILEIYFVDGRRILSNLSESEYGGRVKQLESDITLHIGKQEAELTLRVNSAAFYGDLHQLKSLIRAGADPKNTDYDGRSPLHLAASRGYEDVVQFLVNEGVDMDLTDQFGNTPLLEAVKQGQERVAALLFAKGAKLSLKNAGSHLCTAVAKGDSDFIRRTLAYGADPNCRDYDHRTPLHIAAAEGLYLIAKMLVEAGASVFTTDRWGTTPLDEARKCDG

SEQ ID NO: 5692 - protein, 357 aa, Zea mays
  Clone ID: TF_ZmC21063_1.pep
MAAQEEKTAVAAAADVAAEEPAPAPEQQPQPAGAARRAGPSAPGGAPPNPFDFSTMMNLLNDPSIKEMAEQIAKDPAFTEMAEQLQKTVVSPRQQQQQQARQQQQQLDPQKYVATMQQLMQNPQFVAMAERLGSALMQDPAMSAMLGGLTNPAHKEQLEARVARMKEDPTLKPILDEIESGGPAAMMKYWNDPEALQKFGRAMGVGVGPSGEAGGAEHAEAEDDAGEEGEYEDESIVHHTASVGDVEGLKKALENGADKDEEDSEGRRGLHFACGYGELQCAQALLEAGAAVDAVDKNKNTALHYAAGYGRKDCVALLLESGAAVTLQNLDGKTPIDVAKLNNQDDVLKLLEKHAFV

SEQ ID NO: 5693 - protein, 485 aa, Zea mays
  Clone ID: TF_ZmC13122_1.pep
MPGSQNGGPRPRPVKAETIHDLARAGDLAGVQRKLLENPSLLNDKNPVMCQTPLHVAAGYNNTEIVKFLLNQQGTETVDLEAKNMYGETPLHMAVKNSSCGSTNLLLEHGAHIEAKANNGMTPLHLAVWHAIQAGDFSTVSVLLSYNPDCFVKDDEGKMPLNHIPGGAGSEKLLKLLTHHMEEQRKRKALMSCLEGKAMSEFEEAMSQIVGLQELKMQLRRWARGMFFDEKRRAMGLGIAKRRAPHMAFLGNPGTGKTMVARILGKLLHMVGILPTDKVTEVQRTDLVGEFVGHTGPKTRRKIHDAEGGILFVDEAYRLIPMQKSDDKDYGLEALEEIMSVMDSGKIVVVFAGYCEPMKRVIASNDGFCRRVTKFFYFDDFSTTELAEILHMKMKIPSDCSLLYGFKLHPSCSIEAIGELIAREITEEQRKQMNGGLVDTLLINARENLDSRLDFSCNDADTMITITLEDLEAGLRQISRQRQLQ

SEQ ID NO: 5694 - protein, 484 aa, Zea mays
  unsure (1)..(484): unsure at all Xaa locations
  Clone ID: TF_ZmC13122_2.pep
MPGSQNGGPRPRPVKAETIHDLARAGDLAGVQRKLLENPSLLNDKNPXCQTPLHVAAGYNNTEIVKFLLNQQGTETVDLEAKNMYGETPLHMAVKNSSCGSTNLLLEHGAHIEAKANNGMTPLHLAVWHAIQAGDFSTVSVLLSYNPDCFVKDDEGKMPLNHIPGGAGSEKLLKLLTHHMEEQRKRKALMSCLEGKAMSEFEEAMSQIVGLQELKMQLRRWARGMFFDEKRRAMGLGIAKRRAPHMAFLGNPGTGKTMVARILGKLLHMVGILPTDKVTEVQRTDLVGEFVGHTGPKTRRKIHDAEGGILFVDEAYRLIPMQKSDDKDYGLEALEEIMSVMDSGKIVVVFAGYCEPMKRVIASNDGFCRRVTKFFYFDDFSTTELAEILHMKMKSPSDCSLLYGFKLHPSCSIEAIGELIAREITEEQRKQMNGGLVDTLLINARENLDSRLDFSCNDADTMITITLEDLEAGLRQISRQRHLQ

SEQ ID NO: 5695 - protein, 208 aa, Zea mays
  Clone ID: TF_ZmC23227_1.pep
MAVPGGRNGLRDEDDDMAQHAEAFGGVSDDEDVPPHLRALANAAQSGDVTALVAALDNHDGSIDVPVEDGDTLLHLACLYGHLPCVQLLLERGASLECQDEEGAIPLHDACAGGFTELVQYILNFAANKDGCVVRMLNTIDSEGDTPLHHAARGEHLDVVKLLLQAGASPKKENTYGQTPADMADQDTEVRTLLTAKQIEASTHMSDD

SEQ ID NO: 5696 - protein, 506 aa, Zea mays
  Clone ID: TF_ZmC13153_1.pep
RGDPRAVRQIIAEIDAQMTGTGEEFDSDVAEIRAAIVNEANEMEATALLIAAEKGFLDIVVELLKHSDKDSLTRKNKSGFDALHVAAKEGHRDIVKVLLDHDPSLGKTFGQSNVTPLITAAIRGHIEVVNLLLERVSGLVELSKANGKNALHFAARQGHVEIVEALLHADTQLARRTDKKGQTALHMAVKGTNPEVVQALVNADPAIVMLPDRNGNLALHVATRKKRSEIVNVLLLLPDMNVNALTRDRKTAFDIAEGLPLSEESQEIKECLSRAGAVRANELNQPRDELRKTVTEIKKDVHTQLEQARKTNKNVYGIAKELRKLHREGINNATNSVTVVAVLFATVAFAAIFTVPGGNANDGVAVAVHATAFKVFFIFNAVALFTSLAVVVVQITLVRGETKAERRVVEIINKLMWLASVCTTVAFISSSYIVVGRHFRWAALLVTLIGGVIMAGVLGTMTYYVVKSKRTRKIRKKVKSTRRSGSSSWQHNSEFSDSEIDRIYAI

SEQ ID NO: 5697 - protein, 69 aa, Zea mays
  Clone ID: TF_LIB4721-017-R1-K1-F5.pep
FGQHGANVNAIDHTGQTALHWSAVRGHVQVAELLLKEGAKVDATDLYGYQVTRGTSCYHCIFYSSSIFS

SEQ ID NO: 5698 - protein, 108 aa, Zea mays
  Clone ID: TF_ZmC518296_2.pep
MVQLRSSLSMTRARARGGDSDDADDRGWNQLHVAARKGNLKEVRRLLNEGMDVNAPAWGPKSPGATPLHLAAQGGHVKIMDELLERGANIDAPTKGACGWTPLHIAAR

SEQ ID NO: 5699 - protein, 446 aa, Zea mays
  Clone ID: TF_ZmC12604_2.pep
MGHGVSCARTGDEHNYFRAAQVGDLDALDALLAADPSLARRATLYDRLSALHITAANGHLEVMSMILDHGVPPDAVNRHKQTPLMLAAMHGKIDCARKLLEAGANILMFDSLHGRTCLHHASYFGHVDCLRAILAAARTTPVADSWGFARFVNVRDDRGATPLHLAARQGRSACVQVLLENGAIVSALTGSYGFPGSTSLHLAARSGNLDCIRKLLAWGADRLQRDSAGRIPYAVALKRNHAACAALLNPSAAEPMVWPSPLKFISELDPEAKALLEAALMDANREREEKILKGITKYSQPSPTSPCEHDAIDEASSEASDAELCCICFEQACSIEVQDCGHQMCAACTLALCCHSKPNPATLTPPSPACPFCRGSISRLLVARASPDADDDDKAAAASSPQLVRRRSHNLRWAAATAWTSPSTTCDRHLMLCVAEQTAEHDHFKS

SEQ ID NO: 5700 - protein, 168 aa, Zea mays
  Clone ID: TF_ZmC36749_3.pep
MAAAMDVDEAGGEERRPSEKELFRAAESGDAAAFASLAPADLSLRNEDGRSLLHVAAAAGHPQVVLALAQCGGDAAASVLNAQDEEGWAPIHSAASSGNSQIVDILLERGADVNLVTDGGRTALHYAASKGRLNIAEKLIAHGANVNKKDKFGCTPLHRAASTGNAEL

SEQ ID NO: 5701 - protein, 248 aa, Zea mays
  unsure (1)..(248): unsure at all Xaa locations
  Clone ID: TF_ZmC515903_1.pep
MAPNPAAIALLAALDGNLRLLKKMSKKMDLRETKDPKGLNALHFAANKGSLEICKFLLEDVGVDVNSVSSVGATPMFYAALKGNLQVARYLLDHGSDPAKPSERGLTPLHNAAEHGHCEIVRLLLSKGVDVDVINYRGTPLHMTAAKGQHQAMKILLEHGADPNRVVXHIFSPLMMACCGNSLECMKLLIEAGADVNGNSSSGPTPLTGAVDDGSTEFVKFLLEAGADPNIPNSTGIFHQESSSPWSA

SEQ ID NO: 5702 - protein, 190 aa, Zea mays
  Clone ID: TF_LIB4757-035-Q1-K1-C3.pep
MSAAAEDAAAADGGSGGGSSGAGSSEGGARRRFDDKGLVARTSLILWHTHQNDVGAVRKLLEEDAALVNARDYDSRTPLHVAALHGWHDVAECLVANGADVNAQDRWQNTPLADAEGAKRQPMIELLKEHGGLTYGKTGSHFEPKTIPPPLTNKADWEINPLELDFTKATVIGKGSFGEISEANWRGTPI

SEQ ID NO: 5703 - protein, 218 aa, Zea mays
  unsure (1)..(218): unsure at all Xaa locations
  Clone ID: TF_ZmC34704_1.pep
MSAAAEDAAAADGGSGGGSSGAGSSEGGARRRFDDKGLVARTSLILWHTHQNDVGAVRKLLEEDAALVNARDYDSRTPLHVAALHGWHDVAECLVANGADVNAQDRWQNTPLADAEGAKRQPMIELLKEHGGLTYGKTGSHFEPKTIPPPLTNKADWXPLELDFTKATVIGKGSFGEILKANWRGTPIAVKRILPSLSDDRLVIQDFKHEVNLLIKLR

SEQ ID NO: 5704 - protein, 557 aa, Zea mays
  Clone ID: TF_ZmC139143_1.pep
MSLEIHEEDGGASGARPATKVMSVSGSGKRGRYVRQVTGRHNDTDLHVAARGGDAAALRRALLDAAAAVAATGEAPEDLEAARRAVAAEPNEAGETPLVAAAERGHLGVVVELLRHLDAEGLAAKNRSGYDALHVAAREGRHAVVQEMLHHDRMLAKTFGPANTTPLISAAMRGHIEVVELLLEQDDFGLVEMARDNGKNALHFAARQGHTGIVKALLEKDPQLARRNDKKGQTALHMAVKGTSCDVLRALVDADPAIVMLPDKNGNTALHVATRKKRAEIVSVLLRLPDTHVNALTRDHKTAFDIAEGLPVCEESCEIKDILSQHGALRSRELNQPRDELRKTVTEIKKDVHTQLEQTRKTNKNVHGIAKELRKLHREGINNATNSVTVVAVLFATVAFAAIFTVPGGNDNNGLAVVVQTTSFKIFFIFNAVALFTSLAVVVVQITVVRGETKSERRVVEVINKLMWIASVCTTISFIASCYIVLGRHFQWAAILVSLIGGVTMAGVLGTMTYYVVKSKRQRKIRKKEKMSRRSGSSSWYDNTELSDTELNPVYAL

SEQ ID NO: 5705 - protein, 176 aa, Zea mays
  unsure (1)..(176): unsure at all Xaa locations
  Clone ID: TF_LIB4828-028-A1-N1-C10.pep
MGLQQSKEELLYQQVNYGNVDGIRTLRGQGAGLEWIDKEGKTPLMLACMRPDLFDVAKVLIELGANVNAYRPGSHCGTALHHAAKKGLQQTVHLLLSHGEGRLCLFCGWMRENYAPAFLDAIAPQFMTRKIXAVVLPREVRTPTQASKVEIAIYPXIQASKPRSVLKLWKCPIEQP

SEQ ID NO: 5706 - protein, 492 aa, Zea mays
  Clone ID: TF_ZmC20337_1.pep
MHGPYPTAAAAAASSSDDMAANGMKVALHRQVSGGSMKQNAELRRQASLESPRTGRATSRFLFGRQSSMDPNRRRGRSQSPVRAPEDLGVPDNLDATMQLLFFACQGDALGIEGLLRSGVDVNSINLDGRTALHIAACEGHRDVVRVLISWKANIDARDRWGSTAVADAKFYGHSRVYDLLKFHGAKVPRTKRTPMMVSAPAEIPEYELNPGEVQFRRGCDVTPGVYHIAKWNGTKVSVKILDRDGCSDQEAANSFRHELTVLEKVRHPNVVQFVGAVTQSIPMMIVSELHEEKDLSVCIQKKGKLKPQKVLRYGLDIARGMTYLHQCKPDPIIHCDLKPKHIFLDSGGQLKIAGFGVTRMSKVGTDKVRLIYHGALVDSFSYHTAPELYRNDAFDSSVDSYSFGFILYEMVEGSVRAPEDSGHSIRFEGLRPSLKGRLKGYPPDFKALVEECWHPQAMARPTFSEIIIRLDKIYAHFDKHGSWKDSLKLWK

SEQ ID NO: 5707 - protein, 580 aa, Zea mays
  Clone ID: TF_ZmC14450_1.pep
MDSEPDVELRGLDIDVELDPEDLQPSVPLKKVPGGDLFEAARAGDCDRLALLLDAGANVNARDRWDSVALYYACLAGHAEAARMLLEAGAVCAERTFDGDRCHYAALNLRLRWLLKSFEARPPPLAPLPTALRATFLACPANRTAFLEMLQGSAGAESAALAAAAGFGPKDDPSSACLFPPDITFYVDRKPVEAHRVILCARSPFFEKKFKTDWKDRKEVRFSNQKLYFGALYSLIHFFYSDRLEVAVDDMENLARACKVCKCEELQKVLDKEVVHQKYAEYKSARELDMDSSQKRFILQAQSLPEEDRLPSALQRILQTCLANSREGYCSEESNEMIRNSEDDDLADLYIKVGDKVFHCHQVILASRSEYFRARLSRTVDFLEGNCGFEAAQNVPLLEEHDISAEAFEKMLEYMYTDKLEHLDPGQAEELFDVASRYLLFPLKRVVADMLLPYLEHVSPAELCHWLMMSDIYGVMKIREYILDIIACNFEMFAATREFRALLLTLPPPSGDDSLRTTRPSAPGTGGNTDQGNILDDLREKWLEAEGAELDERDESAALFDKRLEMLMLVAEKEADDEDA

SEQ ID NO: 5708 - protein, 189 aa, Zea mays
  Clone ID: TF_ZmC12604_4.pep
MGHGVSCARTGDEHNYFRAAQVGDLDALDALLAADPSLARRATLYDRLSALHITAANGHLEVMSMILDHGVPPDAVNRHKQTPLMLAAMHGKIDCARKLLQAGANILMFDSLHGRTCLHHASYFGHVDCLRAILAAARTTPVADSWGFARFVNVRDDRGATPLHLAARKGRPACVQVLLENGAIVSALP

SEQ ID NO: 5709 - protein, 141 aa, Zea mays
  unsure (1)..(141): unsure at all Xaa locations
  Clone ID: TF_ZmC36749_4.pep
PQVVLALAQCGGDAAASVLNAQDEEGWAPIHSAASSGNSQIVDILLXEFGCTPLHRAASTGNAELCEFLIEEGAEVDAVDRTGQTPLTHAVICENKGAALLLIRHGADVDVEDKEGYPALGRASNSFRPALIDAAKAMLEG

SEQ ID NO: 5710 - protein, 308 aa, Zea mays
  unsure (1)..(308): unsure at all Xaa locations
  Clone ID: TF_ZmC2241_2.pep
MADATAALSARSKVQAFLEAARAGDLQSLKNLVAALDEDGTGAASVAAAVRDANKRTALHFAAIGCRTDVCEFLIGELGLPVDPKDDDGETPLIHATRQGHLDTVKYLLDHGADPSLATSLGATALHHAAGIGNTELMKLLLSKGVDVESESDAGTPLVWAAGHGNQDAVKLLLQHNAKPNTENDDGVTALLSAVAAGSLPCLEVLIEAGANPNVKAGGATPLHIAADSGNIEVIKCLLKAGADPNTCDDDELKPVQVAAWRNNHEAVELLLPLTSXIPGVSNWNVDGIIEHMLPKEFEEKSQLKEAT

SEQ ID NO: 5711 - protein, 127 aa, Zea mays
  unsure (1)..(127): unsure at all Xaa locations
  Clone ID: TF_ZmC12604_7.pep
MGHGVSCARTGDEHNYFRAAQVGDLDALDALLAADPSLARRATLYDRLSALHINAANGHLEVMSMILDHGVPPXTPLMLAAMHGKIDCARKLLEAGANILMFDSLHGRTCLHHASYFGHVDCLRXIL

SEQ ID NO: 5712 - protein, 128 aa, Zea mays
  unsure (1)..(128): unsure at all Xaa locations
  Clone ID: TF_LIB4766-003-R1-M1-C3.pep
CLSKDVHHVQPVTDKMLLDPISCEIIQDSENQKXCLQGCSLLHFACEYGYPIMVELLLLFGADINMQDFHGRTPLHHCVQKKNDELTKHLLKRGARTTIRDGGGLTALERRMELGAITDEDLFILFVR

SEQ ID NO: 5713 - protein, 200 aa, Zea mays
  Clone ID: TF_LIB4738-092-Q1-K1-A8.pep
MGDLADLAGAGEAARSHLAAGGQRDRLAALLELAAADDVAGFREALAGGGGEGDTAELADGVGMWYGRSKAYEPRTPLMVAATYGSVEVVSLLLALGCVDVNRRPGVDGATPLHCAASGGSRNAVAVVKLLLGAGADPVTPDSAGRLPADVILSPPASPDALGDLEMLLGRRRGLAVATSVPSLSSSPPLSSSPDESTGR

SEQ ID NO: 5714 - protein, 323 aa, Zea mays
  Clone ID: TF_ZmC5707_1.pep
MASDESKNSKPEKPSSAAGAGLPNPFDFSSMSNLLNDPSIREMAEQIASDPVFNQMAEQLQKSAQGAGEQGIPALDPQQYMETMQQVMQNPQFVSMAERLGNALMQDPAMSSMLENLTSPAHKEQLEERMARIKEDPSLKPILDEIENGGPSAMVKYWNDPEVLQKIGQAMGVNLPGDSSVSTVLSGPEETEEEGGDDDESIVHHTASVGDEEGLKKALEGGADKDEEDAEGRRALHFACGYGELKCAEILLEAGAAVDALDKNKNTPLHYAAGYGRKECVDLLLKYGAAVTLQNLDGKTPIEVAKLNSQDEVLKLLEKDAFL

SEQ ID NO: 5715 - protein, 335 aa, Zea mays
  Clone ID: TF_ZmC33803_1.pep
MASSGDPPGSADEKKTPISEGSSDERQGLPPAGFSNPFDFGSMQSLLNDPSIKEMADQIARDPAFNRMAEQLQKSAQSTGEQGTPPLNPQQYMETMQKVMENPQFMTMAERLGNALMQDPAMSSMLETFSSPSHKEQLEERMSRIKEDPAMKSILDELENGGPSAMMKYWNDPDTLQKIGEAMGASFPFGAGSSAEPSGTEETEEEGGDDDESIVHHTASVGDEEGLKKALDGGADKDEEDSEGRRALHFACGYGELKCAQILLEAGAAVDALDKNKNTPLHYAAGYGRKECVDLLLKHGAAVTLQNLDGKTPIDVAKLNNQDEVLKLLEKDAFL

SEQ ID NO: 5716 - protein, 142 aa, Zea mays
  Clone ID: TF_ZmC1115_1.pep
RVFEGPMGPVFSSSLYGEDEGNDSELADIHVLAREGATEDIVKFLAAGVEVNMRDTEGRTPLHWAVDRGHLSAVEVLAKANADLNAKDNEGQTALHYAAVCEREDIAELLVKHHADLQIKDEDGNTAQDLCPPSWSFMNRAN

SEQ ID NO: 5717 - protein, 254 aa, Zea mays
  Clone ID: TF_ZmC9440_2.pep
MGRRHSGGGGGGRGRGRGRGRDEEEDLPLHKAARSGDAAAVESVCESNPLAVNSRDRLSRTPLHLAAWAGHVDVVRCLCKHKADVGAAAMDDTAALHFASQKGHVEVARELLASGASVKAKNRKGFTALHFAAQNSHLDLVKCLVKKGVDVTAKTKGGQTALHVAEDDEVRAFLKECEQSLKKGAELPSEKDDSAEKEGDSKSSGEVMKDEEDAEQGEKRKSELVGASSLSGVKKAKVSLGHLVCENDMDEEEE

SEQ ID NO: 5718 - protein, 758 aa, Zea mays
  unsure (1)..(758): unsure at all Xaa locations
  Clone ID: TF_ZmC9798_1.pep
MAVLLRPAAIAGGRQVWPVAEDEEGAREAEASSQRLVEAVARGDAREAGELLAAGRADVNYAGVVWLRARRVAEAEPREDAAAEARAVHEEIRADVSPLFLAAGNGDVALVRALLAKGADVNGKVFRGYPTTAAVREGCAEVAERVEGGRCSSCANEVEEAAELWVRGIRVXYQGGVWQERQGVSNAWLRSLRLESVGCSERVLVKSCSGRRAVGVLCGSVWGAAALVFSSRALACHDGFWFRGMVLCCVVRLXACCWVASTGEELRVGAGLAEPYDAVWCAVEYYESTGSILRMLLRSGFTSTAAHLGRTLLHHAILCGSAGAVQTLLASGADSEAPVKTTRSNRSRPVHLAARLGQPEILRMLADRGCDLNARAEAGDTAAIICSRHKREDCLRVLVSAGADVALLNSAGDSSASVASSGGWKTGFERAVIGAIRCGAVPRSSERSVFSPLMFGALCGDATAMEVLLSQPDVDVDEQDSDGCSPIMAAAKMGNVEAFRALVFAGANVKLSNKRGETAIGLAQQSKKRDLFEQVMLELALEKGMPGGFYALHCASRRGDTAAVRHLASTGCDVNIPDGDGYTPLMLAAREGHAGVCELLISYGARCDLRTPRGETALSLARAALATAAFNKAEDVIMDEMGRQAVLQGARVRKHTKGGRARPHGKSLRMVAAAGVLRWGGSSRRNVICREAEVGGSSAFQRHRQRKGDAYEPGLFRVVTATGREVHFVCQGGKEAAELWVRGIRAVTRAAFGKRGKE

SEQ ID NO: 5719 - protein, 244 aa, Zea mays
  unsure (1)..(244): unsure at all Xaa locations
  Clone ID: TF_LIB5117-070-A1-PF1-H3.pep
MLPWAATASSSSAAAAAAAALLHASPLPASHRAALPRYRPSPSLPPPLSVAFRSPARALPRGGDAFWEEPDDGSGGDYEDDGKQATGQRSSPFPPPFPLSRLVATRQQERQEQDLRREIELLLTPEEEAILDQNETADVTKISSPKWHPLHTYALALQIPLMDKLLDNGVDIDLVDKDGFTPLHKVIIGKKEAVISHLLRKGANPHVTDRDGATPLHYAGQVGALQTXKLLIKYRVDVNVVDVD

SEQ ID NO: 5720 - protein, 226 aa, Zea mays
  Clone ID: TF_ZmC178914_1.pep
MEAVLRHPSLSRTRPPNLNPPTTPSPSLHAPSLLRLRARRLIAAAVFQDQKPKEPASKGGDDEEEAYGEVDRIVSSRTVSSPVFAEDGSATAAVATEFLVEWKDGHEPSWVPAEAIAADVVAEYETPWWTAAKKADSEALAALLADETLRRDPDAEDAQGRTAAHFAAGLGSEECLRALGAAGADVGRRERAGGGLTPLHMAVGYGRACAVRALLELGADPEAPDG

SEQ ID NO: 5721 - protein, 320 aa, Zea mays
  Clone ID: TF_701167176_FLI.pep
LKVLDPLISSDSQTQCGADPNATARVLLRSLKPSLHANVDCTALFAAIVSRQVAVVRHLLQAGVKRDTKVRLGAWSWDASTGEELRVGAGLAEPYDAVWCAVEYYESTGSILRMLLRSGFTSTAAHLGRTLLHHAILCGSAGAVQTLLASGADSEAPVKTTRSNRSRPVHLAARLGQPEILRMLADRGCDLNARAEAGDTAAIICSRHKREDCLRVLVSAGADVALLNSAGDSSASVASSGGWKTGFERAVIGAIRCGAVPRSSERSVFSPLMFGALCGDATAMEVLLSQPDVDVDEQDSDGCSPIMAAAKMGNVEAFRA

SEQ ID NO: 5722 - protein, 62 aa, Zea mays
  Clone ID: TF_LIB3245-435-P1-N1-A8.pep
SSSTIRRSAARDARWSKNNPLTNSRGRTPLHHSVLKGRHVFAQLLVSRGADPQAADRDGWTA

SEQ ID NO: 5723 - protein, 256 aa, Zea mays
  unsure (1)..(256): unsure at all Xaa locations
  Clone ID: TF_ZmC5707_8.pep
FFLSAEPHSDSFGIVNFTIVLYARHVQDPSIREMAEQIASDPVFNQMAEQLQKSAQGAGEQGIPALDPQQYMETMQQVMQNPQFVSMAERLGNALMQDPAMSSMLENLTSPAHKEQLEERMARIKEDPSLKPILDEIENGGPSAMVKYWNDPEVLQKIGQAMGVNLSGDSSVSTVLSGPEETXLLEAGAAVDALDKNKNTPLHYAAGYGRKECVDLLLKYGAAVTLQNLDGKTPIEVAKLNSQDEVLKLLEKDAFL

SEQ ID NO: 5724 - protein, 883 aa, Zea mays
  unsure (1)..(883): unsure at all Xaa locations
  Clone ID: TF_ZmC885_1.pep
MAGWGPSRLPTCGPWGRGVALERELSRDGSHYSISSGILPSLGARSNRRAKLRPFIVSPYDRRYRCWETFLIILVIYSAWVSPFEFGFIRKPTGALAAVDNVVNAFFAVDIILTFFVAYLDRMTYLLEDDPKRIAWRYTTSWFVLDVASTIPSEFARKILPPNLRSYGFFNMLRLCRLRSNQLLLARGEQHRHFHYFWVVDVQPICVTLFEVHCSACFYYLLADRYPNSTDTWIGNSMPDFRQRGMCIRYVVSVYLSITTLTTVGYVHLHVENTRDAPVTLCASVHVPHLNXSVAYDGFEAVGCIQLGNEFVVSWSVCSFVISFHGKGFTKCNYMISFFSCLXIKLSLEVRNIRESXILSPKAIRSSISQYLFFNLVQKVYLFEGVSNDLIFXLVSEMKAEYFPPREDVILQNEAPTDFYILVTGSAELIELRNGGEQMAGVAKAGDVVGEIGVLCYRPQLFTVRTKSLCQLLRMNRTAFLSLVQSNVADGTIIMNNLMQLLKQQKDNSVMVGVLKEIENMLARGRLDLPVTLCFAVNKGDDFMLHQLLKRGLDPNESDNNGHTALHIAASKGDEQCVKLLLEHGADPNARDSEGKVPLWEALCEKQNPVVELLVQSGAGLSSGDVALYSCVAVEENDPELLENIIRYGGNVNSSMKDGTTPLHRAVCDGNVQMVELLLEHGADVDKQDNNGWSARDLADQQGHDDIQALFKSRKAHRKHASNGRVAPMLIGRFNSEPSMPDMSHENARVRSEVVPQKLLRKRVSFQNSLFGVISSSHAHQDTGRLLSKGLAGTEGPNCRHDSLIRVTISCPEKGGNAAGKLVRLPRSMAELLELGAKKFGIKPGKVLTVGGAEIDEVELIRDGDHILLVSDEWVPDVEQIRP

SEQ ID NO: 5725 - protein, 191 aa, Zea mays
  unsure (1)..(191): unsure at all Xaa locations
  Clone ID: TF_ZmC29_2.pep
MNGMPISASSAASVDSGAVAAGTPMKNATAADALAEMARHLTVDTEDTFAGLLELAADDDAEGLRLALERAPPAAADEAGLWYGRRKVLEHRTPLMVAATYGSLAALRLLVSISYVDVNRRSGTDGTTALHCAASGGSRTAVESVKLLLGAXADANTXDDAXRRRADVISVAPEMFDAKFXPSDLLGFPQS

SEQ ID NO: 5726 - protein, 208 aa, Zea mays
  Clone ID: TF_LIB5116-066-A1-PF1-E11.pep
MELKFDALWKRDLLALSKYNVNGKVKAITVRNDYPDYPVPYFQVTEGFDLKKVKKLMLERDVEIAKSIANDIIIPDPAPQWVADNFLDKYAELEPILVKDSAWCFLRLFQNCRGRGMSSDLTITAQTLTFMVSFNALRCAKVVLEGMAPELYGMHANPNCINKFGYFALHEAAERFSVDMIKLLLRHGASPNVRTVRNDVIFDVIENL

SEQ ID NO: 5727 - protein, 226 aa, Zea mays
  Clone ID: TF_LIB4738-112-A1-K1-G12.pep
MDLPPLSHQALFAAVRSADAPAVRALLVDAEASGTSLAALAAAQTDAGETALYVAAEAGSEEVVRLLLPLYDFEAATVRSRLDLDAFHVAAKQGHTGVVKEFLGRWPGLCSVCDSSNTSPLYSAAVKDHLDVVNAILDTDDSCIKIVRKNGKTSLHTAARIGYHRIVKALIERDPGIVPINDRKGQTVLHMAVKGKNTDVMEELLMDDAFIRHVRDKKRNTAFAIA

SEQ ID NO: 5728 - protein, 178 aa, Zea mays
  unsure (1)..(178): unsure at all Xaa locations
  Clone ID: TF_LIB3279-176-Q1-K6-B3.pep
MGGGNYARQMAMCLSMIASGIGMETGGISSEMVDQMKRNVASSDCDGSNVMELLDRMTEDSDKEEHLGPLHDAARAGKMDVCKHLVENLGFDVDVRANDXSGKTPLTCAVSCGKVIAVRYLIAMGADLEKQDAICFTPLHYAAKRGYSXLSMXLLSRGANVXVDSSGGTPLHGFCCLW

SEQ ID NO: 5729 - protein, 466 aa, Zea mays
  Clone ID: TF_ZM5008.C1.o2.fg.pep
MGNSLGCSASGERLVSAARDGDAIEARMLLELSPALARYSTFGGLNTPLHFAAAKGHLDIVTMLLEKGADVNARNYCGQVTRADYLSGRTALHFAAHDGFVRCIRLLVADFVPSVALEDIASSVVDGGDCQTNSGSSPNSSSGQKFNESARVRYINKPADGGVTALHMAALNGAGSTPLHYAAGGGKQECCELLISKGASRLTLNCNGWLPVDVARIFGRRSLEPLLSPNSHSNVPVFQLSSYLALPLMSILNIAREFGLQHTTPSIDDNDLCSVCLERSCSVTAEGCSHEFCIKCALYLCSTSNIRVEFTGPPGSIPCPLCRNGIMSFTKLPSTPTEGLKSGSALTFCNPCILNARSMDSPATFSRAEIRRNRVAAVSSELVCPITCSPFPSSALPTCRCSDDDPCGDTDVQDGPEFQSPRPSHSASMELDKRGEGDLDRASCSGMFWSRRSCHREQQCDAEINA

SEQ ID NO: 5730 - protein, 215 aa, Zea mays
  unsure (1)..(215): unsure at all Xaa locations
  Clone ID: TF_ZmC5306_1.pep
VVFSAKEKFIHAEYVNKEFLRNRSMDENQLAQQMWNSVAANDKKTAYSLIVRSRANVNLVYGEIPSSPFLTLGKALQQEQPVSPPVGSPRFFDCNSHDKISPREPLSPASTSSRTDDMEDGCEGLSLLHLACRVADVGMVELLLQYGASVNMNDSRGRTPXHCILKGRHRHAKLLLSRGADSQAMDRDGRTALQYAIDGGTSDEDILALLEDHSR

SEQ ID NO: 5731 - protein, 55 aa, Zea mays
  Clone ID: TF_700165611H1.pep
EGHRPLHLAVEGGHAEAVELLLDMGAEANARTRRSATQLQIAKAIEYEAIDQLLC

SEQ ID NO: 5732 - protein, 184 aa, Zea mays
  unsure (1)..(184): unsure at all Xaa locations
  Clone ID: TF_LIB3608-040-Q1-K6-A3.pep
VIRLQEEFFLPGEVILEQGSAVDQLYFVCHGALEGVGIGEDGQEETLLMLEPESSFGEIFSESEYGXSILCNIPQPYTVRVCELCRLLRLDKQSFTNILEIYFVDGRRILXIRVKQLESDITFHIGKQEAELTLRVNSAAFYGDLHQLKSLIRAGADPKNTDYDGRSPLHLAASRGYEDVVQFL

SEQ ID NO: 5733 - protein, 520 aa, Zea mays
  Clone ID: TF_ZmC15603_1.pep
MGNSLGCSASGERLVSAARDGDAIEARMLLELSPALARYSTFGGLNTPLHFAAAKGHLDIVTMLLEKGADVNARNYCGQTALMHACRHGHWEVVQMLLLFRCNVTRADYLSGRTALHFAAHDGFVRCIRLLVADFVPSVALEDIASSVVDGGDCQTNSGSSPNSSSGQKFNESARVRYINKPADGGVTALHMAALNGHLDCMQLLIDLGANVSAVSFPYGTTANLIGAGSTPLHYAAGGGKQECCELLISKGASRLTLNCNGWLPVDVARIFGRRSLEPLLSPNSHSNVPVFQPSSYLALPLMSILNIAREFGLQHTTPSIDDNDLCSVCLERSCSVAAEGCSHEFCIKCALYLCSTSNIRVEFTGPPGSIPCPLCRNGIMSFTKLPSTPTEGLKSGSALTFCNPCILNTRSMDSPATFSKAEIRRNRVAAVSSELVCPITCSPFPSSALPTCRCSDDDPCGDTDVQDGPEFQSPRPSHSASMELDKRGEGDLDRASCSGMFWSRRSCHREQQCDAEINA

SEQ ID NO: 5734 - protein, 180 aa, Zea mays
  Clone ID: TF_LIB5116-047-A1-PF1-C5.pep
MAAPPDSKSDKSPEELLCAAAEAGNDDAIAEIISSGADPTYFDASGMTPLMRAASGGHAAAARLLLDAGAPWNALSPEGLSAGDLTSDPATYDLLLDHALRSELILGTVARRQAASANSSDGVPAETYLDSRISFSEDRVMDAESKAVMMEWERPLMEAHARAVCAAGGGKVLNVGFGMG

SEQ ID NO: 5735 - protein, 166 aa, Zea mays
  Clone ID: TF_ZmC11431_1.pep
MVQVRRSLSMSRLRSCHDADDRGWNPLHVAARKGDLKEVRRLLDEGGMDVNAPAWGPKCPGATPLHLAAQGGHVKIMDELLERGANIDARTKGACGWTPLHIAAKERNKKAVRFLIENGAFLPPEMNDHRFNPPLHYCSGLEWAYEMKRMQDESDSPGETSLSSDN

SEQ ID NO: 5736 - protein, 520 aa, Zea mays
  Clone ID: TF_ZmC15603_2.pep
MGNSLGCSASGERLVSAARDGDAIEARMLLELSPALARYSTFGGLNTPLHFAAAKGHLDIVTMLLEKGADVNARNYCGQTALMHACRHGHWEVVQMLLLFRCNVTRADYLSGRTALHFAAHDGFVRCIRLLVADFVPSVALEDIASSVVDGGDCQTNNGSSPNSSSGQKFNESARVRYINKPADGGVTALHMAALNGHLDCMQLLIDLGANVSAVSFPYGTTANLIGAGSTPLHYAAGGGKQECCELLISKGSSRLTLNCNGWLPVDVARIFGRRSLEPLLSPNSHSNVPVFQPSSYLALPLMSILNIAREFGLQHTTPSIDDNDLCSVCLERSCSVAAEGCSHEFCIKCALYLCSTSNIRVEFTGPPGSIPCPLCRNGIMSFTKLPSTPTEGLKSGSALTFCNPCILNTRSMDSPATFSKAEIRRNRVAAVSSELVCPITCSPFPSSALPTCRCSDDDPCGDTDVQDGPEFQSPRPSHSASMELDKRGEGDLDRASCSGMFWSRRSCHREQQCDAEINA

SEQ ID NO: 5737 - protein, 368 aa, Zea mays
  unsure (1)..(368): unsure at all Xaa locations
  Clone ID: TF_ZmC11797_1.pep
MGIKENRKECHHNKQLKIDADENDLRFCFRIISPVKAYTLQAESGADQKDWIQKITGVIASLLNSPFPQQLSYGNVAAESNRSTSSVDSLSIEDNKSSEGHDDIFNLLRNIPGNDSCAECRSPDPDWASLNLGILICIECSGAHRNLGVHISKVRSLRLDVKVWEPVIMDLFHALGNDYANSIWEALLPKEDQGMNDSNGAILFIEKPKPSDAFSIKERYIQTKYVDKLLFARDPDQNTINILEAIRKNDVRAAYRILAIAEVSANMTYDALSKDVHHVQPVTDKMLLDPISCEIIQDSGKPEGCLQGXHGRTPLHHCVQKKNDELTKHLLKRGARTTIKDGGGLTALERRMELGAITDEDLFILFVR

SEQ ID NO: 5738 - protein, 128 aa, Zea mays
  Clone ID: TF_LIB3150-064-P1-N1-E1.pep
MAAWSRRDGMGGGNYARQMAMCLSMIASGIGMETGGIKLLDRMTEDSDKEEHLGPLHDAARAGKMDVCKHLVENLGFDVDVRANDGSGKTPLTCAVSCGKVIAVRYLIAMGADLEKQDAIGFTPLHYA

SEQ ID NO: 5739 - protein, 327 aa, Zea mays
  unsure (1)..(327): unsure at all Xaa locations
  Clone ID: TF_ZmC17166_1.pep
MAGDWQELGQAAAIGLLFAFLVAKLISTVIAFKEDNLRITRSPPTSPTAAAASRASRXSHYGSTDGGSGSDSDWEGVESTELDEEFSAASAFIAASAASGTSVPEEAQLRLYGLYKIATEGPCTAPQPSALKLKARAKWNAWHKLGAMPTEEAMQGYITIVQDLFPNWDAGASAKRKDEDSIASASASKGPMGPVFSSLMYEEDEGNESELGDIHVSAREGATDDIVKLLAAGVEVNVRDTEGRSPLHWAVDRGHLSAVEVLANANADLNAKDNEGQTALHYAAVCEREDIAELLVKHHADLRIKDEDGNTAHDLCPSSWSFMNQAN

SEQ ID NO: 5740 - protein, 334 aa, Zea mays
  Clone ID: TF_ZmC59910_2.pep
DGEFRREMMNRAVHAAARGGSLAVLRDLLRGCSDAAAYRDAQGSTILHAAAAKGQVEVVKDLIASFEAGNCVDDQGDTALHIAAFRGHVQVVEALITASPSLISATNEAGDTFLHMALTGFGTPEFQRLDRQTELIRQLASGAIVDISSSSTIINAQNDDGKTALHLAVVCNLHSDVVKLLMSLPCIDLNICDKDGMTPLDLLRKQPRTTASEVLIKQLILAGGFTSSRDHETRSAIASQLKMHSIVGSPGTSFKIPDGEIFFLHAAGVDVSGGIGIGEGGAGAVPFSSVIARADAADVLLGPKLKRLNSFQDAAKHIKVLFRWPRRGWKNQAA

SEQ ID NO: 5741 - protein, 204 aa, Zea mays
  Clone ID: TF_ZmC263942_1.pep
MNLKFKAPWKKELVALGKANVNGEDKTITIRNDYPDYPVPYFQVTEGFNLRKVKELMLERNVKIAKSIANDIIIPDPAPQWVADNFLDKYAELEPILVKDSARCFLQLFQNCRGRGMSSDLTITAQTLTFIVSFNALRCAKVVLEGMAPELYGMHANPNCINKYGYFPLHEAAERFSLDMIKLLLRHGASPNVRTVGNDVIKNL

SEQ ID NO: 5742 - protein, 235 aa, Zea mays
  Clone ID: TF_ZmC26160_2.pep
RPGRLHKSSSQGHADNPVSAGSISGAADSFSGLSLGKEDDSSPMKNSTVQSTAALIECKCGIRLCICEAPKPEPSPTPVKNINTVPPTTQSNPRPKKPANTQQKASATSSSNSSPFLNIGLMNNDSNDKGIVDYEVSGEGLREAIKGGDVKGVKKLLTQGVDSNYCDKQGFTLLHLAALFNQTEIALILMDHGANVESKNGQGETPLDCAPAMLQYKMRQRVEELAASASKGPLG

SEQ ID NO: 5743 - protein, 551 aa, Zea mays
  Clone ID: TF_ZmC1327136_1.pep
MDRLVIPEPSNEVVVRVEPGRQARGELTLRNAMHTMPVAFRLQPAVRGRFAVRPHTGILAPLAAVTVDVLYLASAPPEGPSGSGSRGEDAFLLHSVVAPGAAVKEPVTALDSVNPEWFSARSKQVFVDSGIRASFVGASVAARLVEAGAVEALREVLDRSEPEWRAADATDESGRTLLDLAVGLARADIVQVLLEYGADADKPSRGRTPLETAAAAGECLIAELLLANGATPAGSDAIHVAAAAGHNDVLKLLLARPASASPASSSSFSSSLTSIDAAGRDGKTPLRLAAEAGRRDAVKALLAAGARADARCGADGATALHAAARRGDEAVARLLLSHGVSGTASVRDVAGKTAFEIAAEEGHGGRILDFLGLGEAILAAARKGEVRSVRRAADGGASVEGRDAHGWTPLIRAAFKGRADTVRDLIDRGADIDAADADGYTALHCAAEAGRADVVDLLLKNGANVKAMTVKGRTAADAATASGKSKVVRLLDKATIMGRKQDVSEKVAPAVAKGGSMDRKRRARKGSSGAIRFGGGKEGFEAAAVTVGWSH

SEQ ID NO: 5744 - protein, 472 aa, Zea mays
  Clone ID: TF_ZmC12604_1.pep
MGHGVSCARTGDEHDYFRAAQVGDLEALDALLDADPSLARRATLYDRLSALHIAAANGRLEVLSMVLDHGVPPDVVNRHKQTPLMLAAMHGKTDCVLKLLQAGANILMFDSQHGRTCLHHASYFGHVGCLQAILTAARTTPVANSWGFARFVNVRDDHGATPLHLAARQGRPGCVQALLENGAIVSALTGSYGFPGSTSLHLAARSGSLDCTRKLLAWGADRLRRDSAGRIPYAVALKRNHEACAALLNPSAAEPMVWPSPFKFISELEPEAKALLEAALTEANREREEKILRGTKHSPHPPTWDHASDAADADAIDDASSDASASDAELCCICFDQACTMEVQDCGHQMCAPCTLALCCHSKPDPVTLALPSPACPFCRGSISRLLLVARASSDDADTEKSAAAAAAAAASSPQLVRRRSRRSHNLSDGGSSSFKGLSSAVAGSFSKIGRGSSRTMADSDGCGVDKPEHDP

SEQ ID NO: 5745 - protein, 79 aa, Zea mays
  Clone ID: TF_LIB3067-045-B5-F3A.pep
ELPSPEPTRFGFATAVKAAVDGVMTTTPKDVQGDRAVKKRGRKNQYRGIRQRPLGKWAAEIKDPNKGVRVWVGTYNTGE

SEQ ID NO: 5746 - protein, 306 aa, Zea mays
  Clone ID: TF_ZmC660_4.pep
STAGCITSIVYLGAYDSEEAAARAYDLAALKYWGPETLLNFPVEDYSSEMPEMEAVSREEYLASLRRRSSGFSRGVSKYRGVARHHHNGRWEARIGRVFGNKYLYLGTFDTQEEAAKAYDLAAIEYRGVNAVTNFDISCYLDHPLFLAQLQQEPQVVPALNQEPQPDQSETGTTEQEPESSEAKTPDGSAEPDENAVPDDTAEPLTTVDDSIEEGLWSPCMDYELDTMSRPNFGSSINLSEWFADADFDCNIGCLFDGCSAADEGSKDGVGLADFSLFEAGDVQLKDVLSDMEEGIQPPAMISVCN

SEQ ID NO: 5747 - protein, 112 aa, Zea mays
  unsure (1)..(112): unsure at all Xaa locations
  Clone ID: TF_jC-zmX700221106a1.pep
RQSLVRKSPNFRDGLSTXTTAGSDAHAAWVAKGKRXNEYRGILQRAWGKWALMIRDSHQGARVRLGTFNRPNVDERSYDAEMRXIGRKNVKVHYTDAPSSGQTRPSRSTAPQ

SEQ ID NO: 5748 - protein, 144 aa, Zea mays
  unsure (1)..(144): unsure at all Xaa locations
  Clone ID: TF_LIB3732-034-Q1-N6-A3.pep
YDVAARALRGADAVLNFPGAIASRAAPASASPEDIRAAAAAAQLEYSHQGRTANPPPPPASPPSPAAAAAQDWHQQHDAASYTPQQEAGTDEFMDEEAIFXMPQLLRNMAAGMMMSPPRLSPDTSDESPDPSEAGESLWSYRDP

SEQ ID NO: 5749 - protein, 121 aa, Zea mays
  Clone ID: TF_ZmC1903_6.pep
MDSASSLVDDTSGSGGGACTDKLRALAAAAASASGPPPERMGSGASAVVDAAEPGAEADSGSAPASVAAVAAGVGGKLPSSRYKGVVPQPNGRWGAQIYERHLRVWLGTFAGEADAARAYD

SEQ ID NO: 5750 - protein, 177 aa, Zea mays
  unsure (1)..(177): unsure at all Xaa locations
  Clone ID: TF_LIB4767-002-R1-N1-D7.pep
MSIELLASAFNLCAVLCPANCLRSLSRSLSRFSRLPSSLCLLQEPMAATTIDWHARNNAALPAAMYGVAVPDSKELVRALAPPTQQAPTISFAYPRSGVEQQSAAGSFLGAGGSGLTPAQILQVQSRLQFLRRPAGAAVATQPMKRQGVPLPXAPAVSKLYXGVRQRHWGKGVXEIR

SEQ ID NO: 5751 - protein, 116 aa, Zea mays
  Clone ID: TF_LIB3136-018-G10.R6A.pep
MYKSWLAQTQYSSDGKPSNEANGCNFQSLSLTMSPSVQNGVGAISSVQVNEDSRKRVMAKSHAREPVPRKSIDTFGQRASQYRGVTRHRWTGRYENNLWDNSCRKEGQTRKEGKFP

SEQ ID NO: 5752 - protein, 77 aa, Zea mays
  unsure (1)..(77): unsure at all Xaa locations
  Clone ID: TF_LIB4730-052-R1-K1-B8.pep
MRRAEPVGKQADPERGITGYKGVRGPRGGKGVSKIRVPGSGERLGLGSYPTPEAAAVAHKTAVYFFRXXGGGPGNFR

SEQ ID NO: 5753 - protein, 96 aa, Zea mays
  Clone ID: TF_ZmC421638_1.pep
MCGGAIISEFIPQRGAKRGLCAEDIWPHAAADFDDLLHAHAHAHGHDDDDFAAAASFHPDQEPPARKRERKTMYRGIRRRPWGKWAVEIRDPAKGS

SEQ ID NO: 5754 - protein, 168 aa, Zea mays
  Clone ID: TF_ZmC2171_1.pep
LTKVIKILQEMNKRRSSREKKKEEEIDVETKGPRNGYAWTKNRRCHLPRPYCMRACIFHSSAQLLLDLIPSHCKLHACISISSIGRPAGRSRVLFIPVVLPTVRPCTARFTAAARGCRWWSGMPRVTTKPRSVRPCTRSGKLSLALVPLNRSAASWSWTTAWTAPPTC

SEQ ID NO: 5755 - protein, 52 aa, Zea mays
  Clone ID: TF_LIB3062-027-Q1-K1-B1.pep
RHAGSGLTSGTRRSARASGSAPSTRRPYLGPLLQREHSDRAPAYHQDQLSRA

SEQ ID NO: 5756 - protein, 222 aa, Zea mays
  Clone ID: TF_ZmC4345_1.pep
MVSLRRRRLLGLCSGKDSLPVDLPKPIENEKTVEVAHSNVKPFSVHPLPLAKTSDVLIKSSNGSDDSKEEKTQYYPGKEIKCRKRHRRKQYVDQEPCIMRGVYFKNMKWQAAIKVDKKQIHLGTVGTQDEAARLYDRAAFMCGREPNFVLSEEEKQELRRYTWEDFLAVTRNTITSKKQRKVGSLRRSKADLFMGQSDGDTEMANGGGSSNSDNGDAGTSAS

SEQ ID NO: 5757 - protein, 91 aa, Zea mays
  Clone ID: TF_LIB3076-043-Q1-K1-H9.pep
MMNTRACGSGSGGRNDQTMMGFSEHPKPAASGQAQPSPPSSPSERPPAGRGRRRAQEPGRFLGVRRRPWGRYAAEIRDPTTKERHWLGTFD

SEQ ID NO: 5758 - protein, 112 aa, Zea mays
  unsure (1)..(112): unsure at all Xaa locations
  Clone ID: TF_LIB3245-182-P1-N1-H5.pep
NKDLYWGAFSTREEAXDAYHIAAIKFRGLNAVTNFYMSRFPVESILLNDLPVWGGDTLRAGKFPLDLVQTASAGEMILDRAAAALQATMPPCEKDYWGLVTLHYQQQQEHGP

SEQ ID NO: 5759 - protein, 61 aa, Zea mays
  unsure (1)..(61): unsure at all Xaa locations
  Clone ID: TF_cC-zmle189002g10d1.pep
WPAKCDSVPLYRGVQKHVWGRFAENIRYLTKRALVXLGTFDSNDVAELAYDVDQRDLFGPF

SEQ ID NO: 5760 - protein, 107 aa, Zea mays
  Clone ID: TF_LIB3355-042-Q1-K1-C6.pep
ALGGYDREEKAARAYDLAALEYWGPSTHINFPEQQRLLEGSIHVQRSDKVPCCKSARPFLHPTCCLFQHPKTSSHLTSESGHSSVPLSVGSSEFSELTRTHTHAACV

SEQ ID NO: 5761 - protein, 75 aa, Zea mays
  unsure (1)..(75): unsure at all Xaa locations
  Clone ID: TF_LIB4705-003-R1-K1-A4.pep
EIQPPACARVCAAGQRPSNCLPNRPAQRTXEQCAAFYARPPVNCAAFHCTPLVPAMPRRPLFSLAQVVVGGPVAQ

SEQ ID NO: 5762 - protein, 58 aa, Zea mays
  Clone ID: TF_LIB3150-014-Q1-N1-B11-F2B.pep
MAAAAEAAAAQHQRRRRKRFVGVQKQPSGRWVAEIKDTIHKIRAWISTFDTVEEAGRA

SEQ ID NO: 5763 - protein, 82 aa, Zea mays
  Clone ID: TF_ZmC5367_25.pep
MWAWGCVRDRGSTPDVPSPEISPRRSCSRISAALIVFALGLVLCFVRDPSILQGLRFGPAPLRLVGITWDDFKIGFCVSRWT

SEQ ID NO: 5764 - protein, 124 aa, Zea mays
  unsure (1)..(124): unsure at all Xaa locations
  Clone ID: TF_LIB3608-011-Q1-N6-A11.pep
VQRRGRQRQGARRRRRRRRRRLVHHGAPAPARLWSLRQRLLGGGGGFLFGGGTXPTELERGGXXRPLRLLRCVEGAQANSRLSYRVADLRRVPGHRGVSHCVQSWLXRXWCWLKWFIGGYGGIE

SEQ ID NO: 5765 - protein, 84 aa, Zea mays
  Clone ID: TF_LIB3245-310-P1-N1-B6.pep
IALISVTCYQISDYEKEIEVMKTMSQDEFVAYIRRQSSCFSRGTSSYRGVTRRKDGKWQARIGRIGESRDTKDIYLGTFETEEE

SEQ ID NO: 5766 - protein, 94 aa, Zea mays
  unsure (1)..(94): unsure at all Xaa locations
  Clone ID: TF_LIB3633-001-P1-K6-G1.pep
MAGQMGLNQLGPAQIQQIQAQFMFQQQQQQQRGLHAAFLGPRAQPMKQSGSPSPPPPLAPAQSKLYRGVRQRHWGKWVAEIRLPKNXTRXGLVT

SEQ ID NO: 5767 - protein, 201 aa, Zea mays
  unsure (1)..(201): unsure at all Xaa locations
  Clone ID: TF_LIB4730-104-Q1-K1-E6.pep
MWPMEEEEVFVTVRRTEHVDVTSRAVVVAAGRAAVAGPRTVRVFCDDYDATDSSGDEAEEEEKKAARRRVKRYVQEIRLERAAKEEXXEEEATAAASLGAVLPGRKRKRKPDGEASEPRFRGVRQRPWGKXYAAEIRDPWRRXWRVWXLGTFDXTAEEAAKVYDSAAXRLRGRDATTNFQAAGGPRALSQGRAGSKSAATS

SEQ ID NO: 5768 - protein, 179 aa, Zea mays
  Clone ID: TF_LIB3912-059-Q6-K6-H4.pep
MIKTWLRNNQVAQPQPPAPHQPQPEEMSTDASGSSFGCSDSMGRNSMVAAGGSSQSLALSMSTGSHLPMVVPSGAASGAASESTSSENKRASGAMDSPGSAVEAVPRKSIDTFGQRTSIYRGVTRHRWTGRYEAHLWDNSCRREGQSRKGRQGNETYIHNNHCLYRHRKNIYGLYNLSY

SEQ ID NO: 5769 - protein, 126 aa, Zea mays
  Clone ID: TF_ZmC167604_1.pep
MAEKQPPAPHSPSPAVQVQPAGPAAGGHSHHQAASASASGPASPHSPSPVVQQGDGTSSARAAAITAPPMGTTTATSSGEPSPRSSGKHAFYPGIRCRSGKWVSEIPQPRKARRIWLGTYPMAKMA

SEQ ID NO: 5770 - protein, 67 aa, Zea mays
  Clone ID: TF_ZmC485_4.pep
LAHRWERHAWLGCRYIYLGLFDSEVEAARLAYDKAAIKCNGREAVTNFEPSTYDGELLLTEASAEGN

SEQ ID NO: 5771 - protein, 97 aa, Zea mays
  Clone ID: TF_ZM4997.C1.o1.fg.pep
MWRLENASEVPPIEFPQELLQKEVDRPPTQQFFPPTTTAAQQATSTAYRGVTFYRRTGRWESHIWDCGKQVGFISFETCKDFSGEIGNVLVFFRSSV

SEQ ID NO: 5772 - protein, 190 aa, Zea mays
  Clone ID: TF_ZmC141723_1.pep
RKTRKWIGSYDSEEAAAGAYQAYAKQIREELLAIKNQRSVSERAALSSSSSVSCVSSSPPCEQTGHEPQTRVLVEKDPEPVDEVFLNFSLTPKGISMDDLLGRIDEIPVCDDPVSPTDELPLDNFTSLEDAFPISDFIGSRDEHLYEHYIGLADISHLPLPMDDPAFNLDAELDWSGFDFAAIEGELDVL

SEQ ID NO: 5773 - protein, 193 aa, Zea mays
  unsure (1)..(193): unsure at all Xaa locations
  Clone ID: TF_LIB4073-004-Q1-K1-D9.pep
MAAAIDMYKYYNAHQIASSSPSDEELAKALEPFITSASSSSPYHRYSSSPSMSQDSYMPTPSYTSFATSPLPTPAATTSSSTPFSQLPPLYSSPYAAPSMVGQMGLNQLGPAQIQQIQAQFMFQQQQQQQQRGLHAAFLGPRAQPMKQSGSPPLAPAQSKLYRGVRQRHWGKWVAEIRXPKNRTRLWLGTFDT

SEQ ID NO: 5774 - protein, 150 aa, Zea mays
  Clone ID: TF_9952793.pep
MDPTPRAVLISISSGGAKGGGGGSHAHYRGVRKRPWGRYAAEIRDPWKKTRVWLGTFDTPLEAALAYDRAARTLRGAKARTNFPDDHAGQQLQQHLRRRQHPPPQHVSFGGVGVGVDVDCAPPWHFVCFQTPTTAPATETPSTALELGTG

SEQ ID NO: 5775 - protein, 425 aa, Zea mays
  Clone ID: TF_ZmC6700_2.pep
PRLPHSFPPSLAHPVGQPKPSRNRKDLARPPFPSSSLCRSCHPPSVHPTNNPSATTPRCGDVRRRHPLGFHPAVRGAGGGSGGQEETAAARLAFAAAVGAPRTAVDGVMTPKDGEGDMPTTANNSAANKRRRKNQYRGIRRRPWGKWAAEIRDPSKGVRVWLGTYSTAEEAARAYDAEARRIRGKKAKVNFRDEAAAAGAQKPPAATTPTACASAARLAPPPPPPKFRADEVFGNMDGGSNDLFAMLAFSDSSSKVVRVEPGEGAAGFLPADLLPGSKRSAANMLLLSDQSSDSYGSCDLGWEWDWDDDTMTSDYASVFAPAAPSNVVPAWYTQGGPVSKRTRSSYGYGAAMPGGFDPETNYQYQPLPYVVESSPSDGASTDDMDCLQMMRAGDVPQDGASSGGGGGDGGDIWSLDELLMAAGAY

SEQ ID NO: 5776 - protein, 174 aa, Zea mays
  Clone ID: TF_ZmC11704_1.pep
MARPQQRYRGVRQRHWGSWVSEIRHPLLKTRIWLGTFETAEDAARAYDEAARIMCGSRVRTNFPEDAGGGGGGDGQQQQQAAPSLLSPALVAKLHRSNLASAQAAQGKADASAAAAAALPRVAAAVPAGMGVSASPSASASAAGDWSGGLLEEQYVDQMIEELLDSNFSMEISY

SEQ ID NO: 5777 - protein, 146 aa, Zea mays
  Clone ID: TF_ZmC8439_2.pep
MAPRTSEKTMAPAAAAATGLARGAGPHYRGVRKRPWGRYAAEIRDPAKKSRVWLGTFDTPEDAARAYDAAAREYRGAKAKTNFSFPSCLPLAAADVGGACRSGNSSSTTTTVDSFGGDVQATLIFRVKLRTCGLNGSKLTLYGLYS

SEQ ID NO: 5778 - protein, 188 aa, Zea mays
  Clone ID: TF_LIB4742-037-R1-K1-F10.pep
PSNQEAGRLRHHRCSSSKSSAAAACKSYRGVRRRPWGKFAAEIRDTRRRGARVWLGTFATADDAALAYDKAALRMRGPRACLNFPLDVVQRALADGGGRAETTPRVLRRKRRRANHDDAAGGDDTRSDGSVAAATARDPTTTMVSFACAKKDDQVMTPLMAQERSVSDPGAVIEFEDIGGDPAGSRSQ

SEQ ID NO: 5779 - protein, 130 aa, Zea mays
  Clone ID: TF_LIB3354-089-Q6-K6-E1.pep
FACRKARIWLGTFETAEDAARAYDEAARIMCGPRARTNFPADANGPPPSFLSAALVDKLHRFNLASVQAAQRQREAAAAAAAAAATSAPATPPTPPATQWGGGGRSLEEQHVEQMIEELLDSDFSMEICC

SEQ ID NO: 5780 - protein, 443 aa, Zea mays
  unsure (1)..(443): unsure at all Xaa locations
  Clone ID: TF_ZmC485_1.pep
FILRDSPGQQVARSAPPQVASADRCAGSICVGFAVPRPTMPDRRPAAVTQQFFPPTTTAAQQATMEEQCHVPAGSAAEQWVRSSASRKSRRGPRSRSSQYRGVTFYRRTGRWESHIWDCGKQVYLGGFDTARAAARAYGRSALXSRGLTAYANFSLDYDYDGMEKVKDLTMVEFVMPADECSSGSPQGSSRCRGVTGNAGGSSRASSCRPAGDRCVIIGIFHTGHDAAHAYHIAAIPSVGPAAATDVVDPSHDQHVRIKKRALXQELGLGLGSFPPGPLPLSGRCYFFGFAPRGGMLVTCSRSIGFLEEELTRVAYHQPAAGMFGRPADKNVHVAPPPHRQWQQQQQGNRSCLDTLPQQLAATLSXHLRVGQXARRPIPNDSGINWACAPPYATAGAGTDDEDASSAAAAASLGFPLWALRAAPSSPSWPSRCAFPVVPRHQQ

SEQ ID NO: 5781 - protein, 245 aa, Zea mays
  unsure (1)..(245): unsure at all Xaa locations
  Clone ID: TF_ZmC278_2.pep
MEELGDAGQGPQGDASGALVRKKRMRRKSTGPDSIAETIRWWKEQNQRLQDESGSRKAPAKGSKKGCMMGKGGPENVNCVYRGVRQRTWGKWVAEIREPNRGRRLWLGSFPTAVEAAHAYDEAAKAMHGPLPRVNFSAGSADAGCRVATVLLESGXTEVESVETEEVVHXVKTEAKNGALGSVKVTWVIQSAEETVLPKEGDVSYDYFNVENPVEMIIVELNADKKFEAPEESLDGDDGFSLFAY

SEQ ID NO: 5782 - protein, 207 aa, Zea mays
  Clone ID: TF_ZmC218929_1.pep
MNTYMSLSLERSSSVVRDVATPAPPATSGASAPYPRAGAGASLSLPGAAAAHGHSQYLPLNEDDSLDMVLFDVLREASGPGSASAAAPDTYQPPSSLPTLKALASGAARRGSRTAYAPKAATAGHHYRGVRRRPWGKYAAEIRDPARHGARLWLGTFATAEEAAAAYDRAAVRMRGAKALLNFPPGVAGCGSAATATAKQAGLTEAK

SEQ ID NO: 5783 - protein, 157 aa, Zea mays
  Clone ID: TF_LIB4979-098-A1-K1-H5.pep
DLIFFVSASAVADDVDLNLSISQPASSQSPKRDKNCLGPQLHHHHGRPFDGSAVLKKTKIDAPSELSSAGRPHRSFLPHLVAAEHLPPRSHPFFITHHESDASRRDPSWAAAAAWKVTAAAPPPPTTTLLPLPLPSTSSAAASSGFSNTATTAAAAP

SEQ ID NO: 5784 - protein, 135 aa, Zea mays
  Clone ID: TF_ZmC109013_1.pep
THNNKRKIRRWTAEVAGSRHGPEAAVIHRHDLVQAVPDVLVLGRRRPCSLQRGRRPRHRHVQRRRGVGPTVLAEALTGQRAARLHIPRRSGGGGVREVELGAAAPVTDRGGVVGAGGVLGGVERAEPLRAARRGS

SEQ ID NO: 5785 - protein, 62 aa, Zea mays
  Clone ID: TF_LIB3137-013-Q1-K1-H10.pep
GGGRRRGWLESKPAFVVRASSAATHPRARHEQRSRRRAPDQQYMGVRRRPWGKWAGEIRDPV

SEQ ID NO: 5786 - protein, 190 aa, Zea mays
  unsure (1)..(190): unsure at all Xaa locations
  Clone ID: TF_LIB4730-087-Q1-K1-C5.pep
PWERSQPQHQQSPPSPSSSSSCVSADTVLVPPGKRRRRAATAKANKRARKDPSDPPPAAGKRSSVYRGVTRHRWTGRFEAHLWDKHCLAALHNKKKGRQVYLGKXAYDGEEAAARAYDLAALKYWGPEALLNFPVEDYSSEMPEMEAAFREEYLASLRRRSSGFSRGVSKYRGVARWLLINLLIILKPLI

SEQ ID NO: 5787 - protein, 181 aa, Zea mays
  unsure (1)..(181): unsure at all Xaa locations
  Clone ID: TF_LIB4727-004-R1-K1-H3.pep
QRPSGRYAAEIRDPAKKSRVWLGTYDTAEDAARAYDAAAREYRGAKAKTNFPYPSCVPLSAAGCRSSNSSTVESFSSDAQAPMQAMPLPPSLELDLFXVRFPFGSIPVTHPYYFFGQAAAAAAEAGCRVLKLAPAVTVAQSDSDCSSVVDLSPSPPAAVSARKPAAFDLDLNCSPPTEAEA

SEQ ID NO: 5788 - protein, 346 aa, Zea mays
  Clone ID: TF_ZmC455_1.pep
EPSGHLWSGHDAGSEPCHADAAPGPAARKSIWSRGQCCGAWFHQNSRKKRPRRSRDGPTSVAAVIQRWAERNKHLEYEESEEAKRPRKAPAKGSKKGCMKGKGGPDNTQCGYRGVRQRTWGKWVAEIREPNRVDRLWLGTFPTAEDAARAYDEAARAMYGDLARTNFPGQDATTSAQAALASTSAQAAPTAVEALQTGTSCESTTTSNHSDIASTSHKLEASDISSYLKEKCPAGSCGIQDGTPIVADKEVFGPLEPITNLPDGGDGFDIGEMLRMMESDPHNAGGADAGMGQPWYLDELDSSVLESMLQPEPEPEPEPFLMSEEPDMFLAGFESAGFVEGLERLN

SEQ ID NO: 5789 - protein, 330 aa, Zea mays
  Clone ID: TF_ZmC455_3.pep
AGGPTLALNECQILVQQKPQGDSRLLASNLCRKKRPRRSRDGPTSVAAVIQRWAERNKHLEYEESEEAKRPRKAPAKGSKKGCMKGKGGPDNTQCGYRGVRQRTWGKWVAEIREPNRVDRLWLGTFPTAEDAARAYDEAARAMYGDLARTNFPGQDATTSAQAALSSTSAQAAPTAVEALQTGTSCESTTTSNHSDIASTSHKLEADISSYLKEKCPAGSCGIQDGTPIVADKEVFGPLEPITNLPDGGDGFDIGEMLRMMESDPHNAGGADAGMGQPWYLDELDSSVLESMLQPEPEPEPEPFLMSEEPDMFLAGFESAGFVEGLERLN

SEQ ID NO: 5790 - protein, 154 aa, Zea mays
  Clone ID: TF_ZmC7732_2.pep
MARPQQRYRGVRQRHWGSWVSEIRHPLLKARIWLGTFETAEDAARAYDEAARIMCGPRARTNFPADANGPPPSFLSAALVDKLHRFNLASVQAAQRQREAAAAAAAAAATSAPATPPTPPATQWGGGGRSLEEQHVEQMIEELLDSDFSMEICC

SEQ ID NO: 5791 - protein, 363 aa, Zea mays
  Clone ID: TF_ZmC118_2.pep
MCGGAILANLREPAPRRLTERDIWQQKKKLKRGGGGGRRSFAAEDDEDFEADFEVFEADSSDSDLELREGTDDDVVEIKPFTAKRTFSSDGLSTMTSAVARSAKRKRKNLYRGIRQRPWGKWAAEIRDPQKGVRVWLGTFNSPEEAARAYDAEARRIRGKKAKVNFPDAPAVGQKRRSGSASAKASKSSFGQKPIVKVAMNNLANTNASFFQSASYPSNSFVQHGNIPFVPAMNSTASVDDPIMNLHSDQGSNSFGCSDLGWENDTKTPDITSIAPISTIAEGDESAFVDSNSNNSFVLPALENSAVDLTDGLTDLESYMRFVLDGGPSDSVDSLLNLDGSQDVGSDMDLWSFDDMPIVGDFF

SEQ ID NO: 5792 - protein, 257 aa, Zea mays
  Clone ID: TF_ZmC118_4.pep
MCGGAILAELREPAPRRLTERDIWQQKKKPKSTFSSPRVRTMTSAVARSAKRKRKNLYRGIRQRPWGKWAAEIRDPQKGVRVWLGTFNSPEEAARAYDAEARRIRGKKAKVNFPDAPAVGQKHRSGSASAKASKSSFGQKPIVKGSNSFGCSDLGWENDTKTPDITSIAPISTIAEGDESAFVDSNSNSSFVLPALENSAVDLTDGLTDLESYMRFLLDGGPSDSVDSLLNLDGSQDVGSDMDLWSFDDMPIVGDFF

SEQ ID NO: 5793 - protein, 263 aa, Zea mays
  Clone ID: TF_ZmC11610_1.pep
MTKKLISISTMAGKQGCKEQSNDRRIQASIQGDAKSVVVGFGGRLVTREQEQEDAIIVAALRHVVSGYSTPPPEVVVTVAGGEACGTCGIDGCLGCDFFGAPELAQEAVSCGTGQVATTASVGGGAAAAALRPRRRRNRNMYRGVRQRPWGKWAAEIRDPRRAARVWLGTFDTAEEAARAYDCAAVEFRGPRAKLNFPGHEALFQGHGDTAAAADTETLTPSPGEWQLGGGAGDELWEGLQDLMKQDEVDRWLAPVFGAASSF

SEQ ID NO: 5794 - protein, 155 aa, Zea mays
  Clone ID: TF_LIB4865-004-R1-K1-D8.pep
RRAADCSHAAPRAKAKPGRRKNQYRGIRQRPWGKWAAEIRDPVKGVRVWLGTYPTAEAAARAYDRAARRIRGAKAKVNFPSDTSSSVTVPTAVSRSAAAAAQAPAVLPPPKVEAQTQVSDEVKELSEELMAYENYMNFLGIPYMEGGTTAASATT

SEQ ID NO: 5795 - protein, 224 aa, Zea mays
  unsure (1)..(224): unsure at all Xaa locations
  Clone ID: TF_ZmC28357_1.pep
MCGGAIILDYIPARRRVSAADFWPDSEADAEDSDSHAPDPERAPRPRGKAKRGRKNQYRGIRQRPWGKWAAEIRDPVKGVRVWLGTYPTAEAAARAYDRAARRIRGAKAKVNFPNDASSSSVTAPTAASGVAAQAPAVFLPAPKVEARAQVSDEVKXELSEDLMAYKNYVNLHGVPXMAAGNAACECHHRCPSRREAQVPAPAPAGLWSFEDYYYPPSLSLFTE

SEQ ID NO: 5796 - protein, 215 aa, Zea mays
  Clone ID: TF_ZmC28357_2.pep
MCGGAIIFDYIPARRRVSTADFWPGSEADAEDIHASHSTDPQRAPPPRAKAKPGRRKNQYRGIRQRPWGKWAAEIRDPVKGVRVWLGTYPTAEAAARAYDRAARRIRGAKAKVNFPSDTSSSVTVPTAVSRSAAAAAAQAPAVLPLPKVEAQTQVSDEVKELSEELMAYENYMNFLGIPYMEGGTTAAKSQVPAPAGLWSFEDYYYPPSLSLFTE

SEQ ID NO: 5797 - protein, 470 aa, Zea mays
  Clone ID: TF_ZmC485_3.pep
MQLDLNVAEAPPPVEMEASDSGSSVLNASEAASAGGAPAPAEEGSSSTPAVLEFSILIRSDSDAAGADEDEDATPSPPPRHRHQHQQQLVTRELFPAGAGPPAPTPRHWAELGFFRADLQQQQAPGPRIVPHPHAAPPPAKKSRRGPRSRSSQYRGVTFYRRTGRWESHIWDCGKQVYLGGFDTAHAAARAYDRAAIKFRGVDADINFNLSDYEDDMKQMGSLSKEEFVHVLRRQSTGFSRGSSRYRGVTLHKCGRWEARMGQFLGKKYIYLGLFDSEVEAARAYDKAAIKCNGREAVTNFEPSTYHGELPTEVADVDLNLSISQPSPQRDKNSCLGLQLHHGPFEGSELKKTKIDDAPSELPGRPRQLSPLVAEHPPAWPAQPPHPFFVFTNHEMSASGDLHRRPAGAVPSWAWQVAAAAPPPAALPSSAAASSGFSNTATTAATTAPSASSLRYCPPPPPPSSHHHPR

SEQ ID NO: 5798 - protein, 260 aa, Zea mays
  Clone ID: TF_700281859_FLI.pep
CHCRYVYLGLFDTEEEAARAYDRAAIKCNGKDAVTNFDPSIYAEELEPAASTGGGGDDHNHNLDLSLGSSAGNKRGSLDDGGGGGGGGDDETSDQRVPMAFDVDWQTAAPRSTKAKLDASSKQPQTQMLPPPPPAVLRVAHQLPLPFGPRHPQSQFLSNGGDPGTSGGLSLAIGGAGGGHWPPQLQHLQQQRLHGAWANGGGTSWPPPPHPHPHPHPPPPSTAATAAAASSRFPPYVVTTTQGPAGWAQKNGFHSLARPT

SEQ ID NO: 5799 - protein, 249 aa, Zea mays
  Clone ID: TF_ZmC485_12.pep
NSARGRRRDCGKQVYLGGFDTAHAAARHALDWTPRILRHSLAPGTRRAYDRAAIKFRGVDADINFNLSDYEDDMKQMGSLSKEEFVHVLRRQSTGFSRGSSRYRGVTLHKCGRWEARMGQFLGKKAYDKAAIKCNGREAVTNFEPSTYHGELPTEVADVDLNLSISQPSPQRDKNSCLGLQLHHGPFEGSELKKTKIDDAPSELPGRPRQLSPLVAEHPPAWPAQPPHPFFVFTNHEMSASGDLHRRPA

SEQ ID NO: 5800 - protein, 93 aa, Zea mays
  Clone ID: TF_LIB3357-055-P1-K1-F1.pep
LVLCTVYSSHLYLSAHARREQAAHDVHGAEAMEGHYSPTDSADEAGGERRFRGVRQRPWGKWAVEIRDPHKAARVWLGTFDTAEAAARAYDEA

SEQ ID NO: 5801 - protein, 172 aa, Zea mays
  unsure (1)..(172): unsure at all Xaa locations
  Clone ID: TF_LIB3591-110-Q1-K6-H5.pep
GAAAMGGHYSPTGSAAEAGGERGVRGVRERPWGKWAGEIRDPHKGGVVGVXTFNTAEAAGRAYYEAALRFRGSRAKLNFPEDARLTTGPSAAGAPAGGGSTRTMAVAGSGGGSYQQEASAXVXFADYLQYQMMLLQGGTSGQGSSSHGGDPXYYYYGGHRGAGAGAGGGAMS

SEQ ID NO: 5802 - protein, 277 aa, Zea mays
  unsure (1)..(277): unsure at all Xaa locations
  Clone ID: TF_ZmC4595_1.pep
MLLNPASETSVLDTIRQHLLEEPAAAEARPADESFGSLVADQWSGSLPFRTDDADDMVVFGGLQDAFAYGWLPDGSFGHVKPEPVRSPDSSSWHPCSYDGSTCFGLRDPEQPLTPGTTTPGRGPEGAPAAKARGKHYRGGRQRPWGKFAAXIRDPARNGARVWLGTYDTAEDAALAYDRAAYRMRGSRALLNFPLRIGSGDKRPSPAPPEPATSSDSSSSSASGSHKRRKRGEAAAANMAMALVPPPSQLNRPAQPWFPAAPVEQAAMAPRVEQIVV

SEQ ID NO: 5803 - protein, 241 aa, Zea mays
  Clone ID: TF_ZmC8128_1.pep
APPAEAAAGSGPAGGEGRKGKAPKGGPENGKFRYRGVRQRSWGKWVAEIREPRKRSRKWLGTFATAEDAARAYDRAALLLYGPRAHLNLTSPPPPTLAAPRSHPHSSSATSSAPPALRPLLPRPPLHQLSSDGAPAPDFHYHNQFQRRLLPQPTPTLYYANTATASTVTTSVPTRVAVPQEPAIAPAVGSLTSPGEPQVGRKEEARGEAGWDYNGGEEEDYAAALLWDEPEPFFWFDVFLK

SEQ ID NO: 5804 - protein, 200 aa, Zea mays
  Clone ID: TF_ZmC25962_1.pep
MEAEQAAMAAPQLGAAHQQTQPRRQYRGVRMRKWGKWVAEIREPHKRTRIWLGSYATAVAAARAYDTAVFYLRGRSARLNFPEEIPSFGLADGVDVGEHARDPAAAAAGGGGGCTLSAASIRKKAIEVGSRVDALQTGMVVPPPHHRERHRHHNHLPQLRVHAEEQQEEEEQKPQRPAWSGRVKNPDLNRAPSPESSDAE

SEQ ID NO: 5805 - protein, 494 aa, Zea mays
  Clone ID: TF_ZmC485_2.pep
MELDLNVAEVAPEKPAAALEASDSGSSGSSVLNAEAASAGGGGPAPGEEGSSSTPAVLEFSILRSDSDAAGADADDGDATPSPPRHHHQQLVTRELFPAPQHWAELGFFRAGPQQQPDIRVLPHPHPHPPPPPPAQPQPAKKSRRGPRSRSSQYRGVTFYRRTGRWESHIWDCGKQVYLGGFDTAHAAARAYDRAAIKFRGVDADINFNLSDYDDDMKQMKSLSKEEFVHALRRQSTGFSRGSSKYRGVTLHKCGRWEARMGQFLGKKYIYLGLFDSEVEAARAYDKAAIKCNGREAVTNFEPSTYDGELLLTAEASAEVADDVDLNLSISQPASSQSPKRDKNCLGPQLHHHHGRPFDGSAVLKKTKIDAPSELSSAGRPHRSFLPHLVAAEHLPPRSHPFFITHHESDASRRDPSWAAAAAWKVTAAAPPPPTTTLLPLPLPSTSSAAASSGFSNTATTAAAAPSAASSRRFDPPPPSSSSSSSHHHHHHRR

SEQ ID NO: 5806 - protein, 265 aa, Zea mays
  unsure (1)..(265): unsure at all Xaa locations
  Clone ID: TF_700262211_FLI.pep
STAGCITSIVYLGAYDSEEAAARAYDLAALKYWGPETLLNFPXHHHNGRWEARIGRVFGNKYLYLGTFDTQEEAAKAYDLAAIEYRGVNAVTNFDISCYLDHPLFLAQLQQEPQVVPALNQEPQPDQSETGTTEQEPESSEAKTPDGSAEPDENAVPDDTAEPLTTVDDSIEEGLWSPCMDYELDTMSRPNFGSSINLSEWFADADFDCNIGCLFDGCSAADEGSKDGVGLADFSLFEAGDVQLKDVLSDMEEGIQPPAMISVCN

SEQ ID NO: 5807 - protein, 132 aa, Zea mays
  Clone ID: TF_LIB3066-048-Q1-K1-F2-120a.pep
GGQAYLGAYDSEEAAAHTYDLAALKYWGPDTILNFPAETYTKELEEMHFVSVEESLASLRRQSSGFSRGVSKYRGVARHHHNGRWEARIGRVFGNKYLYLGTYNTQEEAAAAYVISAIEYRGANAVTNFDIR

SEQ ID NO: 5808 - protein, 132 aa, Zea mays
  Clone ID: TF_LIB4729-131-A1-K1-D11.pep
MCGGAIIADFVPAGARRPATDDTMSASILSGSEDHPELPLPLPAPAPGRKTAYRGIRRRPWGRWAAEIRDPRKGARVWLGTYATPEDAARAYDVAAREIRGPKAKLEAFLGLQDTDEGGGVEAWDAVDLMLA

SEQ ID NO: 5809 - protein, 209 aa, Zea mays
  Clone ID: TF_ZmC145170_1.pep
MMVKNPSSNGVLTATAFSDSKTRPERGVGGEAAGRPYRGVRMRSWGSWVSEIRAPNQKRRIWLGSYATPEAAARAYDAALLCLKGSNAVLNFPAASSSSSSSSSTSASSSHQRADSRGHPDDDPAAAGGDMSPRSIQRAAAAAAAAIDDDAGMGASAADDRCSSSAGATTPTSASLSTQGSTADHVGQEQHATTTAAASTGSPPEGKEE

SEQ ID NO: 5810 - protein, 340 aa, Zea mays
  Clone ID: TF_ZmC3465_2.pep
MAAAIDMYKYYNTSAHQIASSSSPSDQELAKALEPFITSASSSSSSSPYHGYSSSPSMSQDSYMPTPSYTSYATSPLPTPAAASSQLPPLYSSPYAAPCMTGQMGLNQLGPAQIQQIQAQFMFQQQQQQRGLHAAFLGPRAQPMKQSGSPPPLAPAPAQSKLYRGVRQRHWGKWVAEIRLPKNRTRLWLGTFDTAEDAALAYDKAAFRLRGDTARLNFPALRRGGAHLAGPLHASVDAKLTAICQSLSESKSKSGSSGDESAASPPDSPKCSASTTEGEGEEESGSAGSPPPPPPPTLAPPVPVPEMAKLDFTEAPWDETEAFHLRKYPSWEIDWDSILS

SEQ ID NO: 5811 - protein, 168 aa, Zea mays
  Clone ID: TF_ZmC966436_1.pep
MLSGYERSREAFMMVDALATVVAGGATAGARQHQVSPEGQWWSDYYAGDVTPPPPPPSLSAPAAHEHGAARIPATTASPSSSSQAPSPSSTGSGTPRRRYRGVRQRPWGKWAAEIRDPHKAARVWLGTFDTAEAAARAYDVAALRFRGSRANLNFPESATLAKPPPTA

SEQ ID NO: 5812 - protein, 28 aa, Zea mays
  Clone ID: TF_700610879H1.pep
AAEIKESRKCVRVWLGTFNSPEEPVRAY

SEQ ID NO: 5813 - protein, 159 aa, Zea mays
  unsure (1)..(159): unsure at all Xaa locations
  Clone ID: TF_jC-zmshLIB3587P021g01a1.pep
LPTLCDGAILLEFIPSVLVRRGVTPGHGRGVKVRLTAANDDDDFEAAFRDLCEDSEKQPVWXFYRRRSGSPVLAAEGPSARIKXVRCRPWGKWAAEVPVPVRGVRVWLGTFATAEDLARAXDHSARDLRGATTRLNFPSNSKRRSAVAKAAPRVNEPEH

SEQ ID NO: 5814 - protein, 111 aa, Zea mays
  Clone ID: TF_ZmC8692_2.pep
MPDSDVPSPASSPLGSVQKIARGRKSRRGGGRSPAYRGVRMRAWGKWVSEIREPRKKSRIWLGTFPTAEMAARAHDAAALVVKGRGAVLNFPEMAASLPRPASAAPRDVQA

SEQ ID NO: 5815 - protein, 353 aa, Zea mays
  Clone ID: TF_ZmC1979_1.pep
LLVLVQCRDCGKQVYLGGFDTAHAAARAYDRAAIKFRGVEADINFSLEDYQDDMKQQMGHLSKEEFVHVLRRQSTGFPRGSSKYRGVTLHKCGRWEARMGQFLGKKYVYLGLFDTEEEAARAYDRAAIKCNGKDAVTNFDPSIYAEELEPAASTGGGGDDHNHNLDLSLGSSAGNKRGSLDDGGGGGGGGDDETSDQRVPMAFDVDWQTAAPRSTKAKLDASSKQPQTQMLPPTRPVAHQLPLPFGPRHPQSQFLSNGDPGTSGGLSLAIGGAGGGHWPPQLQHLQQQRLHGAWANGGGTSWPPPPHPHPHPPPPSTAAAAASSRFPPYVVTTTQGPAGWAQKNGFHSLARPT

SEQ ID NO: 5816 - protein, 196 aa, Zea mays
  unsure (1)..(196): unsure at all Xaa locations
  Clone ID: TF_LIB5116-043-A1-PF1-B9.pep
MTVDRKDAEAAAAAAAPFEIPALQPGRTCGAEESTRSHVLVKPIXKKRPRRSRDGPNSVSETIRRWKEVNQQLEHDPQGAKRARKPPAKGSKKGCMQGKGGPENTQCGFRGVRQRTWGKWVAEIREPNRVSRLWLGTFPTAEDAARAYDEAARAMYGALARTNFPVHPAQAPAVAVAAAIEGVVRGASASCESTTT

SEQ ID NO: 5817 - protein, 209 aa, Zea mays
  Clone ID: TF_ZmC8271_1.pep
MTNLSAMAASQSYVIRFDGHFDEPSPSSAGAEPPGPQPPFAGRMISLEREHQVIVAALLHVVSGYATPPPQVFTPPPAAARCQVCGMERCLGCEFFAAGEGALGGGAEKAAATGGAAALAAGQRRRRKKKNKYRGVRQRPWGKWAAEIRDPRRAVRKWLGTFDTAEEAARAYDQAAIEFRGPRAKLNFPFPEQPPTGHDEPISSNGDAS

SEQ ID NO: 5818 - protein, 487 aa, Zea mays
  unsure (1)..(487): unsure at all Xaa locations
  Clone ID: TF_ZmC5960_1.pep
MDMDMSSAYPHHWLSFSLSNNYHHGLLEAFSNSSGTPLGDEQGAVEESPRTVEDFLGGVGCVGAPXRSRRLQIRITSLCAASXGSITARFLRHYPAAPAGTTVENPGAVTVAAMSSTDVAGAESDQARRPAETFGQRTSIYRGVTRHRWTGRYEAHLWDNSCRREGQSRKGRQVYLGGYDKEEKAARAYDLAALKYWGPTTTTNFQVSNYEKELEEMKSMTRQEFIASLRRKSSGFSRGASIYRGVTRHHQHGRWQARIGRVAGNKDLYLGTFSTQEEAAEAYDIAAIKFRGLNAVTNFDMSRYDVESILSSDLPVGGGASGRAPAKFPLDSLQPGSAAAMMLAGAAAASQATMPPSEKDYWSLLALHYQQQQEQERQFPASAYEAYGSGGVNVDFTMGTSSGNNNNNTGSGVMWGATTGAVVVGQQDSSSKQGNGYASNIPYAAAMVSGSAGYEGSTGDNGTWVTTTTSSNTGTAPHYYNYLFGME

SEQ ID NO: 5819 - protein, 488 aa, Zea mays
  Clone ID: TF_ZmC484_102.pep
MNKSLSCYYWRRLQRIRRPRRLPSAPPFRPLSLASSISPPTMGKEKSHINIVVIGHVDSGKSTTTGHLIYKLGGIDKRVIERFEKEAAEMNKRSFKYAWVLDKLKAERERGITIDIALWKFETTKYYCTVIDAPGHRDFIKNMITGTSQADCAVLIIDSTTGGFEAGISKDGQTREHALLAFTLGVKQMICCCNKMDATTPKYSKARYDEIVKEVSSYLKKVGYNPDKIAFVPISGFEGDNMIERSTNLDWYKGPTLLEALDQITEPKRPSDKPLRLPLQDVYKIGGIGTVPVGRVETGVIKPGMVVTFGPTGLTTEVKSVEMHHEALQEALPGDNVGFNVKNVAVKDLKRGFVASNSKDDPAKEAASFTSQVIIMNHPGQIGNGYAPVLDCHTSHIAVKFAELITKIDRRSGKELEKEPKFLKNGDAGMVKMIPTKPMVVETFSAYPPLGRFAVRDMRQTVAVGVIKSVEKKDPTGAKVTKAAAKKK

SEQ ID NO: 5820 - protein, 437 aa, Zea mays
  Clone ID: TF_ZmC2282_1.pep
MCGGAILSGFIPPSGVAAAAAAAKKKKQQQRCRVTADLLWPGPGSKGAPQDQEEDFEADFREFERGLGEDDVDSAGEGGDPEVQELPPPEPTRFAFATAAKAAVDGVMTTTPKDVKGDRAVKKRGRKNQYRGIRQRPWGKWAAEIRDPNKGVRVWLGTYNTAEEAARAYDAEARKIRGKKAKVNFPDDDAPGTRHRPTNAANAARLVAPPPPPKACADEIFNNLKNDDGDNNNNDDLFAMFAFGDNKKEAVPAAKPAAAEGGSGSGSGSFLVPAPAMAAAVPGNKRRSSATNIMVSVSDDQSSNSYGSGSSDLVGSWSWDDAAAAAAMTSDYTSSVFAPASYSYMQGGAPKRMRSSYGGAPPSLAHDAAMPGFGLDKVSYHHYQALPPYYVGSSNASVGNLGLLQQADDAPAPQDGASAGDIWSLDELLMLAAAGAY

SEQ ID NO: 5821 - protein, 436 aa, Zea mays
  unsure (1)..(436): unsure at all Xaa locations
  Clone ID: TF_ZmC2282_3.pep
MCGGAILSGFIPPSGVAAAAAAAKKKQQQRCRVTADLLWPGPGSKEAPQDQEEDFEADFREFERGLGEDDVDSAGEGGDPEVQELPPPEPTRFAFATAAKAAVDGVMTTTPKDVKGDRPVKRGRKNQYRGIRQRPWGKWAAEIRDPNKGVRVWLGTYNTAEEAARAYDAEARKIRGKKAKVNFPDDDAPGTGHRPANAAPRLVAPPPPPKACADEIFNNLKNDDDDNNNNNDDLFAMFAFGDNKKKVPAAKPAAAEGGSGSGSFLVPAPAVAVVPGNKRRSSATNTMLSVSDDQRSNSYGSGSSDLVGSWSWDDDAAAAAMTSDYTSSVFAPDNAVLPAASYTQGGAPKRMRSSYGGAPPSLAHDAAMPGFGLDKVSYHHYQALPPYYVGSSNASVGNLGLLQQADDAPAPQDGASGRGXIWSLDELLMLAAAGAY

SEQ ID NO: 5822 - protein, 422 aa, Zea mays
  Clone ID: TF_ZmC2282_5.pep
MCGGAILSGFIPPSGVAAAAAAAKKKQQQRCRVTADLLWPGPGSKEAPQDQEEDFEADFREFERGLGEDDVDSAGEGGDPEVQELPPPEPTRFAFATAAKAAVDGVMTTPPKDVQGDRAVKKRGRKNQYRGIRQRPWGKWAAEIRDPNKGVRVWLGTYNTAEEAARAYDAEARKIRGKKAKVNFPDDDAPPGTRHRPAPKACADEMFNNLKNDDDNNDDLFAMFAFGDNKKKVPAAKPAAAEGDSGSGSFLVPAPAVAAVPGNKRRSSATNIMLSVSDDQSSNSYGSGSSDLVGSWSWDDDAAAAAMTSDYTSSVFAPDNAVLPAASYSYMQGGAPKRMRSSYGGAPPSLAHDAAMPGFGLDKVSYHYQALPPYYVGSSNASVGNLGLLQQADDAPAPQDGASAGDIWSLDELLMLAAAGAY

SEQ ID NO: 5823 - protein, 534 aa, Zea mays
  Clone ID: TF_ZmC1995_1.pep
MASLAISRPPGTSHRAAPFVLGCPPPWPPPPPPAARPRPPPPRPDAAAAARLLEEEAGAGSSRARSPGGPELESMVLDLNAESPTPGSASAASSSSVVVGGGFFRFDLLGGTPDEEGCSPSPPIVTRQLFPLPYPDAAGSTAASTASNGSPPPEVAVAWARRPADLGAPALAQGKVVSAPSSPAVVSPAAGKKSRRGPRSRSSQYRGVTFYRRTGRWESHIWDCGKQVYLGGFDTAHAAARAYDRAAIKFRGLDADINFQLKDYEDDLKQMRNWTKEEFVHILRRQSTGFARGSSKYRGVTLHKCGRWEARMGQLLGKKYIYLGLFDSEIEAARAYGRAAIRFNGPDAVTNFDSVSYDGDVPLPPAIEKDVVDGDILDLNLRISQPNVHDLRSDGTLTGFGLSCNSPEASSSIVSQPMGPQWPVHPHSRSMRPQHPHLYASPCPGFFVNLREAPMQEEENRSEPACPQPFPSWAWQTQGSRAPVLPATTAASSGFSTAAATGVDAATAGHSVPPPSGSLRQFSGYHQLRFPPTA

SEQ ID NO: 5824 - protein, 121 aa, Zea mays
  Clone ID: TF_LIB3156-001-Q1-K1-H9.pep
PRVRPRVRPRVRPRVRGKASAEIRDPHKGVRVWLGTYNTAEEAARAYDEAAKRIRGEKAKLNFPQTPHLTQPPAKKRCMMAPELTPPSSETKSPPTPQLFMGFGYENGVYRPSEAMESEME

SEQ ID NO: 5825 - protein, 193 aa, Zea mays
  unsure (1)..(193): unsure at all Xaa locations
  Clone ID: TF_ZmC234991_1.pep
MFPWGGFGSEQRSAGEQRRCVLRSWARPLVAQPQADANTTRYLGVRRRSWDRYAAEIRDPATKXHDRVARSLRGSHARTNFAYPDLPPGSSVTPYLSPDLTSGDNATQLLQPFYAVDPAAASLPPALPAANGAAGYGYGVEDMSALMDDLTIPDDLTADYGAEDTGGLEAGSGAATDRGRGRRARETRGRDSG

SEQ ID NO: 5826 - protein, 222 aa, Zea mays
  Clone ID: TF_LIB3607-014-Q6-K6-G12.pep
MVPLPLLPSCDRPGWRAVRRVPAVYLGAYDDEDAEERAHDLAELKYWGPAGTVLNFPLSGYDEERREMEGQPREEYVASLRRRISGFARGVSKYRGVARHHHNGRWEARIGRVLGNKYLYLGTYATQEEAAVAYDMAAIEHRGFNAVTNFDISHYINHWHRHCHGPCDGSLGAMDVAPNVSLELDLLECPVTVRLSLEETTGDDEFHNREDYLGHLFGVQQL

SEQ ID NO: 5827 - protein, 281 aa, Zea mays
  Clone ID: TF_ZmC21315_4.pep
SRTYYIVHQESKRRRRLGTTKPKLESYTIPVIQPASQPSHHIMVKTAASSSSDDAAAAKRRTYKGVRMRSWGSWVSEVRAPGQKTRIWLGSHATAEAAARAHDAALLCLRGSAADLNFPLRLPFDLPPAATMSPKAIQRVAAAAASASSSSSCGGGGGLRAPPPFAPRAENNGTSACSDGDGDATPASSTTSSPTSHADDVSSPDSTVSSAGDVDYYTSLADIDAFFQSPKCVVDYALMDPCSAFFAPDSTAADDDGGCCWAWEEDGGGIALWSFSATLDC

SEQ ID NO: 5828 - protein, 280 aa, Zea mays
  Clone ID: TF_ZmC7961_3.pep
MAAAINLPGPSEDLMRAMESFMQDDTTHPLQQTHRTPRQPENTAHGAQYPATHLSPAQMQFIQAQLHLQRNPGLGPRAQPMKPAVPVPPAPAPQRPVKLYRGVRQRHWGKWVAEIRLPRNRTRLWLGTFDTAEQAALAYDQAAYRLRGDAARLNFPDNAESRAPLDPAVDAKLQAICATIAAASSSSKNSKAKSKAMPINASVLEAAAASPSNSSSDEGSGSGFGSDDEMSSSSPTPVVAPPVADMGQLDFSEVPWDEDESFVLRKYPSYEIDWDALLSN

SEQ ID NO: 5829 - protein, 193 aa, Zea mays
  Clone ID: TF_ZmC983_2.pep
MAQELQETSSSSATTTTSSCTTSCCSSTVTDSSSSPPSPAAANAAPAPRKAEAETGGDEDGCAGKAAPAKKRERSSEGKHPTYRGVRMRAWGKWVSEIREPRKKSRIWLGTFPTAEMAARAHDAAALAIKGRATRSARHKSGSCSTCRTCSSTSGTGSGASRRCGPRSMTCWRSMRRRSRCFGNSSLAITKRV

SEQ ID NO: 5830 - protein, 225 aa, Zea mays
  Clone ID: TF_ZmC484_48.pep
VAACTSGGAPERYRGVRLRKWGKWAAEIRNPFTGKRQWLGTFDTAGAASAAYLSASRSFADEKRRRRGLPVAASSADTPASGSTPTASSSSSASTAPFAHPSPSSVLEPSKEARNTQSPEATPARPSTDSAQLPEDPEFYQDLLRGLQLPDIDPLDFRAGLDALDLSDADFGLDDEHDLLLGDFGDEEMEIDLDLDDINDVFPEMPGCDLGRGMDDFLQTVDFCV

SEQ ID NO: 5831 - protein, 225 aa, Zea mays
  Clone ID: TF_ZmC484_74.pep
VAACTIGGAPERYRGVRLRKWGKWAAEIRNPFTGKRQWLGTFDTAGAASAAYLSASRSFADEKRRRRGLPVAASTPDTPASGSTPTASSSSSASTAPFAHPSPSSVLEPSKEARNTQSPEATPAPPSAESAQLPEDPEFYQDLLRGLQLPDIDPLDFRAGLDALDLSDADFGLDDEHDLLLGDFGDEEMEIDLDLDDINDVFPEMPGCDLGRGMDDFLQTVDFCV

SEQ ID NO: 5832 - protein, 225 aa, Zea mays; identical to SEQ ID NO: 5830
  Clone ID: TF_ZmC484_77.pep

SEQ ID NO: 5833 - protein, 100 aa, Zea mays
  Clone ID: TF_ZmC214275_2.pep
MAMSEPSSDTSCTSSCSSGPSTSTSPRAAPSAAAAAASGGGKKRPRSDDGGSSSSSAPAYRGVRMRAWGKWVSEIREPRKKSRIWLGTFPCPEMAARAHD

SEQ ID NO: 5834 - protein, 125 aa, Zea mays
  Clone ID: TF_LIB3117-035-P1-K1-G4.pep
TSHARSVARADMHAYCTAEPPARKRERKTMYRGIRRRPWGKWAAEIRDPAKGARVWLGTFATAEAAERAYDRAARRIHGDKAKVNFPNEDPTAEYDYDYDGHSHAHAHAGGEQGMLAMYNSGGRD

SEQ ID NO: 5835 - protein, 189 aa, Zea mays
  Clone ID: TF_ZmC15341_1.pep
MCGGAIIADFVPAGARRPATDDTMSASILSGEDHPELPLPLPAPAPGRKTAYRGIRRRPWGRWAAEIRDPRKGARVWLGTYATPEDAARAYDVAAREIRGPKAKLNFPPAVGGGGGARAPAPAAAKRRRKSAAAEESSASSPPAAVVVAGGGEEALRDCMSGLEAFLGLQDADEGGGVEAWDAVRLMLA

SEQ ID NO: 5836 - protein, 228 aa, Zea mays
  unsure (1)..(228): unsure at all Xaa locations
  Clone ID: TF_ZmC15341_2.pep
MCGGAIIADFVPAGARRPATDDTXPPPSSPVLRCEDHPELPLPAPGRKTAYRGIRRRPWGRWAAEIRDPRKGARVWLGTYATPEDAARAYDVAAREIRGPKAKLNFPPAVGGGGGGARAPAPAAAKRRRKSAAAEARGRARPRLLRRRRRRPSWRAAGRRRCATACPGSRRSWGCRTPTRVAASRRGTPWTSCWRRPYAVAGGLWAPAPAPARACRRCERPPQLFWIE

SEQ ID NO: 5837 - protein, 229 aa, Zea mays
  unsure (1)..(229): unsure at all Xaa locations
  Clone ID: TF_LIB4767-027-Q2-K1-E2.pep
DPRGRPGPPRRQSDSPPAPLTTASALHHHRSSRRRGDGDHGHGEISTAAAAVSSATVAVLLLVLRLRGHRPRPARRGGGRRRPRPAPSLIRGSARTPPPPRGREAPSTGESPVYLGAYDSEEAAARAYDLAALKYWGPETLLNFPVEDYSSEMPEMEAVSREEYLASLRRRSSGFSRGVSKYRGVARHXHNGRWEARIGRVFGNKYLYLGTFDTQEEAAKANDLAAIEY

SEQ ID NO: 5838 - protein, 357 aa, Zea mays
  Clone ID: TF_ZmC21952_1.pep
MAKNYRERRLKRAMKIDEGEDDFEADYQAFSKKYDEKDECHYKFMALLPFKNGLPNVSPPTKEKVGLHFAMKDVVISQKPTTTNEGIIVRPKCKRKTPYRGIRRRPWGKWAAEIRDPTKGVRVWLGTYKTPEDAARAYDAEARKIRGNKAKVNFPNEPPNMVSNAPKLIVTAMTTMAIPADKLNANELMCHKNYSNEDFFSMVNFSGNNGNFISTAAFGLQCIKKPRVPYDIPRMGECSNQNRMTYGLSNGLGNEASRNLNGCSFLPQAGMPIFIQPTFDGPSRMIGRNDGVIVPTLTNATPMAGVDAAKKMNQQPIFQEMESEDIPSILQGDVSEDVAAEISMWEFYDNLLDNKEN

SEQ ID NO: 5839 - protein, 307 aa, Zea mays
  Clone ID: TF_ZmC172_1.pep
MCGGAILAELIPTTPARRGGAAWPAGKCKRRKANDFEAAFREFDEDSEEEEEDDEGVVESKPAFVVRASSAATQPRARQEQRSRRRAPDQQYRGVRRRPWGKWAAEIRDPVKGVRVWLGTFPSAEAAARAYDHAARHIRGPRAKLNFPSSSSASAAGAPASRKRARTADADAVIDLEEQEQRPAAAALKHEAAECSGSDALPDFSWQGVSAAYDEASAPRPAFDFEARPESAADEASPRASDSESDAMFDSLLFGDQFAFFDAGAYESLDSLFSADAVQSNAAAAADQDMPLWSFDDGCLVEDNLSF

SEQ ID NO: 5840 - protein, 191 aa, Zea mays
  Clone ID: TF_ZmC8601_1.pep
MGYLEAGQKLYRGVRQRHWGKWVAEIRLPRNRTRLWLGTFDTAEEAALAYDQAAYRLRGDAARLNFPDNAASRGPLHASVDAKLQSLCQSIAASKKGAKKPASAAAAASSSAPTSNCCSSPSSDDATSSCLESATESSCPSRSPSPSASPGPTVPEMQQLDFSEAPWDEAAGFALTKYPSYEIDWDSLLAN

SEQ ID NO: 5841 - protein, 163 aa, Zea mays
  Clone ID: TF_ZmC3662_1.pep
MRRARLPPVPVPTAPGDAGPEVKYRGVRRRPSGRYAAEIRDPARKTPIWLGTFDSAEAAARAYDAAARTIRGAAARTNFPSAPTSAAVAPPLPLPASTAAAAGAATSSLSSAVAVRSERAGPGGRRHGLALRHAAPPLAAAGPQPLLPRLVPPGYSLASCGRR

SEQ ID NO: 5842 - protein, 131 aa, Zea mays
  Clone ID: TF_ZmC3662_2.pep
MRRARLPPVPVPTAPGDAGPEVKYRGVRRRPSGRYAAEIRDPARKTPIWLGTFDSAEAAARAYDAAARTIRGAAARTNFPSAPTSAAVAPPPPLPLPASTAAAAGAATSSLSSTVESWSGGGGGGAPAGIR

SEQ ID NO: 5843 - protein, 441 aa, Zea mays
  Clone ID: TF_21208780.pep
MCGGAILSGFIPPSGVAAAAAAAKKQQQQQQRCRVTADLLWPGPGSKGAPQDKEEDFEADFREFERGLGEDDVDSAGEGGDPEVQELPPPEPTRFAFATAAKAAVDGVMTTTPKDVQGDRAVKKRGRKNQYRGIRQRPWGKWAAEIRDPNKGVRVWLGTYNTAEEAARAYDAEARKIRGKKAKVNFPDDDATGTRHRPTNAANAARLVAPPPPPKACADEMFNNLKNDDGDNNNNDDLFAMFAFGDNKKKVPAAKPAADEVGSGSGSFLVPAPAVAAVPGNKRRSSATNIMLSVSDDQSSNSYGSGSSADLVGSWSWDDDDAAAAAAAAAMTSVFAPDNAVLPAASYSYMQGGAPKRMRRSYGGAPPSLAHDAAMPGFGLDKVSYHYQALPPYYVGSSNASVGNLGLLQQADDAPAPQDGASAGDIWSLDELLMLAAAGAY

SEQ ID NO: 5844 - protein, 173 aa, Zea mays
  unsure (1)..(173): unsure at all Xaa locations
  Clone ID: TF_LIB5023-004-R1-XP1-G5.pep
MAATTIDWHARNNAALPAAMYGVAVPDSKELVRALIAPPMQQAPTISFAYPCSGVEQQSAAGSFLGAGGGGLTPAQILQVQSRLQFLRRPAGAAVATQPMKRQGVPLPQAPAVSKLYRGVRQRHWGKWXVAXIRLPRNRTRLWLGTFDTAEEAALAYDSAAFRLRGGLARLNF

SEQ ID NO: 5845 - protein, 145 aa, Zea mays
  Clone ID: TF_ZmC27868_1.pep
MCPTKKEMSAESSGSASSWTSASTSTSPEHQTVWTSPPKRPAGRTKFRETRHPVFRGVRRRGSAGRWVCEVRVPGRRGCRLWLGTFDAAEAAARAHDAAMLAIAGASACLNFADSAWLLAVPASYASLAEVRRAVAEAVEDFQRR

SEQ ID NO: 5846 - protein, 119 aa, Zea mays
  Clone ID: TF_ZmC28357_4.pep
MCGGAIILDYIPARRRVSAADFWPDSEADAEDSDSHAPDPERAPRPRGKAKRGRKNQYRGIRQRPWGKWAAEIRDPVKGVRVWLGTYPTAVAAARAYDRAVRRIWGAYAEVFFPVGTSS

SEQ ID NO: 5847 - protein, 172 aa, Zea mays
  unsure (1)..(172): unsure at all Xaa locations
  Clone ID: TF_LIB4763-018-R1-K2-F11.pep
MCGGAILSGFIPPSGVAAAAAAAAKKKQQQRCRVTADLLWPGPGSKGAPQDKEEDFEADFREFERGLGEDDVDSAGEGGDPEVQELPPPEPTRFAFATAAKAAVDGVMTTTPKDVQGDRXSKKARPEGDPNKGXRVWLGTYNTAEEAARAYDAEARKIRGKKAKGNFPDDDA

SEQ ID NO: 5848 - protein, 114 aa, Zea mays
  Clone ID: TF_LIB3356-035-Q5-K1-A6.pep
KFRGVRRRPWGKFAAEIRDPWRGVRVWLGTFDTAEEAARVYDTAAIQLRGANATTNFSAAANSGSRAGQRDPATPGYESGTESSPAASSPTSVLRKVPSLSSLAEDDSCAAPCE

SEQ ID NO: 5849 - protein, 99 aa, Zea mays
  Clone ID: TF_ZmC103_1.pep
MRRAKPPPQQPSPSPEIRYRGVRRRPSGRYAAEIRDPAKKTPIWLGTYDCAEAAAHAYDAAARSLRGPTARTNFPSAAVRAPRHRAPSASAAAPTAPAA

SEQ ID NO: 5850 - protein, 219 aa, Zea mays
  Clone ID: TF_LIB4978-024-A1-K1-G5.pep
MMPVAPLPRCHGALASAPEHCPVPSPGPRPRSSPSAHPSFPYPRPRSRIYARCGRGAASEIADLRPMCPRPRSPLAGPAAASRRRSSCSRSGWCSASCVTHRFCRAFASGRRLYSSSGSPGTISRSGSVYLGGHDKEEKAARAYDLAALKYWGTTTTTNFPISNYEKDLEEMNNMSRQEYVVSLRRHARGFSRGASIYQGVTRLAASLPYGGMNSGSLS

SEQ ID NO: 5851 - protein, 166 aa, Zea mays
  Clone ID: TF_LIB3060-069-Q1-N6-H3.pep
RHWAELGFFRADLQQQQAPGPRIVPHPHAAPPPAKKSRRGPRSRSSQYRGVTFYRRTGRWESHIWDCGKQVYLGGFDTAHAAARHALDWTPRILRHSLAPGTRRAYDRAAIKFRGVDADINFNLSDYEDDMKQMGSLSKEEFVHVLRRQSTGFSRGSSRYRGVTLH

SEQ ID NO: 5852 - protein, 168 aa, Zea mays
  Clone ID: TF_18649690.pep
RCCRVKNPSSNGVLTAAAAFSDSKAMRESGKAAAARPYKGVRMRSWGSWVSEIRAPNQKRRIWLGSYATPEAAARAYDAALLCLKGSDAVLNFPSSSASSTHRRADDSSGGRPDDDDPGASGGMSPRSIQRAAAAAAAAFGDAAGIGASATTTPTPASLSTQGSTDHA

SEQ ID NO: 5853 - protein, 308 aa, Zea mays
  Clone ID: TF_ZmC653806_1.pep
MELHFQAQPPVFQLENYSSSSSYYYYQQQEAAAQAKPSKPRGRKKGSNNHSKFVGVRQRPSGRWVAEIKDTTQKIRMWLGTFETAEAAAKAYDEAARLLRGTDARTNFAPRISPDCPLAVRIRGLLHHKKIKKAKAAAAAAKQQASSSSPASTTSNSNSNSHSTNSARGGGSSITTTTTSSSSSSSSSSAVSCDDDMATQGGGTGALDAGEVYRPGFATAGTEEEFDSWMFDSAFPALDSFAAVDSAVPAAGTTEEPGAEMAEFERIKVERRISASLYAMNGLQEYFDRVLDASACDSLWDLSPLCHH

SEQ ID NO: 5854 - protein, 125 aa, Zea mays
  Clone ID: TF_ZmC25962_2.pep
MEAEQAAMASAAAPQLGSAHQHQHQHQQMQPRRQYRGVRMRKWGKWVAEIREPHKRTRIWLGSYATAVAAARAYDTAVFYLRGRSARLNFPDEIPSLAPSEGEGDGDGGEPARDPVDSGGCGTLA

SEQ ID NO: 5855 - protein, 241 aa, Zea mays
  Clone ID: TF_ZmC3836_1.pep
MAMLREHLDLIRAHLLDDNHDAVSSDDSAPSPSPSPPGRRPLPALSVSLPPRPAVVLQQQHLRAAAPPLQIPQQEQHCCPEPEEDDFRRYRGVRQRPWGKYAAEIRDPARKGARVWLGTYDTAVEAARAYDRAAFRLRGSKAILNFPNEVALSTAAWWATPAPPPQPSATVAGNKRARSPQEQDARCMVREVKKERIQEPASGGADYFWEDESLKGAICSLPPLSPLSPHPHLAVPQLYVS

SEQ ID NO: 5856 - protein, 291 aa, Zea mays
  Clone ID: TF_ZmC5658_1.pep
MDPSLKEEVMKAVEEARSAAAPRCRVVRIIVHDEDATDSSSSDDEGEEAGERAAAHPAAAPAGSVKRSRVLLQSAGCGAEEDGEGARFTGVRRRPWGRWAAEIRDPLLRRRVWLGTFDTAEEAAAAYVAARLRIRGPSNSLPPPEHRPALPPRPPPPPQQREKKLPLPPPPPPLLPLPPKKQQYPPPPLLPPKKQLYPPPLPLLPPKKQQQHHHHPSPPLPTLPPKKRLPSPPLLRESKKQCVASSPAEPRFMPLPVWALMSGSGKRKKRSGCGGRVPALHTPAAEETGRA

SEQ ID NO: 5857 - protein, 220 aa, Zea mays
  Clone ID: TF_ZmC8439_3.pep
MAPRTSERAMTSAAAGLARGAGPHYRGVRKRPWGRYAAEIRDPAKKSRVWLGTFDTPEDAARAYDAAAREYRGAKAKTNFSFPACLPLAAADVAGACRSGNSSSTTTTTTVDSFGGDVQAPPMQAMPLPPSFCASGAVRFPFSSYPVTHPYYFFGQAAAGCHMLKLPPTTVTVAQSDSHSSSVASLSASPSPSPPAGVSATRSAAFDLDLNCPPPAEAEA

SEQ ID NO: 5858 - protein, 236 aa, Zea mays
  unsure (1)..(236): unsure at all Xaa locations
  Clone ID: TF_ZmC3465_6.pep
MAGQMGLNQLGPAQIQQIQAQFMFQQQQQQQRGLHAAFLGPRAQPMKQSGSPSPPPPLAPAQSKLYRGVRQRHWGKWVAEIRLPKNRTRLWLGTFDTVEDAALAYDKAVFRLRGDTVRLNFPVLRRGGAHLAGPLHASVDAKLTGICQSLAESKXGGSSGDESAGSPPDSPKCSASASTEGEEESGSAGSPPSPTLAPPVPEMAKLDFTEAPWDETETFHLRKYPSWEIDWDSILS

SEQ ID NO: 5859 - protein, 393 aa, Zea mays
  Clone ID: TF_ZmC660_2.pep
MTMERSQPQHQQSPPSPSSSSSCVSADTVLVPPGKRRRRAATAKANKRARKDPSDPPPAAGERSSVYRGVTRHRWTGRFEAHLWDKHYLAALHNKKKGRQVYLGAYDGEEAAARAYDLAALKYWGPEALLNFPVEDYSSEMPEMEAASREEYLASLRRRSSGFSRGVSKYRGVARHHHDGRWEARIGRVLGNKYLYLGTFDTQEEAAKAYDLAAIEYRGANAVTNFDISCYLDHPLFLAQLQQEQPQVVPALDQEPQADQREPETTAQEPVSSQAKTPADDNAEPDDIAEPLITVDNSVEESLWSPCMDYELDTMSRSNFGSSINLSEWFTDADFDSDLGCLFDGRSAVDGGSKGGVGVADFSLFEAGDGQLKDVLSDMEEGIQPPTIISVCN

SEQ ID NO: 5860 - protein, 316 aa, Zea mays
  Clone ID: TF_ZmC3465_1.pep
MAAAIDMYKYCNTSAHLIASSSPSDQELAKALEPFITSASSPYHRYSLAPDSYMPTPSSYTTSPLPTPTSSPFSQLPPLYSSPYAASTASGVAGPMGLNQLGPAQIQQIQAQLMFQHQQQRGLHAAFLGPRAQPMKQSGSPPAQSKLYRGVRQRHWGKWVAEIRLPKNRTRLWLGTFDTAEGAALAYDEAAFRLRGDTARLNFPSLRRGGGARLAGPLHASVDAKLTAICQSLAGSKNSSSSDESAASLPDSPKCSASTEGDEDSASAGSPPSPTQAPPVPEMAKLDFTEAPWDETEAFHLRKYPSWEIDWDSILS

SEQ ID NO: 5861 - protein, 208 aa, Zea mays
  Clone ID: TF_ZmC74396_1.pep
MRKYAAPRSSRFHGVTRLKWSGKYEAHLWDNTSQVEGRKRMWSHVYLGSYVDEEQAAKAHDLAALKYWGTGPNTKLNFNISDYEKEIEVMKTMSQDEFVAYIRRQSSCFSRGTSSYRGVTRRKDGKWQARIGRIGESRDTKDIYLGTFETEEEAAEAYDIAAIELRGVHAVTNFDISNYCEDGLRKLEGPSEVAKLGSPSEVVKLAGQ

SEQ ID NO: 5862 - protein, 231 aa, Zea mays
  Clone ID: TF_ZmC2532_1.pep
MCPTKKGMTGEPSSPCSSASASTLPEHHQTVWTSPPKRPAGRTKFRETRHPVFRGVRRRGSAGRWVCEVRVPGRRGCRLWLGTFDTAEAAARAHDAAMLALAGAGACCLNFADSAWLLAVPASCASLAEVRHAVADAVDDFLRHQLVPEDDALAATPSSPSSEDGNTSDGGESSSDSSPPTGASPFEFDVFNDMSWDLHYASLAQGLLVEPPSAVTAFMDEGFADVPLWSY

SEQ ID NO: 5863 - protein, 364 aa, Zea mays
  unsure (1)..(364): unsure at all Xaa locations
  Clone ID: TF_ZmC6700_6.pep
MCGGAILSGLIPPSGVPAAAAAAKKKQQRRATADLLWPGPGKKGAPREEDFEADFREFERGLGEDDVDGAGDEVQELALPEPARLAFAAAVGAPRTAVDGVMTPKDGEGDMPTTANNSAANKRRRKNQYRGIRRRPWGKWAAEIRDPSKGVRVWLGTYSTAEEAARAYDAEARRIRGIHVKVNFAVXTGCSRRHKATAGTGSSSQGQSRPAWPHRSRSCSSFSSTPVHLACTXAGSCDLGWEWDWDDDTMTSDYASVFAPAAPSNVVPAWYTQGGPVSKRTRSSYGYGAAMPGGFDPETNYQYQPLPYVVESSPSDGASTDDMDCLQMMRAGDVPQDGASSGGGGGDGGDIWSLDELLMAAGAY

SEQ ID NO: 5864 - protein, 177 aa, Zea mays
  unsure (1)..(177): unsure at all Xaa locations
  Clone ID: TF_ZmC28197_2.pep
MCDAAPRYRGVRKRPWGRFAAEIRDPAKRARVWLGTFDSAEAAARAYDVAARALRGPLARTNFPALATTSRRPAPTCSSGSTVESSSGPRAGDPXQAAHRGRAAAKPRRPPRQAPPPSTDADCHSDCASSASVVDDGDDASTVRSRARPSLDLNLPAPLDLDGGHDLGFCTDLRLCL

SEQ ID NO: 5865 - protein, 306 aa, Zea mays; identical to SEQ ID NO: 5746
  Clone ID: TF_ZmC660_3.pep

SEQ ID NO: 5866 - protein, 416 aa, Zea mays
  Clone ID: TF_ZmC8413_1.pep
MARKRKASDSAAGIDGVHSLPPPLALASTDACAWASSGGTSMAAVAEAAAAQQQRRGRKRFVGVRQRPSGRWVAEIKDTIQKIRVWLGTFDTAEEAARAYDEAACLLRGANTRTNFWPRPSPASSVAVAAAAHPAPPPPTPPPLPGLMGSPTQPPALPSKVTNLLLLRLRARNNQQQLLLNATPARQQEAAAAALLQGPLCAEPYGGGEECAFQVDDFLSYDCGSDENSSQEIEDEEEEEEEEEEEEEELDFQFMDQQTASPGAGCEGGLCSPFEVVAAELGGAVEAGGGEPATAVQELMMSRMDYERKISASLYALSGVSECIKMRLGAAAGGHAVRDQLSGLREACRKKQREIVQQQHEQEPSMDTAEDVKPPREERSPGDGAPEATSSSSEASHGDSDGDMLLWSSLDLAPIC

SEQ ID NO: 5867 - protein, 271 aa, Zea mays
  Clone ID: TF_ZmC313467_1.pep
MEQGDPTPAASACNCDPAAAPPAWIPLHDHDDTLLQQLDAILLGMDDDDVATADDRCCSGWLSSSPSPSPSSSSEATTTASPPPSTREQHRRHPAKDDTALAGGGDEKRAVTTAAFIGVRKRPWGKFAAEIRDSTRKGARVWLGTFDTPEAAALAYDQAALAARGAAAVLNFPVERVVESLGALALAGAGSPVLALKRRHSKRTRRRKPSAVATTDGDGKDTMMKQPRRRQPAAAPRQCSGLPGAVPSYTTVAAVPPPPQQHATARGQSHT

SEQ ID NO: 5868 - protein, 223 aa, Zea mays
  Clone ID: TF_ZmC2464_1.pep
MAPRNALPAASAVANGMVMEPRFRGVRKRPWGRFAAEIRDPARKARVWLGTFDTAEAAARAYDAAALHFRGPKAKTNFPVAFAALPPPPPPKKPAAVTVSPSSSSTVESSSSSSSRDSPATPPRAASPSQQAPSLDLSLGGTPAMVAAQPFLFLDPRLAVTVAVPAPVPYRPTAVAAGANKHAAASCREEEQSDTGSSSSVVDASPAVGVGFDLNMPPPAEVA

SEQ ID NO: 5869 - protein, 182 aa, Zea mays
  unsure (1)..(182): unsure at all Xaa locations
  Clone ID: TF_ZmC28197_1.pep
MCDAAAVAAPRYRGVRKRPWGRFAAEIRDPAKRARVWLGTFDSAEAAARAYDVAARALRGPLARTNFPALTXPPSRRPAPTCSSGSTVESSSGPRAGDPRARAAHRGRAAAKPRPPRQAPPPPTDADCHSDCASSASVVDDGDDASTVRSRARPSLDLNLPAPLDLDGGHDLGFCSDLRLCL

SEQ ID NO: 5870 - protein, 99 aa, Zea mays
  Clone ID: TF_ZmC7732_3.pep
PLPHLDVARSTQQANRDCRKARIWLGTFETAEDAARAYDEAARIMCGPRARTNFPADANGPPPSFLSAALVDKLHRFNLASVQAAQRQKEAAAAAAAAA

SEQ ID NO: 5871 - protein, 237 aa, Zea mays
  Clone ID: TF_LIB5116-007-A1-PF1-B3.pep
MCGGAILAGFIPPSAAAAAAKAAAAKKQQQQQQQQQRSVTADSLWPGLRKKPAEEEDFEADFRDFERDSNDDDDAVEEVPPPPATAGFAFAAAAEVALPAPTRLDAIQHDGPAAKSVKRVRKNQYRGIRQRPWGKWAAEIRDPSKGVRVWLGTYDTAEEAARAYDAEARKIRGKKAKVNFPEEAPTVQKSTLKPTAVKSAKLAPPPKTCEDEPFNHLSRGDNDLFAMFALHDKKGSA

SEQ ID NO: 5872 - protein, 166 aa, Zea mays
  unsure (1)..(166): unsure at all Xaa locations
  Clone ID: TF_LIB4767-056-R1-K1-D10.pep
SIDPSTTTTPLRRCAAAAAKKKQQQRCRVTADLLWPGPGSKGAPQDKEEDFEADFREFERGLGEDDVDSAGEGGDPEVQELPPPEPTRFAFATAAKAAVDGVMTTTPKDVQGDRAVKKRGRKNQYRGIRQRPWGKWAAEIRDPNKGVRVWLGTYNTAXEEAARAYD

SEQ ID NO: 5873 - protein, 201 aa, Zea mays
  unsure (1)..(201): unsure at all Xaa locations
  Clone ID: TF_LIB4977-007-R1-K1-C8.pep
MEADALLHAPMTSSSSSSSSSSDSVGGSCVVNGAQELPSNTGKPHKNVKRKRTASPSAAPGGGVAPAPPEAAIADDDCGGRRRKRGSAGTRHPTFRGVRMRVWGKWVSEIREPRKKSRIWLGTFPTAEMAARAHDVAALAIKGRGAHLNFPHLAHDLPRPXSTSPXDIQXRAAKAAAAAADADVXVEQCESSHAVETPSSS

SEQ ID NO: 5874 - protein, 448 aa, Zea mays
  Clone ID: TF_ZmC203909_1.pep
MSPPTNGAISLAYAPSMMLGAGALTNPPLLPFDGFTDEDFLASADAALLGGADTDQTLLLLPSCPGANCCGGSSSDQGLGALACEVTTAGSFSLLGQPAPGQVSWEVTTAVAADRNTFSRTRDPAPSPPPSPALPLVQTTSQSQRTSIYRGVTRHRWTGRYEAHLWDNTCRKEGQKRKGRQVFLHIPSFALYSILVYASFFDAKGGYDKEDKAARAYDIAALKYWGDNATTNFPRENYIREIQDMQNMNRRDVVASLRRKSSGFSRGASIYRGVTKHHQHGRWQARIGRVAGNKDLYLGTFATEQEAAEAYDIAALKFRGENAVTNFEPSRYNLLAIAQRDIPILGRKLIQKPAPEAEDQAALSARSFSQSQQSSNSLPPYFLTNLLQPLPSQHSLAQALPSYNNLGFGEPSLYWPCPCGDPGEQKVQLGSKLEIVDGLVQLANSAAN

SEQ ID NO: 5875 - protein, 232 aa, Zea mays
  Clone ID: TF_ZmC441_1.pep
MEYAAVGYGYGYGYDERQEPAESADGGGGGDDEYATVLSAPPKRPAGRTKFRETRHPVYRGVRRRGPAGRWVCEVREPNKKSRIWLGTFATPEAAARAHDVAALALRGRAACLNFADSARLLQVDPATLATPDDIRRAAIQLADAASQQDETAAVAADVVAPSQADDVAAAAAAAAAMYGGGMEFDHSYCYDDGMVSGSSDCWQSGAGAGGWHSIVDGDDDDGASDMTLWSY

SEQ ID NO: 5876 - protein, 121 aa, Zea mays
  Clone ID: TF_ZmC8692_1.pep
MPADSDDVASPASTLGSVHKRGGGGGGGGKSGGHGGGRRRPGPAYRGVRMRAWGKWVSEIREPRKKSRIWLGTFPTAEMAARAHDAAALVVKGRGAVLNFPEMAARLPRPASAAPRDVQAA

SEQ ID NO: 5877 - protein, 266 aa, Zea mays
  Clone ID: TF_ZmC9628_2.pep
LVLCTVYSSHLYLSAHAGGEQAAHDVQGAAAMEGHYSPTASAAEAAGERRFRGVRQRPWGKWAAEIRDPHKAARVWLGTFDTAEAAARAYDEAALRFRGSRAKLNFPEDARLTTAPSTAGAGGGGIHDDDGRGGLGGRTSTQQEASAAVVSADYLQYQMMLLQGAATSGQGSSSSHGGYPLYYDYGGHGGAGAGAGGGAMSSFSGSYSFPASTVTVAFVPSSAPRYDEAAQWTSWPESSASAWSYPASTGSWSASSQYPPSTRPPQ

SEQ ID NO: 5878 - protein, 108 aa, Zea mays
  unsure (1)..(108): unsure at all Xaa locations
  Clone ID: TF_LIB3279-008-P1-K1-H11.pep
RRLKNQYRAISXRPWGKWAAGIRDPCKGVHFWLATYRTVHFGRRRPEAHGRGTREMKANLSARHDAAAQSAQNPPFESTTSDITIAYRLAPPPSPPNFRADEVVGNMD

SEQ ID NO: 5879 - protein, 433 aa, Zea mays
  Clone ID: TF_ZmC2239_1.pep
MVLDLNVASPADSGTSSSSVLNSADGGFRFGLLGSPVDDDDCSGEMAPGASTGFMTRQLFPSPTPPAEPEPEPVAAPVPVWQPQRAEDLGMAQRPVAPAKKTRRGPRSRSSQYRGVTFYRRTGRWESHIWDCGKQVYLGGFDTAHAAARAYDRAAIKFRGLDADINFSLSDYEDDLKQMRNWTKEEFVHILRRQSTGFARGSSKYRGVTLHKCGRWEARMGQLLGKKYIYLGLFDSEVEAARAYDRAALRFNGREAVTNFEPSSYNAGDNNLRDTETEAIDDGDAIDLDLRISQPNVQDPKRDNTLAGLQPTCDSPESSNTMASQPMSSSSPWPGYHQNPAVSFHHQRLYSSACHGFFPNHQVQERPVERRPELGAQPFPSWAWQAQGSPHVPLHHSAASSGFSTAAGANGGMPLPSHPPAQFPTTTNPFFFP

SEQ ID NO: 5880 - protein, 192 aa, Zea mays
  Clone ID: TF_LIB4605-003-R1-N1-G8.pep
MCGGAILAELREPAPRRLTERDIWQQKKKPKSTFSRDGLSTMTTAGYDAPAARLAKRKRKNQYRGIRQRPWGKWAAEIRDPQKGVRVWLGTFNSPEEAARAYDAEARRIRGKKAKVNFPDAPAVGQKCRSSSASAKALKSCVEQKPIVKTDMNTLANTNAPFYQSVNYASNNPFVPAMNSTVSFEDPIMNLH

SEQ ID NO: 5881 - protein, 267 aa, Zea mays
  unsure (1)..(267): unsure at all Xaa locations
  Clone ID: TF_LIB5117-065-A1-PF1-F12.pep
LRRVLLLNYSVTISLDRSPSSLAQLPSCGRRSADIDPSARCADAYVCACAGEMEEEERGAAAELAAIAGAGPPPKLEDFLGGGANGNHNGRNNSDAGSGDQVVSAATAEMYDSELKFLAAGFLSGATGTTAPTISPAAAPQEQADPKMPVPAPEQKKAVDSFGQRTSIYRGVTRYRWTGRYEAHLWDNSCRREGQSRKGRQVYLGGYDKEEKAARAYDLAALKYWGSSTTTNFPVADYEKEVEEMKHMTRQEVVASLXRKSSGFSRG

SEQ ID NO: 5882 - protein, 141 aa, Zea mays
  Clone ID: TF_LIB4738-100-Q1-K1-H9.pep
MAPRVADKTPLPLATGLKLGVGGGMGLGPHYRGVRKRPWGRYAAEIRDPAKKSRVWLGTYDTAEEAAKAYDVAAREFRGAKAKTNFPFPLAVAVAGGAGSPSSDSTTVESSCGGSGCGVEAPAVQAAMPLTPALDLDLFHR

SEQ ID NO: 5883 - protein, 109 aa, Zea mays
  unsure (1)..(109): unsure at all Xaa locations
  Clone ID: TF_LIB3732-049-Q1-K6-F2.pep
MVKTATATATAAARHGGANKRTYKGVRMRSWGSWVXEGVRXPGQKTRIWLGSHSTAEAAARAYDAALLCLRGWAAAPDLNLPPRRPLAHGXHPLPPADMSTKAIQRVAV

SEQ ID NO: 5884 - protein, 185 aa, Zea mays
  Clone ID: TF_LIB4740-070-R1-K1-H6.pep
MVKTAASSSSDDAAAAKRRTYKGVRMRSWGSWVSEVRAPGQKTRIWLGSHATAEAAVRAHDAALLCLRGSAADLNFPLRLPFDLPPAATMSPKAIQRVAAAAAAAASGSASSCGGLRAPPFAPPDENSGTSACSDGDATPASSTTSSPTSDFTPAWSTTSLPTSHADDVCSPECTVSSAGDEDYY

SEQ ID NO: 5885 - protein, 365 aa, Zea mays
  Clone ID: TF_ZmC3711_1.pep
MEESDLGGNLGKQTEEDKAAGESGDEGKIERSQSINLNRVPAVAVEAMSTQGNCETHGAAVPGTKDAGTGKAGQSSGDRQEEKLPKCEQVDYGSEVEGCADDENPGKRAALVTLVGNEYCGDEDERVQVLTIVKKDEHADDIVDRINPGTVAGYSEVKGAVGASAATSAVRPAGSRSSSFHGVTRHRWSGKYEAHLWDSSCRVEGRRRKGKQVYLGSYDTEEKAARAYDVAAIKYWGENTRLNFPISQYGKELEDIRDLSREECVTYLRRRSSCFSRGASIYRGVTRRQKDGRWQARIGLVAGTRDIYLGTFKTEEEAAEAYDIAAIEIRGKNAVTNFDRSNYVDKGMHCIEGEGLRLLASKPEE

SEQ ID NO: 5886 - protein, 258 aa, Zea mays
  Clone ID: TF_ZmC184128_1.pep
MEHYDSYLCSGSMHSYGGVGGATDAALDAGGDDMQRLLNALMDDMAAESDSFSDDMEAASSESSSSACSANSQQEATRRPQQQPDGGHSNGSNKSSKKQHQQQPPAPYIGVRKRPWGKFAAEIRDSTRKGARVWLGTFDSPEAAAMAYDQAAFSVRGAAAVLNFPVERVQESLRALALSSASSAAGSPVLALKCRHSIRKRSPNKNKNKKKQERQQQVAVAAAAPQQPPCPTSVVELEDLGADYLDELLRVSSEFHWQ

SEQ ID NO: 5887 - protein, 163 aa, Zea mays
  Clone ID: TF_LIB3597-065-Q1-K6-E10.pep
MDQMLGKHLQMPSVTTSAACQQPQSPPPSPQQQYRGVRKRKWGKWVSEIRQPGTKTRIWLGSFESAEMAAVAHDVAALRLRGRDAQLNFPGCVAWLPRPATSHARDVRAAAAEAADRVRCDPALLLLQQAAAARCHDYDHDHEFGAGPAPVVELGSDEEFELD

SEQ ID NO: 5888 - protein, 205 aa, Zea mays
  Clone ID: TF_ZmC220222_1.pep
MKRQGVPQQAPVPARAGVSKLYRGVRQRHWGKWVAEIRLPRNRTRLWLGTFDTAEEIALAYDGAAFRLRGDSAKLNFPELRRGGQHLGPPLHAAVDAKLHAICSGADVGAPLPQGQSQSHAPAAATTATPSPFSSVSPHVKSEPGCSVSESSFSADGDVSSTGSSDVVPEMQLLDFSEAPWDESDSFHLRKYPSLEIDWDSILIS

SEQ ID NO: 5889 - protein, 133 aa, Zea mays
  unsure (1)..(133): unsure at all Xaa locations
  Clone ID: TF_LIB3062-015-Q1-K1-F11.pep
SSHAWGPAAVPLEAPGAAVLDANDFRKYRGVRQRPWGKFAAEIRDPKKRGSRVWLGTYDTAIEAARAYDRAAFRMRGAKAILNFPNEVGTRGADFLAPPPPPPHAAATSQNKRKLMHDAEATXTAGAGAGAEP

SEQ ID NO: 5890 - protein, 255 aa, Zea mays
  Clone ID: TF_LIB4740-108-A1-K1-A6.pep
SHDQQQSASRTPLHRPQPQAQIPSHPTPPSRSLQPSPRPHSPATASTGCIQPPRRVTAGHLWPESKKPRRAAAGRRRAPVEQEQEEDFEADFEEFEVESGESELESEDEPKPKSFAAPSSALARGGLNTGAAGVDGPAANSVKRKRKNQFRGIRRRPWGKWAAEIRDPRKGVRVWLGTFNSPEEAARAYDAEARRIRGKKAKVNFPDEVPTAVSQKRRAAELASLKAPKMDVEEEKPIIKPAVNNMTNSNAYLYP

SEQ ID NO: 5891 - protein, 685 aa, Zea mays
  Clone ID: TF_ZmC1960_1.pep
METVGPSRRAGRDTRARRALRRECLCFRAESLRLREIEVMMALQAQGTRVPLVLALFLLLAGCGSEAQPLVPALFTFGDSSVDVGNNDYLHTIIKANFPPYGRDFANHVATGRFCNGKLATDITADTLGFTTYPAAYLSPQASGQNLLIGANFASAGSGYYDHTALMYHAIPLSQQLEYFREYQTKLAGGGRRRAGALHPQRRAVHRQCRRQRLRAELLHKPAAVQDADGRPVLRPPRGHLRPHRAGALRHGGRPRGRAGSPTHSAIPHHAEAERPTQNPTPPPATASSDSLPTPPHPTVPLTPAQPASPQPSDSGHRRHPAMCGGAILSDIIPPPPPRRVTAGHLWPESKKPRRAASGRRGAPVEQHEQEEDFEADFEEFEVESGESELESEDEPKPFAAPRSALARGGLNTGAAGVDGPAANSVKRKRKNQFRGIRRRPWGKWAAEIRDPRKGVRVWLGTFNSPEEAARAYDAEARRIRGKKAKVNFPDEVPTAVSQKRRAAGPASLKAPKMDVEEEKPIIKLAVNNMTNSNAYHYPAVVGHNIIPEPFMQTQNMPFAPLVNYAALVNLSSDQGSNSFGCSDFSLENDSRTPDITSVPAPVATLAAVGESVFVQNTAGHAVAPPATGNTGVDLAELEPYMNFLMDGGSDDSISTLLSCDGSQDVVSNMDLWSFEDMPMSAGFY

SEQ ID NO: 5892 - protein, 363 aa, Zea mays
  Clone ID: TF_ZmC1960_2.pep
MCGGAILSDIIPPPPPRRVTAGHLWPESKKPRRAASGRRGAPVEQHEQEEDFEADFEEFEVESGESELESEAEPKPFAAPRSALARGGLNTGAAGVDGPAANSVKRKRKNQFRGIRRRPWGKWAAEIRDPRKGVRVWLGTFNSPEEAARAYDAEARRIRGKKAKVNFPDEVPTAVSQKRRAAGPASLKAPKMDVEEEKPIIKLAVNNMTNSNAYHYPAVVGHNIIPEPFMQTQNMPFAPLVNYAALVNLSSDQGSNSFGCSDFSLENDSRTPDITSVPAPVATLAAVGESVFVQNTAGHAVASPATGNTGVDLAELEPYMNFLMDGGSDDSISTLLSCDGSQDVVSNMDLWSFEDMPMSAGFY

SEQ ID NO: 5893 - protein, 364 aa, Zea mays
  Clone ID: TF_ZmC1960_3.pep
MCGGAILSDIIPPPPPRRVTAGHLWPESKKPRRAAAGRRRAPVEQEQEEDFEADFEEFEVESGESELESEDEPKPKPFAAPSSALARGGLNTGAAGVDGPAANSVKRKRKNQFRGIRRRPWGKWAAEIRDPRKGVRVWLGTFNSPEEAARAYDAEARRIRGKKAKVNFPDEVPTAVSQKRRAAGLASLKAPKMDVEEEKPIIKPAVNNMTNSNAYHYPAVVGHNIIPEPFMQTQNMPFAPLVNYAALVNLSSDQGSNSFGCSDFSLENDSRTPDITSVPAPVATLAAVGESAFVQNTAGHAVAPPATGNAGVDLAELEPYMNFLMDGGSDGSISTLLSCDGSQDVVSNMDLWSFDDMPMSAGFY

SEQ ID NO: 5894 - protein, 365 aa, Zea mays
  Clone ID: TF_ZmC1960_6.pep
MCGGAILSDIIPPPPPRRVTAGHLWPESKKPRRAAAGRRRAPVEQEQEEDFEADFEEFEVESGESELESEDEPKPKPFAAPSSALARGGLNTGAAGVDGPAANSVKRKRKNQFRGIRRRPWGKWAAEIRDPRKGVRVWLGTFNSPEEAARAYDAEARRIRGKKAKVNFPDEVPTAVSQKRRAAGLASLKAPKMDVEEEKPIIKLAVNNMTNSNAYHYPAVVGHHNIIPEPFMQTQNMPFAPLVNYAALVNLSSDQGSNSFGCSDFSLENDSRTPDITSVPAPVATLAAVGESAFVQNTAGHAVAPPATGNTGVDLAELEPYMDFLMDGGSDDSISTLLSCDGSQDVVSNMDLWSFDDMPMSAGFY

SEQ ID NO: 5895 - protein, 395 aa, Zea mays
  Clone ID: TF_ZmC660_1.pep
MERSQRQSPPPPSPSSSSSSVSADTVLVPPGKRRRAATAKAGAEPNKRIRKDPAAAAAGKRSSVYRGVTRHRWTGRFEAHLWDKHCLAALHNKKKGRQVYLGAYDSEEAAARAYDLAALKYWGPETLLNFPVEDYSSEMPEMEAVSREEYLASLRRRSSGFSRGVSKYRGVARHHHNGRWEARIGRVFGNKYLYLGTFDTQEEAAKAYDLAAIEYRGVNAVTNFDISCYLDHPLFLAQLQQEPQVVPALNQEPQPDQSETGTTEQEPESSEAKTPDGSAEPDENAVPDDTAEPLTTVDDSIEEGLWSPCMDYELDTMSRPNFGSSINLSEWFADADFDCNIGCLFDGCSAADEGSKDGVGLADFSLFEAGDVQLKDVLSDMEEGIQPPAMISVCN

SEQ ID NO: 5896 - protein, 276 aa, Zea mays
  Clone ID: TF_ZmC118_3.pep
MCGGAILANLREPAPRRLTERDIWQQKKKLKRGGGGGRRSFAAEDDEDFEADFEVFEADSSDSDLELRERTDDDVVEIKPFTAKRTFSSDGLSTMTSAVARSAKRKRKNLYRGIRQRPWGKWAAEIRDPQKGVRVWLGTFNSPEEAARAYDAEARRIRGKKAKGSNSFGCSDLGWENDTKTPDITSIAPISTIAEGDESAFVDSNSNSSFVLPALENSAVDLTDGLTDLESYMRFLLDGGPSDSVDSLLNLDGSQDVGSNMDLWSFDDMPIAGDFF

SEQ ID NO: 5897 - protein, 152 aa, Zea mays
  unsure (1)..(152): unsure at all Xaa locations
  Clone ID: TF_ZmC840720_1.pep
HSPRPAPLQPQSQQQLHHRRSVGSQKLPWTRTTRRSRPPQPPSPSSSSSSSSSSSXPKKRARRDGGRHPTYRGVRMRSWGKWVSEIREPRKKSRIWLGTFATAEMAARAHDVAALAIKGARDAHLNFPGLARLLPRPATAAPRDVQAAAALA

SEQ ID NO: 5898 - protein, 340 aa, Zea mays
  Clone ID: TF_ZmC19431_1.pep
MCGGAILAELIPPTRRVASKPVTEGHLWSASSKKAGSGRDKRHQHEYADDDFEAAFEDFDDDFDVHEDDEDGHFVFSSKSALSPALHDGRAASQKKQRGRQFRGIRQRPWGKWAAEIRDPHKGTRVWLGTFSTAEDAARAYDVEARRLRGSKAKVNFPAASGRARGRARPRRGDDGNPRTAPETQHPAQPALLPRGERETQRKEGIAAVKPEATESFDVGGGLFFDMAFPTFPASPPPQAVDTSFAGSTATSETGSPAKRPRCDEDSSEGGSGSALELADELAFDPFVLLQMPYSGGYDDDSLDGLFAADEAVQQDVGNGMDGVRLWSFDEFPAVDGSVF

SEQ ID NO: 5899 - protein, 182 aa, Zea mays
  Clone ID: TF_ZmC19431_2.pep
MCGGAILAELIPPTRRVASKPVTEGHLWSASSKKAGSGRDKRHQHEYADDDFEAAFEDFDDDFDVHEDDEDGHFVFSSKSALSPALHDGRAASQKKQRGRQFRGIRQRPWGKWAAEIRDPHKGTRVWLGTFSTAEDAARAYDVEARRLRGSKAKVNFPAASGRARARPRRGDDGNPRTAPEP

SEQ ID NO: 5900 - protein, 457 aa, Zea mays
  Clone ID: TF_ZmC7298_1.pep
MDMNNGWLGFSLSPSAASRGGYGYGDGGGGASASACGDGEGSCPSPAAAASPLPLVAMPLDDSLHYSSAPDWRHGAAEAKGPKLEDFMSITCSNKSSGRSLYDSCGHHDDEQASKYHEVHGIHPLSCGSYYHGCISSGGGGGGGIGLGINMNAPPCTGGFPDHQHHQFVPSSHHGQYFLGAPAASAGPPAGAAMPMYNAGGGSVVGGSMSISGIKSWLREAMYVPPERPAAAALSLAVTDDVPPAEPPQLLPAPLPVHRKPAQTFGQRTSQFRGVTRHRWTGRYEAHLWDNTCRKEGQTRKGRQVYLGGYDREEKAARAYDLAALKYWGPSTHINFPLSHYEKELEEMKHMSRQEFIAHLRRNSSGFSRGASMYRGVTRHHQHGRWQARIGRVAGNKDLYLGTFSTQEEAAEAYDIAAIKFRGLNAVTNFDISKYDVKRICASTHLIGGGDACRRSP

SEQ ID NO: 5901 - protein, 85 aa, Zea mays
  Clone ID: TF_LIB3066-002-Q1-K1-D7.pep
DAWARGWWRASPPSSSSPRPRRRSPGRARKHRTRRRRPDQNQSRGVRGRPWGRWAARIRDPVKGVRVWLGTFPSAEAARRAYNHA

SEQ ID NO: 5902 - protein, 173 aa, Zea mays
  Clone ID: TF_ZmC74396_2.pep
HASAHASAHASAHASAHASADAWVRKYAAPRSSRFHGVTRLKWSGKYEAHLWDNTSQVEGRKRKGKHVYLGSYVDEEQAAKAHDLAALKYWGTGPNTKLNFNISDYEKEIEVMKTMSQDEFVAYIRRQSSCFSRGTSSYRGVTRGKDGKWQARIGRIGESRDTKDIYLGTFGE

SEQ ID NO: 5903 - protein, 117 aa, Zea mays
  Clone ID: TF_ZmC390422_1.pep
FGSSDDIRKKHYRGVRQRPWGKWAAEIRDPKKAARVWLGTFDTAEAAAMAYDAAALRFKGNKAKLNFPERVVMPIQPQTNNNNSTSSSAPTTHALLLFHHHNKYIIIVLFQQKGFQI

SEQ ID NO: 5904 - protein, 266 aa, Zea mays
  Clone ID: TF_ZmC5960_3.pep
IDTFGQRTSIYRGVTRHRWTGRYEAHLWDNSCRREGQSRKGRQVYLGGYDKEDKAARAYDLAALKYWGTTTTTNFPISNYEKELEEMKHMTRQEYIAYLRRNSSGFSRGASKYRGVTRHHQHGRWQARIGRVAGNKDLYLGTFSTEEEAAEAYDIAAIKFRGLNAVTNFDMSRYDVKSILESSTLPVGGAARRLKDAVDHVEAGATIWRADMDGAVISQLAEAGMGGYASYGHHGWPTIAFQQPSPLSVHYPYGQPSRGWCKPEQD

SEQ ID NO: 5905 - protein, 131 aa, Zea mays
  Clone ID: TF_LIB3279-060-P1-K1-B7.pep
ALVCIHQWRSVLLTIVSLHGLHAGAYDDEDAAARAYDLAALKYWGPDTILNFPASAYEAELKEMEGQSREEYIGSLRRKSSGFSRGVSKYRGVARHHHNGRWEARIGRVFGNKYLYLGTYGTQEEAAMAYD

SEQ ID NO: 5906 - protein, 111 aa, Zea mays
  Clone ID: TF_ZmC214275_1.pep
MDMAMSQHSSDTSSTSSYSSDPSSTSSTTSGKKRPRPHAAAAPAYRGVRMRAWGKWVSEIREPRKKSRIWLGTFPRPEMAARAHDAAALSVKGARALLNFSALACRLLRPV

SEQ ID NO: 5907 - protein, 872 aa, Zea mays
  Clone ID: TF_ZmC6822_1.pep
SYLFLWLDTYPLMIGTCGGFRGPTRPAAVTVAVLPHPRPSRPRRPQQPAAAAARAPRSPRRRGSRLVSVTATPRRLPPLPAGCIVLRSSEGELQSPTTIHKMTTKLEQSSAEHRPAKFAAPSSLTPKISMFGAKAGFIIPKNKLAGSLVIRSTSDKNETPTASNEDSSRHVHRKTKWGPDLALDPVVCKGRALAYQTRVEQISKQLKSGALDTSEIDGSVSAGNELNSIGPDILKENELGNVELLELERRELIGEILRLNPGYKTPENYKPVLRETKIPVPAEAHPGNNIIGVLLGSESNTQKRLHEETGAVIRVYGTKKINGEKSEIRHQDINETQDAYEDLYINVSADSYDKVDAAVVLIELLLAPVSVKSTATSTAATVSSADTSKDAVSANVQLEQNTTSQPDLLHYQSHNAPWLPTPQTNAPSIPSTGPVLSTLPNNPSQPQPPAGSFSMPPYTGQPPHMNSMPANPFPVPGPQQPVPSNQQHPPQFRANSSIGPFFGQPPGIVSQQMPPSSSMPPPVRPLQIPHASGGWPPFSPVTSQSHRPLQAPPTFMAVRPPISVSPLGATPPQGPIALTPPNMPTMYRGQHPPVPNFTGSAPLVSRPPGGGAQSFPTAAPQGPSSVAFPGGPSLRPPYPPAPDQARGPPPAFSPVGSTPGMVPPPIASSGLPAPRPANTSCIQTQVVAPLRPPLPAAGDFTFRPAIPPAHAPEFAAPGSQMGAIHGRTHHPGPFSSHPGDQKNPSQGFQGPFDGSRPMYTTNQARMHAPPPPHFHGAFPRNASPLEFPAGFRGAWPSVQAPPMPAPSHPSSFPPFQLRPPPPPQQDMSGAGGTRWPGGNQIYNPFAPTAAAAAQRAEADPEYEDLMASVGMK

SEQ ID NO: 5908 - protein, 247 aa, Zea mays
  Clone ID: TF_ZmC6822_4.pep
MCGGAILAELIPARVHRPLTAATLWAAALSGTTTVGKWKADAAAATDDDDDEEFEAEFQLFDDDDECEAEFQLLDDHQPSPAASPEASGCKRKPALAPPAGAPASTDPATPCSRKYRGVRYRRSGRWAAEIRDPRQGRRAWLGTYRTAEEAALAYDREARRIRGKSARLNFPLLIPHEGPGRHARTPVAIDLNLPPVSDGSRRPGSRLASGDDGTANARRRMQIWPVLRLRSTLVRVKELIAQGPHD

SEQ ID NO: 5909 - protein, 221 aa, Zea mays
  Clone ID: TF_ZmC2464_2.pep
MAPKNALPAASGMTLEPRYRGVRKRPWGRYAAEIRDPARKARVWLGTFDTAEAAARAYDAAALHFRGPKAKTNFPVAFATATATDTRALPLPLRLPLPPPPPKKLSVSPSGSTVESSSRDSPAAPAPAPSLDLSLGMPPMVAAQPFLFLDPRLAVTVAVAAPVPRRPTAAAAGAGASKQAAYSCCREDEQSDTGSSSSVVDASPAVGVGFDLNMPPPGEVA

SEQ ID NO: 5910 - protein, 141 aa, Zea mays
  Clone ID: TF_LIB4827-035-A1-N1-F3.pep
MCGGAIIADFVPAGSRRPATDDTMSASILSGEDHPELPLPLPAPAPGRKTADRGIRRRPWGRWAADIRDPRKGAREWLGTYATPEDAERAYYEAEREIRVPKVKLNFTSAGWGRYARAGGGAAKTRRKSAADDESSVSSPP

SEQ ID NO: 5911 - protein, 170 aa, Zea mays
  unsure (1)..(170): unsure at all Xaa locations
  Clone ID: TF_LIB4746-091-R1-K1-F6.pep
PIHAGGFDPAHAAARAYDRPTGRXIKFHGVDADINFNLSDYEDDMKQMGSLSKEEFVHVLRRQSTGFSRDSSRYIYIGLFDSEVEAARAYDKAVIKCNGREAVTNFEPSTYHGELPTEVADVDLNLSISQPSPQRDKNSYLGLQLHHGPFEGSELKKTKASANDRYTLTS

SEQ ID NO: 5912 - protein, 112 aa, Zea mays
  Clone ID: TF_ZmC3711_3.pep
EDIRDLSREECVTYLRRRSSCFSRGASIYRGVTRRQKDGRWQARIGLVAGTRDIYLGTFKTEEEAAEAYDIAAIEIRGKNAVTNFDRSNYVDKGMHCIEGEGLRLLASKPEE

SEQ ID NO: 5913 - protein, 33 aa, Zea mays
  Clone ID: TF_LIB3592-083-Q1-K6-H12.pep
LSPGVRQWHWGKWVLEIRLPSTRTRMWLGTWHA

SEQ ID NO: 5914 - protein, 197 aa, Zea mays
  Clone ID: TF_ZmC25015_1.pep
MRRAKPQQPSPSPEIRYRGVRRRPSGRYAAEIRDPAKKTPIWLGTFDSAEAAARAYDAAARSLRGPTARTNFPGAAASAPRHRARSASASAAAAAPAAVPATSSHSSTVESWSGGAPRVAAPPRSAAAPMEEDDDEDCHSYCGSSSSVLCEDARGDDDDDAAASHAPLPFDLNLPPPIDAAAEADQMGARYDTLLHL

SEQ ID NO: 5915 - protein, 281 aa, Zea mays
  Clone ID: TF_ZmC983_1.pep
MAQELHETSSCSATTTSSCTTSCCSSTVTDSSSSPPSPAAANAAPATRKRQALEAEAEAEAGGEEEEEEEEGCAGNKAAPAKKRPRGSEGKHPTFRGVRMRAWGKWVSEIREPRKKSRIWLGTFPTAEMAARAHDVAALAIKGRAAHLNFPDLAGALPRAASAAPKDVQAAAALAAAFTSPSSEPGAGAHEEPAAKDGAAPEEAAADAQAPVPVALPPPAASRPGTPSSGVEDERQLFDLPDLLLDIRDGFGRFPPMWAPLTDVEEVVNAELRLEEPLLWE

SEQ ID NO: 5916 - protein, 237 aa, Zea mays
  Clone ID: TF_ZmC3831_1.pep
MAPRVADKSPLPPATGLGLGVGGGVGGVGMGPHYRGVRKRPWGRYAAEIRDPAKKSRVWLGTYDTAEEAAKAYDSAAREFRGAKAKTNFPFPSQCSVASGAAGSASSNSTVDSSGGGSGCGIQAPMQAMPLPPALDLDLFHRAAAVNAVSTGMRFPFKGYPVACPTPQQYFFYEQAAAAASGYRMLKVAPPAVTVAAVAQSDSDSSSVVDHSPSPPAVTANKVGFELDLNWPPPAEN

SEQ ID NO: 5917 - protein, 412 aa, Zea mays
  Clone ID: TF_ZmC21463_1.pep
MASPNPEAAGLQAVAVAGAGEGGSSSSLSAVAGAAALSGELVPRRALALRKERVCTAKERISRMPPCAAGKRSSIYRGVTRHRWTGRYEAHLWDKSTWNQNQNKKGKQVYLGAYDDEEAAARAYDLAALKYWGAGTQINFPVSDYARDLEEMQMISKEDYLVSLRRKSSAFYRGLPKYRGLLRQLHNSRWDTSLGLGNDYMSLSCGKDIMLDGKFAGSFGLERKIDLTNYIRWWLPKKTRQSDTSKTEEIADEIRAIESSMQQTEPYKLPSLGFSSPSKPSSMGLSACSILSQSDAFKSFLEKSTKLSEECSLSKEIVEGKTVASVPATGYDTGAININMNELLVQRSTYSMAPVMPTPMKSTWSPADPSVDPLFWSNFVLPSSQPVTMATITTTTFAKNEVSSSDPFQSQE

SEQ ID NO: 5918 - protein, 130 aa, Zea mays
  Clone ID: TF_ZmC8688_1.pep
MRRRGVAAADADGDVELRFRGVRKRPWGRYAAEIRDPAKKARVWLGTFDSAEDAARAYDAAARMLRGPKARTNFPLPAAAALHHPHMPAAAAAAAPPYTTYPTATGVVSTPPVARPACSSLSSTVESFSG

SEQ ID NO: 5919 - protein, 233 aa, Zea mays
  Clone ID: TF_ZmC8439_1.pep
MAPRTSEKTMAPAAAAATGLALSVGGGGGAGGPHYRGVRKRPWGRYAAEIRDPAKKSRVWLGTYDTAEDAARAYDAAAREYRGAKAKTNFPYPSCVPLSAAGCRSSNSSTVESFSSDAQAPMQAMPLPPSLELDLFHRAAAAATGTGAAAVRFPFGSIPVTHPYYFFGQAAAAAAEAGCRVLKLAPAVTVAQSDSDCSSVVDLSPSPPAAVSARKPAAFDLDLNCSPPTEAEA

SEQ ID NO: 5920 - protein, 55 aa, Zea mays
  unsure (1)..(55): unsure at all Xaa locations
  Clone ID: TF_LIB3607-059-Q6-K6-A10.pep
GVRXPPWGRTGGXTKXXARKARVWLGTFDTAEAAARAYXAAALHFRGPKAEDQLP

SEQ ID NO: 5921 - protein, 255 aa, Zea mays
  Clone ID: TF_ZmC278_1.pep
MTLYISYDDGLPCWVRKKRMRRKSTGPDSIAETIKWWKEQNQKLQDESGSRKAPAKGSKKGCMMGKGGPENVNCVYRGVRQRTWGKWVAEIREPNRGRRLWLGSFPTAVEAAHAYDEAAKAMYGPKARVNFSESSADANSGCTSALSLLASSVPAAALQRSDEKVETEVESVETEEVVHEVKTEAKNGDLGSVKVTCVIQSAEETVLHKEGDVSYDYFNVEDVVEMIIVELNADKKFEAHEEYLDGDDGFSLFAY

SEQ ID NO: 5922 - protein, 100 aa, Zea mays
  unsure (1)..(100): unsure at all Xaa locations
  Clone ID: TF_LIB5116-044-A1-PF1-F11.pep
KWAAEIRDPVKGVRVWLGTFPSAEAAALAYDEAARAIRGPRAKLNFSSSSAVAAAAPGARKRXRAAPPAAKPAPVITLVDDEEEHATSLRQARGRGERGL

SEQ ID NO: 5923 - protein, 180 aa, Zea mays
  unsure (1)..(180): unsure at all Xaa locations
  Clone ID: TF_LIB3606-042-Q1-N6-C4.pep
AXAMASWVAAARAESGVLSAAAGHHHALALSMSSGSLSSCVTAHPAAPEYGAAAAALDGGRKRGGAAGQKQPVHHRKSIDTFGQRTSQYRGVTRHRWTGRYEAHLWDNSCKKEGQTRKGRQVYLGGYDVEEKAARAYDLAALKYWGPSTHINFPLEDYQEELEEMKNMTRQEYVAHLRRK

SEQ ID NO: 5924 - protein, 238 aa, Zea mays
  Clone ID: TF_ZmC16163_2.pep
MGTNPHLQELAASAVAASEPPPRARVVRILVHDADATDSSSSEDEAPPLLPRRRSRGGSSSLSVRRRVMEPAGASSAVRFRGVRRRPWGRWAAEIRDPHNRRRLWLGTFDTAEEAANAYDAANIRSRGRSGTTNFPAARYSPPPKPAKPIISLTPEPGKVITLPPVPVKPTFPVQVKEVGGSWGGLVKGARSEVKAFAPKPVWKMIPRVHQKFPGCADGSGLRAVHAASIYVEEVGGG

SEQ ID NO: 5925 - protein, 168 aa, Zea mays
  Clone ID: TF_ZmC7298_2.pep
MHSIRTLTHLLVLAMPMQCQQRRAVYLGGYDREEKAARAYDLAALKYWGPSTHINFPLSHYEKELEEMKHMSRQEFIAHLRRHHQHGRWQARIGRVAGNKDLYLGTFSTQEEAAEAYDIAAIKFRGLNAVTNFDISKYDVKRICASTHLIGGGDACRRSPTRQPTSEL

SEQ ID NO: 5926 - protein, 494 aa, Zea mays
  Clone ID: TF_ZmC67_1.pep
MDTSHHYHPWLNFSLAHHCDLEEEERGAAAELAAIAGAAPPPKLEDFLGGGVATGGPEAVAPAEMYDSDLKFIAAAGFLGGSAAAAATSPLSSLDQAGSKLALPAAAAAPAPEQRKAVDSFGQRTSIYRGVTRHRWTGRYEAHLWDNSCRREGQSRKGRQVYLGGYDKEEKAARAYDLAALKYWGSSTTTNFPVAEYEKEVEEMKNMTRQEFVASLRRKSSGFSRGASIYRGVTRHHQHGRWQARIGRVAGNKDLYLGTFSTEEEAAEAYDIAAIKFRGLNAVTNFEISRYNVETIMSSNLPVASMSSSAAAAAGGRSSKALESPPSGSLDGGGGMPVVEASTAPPLFIPVKYDQQQQEYLSMLALQQHHQQQQAGNLLQGPLVGFGGLYSSGVNLDFANSHGTAAPSSMAHHCYANGTASASHEHQHQHQMQQGGENETQPQPQQSSSSCSSLPFATPVAFNGSYESSITAAGPFGYSYPNVAAFQTPIYGME

SEQ ID NO: 5927 - protein, 238 aa, Zea mays
  Clone ID: TF_ZmC16163_1.pep
MGTNPHLQELAASAVAASEPPPRARVVRILVHDADATDSSSSEDEAPPLLPRRRSRGGSSSLSVRRRVMEPAGASSAVRFRGVRRRPWGRWAAEIRDPHNRRRLWLGTFDTAEEAANAYDAANIRFRGVSATTNFPAARYSPPPKPAKPIISLTPEPGKVITLPPVPVKPTFPVQVKEVGGSWGGLVKGARSEVKAFAPKPVWKMIPRVHQKFPGCADGSGLRAVHAASIYVEEVGGG

SEQ ID NO: 5928 - protein, 200 aa, Zea mays
  Clone ID: TF_ZmC587761_1.pep
LDLDPRRDERERSGGRSTGRSTKVDPRRHGKRPLPADEEEEQPPPPPSAPKHEQVEEQPYHPLIARALQQQGAASAGGSPGADVADPSPSPEAYAQYYYSARADHDATAMVSALSHVIRATPDQQQAYYPAGSAAVSGEQQHQHDAAAAAAIAEEQGRKRHYRGVRQRPWGKWAAEIRDPKKAARVWLGTFDTAEDAAIA

SEQ ID NO: 5929 - protein, 246 aa, Zea mays
  Clone ID: TF_ZmC4601_1.pep
MDMGRHQLQLQHAASSSSTSASSSSEQDKPLCCSGPKKRPAGRTKFRETRHPVFRGVRRRGAAGRWVCEVRVPGRRGARLWLGTYLGAEAAARAHDAAMLALGRGAACLNFPDSAWLLAVPPPPALSGGLDGARRAALEAVAEFQRRRFGAAAADEATSGTSPPSSSSSATKPAPAIERVPVEASETVALDGAVFEPDWFGDMDLDLYYASLAEGLLVEPPPPPPPAAWDHGDCCDSGADVALWSY

SEQ ID NO: 5930 - protein, 256 aa, Zea mays
  Clone ID: TF_ZmC4601_2.pep
MDMGRLQLQLQHAASSSSTSASSSSSSEQNKLAWSPSSPQPPKKRPAGRTKFRETRHPVFRGVRRRGAAGRWVCEVRVPGRRGARLWLGTYLGAEAAARAHDAAMLALGRGAACLNFPDSAWLLAVPPPPALSGGLDGARRAALEAVAEFQRRRFGAVAADEATSGTSPPSSSSSPSGTYVSQAPAPAIERVPVEASETAALDGAVFEPDWFGDMDLDLYYASLAEGLLVEPPPPPAAWDHGDCCDSGADVALWSY

SEQ ID NO: 5931 - protein, 195 aa, Zea mays
  Clone ID: TF_ZmC21315_1.pep
MVKGAHFQDAAVDGGAGGNAEAAMQGGAKRQYKGVRMRSWGSWVSEVRAPSQKTRIWLGSYSTAEAAARAYDAALLCLKGSAAADLNFPVHLPFHVPAAAAMSPKSIQRVAAAAAAASGGATCSPPAPLLRAATATRRRRLALAPRRPAGTLACATARRTTTTWTWTWRATPTRTSPRSRTSRPSSSRLSAWSTP

SEQ ID NO: 5932 - protein, 250 aa, Zea mays
  Clone ID: TF_ZmC21315_2.pep
MVKGAHFQDAAVDGGAGGNAEAAMQGGAKRQYKGVRMRSWGSWVSEVRAPSQKTRIWLGSYSTAEAAARAYDAALLCLKGSAAADLNFPVHLPFHVPAAAAMSPKSIQRVAAAAAAASGGATCSPPQLQAGAAASAPYSAGGGAGATPPCSYGDASSSSGVSSPETGRNAGLCYGTAHYDDMDMDLAGDADADLAALADIEAFFQSPKCMEYAMMDPCSTFFAPAPVATDAASEWAEEGEIDLWSFSSLN

SEQ ID NO: 5933 - protein, 112 aa, Zea mays
  Clone ID: TF_ZmC21315_7.pep
MVKGARLQDAAVAGGNAETAMQGAGGGAKRQYKGVRMRSWGSWVSEVRAPSQKTRIWLGSYSTAEAAARAYDAALLCLKGSAAADLNFPVHLPFHVPAAAAMSPKSIQRVAA

SEQ ID NO: 5934 - protein, 190 aa, Zea mays
  Clone ID: TF_ZmC444_1.pep
MAPKRPVSAAAAAEQPRLRGVRKRPWGRYAAEIRDPVRKARVWLGTFDTPEQAARAYDAAARKLRGPGAATNYPAPEPTAEALAEAPAASGSGSAVVYESSSASASASSCSLPLAAPSLDLSLALPAAAAAAEPYQLFADPAAAAAVTPALLHFLPPSEEQQSYSGSSLSSSSASVFDAAPPVGLRLDLN

SEQ ID NO: 5935 - protein, 271 aa, Zea mays
  unsure (1)..(271): unsure at all Xaa locations
  Clone ID: TF_ZmC2282_9.pep
MCGGAILSGFIPPSGVAAAAAAAKKKQQQQRCRVTADLLWPGPGSKGAPQDQEEDFEADFREFERGLGEDDVDSAGEGGDPEVQELPPPEPTRXVMTTTPKDVKGDRPVKRGRKNQYRGIRQRPWGKWAAEIRDPNKGVRVWLGTYNTAEEAARAYDAEPGKIRGKKAKVNFPDDDAPGTGHRPANAAPRLVAPPPPPKACADEIFNNLKNDDDDNNNNNDDLFAMFAFGDNKRRSSATNTMLSVSDDQRSNSYGSGSSDLVGSWSWDDDA

SEQ ID NO: 5936 - protein, 196 aa, Zea mays
  Clone ID: TF_LIB4742-133-A1-K1-G3.pep
MCGGAILSGFIPPSGVAAAAAAAKKKQQQQRCRVTADLLWPGPGSKGAPQDQEEDFEADFREFERGLGEDDVDSAGEGGDPEVQELPPPEPTRFAFATAAKAAVDGVMTTTPKDVKGDRPVKRGRKNQYRGIRQRPWGKWAAEIRDPNKGVRVWLGTYNTAEEAARAYDAEARKIRGKKAKVNFPDDATGTRHRPT

SEQ ID NO: 5937 - protein, 416 aa, Zea mays
  Clone ID: TF_ZmC2282_2.pep
MCGGAILSGFIPPSGVAAAAAAAKKQQQQQQRCRVTADLLWPGPGSKGAPQDKEEDFEADFREFERGLGEDDVDSAGEGGDPEVQELPPPEPTRFAFATAAKAAVDGVMTPPPKDVQGDRAVKKRGRKNQYRGIRQRPWGKWAAEIRDPNKGVRVWLGTYNTAEEAARAYDAEARKIRGKKAKVNFPDDATGTRHRPTTDEIFNNLKNDDNNNNDDLFAMFAFGDNKKKVPAAKPAAAEGGSGSGSFLVPAPAVAVVPGNKRRSSATNTMLSVSDDQRSNSYGSGSSDLVGSWSWDDDAAAAAMTSDYTSSVFAPDNAVLPAASYSYMQGGAPKRMRSSYGGAPPSLAHDAAMPGFGLDKVSYHYQALPPYYVGSSNASVGSLGLLQADDAPQDGASAGDIWSLDELLMLAAAGAY

SEQ ID NO: 5938 - protein, 220 aa, Zea mays
  Clone ID: TF_ZmC2282_8.pep
MCGGAILSGFIPPSGRCRVTADLLWPGPGSKGAPPKDVQGDRAVKKRGRKNQYRGIRQRPWGKWAAEIRDPNKGVRVWLGTYNTAEEAARAYDAEARKIRGKKAKVNFPDDATGTRHRPTTDEIFNNLKNDDNNNNDDLFAMFAFGDNKKKVPAAKPAAAEGGSGSGSFLVPAPAVAVVPGNKRRSSATNTMLSVSDDQRSNSYGSGSSDLVGSWSWDDD

SEQ ID NO: 5939 - protein, 98 aa, Zea mays
  Clone ID: TF_LIB3356-023-P1-K1-B12.pep
FACRKARIWLGTFETAEDAARAYDEAARIMCGPRARTNFPADANGPPPSFLFAALVDKLHRFNLAFVQAAQRQKEAAAVAAAATRTSVPATPSTPAGT

SEQ ID NO: 5940 - protein, 162 aa, Zea mays
  unsure (1)..(162): unsure at all Xaa locations
  Clone ID: TF_ZmC7732_1.pep
MARPQQRYRGVRQRHWGSWVSEIRHPLLXDRARLGLKARIWLGTFETAEDAARAYDEAARIMCGPRARTNFPADANGPPPSFLSAALVDKLHRFNLASVQAAQRQREAAAAAAAAAATSAPATPPTPPATQWGGGGRSLEEQHVEQMIEELLDSDFSMEICC

SEQ ID NO: 5941 - protein, 141 aa, Zea mays
  Clone ID: TF_21393791.pep
VEHQPCCNATVPKGSVVDGGKRKVTTAGVPTEPRYRDAQRRRPRGRYSAEIRDQHKGVWLWLGTFDTAEEAARRYDSEACRLRGPSENTNFLATLDYRVPLPALSLHALLPCVRTLVWIGVERYSQHSKGIVVLHDESTAS

SEQ ID NO: 5942 - protein, 474 aa, Zea mays
  Clone ID: TF_ZmC5960_2.pep
MDMDMSSATHPAHHWLSFSLSNNYHHGLLEALSSSSSAHQIAGDEAPVDEAPKMEDFLGCVGSAGTGSTAVVDHGELGSIAAGFLHRYPAHDGMTDQNSGAVTVAAATMEVAESDQARRPAETFGQRTSIYRGVTRHRWTGRYEAHLWDNSCRREGQSRKGRQVYLGGYDKEEKAARAYDLAALKYWGPTTTTNFPVSNYEKELEEMKSMTRQEFIASLRRKSSGFSRGASIYRGVTRHHQHGRWQARIGRVAGNKDLYLGTFSTQEEAAEAYDIAAIKFRGLNAVTNFDMSRYDVESILSSDLPVGGGATGRAAKFPLDSLQPGSAAAMMLAGAAAASQATMPPSEKDYWSLLALHYQQQQEQERQFPASAYEAYGSGGVNVDFTMGTSSGSNNNTGSGVMWGATSGAVVGQQDSSSKQGNGYASNIPYAAAMVSGSAGYEGSTGDNGTWVTTTTSSNTGTAPHYYNYLFGME

SEQ ID NO: 5943 - protein, 301 aa, Zea mays
  Clone ID: TF_ZmC3047_1.pep
MSRSRTVRIFWDDPDLTDSSGDDEGCGARRVGRMVRELAPAPAPAPAALPVPDQCNAGDGDRGRKAGVAGPGVCSGARRRVAKGAGGPASTKFRGVRRRPWGKFAAEIRDPWRGVRVWLGTFDTAEEAARVYDTAAVQLRGANATTNFAASAATNSGSGAGAGQDPATTPAAGYESGAESSPTSVLRKVPSLSSLAEDDSDAPAAERRSLAVLEEEELGEFVPFEDAPVYATSGFWDFEPDAGFLYAEPSSPEASWNAAAAVAEPASSDDAPSWAASPVQENDYFQDLRDLFPLNRLPAIF

SEQ ID NO: 5944 - protein, 212 aa, Zea mays
  unsure (1)..(212): unsure at all Xaa locations
  Clone ID: TF_ZmC6700_3.pep
MCGGAILSGFIPPSGVPAAAAAAKKKQQRRATADLLWPGPGKKGAPREEDFEADFREFERGLGEDDDVDGAGDEVQELPLPEPARLAFAAAVGAPRTAVDGVMTPKDGEGDMPTTATNSAANKRRRKNQYRGIRRRPWGKWAAEIRDPSKGVRVWLGTYSTAEEAARAYDAEARRIRGKKAXVNFRDEAAAAACSEATSRNYSNCLSPAQRG

SEQ ID NO: 5945 - protein, 174 aa, Zea mays
  Clone ID: TF_LIB4073-022-Q6-K1-D12.pep
MAPRTSEKTMTPAAAAAATGLALSVSGGAGASGPHFRGVRKRPWGRYAAEIRDPAKKSRVWLGTFDTAEEAARAYDAAARDYRGPKAKTNFPFPSSCMPLAAGAGAGSLPAAKAVTGGGGSRSSNSSTVESFSSGSDVQAAPMQAMPLPPSLELDLFHRAAAAGTGTGGAAVRF

SEQ ID NO: 5946 - protein, 43 aa, Zea mays
  Clone ID: TF_uC-zmflteosinte001a02b2.pep
IISSAELASLPSEIDEGMVCINTFGTSRNTPATLQKMPSWLAS

SEQ ID NO: 5947 - protein, 198 aa, Zea mays
  Clone ID: TF_ZmC258_3.pep
KSTAHSFCKTLTAWDTSTHGGFSVLRRHAEEEVLPEVTAPGVGYEQTAASVELNSDKLSQPSDVNNSDALAASSERSPLESQSRQVRSCTKVIMQGMAVGRAVDLTKLSGYSDLCQKLEEMFDIQGELGSTLKKWRVIFTDDEDDMMLVGDDPWDEFCRMVKRIYIYTYEEAKKLTSKSKLPVSSDSSKLSAANSLSE

SEQ ID NO: 5948 - protein, 56 aa, Zea mays
  unsure (1)..(56): unsure at all Xaa locations
  Clone ID: TF_LIB3180-047-P2-G3.pep
LKTLTASDTRAHGGLCVVMRHSLECLSQLDMSYNSPXIDLVFXDLYGNDWHLCHIF

SEQ ID NO: 5949 - protein, 194 aa, Zea mays
  unsure (1)..(194): unsure at all Xaa locations
  Clone ID: TF_LIB4757-020-Q1-K1-H5.pep
APSPQIARVPARCAAQGGRDGFRASACEIRWWRLSSVPLLGEKVYYFPQGHIEQVEASTNHLAEHQGTPLYNLPWKIPCKLMNMELKAEPDTDEVYAQLTLLPDKKQDENTSARRRRVVPHVPPATSEEGLRIHSFCKTLTASDTSTHXGGFSVLRRHADECLPPLDMGQHPPNQEXLVAKDLHGXRWRFRHIF

SEQ ID NO: 5950 - protein, 152 aa, Zea mays
  unsure (1)..(152): unsure at all Xaa locations
  Clone ID: TF_LIB3689-215-Q6-K6-B9.pep
MSSSSAASIGQPPPPAPPPEEEKKCLNSELWHACAGPLVCLPTVGTRVVYFPQGHSEQVAASTNKEVDGHIPNYPNLPPQLICQLHDVTMHXGXVRPDEVYAQMTLQPLNPQEQTDAYLPAEMGIMSKQPTNYFCKTLTASDTSTHGGFSVP

SEQ ID NO: 5951 - protein, 424 aa, Zea mays
  unsure (1)..(424): unsure at all Xaa locations
  Clone ID: TF_ZmC37547_1.pep
PASAQRPXCISGWNAPVYGALSAFLKDEAGKITKGPGGYMSGRGKVEITDVVEAASLAASGQPFEVVYYPRASTPEFVVKAASVQNAMRNQWCPGMRFKMAFETEDSSRISWFMGTIASAQVADPIRWPNSPWRLLQVSWDEPDLLQNVKCVNPWLVEIVSSIPPIHLGTFSPPRKKLRVAQHPDFPFEGQLLNPIFHGNPLGPSNSPLRCFSDIAPAGIQGARHAQFGLPLTDYQLNQLHLGFNRLGAMTPTPRISKGFVISSAPASESVSCLLTIGTPQATEKSDDIKRPHIMLFGKPILTEQQMDSGGSREGLSQDRKASELGLEDGHCKVFMESEDVGRTIDLSVFGSYEELYGQLADMFGIEKAEIMRHLCYRDAAGAVRHTGEEPFNDFMKVARRLTIIEGTEGRLQKPLVEYMVERA

SEQ ID NO: 5952 - protein, 66 aa, Zea mays
  unsure (1)..(66): unsure at all Xaa locations
  Clone ID: TF_LIB3245-352-P1-K1-E12.pep
PRVRPLVRPRLSDSCRIIWVGGTVSCARXXDPIRWSNSPWRLVQVSWDDPDLLHIVKRASPWLVEL

SEQ ID NO: 5953 - protein, 184 aa, Zea mays
  Clone ID: TF_5555419.pep
MRGNVSPCAAAKARGKVRPEDVAEAARLAAAGQSFEVVYYPRASTPEFCVRAAAVRAAMRVQWSPGMRFKMAFETEDSSRISWFMGTVAGVQVTDPIRWPQSPWRLLQVTWDEPDLLQNVKRVSPWLVELVSSMPAIHLASFSPPRKKPRIPAYPEFPFEGQLLNPAFPPSPLPHGQQHHHNFL

SEQ ID NO: 5954 - protein, 178 aa, Zea mays
  Clone ID: TF_ZmC15491_1.pep
MLSVGLTPNIVTYNSLIYGLCKSGELSRAVSLFKKLWTKGISPNAITYNTLIDKHCKDGYITEAFKLKQRMIEEGIHPTVFTYSILINGLCTQGYMEEAIKLLDQMIENNVDPNYVTYWTLIQGYVRCGNMIEISKIYDKMHIHGLLPTNVSGDVKQSCPAIHNPNRETCQMKMHSQC

SEQ ID NO: 5955 - protein, 139 aa, Zea mays
  Clone ID: TF_uC-zmflb73175c11b1.pep
LRVGQKALYSDQISLGMRFRMMFETEELGMRRYMGTITGITDLDPVRWKNSQWRNLQVGWDESAAGERRNRVSMWEIEPIAAPFFICPQPFFGVKRPRQIDDESSEMENLFKRAMPWLGEEICIKDAQTHNTTMPGLSL

SEQ ID NO: 5956 - protein, 219 aa, Zea mays
  unsure (1)..(219): unsure at all Xaa locations
  Clone ID: TF_LIB3245-093-P1-K1-H4.pep
TRGKAARVWVRPEEVVEAXANLAVSGQPFEVVYYPRASTPEFCVKAGGVRAAMRTQWCPGMRFKMAFETEDSSRISWFMGTVSAVHVADPIRWPNSPWRLLQVAWDEPDLLQNVKRVSPWLVELVSNMPVIHHLTATPFSPPRKKLCVPLYPELPLEGQFPAPMFHGSPLLGRGGAGGPMCYFPDGTSAGIQGARHAQFGISLSDLHLNKLQPGLSPYG

SEQ ID NO: 5957 - protein, 137 aa, Zea mays
  Clone ID: TF_ZmC84987_1.pep
MAGIDLNTVEEEDEEEAEALPLPGPGGRGAVCLELWHACAGPVPPLPRKGSAVVYLPQGHLEHIGGDAARGAAAAAVPPHVLCRVVDVTLHADGATDEVYARVSLLPEDEDAEKRAQAQARVPEDEDRRDGEDGAMR

SEQ ID NO: 5958 - protein, 124 aa, Zea mays
  Clone ID: TF_LIB4730-133-A1-K1-C7.pep
LASVRSDDTFADLTEPAAAGAERCVDRQLWLACAGGMCTVPPVGASVYYFPQGHSEHALGLAGAADLSAARVPALVPCRVTAVRYMADPDTDEVFARIRLVPLRGGDADADAFFFFTPPPLHLH

SEQ ID NO: 5959 - protein, 312 aa, Zea mays
  Clone ID: TF_ZmC952_2.pep
GRVIPHHKFLKSLNLPFCIGARINLQCHNEDVSERRSGMVVHVSEIDPMKWPGSKWRSLLVRWEDGVECNGQDRVSPWEIEIAGGSVSVAHSLSASSSKRTKLCPQGNLDVPTMYVTGNGNGCTDSVETGKFPRVLQGQDLMSFRTRHVPSAPQTVEAAKLQSSGAQVPSVYPDNIFNRTVVRQLGLASKFDGGATNAQQSGPFDRPREIWSKPQHEISDQTKMDHFETRRASAPGDDAAKHGSGGEVVRKTSCRLFGFSLTEKILPADDDGIKEVTYEPECQNPRMLDLFGYNCSAPSAALPALCAAPFGM

SEQ ID NO: 5960 - protein, 575 aa, Zea mays
  Clone ID: TF_ZmC500_1.pep
AAHGFCKTLTASDTSTHGGFSVPRRAAEDCFPPLDYSQQRPSQELVAKDLHGTEWRFRHIYRGQPRRHLLTTGWSAFVNKKKLVSGDAVLFLRGDNGELRLGVRRAAQLKNGSAFPALYNQCLNLGSLPNVAHAVATKSVFHIYYNPRLSQSEFIIPFSKFIKSFSQPFSAGSRFKVKYESDDASERRCTGIIAGIGDADPMWRGSKWKCLMVRWDDDVDFRQPNRISPWEIELTSSVSGSHMSAPNAKRLKPCLPHVNPDYLVPNGSGRPDFAESAQFHKVLQGQELLGYRTHDNAAVATSQPCEATNMQYIDERSCSNDASNIIPGVPRIGVRTPLGSPRFSYRCSGFGESPRFQKVLQGQEVFHPYRGTLVDASLSNSGFHQQDGSHVPTQASKWHAQLHGCAFRGQQAPAVPSQSSSPPSVLMFQRGDPKMSPFEFGHFHVNKKEDRRAMFVHAGGIGGTEQTTMLQAHHVSGGTGNRDVTVEKSHPAVAAASDNREVSKNSCKIFGISLTEKVPAMKEKGCGDINTNYPSPFLSLKQQVPKSLGNSCATVHEQRPVVARVIDVSTVDMMI

SEQ ID NO: 5961 - protein, 524 aa, Zea mays
  unsure (1)..(524): unsure at all Xaa locations
  Clone ID: TF_ZmC1173_1.pep
HASAHAQEINAKDLHVTIXKRQHICRGQRKRYILISGWSVFVRAKRLVAGDSVLFIWNDNNQLIVVIRLANRPHTVMPSSVLSSDSMHIGLLDAVAHAASTNSRFTIFYNPRASPCEFVIPMAKYVKAVYHTRLYMSIKFQSKLLKCPCSYMGTITGISDLDPVRWPNSHWRSVKVGWDESTAGEKQPRVSLWEIEPLTTFPMYPSPFALGLKRPWPAGLPSLYGGTSDGLTSSLMWLRDRANPGFQSLNFSGLGMSPWMQPRLDNSLLGLQSDMYQTIAAAAAFQSTTKQVPPSAMQFQQPQNIADRSALLSSQILQQVQPRFQQIYPQNLNENKIQGHTQPEYLQVQQQLQRCQSFNEQKPPMHPQQQQQEPQKQQCVQTPQDQQMQEQKHLHNFHSLPDALSAFSQLSPATHSPPSALQTVPAFSHQQNFPDTNISSLSPSTGPSMHGMLGRLPSEAASSLPCVAMNAPVSVSDPWSSKRVAVESVNPCRPRCFHSINDGDSVSEDGAICFGLEGRAGRPF

SEQ ID NO: 5962 - protein, 227 aa, Zea mays
  Clone ID: TF_ZmC1113_2.pep
AAAAAAAQVAGGGGGGEGDAAAAARGGGGTEDGMYTELWNLCAGPLVTVPRVGDKVYYFPQGHIEQVEASTNQVAEQHMQFYDLPWKILCEVMNVELKAEPDNDEVYAQLTLLPESKPEENGSSEEMPASPPAALARPRVHSFCKTLTASDTSTHGGFSVLRRHADECLPPLDMTRQPPTQELVAKDLHGVEWRFRHIFRGQPRRHLLQSGWSVFVSAKRLVAGDAF

SEQ ID NO: 5963 - protein, 71 aa, Zea mays
  Clone ID: TF_LIB3279-211-Q6-N6-B2.pep
MAQEQADKFQREPTSDPRTHLSPHSTPHRPLQSSSSHSLAGQPREHLLLTDWSIFVSSKRLVSGDTFIFLS

SEQ ID NO: 5964 - protein, 123 aa, Zea mays
  unsure (1)..(123): unsure at all Xaa locations
  Clone ID: TF_LIB4171-034-R1-L1-C6.pep
GGAFFGWGLPHRGGGRSLSLERPPALQNFRRRVVLRLKMRFXGDDAPERRSSVTVIGIVRLPAMSNSLWADSEWRSLIGXWDEPSSILLPDRISPWEVEPLHASNPQSSQPALRAEASSDPQL

SEQ ID NO: 5965 - protein, 234 aa, Zea mays
  Clone ID: TF_ZmC952_3.pep
CQLIPSQELVAKELHGAKWKFRHIYRGQPRRHLLTTGWSSFVNKKKLVSGDAVLFLRGDDGELRLGVRRAIQLKNEALFDDFSCDSTKRHTLLAVADSLKHKSVFHISYNPRATASEYIIPYHKFLKSLNLPVCIGARINFQCHNEDVSERRSGVVVRISEIDPMKWPGSKWRSLLVRWEDGAECNGQDRVSPWEIEIAGGSVSVSHSLSASSSKRTKLCPQGNLDVPAMCKLS

SEQ ID NO: 5966 - protein, 145 aa, Zea mays
  Clone ID: TF_ZmC425960_1.pep
MAGIDLNDTVEEDEEEAEPGNACSQQSRTSSAATFPPPPPNQPRPSAAVCLELWHACAGPVAPLPRKGSVVVYLPQGHIEHLGDAAAAGGGAPPPVALPPHVFCRVVDVTLHADASTDEVYAQLALVAENEDVARRLRGRSEDGS

SEQ ID NO: 5967 - protein, 477 aa, Zea mays
  Clone ID: TF_ZmC12351_3.pep
VPSACRAAFGCTQPTLHFFSFLLLFCSSHLNKILVHKTNALRLRNIPLLVICTLFIHGHIFTFKHLCLHSITKILRNGPRAHFPFNPFLPPGAYRRETQLRAFYSTTEEISSLFAKQQEQLKAMQRTLEDEENYESTLMGVDLNKVPLATDNAGMKPVDCSKNTVGASSASPENTQVSEHDSSDEDANMTEQQDDDGTAIGGSTQGLECTSPERSEGRRSGFHGNPVSTAPEREVTDTEQVPETDSQAGNAGCDDQRCDNTGGETMPLEDDMLLPDNEEPTALLKDAGQPQANVVPIPIPGDGVGHCSEEKHEGACSESKREDTHAGAIRTADLLASEVAGSWAVETAPSVNGENESPRSLGDATEHDEAGGSVAGDALVTLVNSEGQAAGSQNNVERGSSKITHHHHHHRHHHRVLSAMIGIVDPEFRKQMSGRSGVGNEEPMSDAETGEGIEEGDSDSGSDGSDSEEAMVEDSVV

SEQ ID NO: 5968 - protein, 167 aa, Zea mays
  Clone ID: TF_ZmC13783_3.pep
MSCSSAASIGQPPPEEEKKCLNSELWHACAGPLVCLPTVATRVVYFPQGHSEQVAASTNKEVDGHIPNYPNLPPQLICQLHDVTMHADVETDEVYAQMTLQPLNPQEQNDPYLPAEMGIMSKQPTNYFCKTLTASDTSTHGGFSVPRRAGERVFPPLDFTQQPSAQE

SEQ ID NO: 5969 - protein, 813 aa, Zea mays
  Clone ID: TF_ZmC965_1.pep
MVAAAAAAGGGADAGCGGGGGGGGKDALFVELWKACAGPLSSVPLLGEKVYYFPQGHIEQVEASTNHLAEHQGTPLYNLPWKIPCKLMNMELKAEPDTDEVYAQLTLLPDKKQDENTSARVENEEAEEEVVPHVPPATSEGLRIHSFCKTLTASDTSTHGGFSVLRRHADECLPPLDMSQHPPNQELVAKDLHGVEWRFRHIFRGQPRRHLLQSGWSVFVSAKRLVAGDAFIFLRGENGELRVGVRRALRHQTTIPSSVISSHSMHLGVLATAWHAVNTGSMFTVYYKPRTSPAEFVVSRARYCESLKRNYSIGMRFRMRFEGEEAAEQRFTGTIVGICVSDPSGWADSKWRSLKVRWDEASSVPRPERVSPWQIEPAVSPSPVNPLPVRFKRSRSSVNASPSDVSTVNREVASKVMVDSQQNNLPRALHNQGRTQLTGRYRDSTDVKTAQDLTMWSSGTEQQRNNIAAQTKRCLEGWTQSRTPEGYNQLFSAFQPLKDAHNPLRPFPNKISGTRSSTWVTADARYPAQQANHNMLHGTLSFMPHSSGFRMIQQNNLVMPEAANFTGKSAFTSLQGHVTDQCSTGWFGPIESNSHTDHASSSLIRSQPLVIGNDVQKTKGTSFKLFGIPLGSPEKSEPLVSPPSVAYDGKLQTSPTDNNEPCSEATQNIQNKVPSSSTRSCKKVHKQGSALGRSIDLTKFACYDELIAELDQMFDFDGELKSPCRNWLVVYTDNEGDMMLVGDDPWNEFCDMVHKIFIYTREEVERMNPGALNSRLEDCLSDSLGRGLASKEPRSGPSTSAVDSENRANLSSQ

SEQ ID NO: 5970 - protein, 319 aa, Zea mays
  unsure (1)..(319): unsure at all Xaa locations
  Clone ID: TF_ZmC488_2.pep
FRLTNFSVLSLNRVGASEFIVPYCKFLKSLNYPFSVGTRFKVGCENEDANERSFGLIIGISEVDPIHWPGSKWKSLLIKWDGATKYSHQNRVSPWDIEGVGSSVLVTHRLSSSVSKRTKLCFPPSDLDTPILDGNGRPDSVETERFHRVLQGQELVHPSIHGAACSHSSDSPRXYALQQFNLPATEVHSPSSVLMFNQTMAPHAELDGATNREEVHGSRYLSSNAIGREAEPWPSMQQQRATSAPARNAESGSVGRGAGRSNCKLFGFSLTEKILGTDGGGVKEGNYEVDRQTPRVLDLFGHGSTPGALHALCAAPLGI

SEQ ID NO: 5971 - protein, 222 aa, Zea mays
  unsure (1)..(222): unsure at all Xaa locations
  Clone ID: TF_ZmC499146_1.pep
MITFADLTEPAAAGAERCVDRQLWLACAGSMCTVPLVGASVCYFPQGHAEHALGLDGAADLSAARVPALVPCRVTAVRYMADPDTDEVFARIRLVPLRGGEAHAGGLDDDVAAADEQEKPASFAKTLTQSDANNGGGFSVPRYCAETIFPRLDYAADPPVQNVVAKDVHGXAWKFRHIYRGTPRRHLLTTGWXSTFVNQKKLIAGDSIGFLRGDSGELHVGI

SEQ ID NO: 5972 - protein, 1086 aa, Zea mays
  Clone ID: TF_ZmC2665_1.pep
MEAPGTSSGGAGGEGAGGTKVNEELWYACAGPLVALPPAGSLVVYFPQGHSEQVAASMRKDADAKIPSYPNLSSKLICILRSVTMLADPDTDEVYARMTLQPVSNVTHCDKETLLATELALKQTRPQTEFFCKTLTASDTSTHGGFSVPRRAAERIFPHLDFSVQPPAQELQARDLHDAIWTFRHIYRGQPKRHLLTTGWSLFVSGKRLLAGDSVLFIRDGRQQLLLGIRRANRQPVNLSSSVLSSDSMHIGILAAAAHAAANNSQFTVFYNPRASPSEFVIPFAKYQKAVYSNQLSLGMRFRMMFETEESATRRYMGTITGISDMDPLRWKNSQWRNIQVAWDEAAPSERRTRVSLWEVEPVIAPFFIYPSPLFTAKRPRQPGVTDDDSSEMDNLFKRTMPWFGEEVGKRDLSTQNGLVPGLSLVQWMNMQHNPSLANTVMQPELLNSLAGKPVQTLAAADLSRQISFQPQFLQQNNIQFNTSLLPPQNQQTEQLANVIATPNQLGSVIVPQKAVQNCSSEQKQNLVTQPLQVSQPMVSVAQPQLVHTQLQQPQVVLQAQPQQPQVIVQAQLQQQQPLVQNHTTIQGGLQQIQLLQQQQVQQSVQEQQQIKIQPFQVPNDANMVTQLSDQMKIQLLKALQPQQPLVMEQQKMIFDLQQQAVNSQSTAQQCSQVATQVVGLHSSSTNQYPTQQKTQPLKTFQDFPGNAVSIVKPEIVTSVGARSLHVPGGVQSMKMDEVPSSSTSPSTNNNPVILRSTPSSSKNQCLPTAAKAPQSSVVLGSTLEQGMKPCDSTQHPMVIPKLAEERPATGQDYMNNNQLDYLDTSSSATSVCLSQADGSLQQSFPPSSFNQHQPLREAVPDSEFEVTDAGNNFLFGANIDGHMEPLNEDDLLGTAFEADKYMEQMPGNGISNYISSKDSQQELSSSMISHPFGVADIAFNSIDSSINDIQFLNRNSRAPGPVQQRMRTYTKVHKRGAVGRSIDINRYSGYDELKHDVARMFGIEGQLSDQNRVGWKLVYEDHEKDVLLVGDDPWEDFVNCVRCIRILSPQEERQMRLASDYGDSFLGNQACSSSDGGRPWRVTGD

SEQ ID NO: 5973 - protein, 835 aa, Zea mays
  Clone ID: TF_ZmC1173_2.pep
LPPQLICQLHNVTMHADAETDEVYAQMTLQPLSPQELKDPFLLAELGTASNQPTNYFCKTLTASDTSTHGGFSVPRRAAEKVFPPLDFNQQPPAQELIAKDLHGNDWKFRHIFRGQPKRHLLTTGWSVFVSAKRLVAGDSVLFIWNDNNQLLLGIRRANRPQTVMPSSVLSSDSMHIGLLAAAAHAASTNSRFTIFYNPRASPCEFVIPMAKYVKAVYHTRISVGMRFRMLFETEESSVRRYMGTITGISDLDPVRWPNSHWRSVKVGWDESTAGEKQPRVSLWEIEPLTTFPMYPSPFALGLKRPWPAGLPSLYGGRGDGLTSSLMWLRDRANPGFQSLNFSGLGMSPWMQPRLDNSLLGLQSDMYQTIAAAAALQSTTKQVPPSAMQFQQPQNIADRSALLSSQILQQVQPRFQQIYPQNLNENKIQGHTQPEYLQQQLQRCQSFNEQKPPMHPQQQQQEPQQQQCVQTPQDQQMQEQKHLHNFHSLPDALSAFSQLSPATHSPPSALQTVPAFSHQQNFPDTNISSLSPSTGPSMHGMLGRLPSEAASSLPCVAINAHVSVSDPWSSKRVAVESVNPCRPHVSPQIEHLDMATCNMPQSSALAPLPGRECLVDEDGCSDPQNHLLFGVHIDSHSLLMQGGIPALQNDNSSGTIPYSTSNFLSPSDNDFPLNQPLRSAGCLDESDYLPCAENAEQANQQFATFVKVYKSGTVGRLLDITRFSSYDELRSEVGRLFGLEGQLEDPLRSGWQLVFVDREDDVLLVGDDPWQEFVNSVSCIKILSPEEVQRMGKPGIQLLSSAPSRRLGNGCDSYASMQEPRGLDAGMAPVGSVEF

SEQ ID NO: 5974 - protein, 850 aa, Zea mays
  Clone ID: TF_ZmC1113_1.pep
MTSSAAAAAAAAQVAGGGGGGEGDAAAAARGGGGTEDGMYTELWNLCAGPLVTVPRVGDKVYYFPQGHIEQVEASTNQVAEQHMQFYDLPWKILCEVMNVELKAEPDNDEVYAQLTLLPESKQPEENGSSEEMPASPPAALARPRVHSFCKTLTASDTSTHGGFSVLRRHADECLPPLDMTRQPPTQELVAKDLHGVEWRFRHIFRGQPRRHLLQSGWSVFVSAKRLVAGDAFIFLRGDSGELRVGVRRAMRQQANVPSSVISSHSMHLGVLATAWHAVNTGTMFTVYYKPRTSPAEFVVPCDRYMESLKRNYPIGMRFKMRFEGEEAPEQRFTGTIVGNVDPDQAGWAESKWRYLKVRWDEASSIPRPERVSPWQIEPAVSPPPINPLPVHRPKRPRSNAVASLPESSAPTKEAAPKVTLETQQHALQRPLQTQDNVAPKSVFGDNSELDSAHKSSLRPSGFDLDKSTIGMQRKLGSDIWMRMNRPDGYSEMLSGYQPPNEGARNSQGFCSLPDQIAAGRPNFWHTVNAHYQDQQGNHNLFPGSWSMMPSSTGFGMNRQSYPMIQEVGGMSQSCTNTKFGNGVYAALPGRGIDRYPSGWFGHTTPGGRVDDAQPRVIKPQPLVLAHGEALKMKGNSCKLFGIHLDSPAKSEPLKSPPSVATPAAEKWMADGIDADKSPEPHKTPKQLGATQVDPVPERCPQASRGTQCKSQGGSTRSCKKVHKQGMALGRSVDLTKFNGYTELVAELDEMFDFNGELKGCSKEWMVVYTDYEGDMMLVGDDPWNEFCSMVHKIFVYTREEVQRMNPGALNSRPEDSGLANSTERGSASTAAAREAPGYQSASSLNSDNC

SEQ ID NO: 5975 - protein, 203 aa, Zea mays
  unsure (1)..(203): unsure at all Xaa locations
  Clone ID: TF_LIB5046-008-R1-K1-E10.pep
MGPQPPLHLPAANGDSIVDRDVWLACAVPLSRLPAVGAEVYYFPHGHAEQCPAHLPAPLPAPHLFPCTVAGVSLGADDETNEVFAKISLSPGPHRGPAAACRTDPTSDCPPQELSYFTKELTQSDANNGGGFSVPRYCADHIFPTLDFDANPPVQKLFMRDTRGNPWQFRHIYRXTPRRHLLTXGWSRFVNAKLLVAGDIVVF

SEQ ID NO: 5976 - protein, 186 aa, Zea mays
  Clone ID: TF_ZmC2665_4.pep
MRKDADAKIPSYPNLSSSVLSSDSMHIGILAAAAHAAANNSQFTVFYNPRASPSEFVIPFAKYQKAVYSNQLSLGMRFRMMFETEESATRRYMGTITGISDMDPLRWKNSQWRNIQVAWDEAAPSERRTRVSLWEVEPVIAPFFIYPSPLFTAKRPRQPGVTDDDSSEMDNLFKRTMPWFGEEVGK

SEQ ID NO: 5977 - protein, 175 aa, Zea mays
  unsure (1)..(175): unsure at all Xaa locations
  Clone ID: TF_ZmC371412_1.pep
MKEVAEERCLDPQLWHACAGGMVQMPPVRSRVYYFPQGHAEHAHGGGAADLAGARALPSLVLCSVTGVRFLADPETDEVFAKIRLVPVAPGEVEFREPREFSVDPEDAREKLSSFAKTLTQSDANNGGGFSVPRYCAETIFPKLDYRADPPVQTVLAXDVHGKVWKFAHLPGHAA

SEQ ID NO: 5978 - protein, 203 aa, Zea mays
  Clone ID: TF_ZmC13783_2.pep
MSSSSAASIGQPPPPAPPPEEEKKCLNSELWHACAGPLVCLPTVGTRVVYFPQGHSEQVAASTNKEVDGHIPNYPNLPPQLICQLHDVTMHADVETDEVYAQMTLQPLNPQEQNDAYLPAEMGIMSKQPTNYFCKTLTASDTSTHGGFSVPRRAAERVFPPLDFTQQPPAQELIARDIHDVEWKFRHIFRGQPKRHLLTTGWS

SEQ ID NO: 5979 - protein, 675 aa, Zea mays
  unsure (1)..(675): unsure at all Xaa locations
  Clone ID: TF_ZmC1206_1.pep
AAVWATPAVTTYSGPHHDALFRQLRMACTGCMVMQRRLGELFFVFPQGCFHQRYTATXNGXNEDLRLIELPPMILCKVVNVELRAETDSDEVYAQIMLQPEADQSEPTSPDSEPPEPERCNVYSFCKTLTASDTSTHGGFSVLRRHAEECLPQLDMTQNPPWQELVAKDLHGNEWHFRHIFRGQPRRHLLTTGWSVFVSSKRLVAGDAFIFLRGENGELRVGVRRLMRQLNNMPSSVISSHNMHLGVLATASHAISTGTLFSVFYKPRTSRSEFVVSVNKYLEAKNHKVSVGMRFKMRFEGDESPERRLSGTIIGMGSMPANSTSPWANSDWRSLRVQWDEPSAILRPDRVSPWELEPLDPTNPQPPQPPLRNKRARPPASPSIAPELAPVFGFWKSPAEPAQAFSFSRPQRTQELYHSNPSSIFSSSLNVGFSSKNDRSTPINSHLYWTMRQTRTESYSASINKAPTEKKQESATSGCRLFGIEIGSAVSPVATVASVGQDQPPALSVDVESDQLSQPSHANKTDAPVASSERSPNESESRQVRSCTKVIMQGMAVGRAVDLTRLDGYDDLRRKLEEMFDIPGELSASLKKWKVIYTDDEDDMMLVGDDPWSEFRRMVKRIYIYSYEEAKSLTRKAKPPVVGDTIKPDPNKLPPESDVPHDSNNNAPVAADYQD

SEQ ID NO: 5980 - protein, 661 aa, Zea mays
  unsure (1)..(661): unsure at all Xaa locations
  Clone ID: TF_ZmC258_1.pep
MAAAMDAPNPGAAAGPGMPSDALYQELWHACAGPLVTVPRRGERVYYFPQGHMEQLEASAHHQQLDQYLPMFDLPPKILCRVVNVELRAEADSDEVYAQIMLQPEADQNELTSLDAEPQEREKCTAHSFCKTLTASDTSTHGGFSVLRRHAEECLPQLDMSQNPLCQELVAKELHGTEWHFRHIFRGQPKRHLLTTGWSVFVSSKRLVSGDAFIFMRGENGELRVGVRSLILYESNMXEIVTFSSTCTEGVXVARWENVSTGTLFSVFYKPRTSRSDFIVSVNKYLEAKKQKISVGMRFKMRFEGDDAPERRFSGTIIGIGSLPAMSKSLWADSDWRSLKVQWDEPSSILRPDRISPWEVEPLDAANPQSPQPPLRAKRPRPPASPCMVSELPSGFGLWKSPIESSCTLSFSEPQRARELFPSIPTSTLSSSSNVSFNSKNEPSMLTSQFYWSARHTRADSCAASTNTVVIEKKQEPSSGGCRLFGINICSAEEEVLPEVTAPGVGYEQTAASVELNSDKLSQPSDVNNSDALAASSERSPLESQSRQVRSCTKVIMQGMAVGRAVDLTKLSGYSDLCQKLEEMFDIQGELGSTLKKWRVIFTDDEDDMMLVGDDPWDEFCRMVKRIYIYTYEEAKKLTSKSKLPVSSDSSKLSAANSLSE

SEQ ID NO: 5981 - protein, 716 aa, Zea mays
  Clone ID: TF_ZmC965_2.pep
MAAAACAGAEAGRGCGGKDALFVELWKACAGPLSCVPPLGEKVYYLPQGHIEQVEASTNQLAEQQGTPLYNLPWKIPCKLMNIELKVEPDTDEVYAQLTLLPDKKQDENTSTTVEEEEVVVPPALPATNEGPHIHSFCKTLTASDTSTHGGFSVLRRHADECLPPLDMSQHPPNQELVAKDLHGAEWRFRHIFRGQPRRHLLQSGWSVFVSAKRLVAGDAFIFLRGENGELRVGVRRALRHQTTIPSSVISSHNMHLGVLATAWHAVNTDSMFTVYYKPRTSPAEFVVSRDRYYESLKRNYSIGMRFKMRFEGEEAAEQRFTGTIVGIGASDPSGWADSKWRSLKVRWDEPSSISRPERVSPWQIEPSVSPCHVNPLPVRFKRSRSSVNALPSDVSTVTREVTSKVMADSQQNSLTRALHNQGRTQLTVRYHDNSDVKTTQDLTVWSSGTEQQRNNIAAQTKLCLEGWTPTRSPEGYNQIFSAFKPLKDIHNPLGPFPSQISGTHSNSWDTADARYPVQQANYSMLPGTWSLRPHNSGFRMNQQNYLVMPEGANFTGKSAFTSLQDHGTDKCSTGCFGHIESSSHTDHASSSLIRPQPLVLGNGVQKSKGTSFKLFGIPLGSPEKSEPLVSPPSVAYDGKLQTSPSEKGNQLDVVEVDNCSHPSKTVKPLDGPQSDSITENNQPSPEATLNIQNKVQSSSTRSCKKVHHMLHLFPC

SEQ ID NO: 5982 - protein, 127 aa, Zea mays
  unsure (1)..(127): unsure at all Xaa locations
  Clone ID: TF_ZmC371412_2.pep
MKEAGEERCLDPQLWHACAGGMVQMPPVRSRVYYFPQGHAEHAHGGGGATDLAGARARPLPPLVLCTVAEVRFLADPETDEVFAKIRLVPAAPGEVEFGEPREFGIDPEDAREKLSSFXXTLTQSDA

SEQ ID NO: 5983 - protein, 59 aa, Zea mays
  Clone ID: TF_LIB3068-003-Q1-K1-F5.pep
LLTYLLLLLWQPMRHLLMTDWSIFVSSKRLVSGDTFIFLSVTSLHVKVVLYVTFISWLY

SEQ ID NO: 5984 - protein, 247 aa, Zea mays
  unsure (1)..(247): unsure at all Xaa locations
  Clone ID: TF_ZmC929401_1.pep
SSKRRCTGTIVGISDYEPMRWPNSKXRNLQVEWDEHGYGERPERVSLWDIETPENMVFSSPLNSKRQCLPSYGVSGLHVSSISKPQGSPFGNLQHMPGISSDIALLLLNQSAQNLGSSIACQQSSFSSIIQNAKQSYFPPTTLGASTGWNESQQQLNALGIQKGDQVSCDVQPGIDSITAPEMNVKPRVPRSTDSYSSQSISDPNSKSDPKTKTRRSKKSSSHKTISDRSEXSSVPSQICDKAEHGS

SEQ ID NO: 5985 - protein, 95 aa, Zea mays
  unsure (1)..(95): unsure at all Xaa locations
  Clone ID: TF_cC-zmle189096f07d1.pep
GGRNSGGHIXXILLTDXDTSTHGXGCVSNRAADHPPPPMDYNQLRPKKKPACQGLXHGAKWKIRHIYRGQPRKHLLTTGWSSFVKKKKLLTRDAV

SEQ ID NO: 5986 - protein, 510 aa, Zea mays
  Clone ID: TF_ZmC488_1.pep
IAKDLHGMKWRFRHIYRGQPRRHLLTTGWSSFINKKKLVSGDAVLFLRGNDGELRLGVRRAVQLKNEALLEAVNCTDSKLLMLSAVANSLDNRSIFHICFNPRVGASEFIVPYCKFLKSLNYPFSVGTRFKVGCENEDAKEAHASVIIGISEVDPIHWPGSKWKSLLIKWDGATKYSHQNRVSPWDIEGVGSSVLVTHRLSSSVSKRTKLCFPPSDLDTPILDGNGRPDSVETERFHRVLQGQELVHPSIHGAACSHSSDSPRCQGSYGRRFSADVWNCKMNDVMSGPRHLNATGFAYQPLGFSESVKFSEVLQGQEMSQAVPSFMRSAFNSGTQNGRVRPFDYVQRSDATQGYALQQFNLPATEVHSPSSVLMFNQTMVPHAELDGATNREEVHGSRYLSSNAIGREAEPWPSMQQQRASVNGSEPLDTTEASAPARNAESGSVGRGAGRSNCKLFGFSLTEKILGTDGGGVKEGNYEVDRQTPRVLDLFGHGSTPGALHALCAAPLGI

SEQ ID NO: 5987 - protein, 779 aa, Zea mays
  unsure (1)..(779): unsure at all Xaa locations
  Clone ID: TF_ZmC2734_1.pep
PLVSLPAVGSRVVYFPQGHSEQVAASTNKEIESQIPNYPNLPPQLICQLHNVTMHADAETDEVYAQMTLQPLNPQELKDPYLPAELGSANKQPTNYFCKTLTASDTSTHGGFSVPRRAAEKVFPPLDFTQQPPCQELMAKDLHGNEWKFRHIFRGQPKRHLLTTGWSVFVSAKRLVAGDSVLFIWNDNNQLLLGIRRANRPQTVMPSSVLSSDSMHIGLLAAAAHAASTNSRFTIFYNPRASPSEFVIPLVKYVKAVYHTRISVGMRFRMLFETEESSVRRYMGTITGICDLDSVRWPNSHWRSVKVGWDESTAGERQPRVSLWEIEPLTTFPMYPSPFPLRLKRPWPTGLPSLHGGKDDDLANSLMWLRDTANPGFQSLNFGGLGMSPWMQPRLDATLLGLQPDMYQAMATAAFQDATKQASPTMLQFQQPQNIAGRASPLLSSQILQQAHHQFQQQPYLQNISESTIQAQGQSEFLKQQIQRSQSFNEQKPQMQHQQESQQQQQPXVCQFPQTSANATNRIMTNYQSISNALSPFSSYHELRRELGRLFGLEGQLEDPLRSGWQLVFVDREEDVLLVGDDPWQEFVSTVSCIKILSPQEVQQMGKQGLELLSSAPARRLGSSCDDYVSRQESRSLSTGIASVGGIPGLQNGNDSAAIPYSTYNFLSPSQNDFPLDHTLNSSGCLDDSGYVPPCSDNSDKVNRPPATFVKVYKSGTYGRSLDITRFSSYHELRRELGRLFGLEGQLEDPLRSGWQLVFVDREEDVLLVGDDPWQEFVS

SEQ ID NO: 5988 - protein, 60 aa, Zea mays
  Clone ID: TF_LIB3245-008-P2-N1-H10.pep
PDRAAARCFPAEFCPQLVSEAADMAEAGVARGSGSAGDDLFTELWHACAGPVVTVPRQGE

SEQ ID NO: 5989 - protein, 195 aa, Zea mays
  unsure (1)..(195): unsure at all Xaa locations
  Clone ID: TF_LIB3959-021-Q1-K6-B1.pep
XGDDGELRLGVRRAIQLXNEALFDDFSCDSTKRHTLLAVADSLKHKSVFHISYNPRATASEYIIPHHKFLKSLNLPFCIGARINLQCHNEDVSERRSGMVVHVSEIDPMKWPGSKWRSLLVRWEDGVECNGQDRVSPWEIEIAGGSVSVAHSLSASSSKRTKLCPQGNLDVPTMYVTGNGNGCTDSVETGKFPRS

SEQ ID NO: 5990 - protein, 677 aa, Zea mays
  Clone ID: TF_ZmC1206_6.pep
MAEAGVARGSGSAGDALFRELWHACAGPLVTVPRQGELVYYFPQGHMEQLEASTDQQLDQHLPLFNLPHKILCKVVNVELRAETDSDEVYAQIMLQPQTEQSEPTSPDPEPPEPERCNIHSFCKTLTASDTSTHGGFSVLRRHAEECLPQLDMTQNPPWQELVAKDLHGNEWHFRHIFRGQPRRHLLTTGWSVFVSSKRLVAGDAFIFLRGENGELRVGVRRLMRQLNNMPSSVISSHSMHLGVLATASHAISTGTLFSVFYKPRTSRSEFVVSVNKYLEAKNHKMSVGMRFKMRFEGDESPERRFSGTIIGMGCMPANSTSPWANSEWRSLKVQWDEPSAILRPDRVSPWEVEPLDRTNPQPPQPPLRNKRARPPASPSIAPELAPVFGFWKSPAEPAQAFSFSGLQRTQELYHSSPSSMFSSSLNVGFNPKYEGPTPNTNHLYWTMRETRTESYSASINKAPTEKKQESTTSGCRLFGIEIGSSAVSPVVTVASVGHDPPPPALSVDAESDQLSQPSHANKAMDAPAASSDRSPNETESRQARSCTKVIMQGVAVGRAVDLTRLDGYDDLRRKLEEMFDIPGELCASIKKWKVIYTDDEDDMMLVGDDPWSEFCRMVKRIYIYSYEEAKSLTPKAKLPAIGGDTGVKPDPSKLPPESDVPQSDSDNSAPVAADKD

SEQ ID NO: 5991 - protein, 213 aa, Zea mays
  unsure (1)..(213): unsure at all Xaa locations
  Clone ID: TF_ZmC1249_3.pep
MPPAAMALPSQAPSNSGDPLYPELWRACAGPLVTVPRVGDLVFYFPQGHIEQVEASMNQVAGNPMRLYDLPSKLLCRVLNVELKAETDTDEVYAQIMLMPEPEQNDVAAEKTSSGSAAPPRPAVRSFCKTLTASDTSTHGGFSVLRRHADECLPALDMSQSPPTQELVAKDLHGMEWRFRHIFRGQPRRHLLQSGWSVFVSSXRLXAGDAFIF

SEQ ID NO: 5992 - protein, 345 aa, Zea mays
  Clone ID: TF_ZmC9734_2.pep
WPNSPWRLLQVAWDEPDLLQNVKRVSPWLVELVSSTPAIHHLTPFSPPSRKKLCIPLYPEGHQLPAPMFHGSPLVGRGVGPMRYFPDGGTPPAGIQGARHAQFGICLPDLHHLTRLQSSLSPHAHGLRHQLDHGARPRIAGGLIVGHPAARDDISCLLTIGTAPHKKPSDVKSAAAAPAPQLMLFGKPILTEQQISLGFRPLPAPKKSPSGDVAETEITMSNNSDASSPAGTGSGSTPSISGGAPSSCQDNKAAATATDDDDLLGHCKVFMQSEDVGRTLDLSAVASYEELYQRLADMFGVDRAELTSHVFYRDGASGALKHAGDEPFSEFTKTARRLTILTDAR

SEQ ID NO: 5993 - protein, 213 aa, Zea mays
  unsure (1)..(213): unsure at all Xaa locations
  Clone ID: TF_LIB5117-056-Q2-PF1-A3.pep
MPPAAMAPPQAPSAGDPLYDELWHACAGPLVTVPRVGDLVFYFPQGHIEQVEASMNQVAGNQMRLYDLPSKLLCRVINVELKAEADTDEVYAQVMLMPEPEQNEMAVDKSTSTTGATPPRPAVRSFCKTLTASDTSTHGGFSVLRRHADECLPPLDMTQSPPTQELVAKDLHGMDWRFRHIFRGQPRRHLLQSXWSVFVSSKRLVTGDAFIFL

SEQ ID NO: 5994 - protein, 669 aa, Zea mays
  Clone ID: TF_ZmC1206_4.pep
MASAGVAGCSGSAGDALFRELWHACAGPLVTVPRQGELVYYFPQGHMEQLEASTDQQLDQHLPLFDLPPKILCKVVNVELRAETDSDEVYAQIMLQPEADQSEPTSPDSEPPEPERCNVYSFCKTLTASDTSTHGGFSVLRRHAEECLPQLDMTQNPPWQELLAKDLHGNDWHFRHIFRGQPRRHLLTTGWSVFVSSKRLVAGDAFIFFRGENGELRVGVRRLMRQLNNMPSSVISSHNMHLGVLATASHAISTGTLFSVFYKPRTSRSEFVVSVNKYLEAKNHKMSVGMRFKMRFEGDESPERRFSGTIIGLGSMPANSTSPWANSDWRSLKVQWDEPSAILRPDRVSPWELEPLDATNPQPPQPHLRNKRARPPALLSIAPELPQVFGFWKSPAEPAQAFSFSRPQQTQELYHSNPSSIFSSSLNVGFSSKNDRSTPINSHLYWTMRQTRTESYSASINKAPTEKKQESATSGCRLFGIEIGSAVSPVATVASVGQDQPPALSVDVESDQLSQPSNANKTDAPVASSERSLNESESRQVRSCTKVIMQGMAVGRAVDLTRLDGYADLHRKLEEMFDIQGELSANLKKWKVIYTDDEDDTMLVGDDPWNEFLRMVKRIYIYSYEEAKSLTRKAKPPVVGDTIKPDPNKLPPESDVIKQQCSVAADYQD

SEQ ID NO: 5995 - protein, 113 aa, Zea mays
  Clone ID: TF_LIB4172-034-R1-L1-A5.pep
IRHEVRFRMLFETEESSVRRYMGTITEVSDADPVRWPSSYWRSVKVGWDESTAGERPPRVSLWEIEPLTTFPMYPSLFPLRVKHPWYSGVAALHDDSNALMLLRGSCCEGGFQ

SEQ ID NO: 5996 - protein, 686 aa, Zea mays
  Clone ID: TF_ZmC1284_1.pep
MAQGAGRDPEELFEELWRACAGPLVELPQTNERVFYFLQGHLEQLQEPTDPALLAEQIKMFQVPNKILCKVVNVELKAETETDEMYAQITLQPEPDQVDLPQLPEPPLQETSRPVVHSFCKILTPSDTSTHGGFSVLRRHANECLPALDMSMPTPTQELITKDLHGSEWRFKHIYRGQPRRHLLTTGWSTFVTSKKLIAGDAFVYLRSETGQQRVGVRRLVQKQSTMPASVISSQSMHLGVLASASHAIRTHSIFLVYYRPRLSQSQYIVRLNKYLESSKIGFDVGMRFKMSFEGDDVPIKKFSGTVVDKGDLSPQWQGSEWKTLKVKWDEATNLNGPERVSSWEIEPFDASAPAITMPVQPSMKNKRPRETAEGLDIHALEPAQEFWLSGRPEQHEKTSVSSSEPKHQVAWTSERAGYSAMSSSICQNSAVTGSWFKGFNSSGSHPSLPEISQKLFQVTSNDARVPPWPGLSAYHADEPSSKLSCNTALCSYQTEEVAPRFSNAVEEEKKEPGMFRLFGVNLINHARSSATADKASVGAGEASARAAGSFEDSAQLSRVTKDHTHMVNGSPREIQSHQSCSGRSRIKVQMHGNDVCRAVDLGNLDGYEQLMGEVGVMFEIKDLGSKEKEEWKVTFTNDENETMEVGAVPWQEFCQMVRKIVIHSIGDRGHMEACPCLGQDGKRDY

SEQ ID NO: 5997 - protein, 153 aa, Zea mays
  Clone ID: TF_ZmC1206_11.pep
MAEAGVARGSGSAGDALFRELWHACAGPLVTVPRQGELVYYFPQGHMEQLEASTDQQLDQHLPLFNLPHKILCKVVNVELRAETDSDEVYAQIMLQPQTECNSRERTTTTAAAASATGATSTSCPRFTTQAAPLHNRRHWNRLRYRNFPREQL

SEQ ID NO: 5998 - protein, 806 aa, Zea mays
  Clone ID: TF_ZmC1249_2.pep
MPPAAMALPSQAPSNSGDPLYPELWRACAGPLVTVPRVGDLVFYFPQGHIEQVEASMNQVAGNPMRLYDLPSKLLCRVLNVELKAETDTDEVYAQIMLMPEPEQNDVAAEKTSSGSAAPPRPAVRSFCKTLTASDTSTHGGFSVLRRHADECLPALDMSQSPPTQELVAKDLHGMEWRFRHIFRGQPRRHLLQSGWSVFVSSKRLVAGDAFIFLRGENGELRVGVRRAMRQLSNVPSSVISSQSMHLGVLATAWHAINTKSMFTVYYKPRTSPSEFIIPYDQYMESVKNNYSIGMRFRMRFEGEEAPEQRFTGTIVGCENLDPLWPDSSWRYLKVRWDEPSTIPRPDKVSPWKIEPASSPPVNPLPLSRGKRPRQNAPPPSPESSVLTKEGATKIDTDSAQTPHQNSVLQSQEQMSFRNNLTESTDSDSTVQKQMMWSPSPNGKVHTNFQPRPAMDNWMPLGRRETDFKDTRSAFKDARTASQSFGDTQGFFMQAYDDSRHRLSFNNQFQDQGSAHRFADPYFYMPQQPSLTVESGTRTQTANNDLRFWSERNSMYGNPSDQQQGFSFGQNTSSWLNQPLPQVEQSRVVRPHATVAPFDLEKTREGSGFKIFGFQVDTTNPSPVQLSSPLSAIREHVVQTRPSAPVNELQPVQIECLPEVSVSTAGTAAENIQQVQQSSKDIQSKSQGASTRSCTKVHKQGVALGRSVDLSKFTDYGELKAELDKMFEFEGELVSANRNWQIVYTDNEGDMMLVGDDPWEEFCNIVRKIYIYTKEEVQKMNSKSSVPRKEEPPAAGEGCAAAAANE

SEQ ID NO: 5999 - protein, 76 aa, Zea mays
  unsure (1)..(76): unsure at all Xaa locations
  Clone ID: TF_ZmC172363_1.pep
MGIDLNMADGESQERRPPPAVCRELWHACAXPVVALPRRGSLVVYLPQGHLSAAGGGHVAVDLPXHVACRVADVEL

SEQ ID NO: 6000 - protein, 727 aa, Zea mays
  unsure (1)..(727): unsure at all Xaa locations
  Clone ID: TF_ZmC13783_1.pep
YCGGFHVGISSSKSILVCGRLERRSLLCRTKIFGLKSVAETDLCKTLTASDTSIHRGFSVPRRAAERVFPPLDFTQQPPAQELIARDIHDXQSQCRHVFMTQCXRALHRTGWSVFVSAKRLVAGDSVLFIWNEKNQLLLGIRHATRPQTVMPSSVLSSDSMHIGLLAAAAHAAATNSRFTIFYNPRASPTEFVIPLSKYIKAVFHTRISVGMRFRMLFETEESSVRRYMGTITEVSDADPVRWPSSYWRSVKVGWDESTAGERPPRVSLWEIEPLTTFPMYPSLFPLRVKHPWYSGLAALHDDSNALMWLRGVTGEGGFHSLNFQSPGIGSWGQQRLHPSLLSNDHDQYQAVVAAAAASQSGGYLKQQFLHLQQPMQSPQEQCNLNPLLQQQILQQASQQQMVSSDAQNIQSVLNPGAIQQQLHQLQQMQHTHNDQKQKIQPDQQYQVASSAVLPSPTSLPSHLREKFGFSDPNVNSSSFISSSSNENMLESNFLQVSSKSVDLSRFNQPVVSEQQQPQQQQAWKQKFMGSQSMSFGGSVSLNSPTSKDGSVDNKVGRDVQNQSLFSPQVDSSSLLYNMVPNLTSNVADNNISAFPSGSTYLQSPMYGCLDDSSGLLQNTGENDPTTRTFVKVYKSGSVGRSLDITRFSNYAELREELGQMFGIKGQLDDPDRSGWQLVFVDRENDVLLLGDDPWESFVNSVWYIKILSPEDVHKMGKPGNDPRYLS

SEQ ID NO: 6001 - protein, 69 aa, Zea mays
  Clone ID: TF_ZmC12351_2.pep
EAEEHKCLNSELWHACAGSLVSLPAVDSRVMYFLQGHSEQVTLLPWTSYCQKLDMNIAEFIWMLIMSRT

SEQ ID NO: 6002 - protein, 274 aa, Zea mays
  unsure (1)..(274): unsure at all Xaa locations
  Clone ID: TF_ZmC1126_1.pep
IRHEAFVDSAAMERERESDRCLDPQLWHACAGGMVQMPAVHSKVYYFPQAASEHAQGPVXLPAGRVPALVLCRVAAVRFMADPDTDEVFAKIRLAPVRPNEPGYADDAIGAAAASGAQEDKPASFAKTLTQSDANNGGGFSVPRYCAETIFPRLDYSADPPVQTVLAKDVHGVVWKFRHIYRGTPRRHLLTTGWSTFVNQKKLVAGDSIVFMRTENGDLCVGIRRAKKGGIGGPEFMHHHHQQPPPPQGGGYAGFSMFLRGEEDGGKMMAAAAP

SEQ ID NO: 6003 - protein, 92 aa, Zea mays
  Clone ID: TF_LIB3594-048-Q1-N7-A7.pep
LCLIYQGPTRRDAAALDPELLQLVELAPGALRENSIADVLYSQWLVLPETTKLLGSTAIGLKTKDGVVLAIEKRVTSPLLVLSHFLSGHSVK

SEQ ID NO: 6004 - protein, 931 aa, Zea mays
  Clone ID: TF_ZmC7095_1.pep
MATCKAPAAIAAQSFSSPHLGVLAPRSYWLVGGNMNLSPPKMSEPSPESDGEQRCLNSELWHACAGPLVSLPVVGSRVVYFPQGHSEQVAASTNKEVDAQIPNYPNLPPQLICQLHNVTMHADAETEEVYAQMTLQPLSPEEQKDPFLPIELGAGSKQPTNYFCKTLTASDTSTHGGFSVPRRAAEKVFPPLDFSQQPPVQELVARDLHDNEWKFRHIFRGQPKRHLLTTGWSVFVSAKRLVAGDSIIFIWNDNNQLLLGIRRASRPQTVMPSSVLSSDSMHIGLLAAAAHAAATNSRFTIFYNPRASPSEFVIPLAKYVKAVYHTRVSVGMRFRMLFETEESSVRRYMGTITGISDLDSERWPNSHWRSVKVGWDESTAGDKQPRVSLWEIEPLTTFPMYPTAFPLRLKRPWASGLPMFNGGRSDEFARYSSLMWLRDGNRGAQSLNFQGLGASPWLQPRIDYPLLSLKPDTYQQMAAAALEEIRAGDHLKQASSLLPVQQTQTLNGGLDHLYGNPVLQQMQFQSQQSTLQAVQQGYGQNANDSGYVQNQLQQLQLQKQQEPPPPQQQQQTQVLQRQAHQEMQQHLSASCHDIANVASGVSMSGSACQSQSSLLSGSSFYQQNIFDGNGGPDLHLHNSFHNFSSQESSNLLNLPRSGQLMASEGWPSKRLAVESLAGHEIQPLQHKLEKVSHQSTVSHCSGTLPPLSARDGSSAQACGTNVQSHLLPSSFAIHDGLSTIRSGGVGSGTDAITIASLRYSDANLLPENSIATSSCLGESGTFNSLDDVCGVNPSQGGTFVKVYKSGSLGRSLDITRFGSYYELRVELERLFGLEGQLEDPARSGWQLVFVDRENDVLLLGDDPWQEFVNSVGCIKILSPQDLQQMARGGGGDLLSAPGARMLQGSVCDDYSAGHDVQNLTGSIAPVVPLDY

SEQ ID NO: 6005 - protein, 806 aa, Zea mays
  unsure (1)..(806): unsure at all Xaa locations
  Clone ID: TF_ZmC1249_1.pep
MPPATAMAPPSQPPSNSGDPLYPELWRACAGPLVTVPRVGDLVFYFPQGHIEQVEASMNQVAGNQMRLYDLPPKLLCRVLNVELKAETDTDEVYAQIMLMPEPEQTDVPAEKPSSAPAASPRPAVRSFCKTLTASDTSTHGGFSVLRRHADECLPPLDMTQSPPTQELVAKDLHGMEWRFRHIFRGQPRRYHDQIVWRKPTMMHXDEPVPCAGGGASPGPREVKTPXDLLLVRCSPIPSPFASQRMHLRVLATAWSAKNTXKSMCTVYYKPRTSPSEFIIPYDQYMESVKKNYSIGMRFRMRFEGEEAPEQRFTGTIVGCENLDPLWPDSSWRYLKVRWDEPSTIPRPDRVSPWKIEPASSPPVNPLVHSSRAKRPRQNVPPPSLESSVLTKEGATKVEIDSAQTQHQNSVLQGQEQMTLRNNLTESADSDSTVQKPMMWSPSLNGKAHTHFQQRPAMDNWMPLGRRENDFKDTRSAFKDARTASQSFGDTQGFFVQAYDDNHHRLSFKNQGSTHRFADPYFYMPQQSSVTVESSTRTQTANNDLCFWGDQNAMYGNPSDQQQGFNFGQNPSSWLNQPFPQVEQPRVVRPHATVAPFDLEKTREGSGFKIFGFQVDTTSPSPVQLSSPLPAIQEHVLQTRPSAPVNELQPVQIECLPEGSVSTAGTATENIQQAPQSSKDIQSKSQGASTRSCTKVHKQGVALGRSVDLSKFTDYGELQAELDKMFDFEGELVSGSQNWQIVYTDDEGDMMLVGDDPWEEFCSIVRKIYIYTKEEVQKMNSKSAAPRKEESPAAGGGGGCAAATNE

SEQ ID NO: 6006 - protein, 466 aa, Zea mays
  unsure (1)..(466): unsure at all Xaa locations
  Clone ID: TF_ZmC490_1.pep
MSQQQGVEEPPPAPLPAAEGEAQPAADIPMSEAAAVEDEEEEPVVGEGEDGADGAADAVDSVNASAKPEAEGAEEGGSDREERNGGPTADLVGEVVKLENGDGPVTVGGSVDEGRGGDGGDDKGLAGQNQPAVNQLLLAPAEEDLALSKISDNSFMFDYTTGGDDSGTEEEQAAFMKELERFHREKMLEFKPPKFYGEGLNCLKLWRQVTGLGGYDQVTSCKLWRQVGESFKPPKPCTTVSWNFRNFYQKALLEYGVHKIDTRKYLVAPFHLPRLLGGWGLFGGSMRSESGSPTIANXRALLIASLLDASVLMLDCIKLNSLVDVVLCVCGIELLKAVVLPRKKGHHALKXDIGIPYKSYKLQKDSMDIDMGPLADWVKINVRKTKDCYEVYALVPGLLREEVHVQSDPAGRLIVTGEPEQLDNPWGVTPFKKVIRLPSRIDPHQTSAVVTLHGQLFVRAPFEQSK

SEQ ID NO: 6007 - protein, 598 aa, Zea mays
  Clone ID: TF_ZmC5175_1.pep
WFLKYSICSTTFQLAHASFRLYCVRNSHVQSVKLGPRLLGDAPKINISPPETEMVDEEGSSEVTPALKLYDEEINMKLLLCGVPCTLIRGSKLQNRISASPPPLEAASLPRGMVTMRCDISTCSSSHVSLLVSGSAQTCFDDQLLESHIKNEIIEKSQLVRALSNSEDKLPSSEPLTSMSTACGASTFEVWMSLPKWAAQVLKHLAPDISYRSLVALGIGCINGTPVASFERRDADRLLFFCTSQCKDLANENGPYFHLPRWSASLTKDRTKLGSESKQNLLGANGVLEDKKHMMEGPSSWSAVKAKLKPATMRPIPHSRKQQMHPFMGFPETSLHETSIVKPSLPAAPTVKHNSVSSATTTHRKSTSGPSHTPSVIQLNPLPMKKHGCDRLPIQVCSEEDFLKDVMQFLIQRGHNRLVPHGGLAEFPDAILNAKRLDLYNLYKEVVSRGGFYVGNGINWKGQVFSKMRNHTATNRMTGVGNTLKRHYETYLLEYELAHDDVDGECCLLCHSSAPGDWVNCGLCGEWAHFGCDRRQGLGTFKDYAKTDGLEYICPHCSLANYKKKPPPPKAANVSLVWINQTFDATARKCEVLKLLAQ

SEQ ID NO: 6008 - protein, 530 aa, Zea mays
  unsure (1)..(530): unsure at all Xaa locations
  Clone ID: TF_ZmC5175_2.pep
MKLLLCGVSCTLDPCLLGSLEDGLNALLNIEIRGSKLQNRISASPPPLEAASLPRGMVTMRCDITTCSSSHVSLLVSGSAQTCFDDQLLESHIKNEIIEKSQLVRALSNSEDKLPSSEPLTSMSTACGASTFEVWMSLPKWAAQVLKHLAPDISYRXFXLHLXIGCINGTPVASFERRDADRLLFFCTSQCKDLANENGPYFHLPRWXPPLPRTEQSLGSESKQNLLGANGVLEDKKHMMEGPSSFSAVKAKLKPATMRPIPHSQKQQMHPFMCLPETSFHETSIVKPSLTVAPTVKHNSVSYAPTTHRKSTSGPSHTPSVIQLNPLPMKKHGCDRLSIQVCSEEDFLKDVMQFLIQRGHNRLVPHGGLAEFPDAVLNAKRLDLYNLYKEVVSRGGFYVGNGINWKGQVFSKMRNHTATNRMTGVGNTLKRHYETYLLEYELAHDDVDGECCLLCHSSAPGDWVNCGLCGEWAHFGCDRRQGLGTFKDYAKTDGLEYICPHCSLANYKKPPLPPKVANGFSNTAYVPRSV

SEQ ID NO: 6009 - protein, 246 aa, Zea mays
  Clone ID: TF_LIB4978-057-A1-K1-D3.pep
MDKYKLNDNSKTFINELFNFWGQRGVTNLKIPQIGGRELDLMHLYKAVCKRGGFHRVCSNKLWKEIVLEFGLPRTCTSASFTLRNHYQKYLLAYEQKFFFGRNEEVEYPEVQGARPRKVVRPVEEEPKFIALEIAPRNQSIENVLNGMYQNIPDNSEILYLRKYKTVPVVSEMSRILLAFESHMQEETTFALNSLLLYSCNAHFHLEYHPTLLDTLFVYVENIIKDVPYYKKSISRQTKKKTRRCS

SEQ ID NO: 6010 - protein, 478 aa, Zea mays
  Clone ID: TF_ZmC8963_1.pep
MSDPRGHAAGPDRDGDDPLAEDANSEEAWQTPEKEPVAVSKEAAARGGDTTPDAEPESDDGEGGVGSPDQMEPNADGERAPPVAAAEDPEGIVGSAKVETNGEDAISLDADGEEEDDDDDGDEEEEEEDDDDDDSTPDASPRAEVKVEGESSTGMTQSGAGHRVEVEPDPFLDGDDSGTEEEQGAFMAELERFHREHSLEFKPPKFYGKGLNCLKLWRQVAHLGGHEQVTVCKLWRQVGETFRPPKTCTTVSWSFRIFYEKALLEYEKHKVRTGQLQIPPPGLPQPSGADREVVVNQSSSARVRRDAAARAMQGWHAHRLLTNGTYGDNILKDKDTMPLPNRDKNLSFGVLKRKKASSPEYALKSSRSKTNKSQEDSMVVDVGEPADWVKINVRQTKDCFEVYALVPGLLREEVHVQSDPAGRLVITGDPEQPDNPWGITPFKKVVNLPSRIDPHQTSAVVTLHGQLFVRAPFGHPDM

SEQ ID NO: 6011 - protein, 448 aa, Zea mays
  Clone ID: TF_ZmC50242_2.pep
MTEPAPAAAAEEKRAVADTAAAVVAKGKEKEEAAPTLAAGARGRFVAYPARVTEHTDVVADAARFRAALEGLHAHMNTRLKVPPTRPKDLDLHQLYKEVTSRGGIDKLKAENRWREVTASFIFPATATNASFMLKKYYMSLLYHFEQLYFFRVQGWYQQEIDSRTNSSIEVKTEAQAYHKRKRGINASLSGPASSSDNVDVDVIVDGKFEHGYIITVIMGSKSTKAILYNCTEEPALPTSELAVASNNNDLKGGRRRRRRKKKLSTTDPRHPKPNRSGYNFFFQDQHRMLKPQCPGQDRLISKMIGERWNNLSPEDKAVYQERGVQDKERYRTQLAAYRKLTGQPISNAVPIEQRLPLTDVTIDEVDSKVSEGDMLLSNQAYSSSDESDHSGEKTVEDELNTETSPEVSMETTGSLRHPDPCADEDHFELRRRENPKADEKYNAPPDS

SEQ ID NO: 6012 - protein, 270 aa, Zea mays
  Clone ID: TF_ZmC27538_1.pep
MDPVTASIHGHYLPPPFNTRDFHHHLQQQQQHHHHQQHLQLKTEDDHGGGAPGLFGDRGTQGDHENNDENSGNSNGSGGGELALVPPSGGGGPEGGDATPRRPRGRPAGSKNKPKPPIIITRDSANTLRTHVMEVAGGCDISESVTAFARRRQRGVCVLSGAGTVTNVTLRQPASQGAVVALHGRFEILSLSGSFLPPPAPPEATGLTVYLAGGQGQVVGGSVVGALTAAGPVVVMAASFANAVYERLPLEDDDLLAAHQAPQAQADGVL

SEQ ID NO: 6013 - protein, 160 aa, Zea mays
  Clone ID: TF_LIB3069-002-Q1-K1-B12.F2.pep
QGGVFSHTGPGFSDFFWSPPGPPAAYLFFHVPLRRVGAPLNEFWVLAPHFWYMAPAGWGPPPLGGVLPRETTVVALPPLGACVLPWGGGALSLSPVARGGFFWGGGALFGSYLSPVVAGAPSPLFWGGVAPLFFSFFFWCPVFFSSAGPFRAGAGPFPLF

SEQ ID NO: 6014 - protein, 596 aa, Zea mays
  Clone ID: TF_ZmC139_1.pep
MVAAVASPSSAAPSAGRPHPTYKEMIMQALTELRDPSGSSRSAIASYIADHFSGLHSRHDALLSVHLRSLKSHGQLRLVSGNYFVSTAAQRQGRGSNIPPNPKPAPGQKRGRGRPRKHADSAPSASTPAFQGAKRGRGRPRKRKSAQDPVASSPSPSPLQGASVPPPPSGVKRGRGRPRKDALVPPPSSSSPLLGGIDPPPPSGIKTGRARPRKALVPVRSSFSELLGAVVLPPPSGVKRGRGRPRKSAYPAVAPLVGAEKGPAGGQPQRNTTPLSPTPATMSHSGKSETVRLPKVAVDISALRGSSMNISASSNSLVGAKRGRGRPPKVVVAGKEKMQQPESVQSVDASLTKRGRGRPRKEKALESGRMKASQMTEGQREALTADQAGAVQNEVEDRDLQSLGTPLTEKRGRGRPRKRPLEIETAKAGAAKRGRPRKEKTSETGDLKVAQMTEGRHEALPAQAVDQTGPVQNEVEAMILQSLATTPLMEKRSRGRPRKRPLETETAETQVAASVEKRGRGRPRKKNPSAGWSAGTRDTALKGIKRGPGRPRKARPFETESVKTALEVSRDLTEDGPQKDGDLVSGKKADTHGVVW

SEQ ID NO: 6015 - protein, 141 aa, Zea mays
  Clone ID: TF_LIB3637-199-Q1-N6-F3.pep
PGSYRPPFTRSCYPSGYGWGFSGSSPGSVKGVPGVGSFCCFSRGFPLFSPVLGSMVVAFSWASAVLFLPAGPFGVFAPGGFPLFLPRFFFASPPPPFFCGAPPPLPPFCPRCLRVAGLWSFPCFSPLFSSPGWKANFPPNG

SEQ ID NO: 6016 - protein, 107 aa, Zea mays
  Clone ID: TF_LIB4172-013-Q1-L1-E6.pep
MSESGSKSSQPLASKQEKDGTEKRGRGRPRKQPPVSPGTALVGSQKEPSEVPTPKRPRGRPKGSKNKGAAKTRKVTTAPGRKPRGRPKKLEKEEEEGISQESSEEEQ

SEQ ID NO: 6017 - protein, 161 aa, Zea mays
  unsure (1)..(161): unsure at all Xaa locations
  Clone ID: TF_jC-zmXLIB3526P032bf12a1.pep
LRFLASRSKAEVVDMLRKHTYFDELAQNKRAFAAASAATASSLANNPSSYASLSPATATAAAAAAREHLFDKTVTPSDVGKLNRLVIPKQHAEKHFPLQLPSAGGESKGVLLNLEDAAGKXVWRFRYSYWNSSQSYVLTKGWSRFVKEKGLQAGDVVGFYR

SEQ ID NO: 6018 - protein, 81 aa, Zea mays
  Clone ID: TF_ZmC4844_3.pep
VVIDFCNVSPSHWDKSKRRITSLRPRVNGGKEERKTLEVRLSSEQVVHVLRPPPPPQPVVFGWLSPAAHCILKNIRSLFVL

SEQ ID NO: 6019 - protein, 67 aa, Zea mays
  unsure (1)..(67): unsure at all Xaa locations
  Clone ID: TF_uC-zmroteosinte109f10b3.pep
DFVGKVWWLRYWYCNSCQSYFLTKGWSRFIKEKGLQAGXVFRYYRSSVGAYSMLFIDLQACDSAEHS

SEQ ID NO: 6020 - protein, 119 aa, Zea mays
  Clone ID: TF_LIB3245-012-P2-N1-F3.pep
MHAYVSSEFGSRAPQTKPAPAGARQDDIHHRLAAASDKRQGAKADKNLRFLLQKVLKQSDVGSLGRIVLPKKEAEVHLPELKTRDGISIPMEDIGTSRVWNMRYRFWPNNKSRMYLLEN

SEQ ID NO: 6021 - protein, 162 aa, Zea mays
  unsure (1)..(162): unsure at all Xaa locations
  Clone ID: TF_jC-zmXLIB3526P032be12a1.pep
CFCFLCVPLQGSRFVDMLRMHTYLCELTHNKMRLRRRDAVTRWSLAYNPYLLRVRYTRGPRWEEPSPARETPVXTQKVTIGDKRKQNRLVIPKHHAEKHLQLQIPSVGDESNGALLNLEDEQGKVWRLHYSHWNSRQSYLLTNGWSQWVKENGLQPGDVVGL

SEQ ID NO: 6022 - protein, 264 aa, Zea mays
  Clone ID: TF_ZmC1903_2.pep
MATNHLSQGQHPQAWPWGVAMYTNLHYHHQQHHHYEKEHLFEKPLTPSDVGKLNRLVIPKQHAERYFPLSSSGAGDKGLILCFEDDDDEEAAAANKPWRFRYSYWTSSQSYVLTKGWSRYVKEKQLDAGDVVRFQRMRGFGMPDRLFISHSRRGETTATAATTVPPAAAAVRVVVAPAQSAGSDHAAAAAVALEPNVLQHIGLVLVPPPAAQPIPSMPTTATQLTMTTATTCNMQENLSPTETTGAAVQLRHRRHRRGGSGCSA

SEQ ID NO: 6023 - protein, 369 aa, Zea mays
  Clone ID: TF_ZmC4844_1.pep
MGQMGGPDGDGDGGAGPHHQYHYQALLAAVQNPSQGLHPFPLPFHVPLHAGAGAPAAGPGPGADADASTHNANAAHHSQPPRGFTDWSASNSAFAAVASQPAPATTNTPFHYNLSQSYALWTHYMLNKNVSYSTYPTPHEEHPHPLRHTHIQENPHPLRHTHIPDKDSGCASSLGFDSFTTMSLGPNICSHMTPMEGSISAKEPENSEDLPAIVRSSDEMDTRNSGKVHRDTVGTLPESKQSHESCASVNNKFNSGEYQVILRKELTKSDVANSGRIVLPKKDAEAGLPPLVQGDPLILQMDDMVLPIIWKFKYRFWPNNKSRMYILEAAGEFVKTHGLQAGDALIIYKNSVPGKFIIRGEKSIQQTNP

SEQ ID NO: 6024 - protein, 304 aa, Zea mays
  Clone ID: TF_ZmC1903_1.pep
MATHHLAQGHPQAWPWGMAMYTNLHYHHHHHHQQYYEREHLFEKPLTPSDVGKLNRLVIPKQHAERHFPLGGGDGDGNEKGLLLEFDDEAGRPWRFRYSYWVSSQSYVLTKGWSRYVKEKRLDAGDVVRFDRVRGVGPPVRLFLCSPAARRSGPRRVIPTPPGARRASSSSSSRGAPPCATARRGRRTRPAPLAPLTPTTSTRHTQAQARRTPRAAAARLLQEQRRRGSSGCSASTSTAARSRSRRRRRRQCTATDTCTRVPTQQCPQFPATGNEQARSEGTTPRSFSRITRTVLLLAEADRAN

SEQ ID NO: 6025 - protein, 478 aa, Zea mays
  Clone ID: TF_ZmC7307_1.pep
VATVPISQPERLPLKVQDASGKEWIFQFRFWPNNNSRMYVLEGVTPCIQSMQLQAGDTVTFSRIDPEGKLIMGFRKATNNSFEQEQATKPANGALATSEANGKVSAPDSSPNAAVSRQNKLNTETKSSSPVEQATALKMDKDGLTQKEGPGTGSSSPGSVKRKTTILGQKNKRLRMDNEESMELKITWEEAQELLRPPPKAPSIVIVDGHEFEEYEEPPVLGRKTYFVADKSGSNHQWAQCEDCSKWRKLPIDALLPSKWTCSDNKWDPERCSCESAQEISIEELAEFIPIKPAKKPKLKIESDAIDASDGLDTLANLAILGEGEALPSQPTTKHPRHRPGCSCIVCIQPPSGKGPKHKQTCTCNVCMTVRRRFRTLMLRREKKATRDSSRKKETGQSSEKATQQAVSGPPGANATATRSAQKADGNADGPEDMAVDHKVTTSSPVKNHIDLNIQPERDDEQSPKSGAAGLLSRDNAT

SEQ ID NO: 6026 - protein, 86 aa, Zea mays
  Clone ID: TF_jC-zmX700468806a1.pep
FGSRPHTKPFLGGARLDDFDLRLSTVSDKRLGAKAVKNLLLLSEKVVIHCDTRSLGRIVLPIKVAEVHLPVLKTRDGISIPIGGHW

SEQ ID NO: 6027 - protein, 580 aa, Zea mays
  Clone ID: TF_ZmC7307_2.pep
HIRIAPTQQQAQMASSPLQKQFYSHTVTGYNEFQAQMRNGRPRMDSKARSQLLPRYWPRITDQELQHLSSDSNSVITPLFEKMLSASDAGRIGRLVLPKKCAEAYFPPISQPEGLPLKVQDAGGKEWIFQFRFWPNNNSRMYVLEGVTPCIQSMQLQAGDTVTFSRIDPEGKLIMGFRKATNNSFEQEQATKPVNGAPATSEVNGKVSAPDSSPNAAVSRQNMVKTETKSSSPVEQATVSKMDKDRLTQKEGPGIASSSPGSLKRKTTNLGQKNKRLRMDNEESMELKITWEEAQELLRPPPKVPSIVIVDGHEFEEYEEPPILGRKTYFVADKSGLNHQWVQCEDCSKWRKLPIDALLPSKWTCFDNKWDPERSSCEPAQEISLEELAELIPIKPGKKPRLKIESDAIDASDGLDTLANLAILGEGEALPSQPTTKHPRHRPGCSCIVCIQPPSGKGPKHKQTCTCNVCMTVRRRFRTLMLRREKKVTRDSSRKKETGQSSEKVTQQAVSGPPGANGSTTSSPQKADGNADAPENMAVDHKVASSPVKNHIDLNIQPERDDEQSPKSGAAGLLTRDNPT

SEQ ID NO: 6028 - protein, 642 aa, Zea mays
  Clone ID: TF_ZmC10032_1.pep
MFPHLRVARQPADGRGRNQLLPRYWPRITDQELQQISGDSNSTIVPLFEKVLSASDAGRIGRLVLPKACAEAYFPPISQPEGRPLTIQDARGKEWHFQFRFWPNNNSRMYVLEGVTPCIQSLQLQAGDTVTFSRIDPGGKLVMGFRKATNTVSLPDSQISAIANGSLLSETLFSTANESIGVVSGYPGFLHSIKGAADFHPSSLYDHHMNSADGDVSWNKADKFGSRPDEGSLQFLQKRSRNIGSKSRRFLIDAEDAMELKLTWEEAQELLRPAPTAKPTVVMIEDYEFEEYDEPPVFAKRSIFTIRATGEQDQWIQCDECSKWRRLPLNVIVASKWTCTDNSWDPKCCSCSAPEELTPKELQSVMQQYEEMRRRKGSYGLKLNVAEMDASSFDALATGAVFGEVGNQGTASVATTTRHPRHRPGCTCIVCIQPPSGKGPKHNPACTCNVCMTVRRRFKTLMMRKKQRQSEREEAEASKKIAWVNRDEPEGSSLSRSPQTLDSTRDNSDVTMFDKVSDVNKQGHIDVDLNLHPAAPAVQAAQQQPRPVSMMGLLEVAGRPLDNYMKQNGLTSLVGEQGGGSSSTATVPPAPVESEERTSNEGLVPSASAEREPNAMAVDEAGENQQDKAADDDDDAVAAAAT

SEQ ID NO: 6029 - protein, 710 aa, Zea mays
  unsure (1)..(710): unsure at all Xaa locations
  Clone ID: TF_ZmC10032_2.pep
MNLGIANNGNRMEATSTAERPMLSPTTAIAEGRELTTALSPFQHAQRARHFLTRPPRVGEGAAFDPTRDMFLHLRVARPPAEGRGRNQLLPRYWPRITDQELQQISGDSNSTIVPLFEKVLSASDAGRIGRLVLPKACAEAYFPPISQPEGRPLTIQDARGKEWHFQFRFWPNNNSRMYVLEGVTPCIQSLQLQAGDTVTFSRIDPGGKLVMGFRKATNTVSLPDSQISAIANGSLLSETLFSTANESIGVVSGYPGFLHSIKGAADFHPSSLYDHHINSADGDVSWNKADKFGSRPDEGSLQFLQKRSRNIGSKSRRFLIDAEDAMELKLTWEEAQELXRPAPTAXPTVVMIEDYEFEEYDEPPVFAKRSIFTIRATGEQDQWIQCDECSKWRRLPLNVIVASKWTCTDNSWDPKCCSCSAPEELTPKELQSVMQQYEEMKRRKGSYGLKTNVAEMDASSFDALATGAVFGEVGNQGTASVATTTRHPRHRPGCTCIVCIQPPSGKGPKHNPACTCNVCMTVRRRFKTLMMRKKQRQSEREEAEASKKIAWVNRDEPEGSSLSRSPQTLDTTRDSSDVTMFDKVAADVNKGHIDLNFHPAAPAVRGAGDQGQNGAQQPRAVSMMGLLEVASRPLDNYMKQNGLTSLAGEQGGGSSSTATVPPAPVESEDRTSDEGRVASAEREADAMAIDEAGENQQDKPADSAAAAAT

SEQ ID NO: 6030 - protein, 175 aa, Zea mays
  Clone ID: TF_ZmC403009_1.pep
MEFASSSSRFSREEDEEEEQEEEEEEEEASPREIPFMTAAATADTGAAASSSSPSAAASSGPAAAPRSSDGAGASGSGGGGSDDVQVIEKEHMFDKVVTPSDVGKLNRLVIPKQHAEKYFPLDAAANEKGQLLSFEDRAGKLWRFRYSYWNSSQSYVMTKGWSRFVKEKRLDAGD

SEQ ID NO: 6031 - protein, 247 aa, Zea mays
  Clone ID: TF_ZmC2719_1.pep
MNMLQTPPFHSNSHEKESGAVFSNSFNMAPSVTPTSPFQLMSPSSTNYTSTQIFEETNNLEDTSRVFGGGDNESNNSEEPDPKPAVEMEDLNQGNDHTSNKTANCQDYRMVLRKDLTNSDVGNIGRIVLPKKDAEPNLPILEDKDGLILEMDDFELPVVWNFKYRYWPNNKSRMYILESTGEFVKRHGLQAKDILIIYRNKKSGRYVARAVKAEDIAPPECECVEAGNPREECGFSVSPSINKKIIT

SEQ ID NO: 6032 - protein, 187 aa, Zea mays
  unsure (1)..(187): unsure at all Xaa locations
  Clone ID: TF_ZmC1903_4.pep
MATNHLSQGQHPQAWPWGVAMYTNLHYHHQQHHHYEKEHLFEKPLTPSDVGKLNRLVIPKQHAERYFPLGXAAPATGLILRFEDDDDDEAAAANKPWRFRYSYWTSSQSYVLTKGWSRYVKEKQLDAGDVVRFQRMRGFGMPDRLFISHSRRGETTATAATTVPPAAAAVRVVVAPAQSAGADHQQQ

SEQ ID NO: 6033 - protein, 201 aa, Zea mays
  Clone ID: TF_ZmC10115_12.pep
MAMHPLAQGHPQAWPWGVAMYTNIHYHHQYEREHLFEKSLTPSDVGKLNRLVIPKQHAERYFPLNGGDSPGDKDLLLSFEDEAGKPWRFRYSYWTSSQSYVLTKGWSRYVKEKQLDAGDIVHFERVRGLGTGDRLFIHCRRRGESAPPPPVRVPPPALNAGEQQPWSPMCYSTSGSYPTSPANSHAYRRSVEQDHSEMLHA

SEQ ID NO: 6034 - protein, 147 aa, Zea mays
  Clone ID: TF_LIB3239-009-P1-N1-E9.pep
SRAQPTPAWARVLLFDKAVTPSDVGKLNRLVVPKQHAEKHFPLKRAPPSVEAQAPTTAKGVLLNFEDGEGKVWRFRYSYWNSSQSYVLTKGWSRFVREKGLRAGDTIVFSHSTYGSEKQLFIDCKKTKTTTPATDGVPVPLPAPAEK

SEQ ID NO: 6035 - protein, 191 aa, Zea mays
  Clone ID: TF_16927321.pep
HMFDKVLTPSDVGKLNRLVVPKQHAERFFPAAGAGSTQLCFQDRGGALWQFRYSYWGSSQSYVMTKGWSRFVRAARLAAGDTVTFSRSGGGRYFIEYRHCQRRRRDVDISFGDAATVPAWPRPIVIGTAAMNNGGATVASATIAGHDIEVAVAPSGARSFRLFGFNVECSGDDAPAPAPAPAEVEYVDGDT

SEQ ID NO: 6036 - protein, 227 aa, Zea mays
  Clone ID: TF_LIB4828-034-A1-N1-A10.pep
MAASLPLSAAIVGAEESVDKEVLEMEYLFEKFLMPSDLCSNTEWLGIPEEHVRKFGMMLEDRDGYSVIFFQDGVVPGKLWCFRYWKSNGVHGLTKGWRCFVREKGLKAGDTISFFRGSACGRLFICCRLGTHATFASSSTLHHGFSMPPPPARPLVGLQSGMLARDVPSLGQARLHDGNQDGGGAPSRHVPSSGRRVEAQLSRVSSRRQRRTMKHSIPEPTIETPPI

SEQ ID NO: 6037 - protein, 449 aa, Zea mays
  Clone ID: TF_2437851.pep
DQLLDFASLSMPWDSEPFPGVSMMLENAMSAPPQPVGDGMSEEKAVPEGTTGGEEACMDASEGEELPRFFMEWLTSNRENISAEDLRGIRLRRSTIEAAAARLGGGRQGTMQLLKLILTWVQNHHLQRKRPRDVMEEEAGLHVQLPSPVANPPGYEFPAGGQDMAAGGGTSWMPHQQAFTPPAAYGGDAVYPSAAGQQYSFHQGPSTSSVVVNSQPFSPPPVGDMHGANMAWPQQYVPFPPPGASTGSYPMPQPFSPGFGGQYAGAGAGHLSVAPQRMAGVEASATKEARKKRMARQRRLSCLQQQRSQQLSLGQIQTSVHLQEPSPRSTHSGPVTPSAGGWGFWSPSSQQQVQNPLSKSNSSRAPPSSLEAAAAAPQTKPAPAGARQDDIHHRLAAASDKRQGAKADKNLRFLLQKVLKQSDVGSLGRIVLPKVRHVRIDKSLEQISL

SEQ ID NO: 6038 - protein, 292 aa, Zea mays
  Clone ID: TF_ZmC9208_1.pep
MAGITKRRTSPASTSSSSGDVLPQRVTRKRRSARRGPRSTARRPSAPPPMNELDLNTAALDPDHYATGLRVLLQKELRNSDVSQLGRIVLPKKEAESYLPILMAKDGKSLCMHDLLNSQLWTFKYRYWFNNKSRMYVLENTGDYVKAHDLQQGDFIVIYKDDENNRFVIGAKKAGDEQTATVPQVHEHMHISAALPAPQAFHDYAGPVAAEAGMLAIVPQGDEIFDGILNSLPEIPVANVRYSDFFDPFGDSMDMANPLSSSNNPSVNLATHFHDERIGSCSFPYPKSGPQM

SEQ ID NO: 6039 - protein, 243 aa, Zea mays
  Clone ID: TF_ZmC9208_2.pep
MNELDLNTAALDPDHYATGLRVLLQKELRNSDVSQLGRIVLPKKEAESYLPILMAKDGKSLCMHDLLNSQLWTFKYRYWFNNKSRMYVLENTGDYVKAHDLQQGDFIVIYKDDENNRFVIGAKKAGDEQTATVPQVHEHMHISAALPAPQAFHDYAGPVAAEAGMLAIVPQGDEIFDGILNSLPEIPVANVRYSDFFDPFGDSMDMANPLSSSNNPSVNLATHFHDERIGSCSFPYPKSGPQM

SEQ ID NO: 6040 - protein, 251 aa, Zea mays
  Clone ID: TF_LIB4742-120-A1-K1-H3.pep
MAFSARTISREMEVQMGKAPPCLNPFLMVNPLLPPQHVSPWSSKFVPVFQFGMTNGHGALDLCEESKRARKVVHLEYLFSKVLTPSDVGKLNRLLIPRQCAEGFFPMISEVKSGGDDIFLNFEDTSTGLVWRFRFCLWNNSKTYVLTKGWSVFIKEKNLKKGDILSFYRDASKSIRTNHIFIHIKPHTGTMPLPHHVPSPVFSPSGMVIDDQVHNSLDIGKSHGIAPFWKPLSFGSELSPQLIRRHNKQIS

SEQ ID NO: 6041 - protein, 691 aa, Zea mays
  Clone ID: TF_ZmC2776_1.pep
MEASAGSSPPHSQENPPEHGGDMGGAPAEEIEGEAADDFMFAEDTFPSLPDFPCLSSPSSSTFSSNSSSNSSSAYTNTAGRAGGEPSEPASAGEGFDALDDIDQLLDFASLSMPWDSEPFPGVSMMLENAMSAPPQPVGDGMSEEKAVPEGTTGGEEACMDASEGEELPRFFMEWLTSNRENISAEDLRGIRLRRSTIEAAAARLGGGRQGTMQLLKLILTWVQNHHLQRKRPRDVMEEEAGLHVQLPSPVANPPGYEFPAGGQDMAAGGGTSWMPHQQAFTPPAAYGGDAVYPSAAGQQYSFHQGPSTSSVVVNSQPFSPPPVGDMHGANMAWPQQYVPFPPPGASTGSYPMPQPFSPGFGGQYAGAGAGHLSVAPQRMAGVEASATKEARKKRMARQRRLSCLQQQRSQQLSLGQIQTSVHLQEPSPRSTHSGPVTPSAGGWGFWSPSSQQQVQNPLSKSNSSRAPPSSLEAAAAAPQTKPAPAGARQDDIHHRLAAASDKRQGAKADKNLRFLLQKVLKQSDVGSLGRIVLPKKEAEVHLPELKTRDGISIPMEDIGTSRVWNMRYRFWPNNKSRMYLLENTGEFVRSNELQEGDFIVIYSDVKSGKYLIRGVKVRPPPAQEQGSGSSGGGKHRPLCPAGPGRAAAAGAPEDAVVDGVSGACKGRSPEGVRRVRQQGAGAMSQMAVSI

SEQ ID NO: 6042 - protein, 123 aa, Zea mays
  Clone ID: TF_LIB3069-031-Q1-K1-A4.pep
PTRTSQVTVSKDVSSREASKDVTWMGASWKCQRSLKHYKSFCRTGITISVHSFVYIMGEEMNRLIAYVEDLYEDTNSCNMVKVQWFGKADEVGVLLPMDFDDREIFFSLGRQDLNVICIDGLA

SEQ ID NO: 6043 - protein, 531 aa, Zea mays
  Clone ID: TF_ZmC5665_1.pep
MDGNAETIQFSWGKRRGKGGAKMDTQFFGSFTLDNVKYSLFDCVYLFKHGDPEPYIGKIVKIWEKDNDKKVKILWFFHPDEVQKYLSGPVMGKEIFLACGEGAGLADINPLEAVAGKCTVICTSKDKRNRQPSPQELQIADYIFYRVFDVKSLTLSDQLPDKIAAFTVDLLLNPKDELVIPANVLVNPNVDEGMVATVPTPPSAVKLEDRSQAAALPLTQTGQVDENLPATVPLPQSEVKEEQKPVIAIPISQTVVKKEDKKSLSDIPLSHSAVKEDETPVASIGPPQSAVMENIPKHTQLQDAHAGERPPKKLKLSQETTEQDIDPTNTEQRPLELQPKNIDRSKWFNIEWNDRLKMADDKGTLVYIQNLDIRFGPADIEELVRKALQLNCTAKPINHPTYDDPNNGKAYAIFRTKDAADAAISKINSGLVVGGRPLYCSKGLLEVPKPSANLVGHLSSYVKIGQKQRDEQKKAVATSHCSQPNTIEYDLALDWMLLREKQDQSFRVLHKKHREARKGFASLVGKGSKAE

SEQ ID NO: 6044 - protein, 638 aa, Zea mays
  Clone ID: TF_ZmC2907_1.pep
MGRRRRFAQLDDDDDDDEDVPINFKPSGGASSSDAKPRKPQPPPQQRRGVSDDDDEDVEEVELEEEEDDEKDLEAMRRAEEEERREQEAETKTRRRRGRPKRRRDPGSEDEEPEELELQTEDPREEEITEAVPVAVGDPVKITGKGKKQKKHYASFEYEGNSFELEDPVLLTPEDSNQKPYVAILKDITETDGSLYVTGQWFYRPEEADKKEGGFWVARDTRELFYSFHTDDVPAESVMHKCVVHFIPQQKQIPSRKQHPGFIVQKVYDAVEKKLWNLTDKDYEDNKQQEIDLLVKKTIDRIGQLPDLEPEETPLENNYLSNKRGLRKKPVNPIDVTREPPVGKSEQFAKAETPGSDKIRNYDTLVKYKVLTGHSHRDRWLDKLIESIPLASKENAGTSADANSTAKSSISGSPAKDVGSAENEKSYGLDVVVEIMTALERSAYEALGTDFGKYNQKLRQLQFNIKNISKLRRRLMDKELDPPVLLTMSPDELKAGLTSAEKTSEPEESRKLQMTDTRCQRCSEKKVGISDIIHAGHGDRYQLECTSCGYTWFSSRDAITTLTEDAPSTAGNVGTAPLATAKFEVVEKKLTSPRDQSGKPASDALQKSTAAYMPTMERQKSFAKTKLLDEPSPAPKQG

SEQ ID NO: 6045 - protein, 130 aa, Zea mays
  unsure (1)..(130): unsure at all Xaa locations
  Clone ID: TF_ZmC35813_2.pep
MGGKSRPPKGILESYTIKGSERVIKPGDWGLMRASDASKPPYVERVEEIEEEGSRGTNVKVRVGGYYRPKESIGGRGPFHGSKEVFLSDHYDVQRVDTIEGKXNVHSFRSYTKLDFANGEDFLCRFENKS

SEQ ID NO: 6046 - protein, 133 aa, Zea mays
  unsure (1)..(133): unsure at all Xaa locations
  Clone ID: TF_ZmC3042_6.pep
QFHGAKELFLSDHFDLQSAHTIEGKCVVHSFKNYTRLDNVGPEDFFCRFEYKAATGSFTPDRVAVYEAPQPFHCWLSLLLCMHFXLACDDFGAWFLSRYCKCEMPYNPDDLMVQCDACKHWYICYNDLQFTFH

SEQ ID NO: 6047 - protein, 217 aa, Zea mays
  unsure (1)..(217): unsure at all Xaa locations
  Clone ID: TF_ZmC977_1.pep
MAKTKQGKRDVDAYTIKGTNKVVRVGDCVLMRPADTDNPPYVARVEXDLESDGRGSVRVRVRWYYRPEEAKGGRRPFHGAKELFLSDHFDTQSAHTIEGKCIVHSFKSYTKLDNVGPEDFYCRFDYKAATGAFTPDRVAVYCKCEMPYNPDDLMVQCEGCKDWFHPSCMGMTIEQAKKIDHYMCSDCAKENGAKRPSNSYSVSPNSDSKIESKRRKR

SEQ ID NO: 6048 - protein, 364 aa, Zea mays
  unsure (1)..(364): unsure at all Xaa locations
  Clone ID: TF_ZmC29757_2.pep
ECDACLGGFHLRCVRPPLRRVREGDWACPYCXAERAGKVVERPMPPEGKRVVRTAKEKLLSSDLWAARIESLWREPDGTFWAKVRWYIIPEETAAGRQLHNLRRELYRTNDLADIEMETILRHCSIMCPKDFRDANNGGDDVFYCEYEYDIHWHNFKRLADIDDEPETKEDLSDEPYNAGDDYNSDTDEDSDYDEEEESTSSFSVRRNQSHESAANSRKGRIYGLQKIGIQKIPEHARCHQKTELEKAKATLLLATLPKSLPCRDKEMDEISIFVKDAICNNQCLGRCLYIHGVPGTGKTMSVLAVMRRLRSEFDSGTLRPYCSIEINGLKLASPENIYKVVYEQLSGHKGGWKKALHYLTEHF

SEQ ID NO: 6049 - protein, 209 aa, Zea mays
  Clone ID: TF_ZmC3042_4.pep
MVRMKQVKISVKKDVDSYTIRGTNKVVHVGDCVLMRASDSDKQPYVARVEKMEADGRGSVRVQVRWYYRPEESKGGRRQFHGAKELFLSDHFDLQSAHTIEGKCVVHSFKNYTKLDNVGPEDYFSRFEYKAATGSFTPDRVAVYCKCEMPYNPDDLMVQCEACKDWFHPSCMAMTIEQAKKLDHFVCSDCLKENGSKRLSNVYATSSNS

SEQ ID NO: 6050 - protein, 209 aa, Zea mays; identical to SEQ ID NO: 6049
  Clone ID: TF_ZmC3042_1.pep

SEQ ID NO: 6051 - protein, 916 aa, Zea mays
  Clone ID: TF_ZmC29605_1.pep
MAPSSPSSARPTRASGRERSAMAEEIHQNQEEEEEVVAASTAKRRRKAASSGKKPKPTPKQAKPAVAGMKKKGETEKTEPVVDDVCAEEPDEEELAMGEEEAEAEEQAMQEVVAAVAAGSPGKKRVGRRSAAASGDHVPEFIGSPVAAAEAHSNWPKRYERSTAANKPEEDDELKARCHYRSAKVDNIVYCLGDDVYVKAGENEADYIGRITEFFEGTDRCHYFTCRWFFRAEDTVINSLVSINVDGHKHDPRRVFLSEEKNDNVLDCIISKVKIVHVDPNMDPKAKAQLIEHCDLYYDMSYSVAYSTFANISSENGQSGSETASGISSDDAGLETSSNMPERTATLLDLYSGCGGMSTGLCLGAALSGLKLETRWAVDLNSFACQSLKYNHPQTEVRNEKADEFLALLKEWAVLCEKYVHQDVDSNLAGSEDQEDADTLDKDEFVVQKLIGIRYDGTGRKKGVYFKVQWEEYGPEEDTWEPIDNLSDCPLKIREFVQEGRKRKILPLPGDVDVICGGPPCQGISGFNRFRNRDEPLKDEKNKQMVTFMDIVAYLKPKYVLMENVVDILKFADGYLGKYALSCLVAMKYQARLGMMVAGCYGLPQFRMRVFLWGALSSMVLPKYPLPTYDVVVRGGAPNAFSQCMVAYDETQRPSLKKALLLGDAFSDLPKVQNHQPNDVMEYGGSPKTEFQRYIRLGRKDMLDWSFGEGAGPDEGKLLDHQPLRLNNDDYERVKQIPVKKGANFRDLKGVRVGANNIVEWDPEIERVKLSSGKPLVPDYAMSFIKGKSLKPFGRLWWDETVPTVVTRAEPHNQVIIHPTQARVLTIRENARLQGFPDYYRLFGPIKEKYIQVGNAVAVPVARALGYCLGQAYLGESEGSDPLYQLPPSFTSVGGRTAGQARASPVGTPAGEVVEQ

SEQ ID NO: 6052 - protein, 219 aa, Zea mays
  Clone ID: TF_ZmC35813_1.pep
MAGKSRPPKRILESYTIKGSDRVIKPGDCVLMRASDASKPPYVARVEAIEAAGSRGTNVRVRVRWYYRPEESIGGRRPFHGSKEVFLSDHYDVQSADTIEGKCNVHSFRSYTKLDSVNAEDFFCRFEYKSATGSFVPDRIAVFCKCEMPYNPDDLMIQCEECSDWFHPACIGMTIKEAKKLEHFFCQTCTAENGKMVENSHEATAQSEEKPVESKRRRR

SEQ ID NO: 6053 - protein, 776 aa, Zea mays
  Clone ID: TF_ZmC29605_2.pep
VEGSKHPSIHRPRLFVEGYGRATAAKLPGYEEEFKDRCHHRSAKVDNVVYCLGDDVYVKAGENEADYIGRITEFFEGTDQCHYFTCRWFFRAEDTVINSLVSISVDGHKHDPRRVFLSEEKNDNVLDCIISKVKIVHVDPNMDPKAKAQLIESCDLYYDMSYSVAYSTFANISSENGQSGSDTASGISSDDVDLETSSSMPTRTATLLDLYSGCGGMSTGLCLGAALSGLKLETRWAVDFNSFACQSLKYNHPQTEVRNEKADEFLALLKEWAVLCKKYVQDVDSNLASSEDQADEDSPLDKDEFVVEKLVGICYGGSDTGKGVYFKVQWEGYGPEEDTWEPIDNLSDCPQKIREFVQEKHKRKKNPLPGDVDVICGGPPCQGISGFNRYRNRDEPLKDEKNKQMVTFMDIVAYLKPKYVLMENVVDILKFADGYLGKYALSCLVAMKYQARLGMMVAGCYGLPQFRMRVFLWGALSSMVLPKYPLPTYDVVVRGGAPNAFSQCMVAYDETQKPSLKKALLLGDAISDLPKVQNHHPSDVMEYGGSPKTEFQRYIRLGRKDMLDWSFGEGAGPDEGKLLDHQPLRLNNDDYERVQQIPVKKGANFRDLKGVRVGANNVVEWDPEVERVYLSSGKPLVPDYAMSFIKGKSLKPFGRLWWDETVPTVVTRAEPHNQVILHPTQARVLTIRENARLQGFPDYYRLFGPIKEKYIQVGNAVAVPVARALGYCLGQAYLGESDGSHPLYQLPPSFTSVGRRTAGQARAAPVGTPAGEVVEQ

SEQ ID NO: 6054 - protein, 196 aa, Zea mays
  Clone ID: TF_LIB3150-078-B9_FLI.pep
DVDSYTIRGTNKVVHVGDCVLMRASDSDKQPYVARVEKMEADGRGSVRVQVRWYYRPEESKGGRRQFHGAKELFLSDHFDLQSAHTIEGKFVVHSFKNYTKLDNVGPEDFFSRFEYKAATGSFTPDRVAVYCKCEMPYNPDDLMVQCEACKDWFHPSCMAMTIEQAKKLDHFVCSDCLKENGSKRLSNVYATSSNS

SEQ ID NO: 6055 - protein, 1525 aa, Zea mays
  unsure (1)..(1525): unsure at all Xaa locations
  Clone ID: TF_ZmC2046_1.pep
MQSKATKEGRGIHRKQQAGEWTSGCNRRGASWSRKXDGHVTRKRPRRAAACSDFKEKSIRLSEKKSVVMVKKNRMEEEEVDAVNLTKLGPEDPPPCRKLIDFILHDAEGNPQPFEMSEIDDFFITALIMPMDDDLEKERERGVRCEGFGRIEDWNISGYDEGTPVIWVSTDVADYECVKPSTNYKSYFDHFYEKAQVCVEVFKKLAKSVGGNPNQGLDELLASVVRSTNAMKGYSGTMSKDLVISIGEFVYNQLVGLDETSNNDDEKFATLPVLLSLRDQCRSRVELTKLPSNFSNTSLKIKDSECDETAEDDDDAKLARLLQQEEEWKMMKKQRGRRGTPSQKNVYIKISEAEIANDYPLPAYYKPFSQEMDEYIFDSDDSIFSDDVPVRILNNWTLYNADSRLISLELIPMKSGAENDVVVFGSGFMRDDDGSCCSTAESVKSSSSSSKADQLDAGIPIYLSPIKEWIIEFGGSMICITIRTDVAWYKLRQPTKQYAPWCEPVLKTARLAVSIITLLKEQSRASKLSFADVIRKVAEFDKGNPAFISSNITLVERYIVVHGQIILQQFADFPDETIRRSAFVSGLLLKMEQRRHTKLVMKKKTQVMRGENLNPSAAMGPASRKKAMRATTTRLINRIWSDYYAHHFPEDSKEGDGNEIKEIDDEQEENEDEDAEDEGQIEENISKTPPSTRSRKLLSQTCKEIRWEGETSGKTLSGETLYKCAYVRELRIPVGGTVALEDDSGDTVICFVEYMFQKVDGSKMVHGRILQKGSQTILGNAANEREVFLTNDCLEFKLDDIKELVMVDIQSRPWGHKYRKENSEADKVEQVKAEERKKKGQPMVYFCKSLYWPEKGAFFALSRDKMGLGSGLCSSCDNIEPDSDELKIFSKTSFVYRKVTYNVNEFLYIRPDFFAEDEDRATFKAGRNVGLKPYAVCQILSIPEGAGSKKLNPASANISARRFYRPDDISSAKAYASDIREVYYSEDVIDVPVDMIEGKCEVRKKNDLASSDLPVMFEHVFFCELIYDRASGALKQLPPNVRFMSMVQRTSALKKNKGKQICEPDQIDSGKWLDVPKENRLATLDIFAGCGGLSEGLQQAGVSFTKWAIEYEEPAGEAFNKNHPEAVVFVDNCNVILKAIMDKCGDTDDCVSTSEAAEQAAKLPEVNINNLPVPGEVEFINGGPPCQGFSGMNRFNQSPWSKVQCEMILAFLSFAEYFRPRFFLLENVRNFVSFNKGQTFRLAVASLLEMGYQVRFGILEAGAFGVAQSRKRAFIWAAAPGEMLPDWPEPMHVFASPELKITLPDGQYYAAARSTAGGAPFRAITVRDTIGDLPKVGNGASKLTLEYGGEPVSWFQKKIRGNMMVLNDHISKEMNELNLIRCQHIPKRPGCDWHDLPDEKVKLSNGQMADLIPWCLPNTAKRHNQWKGLYGRLDWEGNFPTSVTDPQPMGKVGMCFHPDQDRIITVRECARSQGFPDSYEFAGNIQNKHRQIGNAVPPPLAYALGRKLKEAVDKRQEASAGVPAP

SEQ ID NO: 6056 - protein, 127 aa, Zea mays
  unsure (1)..(127): unsure at all Xaa locations
  Clone ID: TF_ZmC3042_3.pep
RPGAHTIEGKCVVHSFKNYTRLDNVGPEDFFCRFEYKAATGSFTPDRVAVNCKCEMPYNPXDLMVQCDACKHWFHPSCVAMTIEQAKKLDHFVCSDCFKENGSKRLSNAYATSPNFEPKAEPKRQRR

SEQ ID NO: 6057 - protein, 586 aa, Zea mays
  unsure (1)..(586): unsure at all Xaa locations
  Clone ID: TF_ZmC29757_1.pep
ETLRYQICTLPAPLWREPDGTFWAKVRWYIIPEETAAGRQLHNLRRELYRTNDLADIEMETILRHCSIMCPKDFRDANDGGDDVFYCEYEYDIHWHNFKRLADIGDEPETKEDPSDEPYNASDDYNIXTEHFSGGTKIGRPANQPLVLRIAVIYLXANSRKGRIYGLQNGLPRKIPEHVRCHQKTELEKAKATLLLATLPKSLPCRDKEMEEISIFVKDAICNDQCLGRCLYIHGVPGTGKTMSVLAVMRRLRSEFDSGTLRPYCFIEINGLKLASPENIYKVVYEQLSGHRVGWKKALHYLTEHFSGGTKIGKQANQPIVLLIDELDLLMTRNQSVLYNILDWPTKPNSNLVVIGIANTMDLPEKLLPRISSRMGIQRLCFGPYNYRQLQEIITSRLKGIDAFEEQAIEFASRKVAAMSGDARRALEICRRAAEFADYRVKQSRQSAQNTVSANKGDGVVSMGDIEAAIQEVFQAPHIQVMKNCPKFGKVILVAIVHELYKSGLGEIMFDKLATTVFSWCHAHRELLPGYDTLLKICCKLGESKIILCEEGTKHKLQKVQLNYPSDDVTFALKESPDLPWLSKYL

SEQ ID NO: 6058 - protein, 680 aa, Zea mays
  unsure (1)..(680): unsure at all Xaa locations
  Clone ID: TF_21213068.pep
MVFQKXXXXXEMESCGGGQVPEMPRVPKSARGKRSVRKKEAQSPAQMSAFDLLATVAGKLFXXXXXXXXXTSAGAPALAACAKDALVKQEQCDEQMKLFKHEATDQDSCNESAIXXXIVLQRVVNNARNEDPKAKSEVQDKESSMISYTKAXXXXXXXXXADRWSPESVESGACTGDAVARLMMTAPAGFHKNAPEMYSLLDSMDVDVKPPPLVSSDSTGEMPLHGDKIHRSTSLPRGXXXXXXXXXDRXXXXXXSSGCTHPSTATNKDFTSNCKAEYNRVRKLLTSKHRKVAPARIHKSDLSYSDVERKPSFRYXXXHTRQRTQRSTFKRRKLFDRHLALASEFGTANGKGNTKVAGRNSNAVSLEANKGTNSMPFQKSCGSNDCYVKLRIKSFNVPELLVEIPDSATVGSLKKTVLEAVTAILGGGLRVGVLHHGKKVRDDSKTLIQAGIGQDDMLDNLGFSLEPNCTQNPQVQAPEDVNFLENIDTTEPLARITPADSSSKLGEVDVSQELALTPLAMNYQGSDHDSVHSPGAVSSRDKDSRALFLVPAADPNAGAVVPANKTKRSPEQGHRRIRRPFSVAEVEALVLAVEKLGTGRWRDVKLRAFDNAKHRTYVDLKDKWKTLVHTASISPQQRRGEPVPQELLDRVLAAQAYWSQQQAKLQPKTPSLAEARLLTQ

SEQ ID NO: 6059 - protein, 550 aa, Zea mays
  Clone ID: TF_ZmC9036_2.pep
DPKAKSEVQDKESSMISYTKAELGCNFGVIADRWSPESVESGAFTGDAVARLMMTAPAGFHKNAPEMYSLLDSMDVDVKPPPLVSSDSTGEMPLHGDKIHRSTSLPRGPKGVGFFAVDRDDDDDKSSGCTHPSTATNKDFTSNCKAEYNRVRKLLTSKHRKVAPARIHKSDLSYSDVERKPSFRYKKMHTRQRTQRSTFKRRKLFDRHLALASEFGTANGKGNTKVAGRNSNAVSLEANKGTNSMPFQKSCGSNDCYVKLRIKSFNVPELLVEIPDSATVGSLKKTVLEAVTAILGGGLRVGVLHHGKKVRDDSKTLIQAGIGQDDMLDNLGFSLEPNCTQNPQVQAPEDVNFLENIDTTEPLARITPADSSSKLGEVDVSQELALTPLAMNYQGSDHDSVHSPGAVSSRDKDSRALFLVPAADPNAGAVVPANKTKRSPEQGHRRIRRPFSVAEVEALVLAVEKLGTGRWRDVKLRAFDNAKHRTYVDLKDKWKTLVHTASISPQQRRGEPVPQELLDRVLAAQAYWSQQQAKLQPKTPSLAEARLLTQ

SEQ ID NO: 6060 - protein, 680 aa, Zea mays
  Clone ID: TF_ZmC9036_4.pep
MVFQKRSSSSEMESCGGGQVPEMPRVPKSARGKRSVRKKEAQSPAQMSAFDLLATVAGKLFDEGAGSLGNTSAGAPALAACAKDALVKQEQCDEQMKLFKHEATDQDSCNESAILPHIVLQRVVNNARNEDPKAKSEVQDKESSMISYTKAELGCNFGVIADRWSPESVESGACTGDAVARLMMTAPAGFHKNAPEMYSLLDSMDVDVKPPPLVSSDSTGEMPLHGDKIHRSTSLPRGPKGVGFFAVDRDDDDDKSSGCTHPSTATNKDFTSNCKAEYNRVRKLLTSKHRKVAPARIHKSDLSYSDVERKPSFRYKKMHTRQRTQRSTFKRRKLFDRHLALASEFGTANGKGNTKVAGRNSNAVSLEANKGTNSMPFQKSCGSNDCYVKLRIKSFNVPELLVEIPDSATVGSLKKTVLEAVTAILGGGLRVGVLHHGKKVRDDSKTLIQAGIGQDDMLDNLGFSLEPNCTQNPQVQAPEDVNFLENIDTTEPLARITPADSSSKLGEVDVSQELALTPLAMNYQGSDHDSVHSPGAVSSRDKDSRALFLVPAADPNAGAVVPANKTKRSPEQGHRRIRRPFSVAEVEALVLAVEKLGTGRWRDVKLRAFDNAKHRTYVDLKDKWKTLVHTASISPQQRRGEPVPQELLDRVLAAQAYWSQQQAKLQPKTPSLAEARLLTQ

SEQ ID NO: 6061 - protein, 74 aa, Zea mays
  Clone ID: TF_LIB4171-017-R1-K1-A8.pep
TLALAQINPRASVGPKDKWKTLVFPASIFPPPPKGHPVPQKILNRVLLGQAFWFPHQHQGRVLGKPPPPALPFS

SEQ ID NO: 6062 - protein, 97 aa, Zea mays
  Clone ID: TF_ZmC426700_1.pep
VVTSSDQDFMVRKRLGYSSRGHRIPTMPRVPNSARGKRSTRRKKDENDDMCAMDLLATVAGKLLADQDNSSSVPNTSAAKAKKRKSVKEEHFDEIPL

SEQ ID NO: 6063 - protein, 501 aa, Zea mays
  Clone ID: TF_ZmC1435_1.pep
MLAKIPECGSYGIHHAGSSSSAEPEQVHQAEPKVSRRQADGHPVAYGIFNSVDVDGKPPALVSSDSSSCVPLSSHDKEHQTSSLYRGVVQYTADREDDENSSGCTHPSTIENKGCKPQYLGNHRIRKLLASKVRKAARNKICGGIPSKKICGGLSKKGSKLNLCGKKMSTTHQKVQRMIFKKKKLAHRTSFAKEMLTEASGTSFAMEGQNKSCEAENYHVKLRIKSFNIPELFIKVPENATIGSLKRAVMDVVNSIMEGDLRVGVLLQGKDIQDDNKTLCQAGICHDKKLNNIDFTLECEREREPPSGVIIQEQMDFLTTDMVEPLARMKCEEPFPEADVGDDSQQPRAPYRSRSLSDLYSVHCPVQMASQDTSVSSQAIVPVSPAPSDVGALAIVPLCKSKGSEVGQRRMRRPFTVGEVEALVGAVEQLGTGRWRAVKTLAFDSIDHRTYVDLKDKWKTLVHTASISPQQRRGQPVPQELLDRVLLAQAYWSQQQQQARL

SEQ ID NO: 6064 - protein, 81 aa, Zea mays
  Clone ID: TF_LIB3600-034-Q6-K6-C8.pep
QFVVRLCLQRAVMDVVNSIMEGGLRVGVLLQGKDIQDDNKTLCQAGICHDKKLNNIDFTLECEREREPPSGVIVQEQMDFL

SEQ ID NO: 6065 - protein, 98 aa, Zea mays
  Clone ID: TF_UC-ZMFLB73193B04_FLI.pep
DRISWLLYSPVWLWISCRWRDVKLRAFDNAKHRTYVDLKDKWKTLVHTASISPQQRRGEPVPQELLDRVLAAQAYWSQQQAKLQPKTPPLLAEARLLT

SEQ ID NO: 6066 - protein, 685 aa, Zea mays
  unsure (1)..(685): unsure at all Xaa locations
  Clone ID: TF_ZmC9036_1.pep
MVFQKRSSSELEASGGGQVAEMPRVPKSARGKRSVRKKEAQNPPQMSAFDLLATVAGKLLDEGVGSLGNMSAGAPALTACAKDVRVKKEQCDEEMKQFKHEVTDQDSCNESAILPHIVFQRAVNNARNEDPKAKSEAQDKESSMISCTKAELGCNFGVIADRWSPESVESGAFTGDAVASLMPPAPAGFHKNAPEMYNLLDSMDVDVKPPPLVSSDSTGEMPLYGDKVHRSTSLPRVSKGVGFFXAVDRDDDDDKSSGCTHPSTTTNKDFRSNCTAEYSRVRKLLTSKYRKVAPARVYKSDLSYSDVDRKPSFRNKKMHYTRQRTQRSTFKRRKLFDRHSVLASEFGTAHGKGNTKKVTGRDSHAVSLEANKGTSSTPFQKSRGSNDCHVKLKIKSFKVPELLVEIPESATVGSLKKTVLEAVTAILGGGLRVGVLHHGKKVRDDNKTLIQAGIGQEDMLDNLGFSLEPNCTQNPQVQAPEDISFLETIDTAEPLARIAPADSSSKHGEVDLSQEFALTPLAMNYQGSDHDSVHSPGGVSSPDKVSTNSRALVPVPAADPNAGAIVPANKSKRSPEQGQRRIRRPFSVAEVEALVLAVEKLGTGRWRDVKLRAFDNAKHRTYVDLKDKWKTLVHTASISPQQRRGEPVPQELLDRVLAAQAYWSQQQAKLQPKTPPLLAEARLLT

SEQ ID NO: 6067 - protein, 34 aa, Zea mays
  Clone ID: TF_LIB3245-450-P1-N1-F8.pep
FSQKRGGERVPQELLDRVLGGQAFWFQQQTKVQA

SEQ ID NO: 6068 - protein, 131 aa, Zea mays
  unsure (1)..(131): unsure at all Xaa locations
  Clone ID: TF_jC-zmX3061005Q1K1D06b2.pep
PRGTSSTPGLLTRGGDDCHGKLKIESSTVPGLIXEIPERASVGSLKKTVVREVTSDLGGRLRVGVLXHGKKVRDDNKSXIHAGIGQEDMLDNLGSSLEPSWTRNPQVPATGDINYPEAIGTAEPPSRIGPA

SEQ ID NO: 6069 - protein, 145 aa, Zea mays
  unsure (1)..(145): unsure at all Xaa locations
  Clone ID: TF_ZmC73462_1.pep
CTIRRHVDLETGEVQAGXGSGSYASATEFYRDLLLLCANALVFYPRGSPERSAAARTRALVAKHMSKDQPGPSGKAVAGPAASKKAKAEADVGSLLEKTAPIIVCRKRSSIAKAAAAATAKEERSEKAESDKEGEKQQEAVGKRK

SEQ ID NO: 6070 - protein, 95 aa, Zea mays
  unsure (1)..(95): unsure at all Xaa locations
  Clone ID: TF_LIB3279-203-Q1-K6-H9.pep
MRIRSTHHLWSRLMKHKFGXWVFNKPXVDAATLGLRDDYTIIKHPMDLGTIRRLVTRWLTMNPHELAEDVRITSHNGRTYNPTGPVVHFMVKQKL

SEQ ID NO: 6071 - protein, 374 aa, Zea mays
  unsure (1)..(374): unsure at all Xaa locations
  Clone ID: TF_ZmC1240_1.pep
FAAGLERPKHHKKKHRSLESRGADFDAERRLYSHAFKKSSSLLSRLMKHKFGWVFNKPVDPVTLGLHDIKHLDLGTXRLSRGQYRNPKEFAEDVRLTFHNAMTYNPKGQDVHFMAEQLSGIFEAQWPEIEAEVNYLASCPPLPKKFPPPPIDLHFLERSDSMRHHMALDTNSRPISHTPTYTRTPSMKKPRAKDPNKRDMTIDEKRKLSENLQNLPPVKLDAVVQVIKNKNLSVKQHDDEIEVEIDSMDAETLWELDRFVSNYKKNLSKQKRKAERAMLARQDAELRAQHPIQQPQPTPVPQEPFGEKSPKQVVKDSLEGEQLPASAPEQNGENRQNASSSSNSSSSSSGSGSSSSGSDSDSSSSDGSDAGNSS

SEQ ID NO: 6072 - protein, 67 aa, Zea mays
  Clone ID: TF_ZmC209461_1.pep
GGYSYLKRFEKTLGHHTCCCKCQIVQGQFCGDSLYMRYGENVVEVKKNPNRICQGWRGIYNCRICRT

SEQ ID NO: 6073 - protein, 53 aa, Zea mays
  unsure (1)..(53): unsure at all Xaa locations
  Clone ID: TF_700223701H1.pep
MILEKLQKKDTYGVFAXPVDPEELPDYHDVIEHPMDFSTVRKKLARNAYRSFE

SEQ ID NO: 6074 - protein, 134 aa, Zea mays
  Clone ID: TF_LIB5116-027-A1-PF1-E10.pep
DYNDIIKHPMDLGTIKKKLDSGSYASPSDFAADVRLTFNNAITYNPRGHVVHDLAIQLNKMFESRWRTVEKKLATAATKPHVEVDKADSKRRKTPPVERSNLSIDRVRPTEIVKPKMTKEERETLGDCLTSLAE

SEQ ID NO: 6075 - protein, 175 aa, Zea mays
  Clone ID: TF_ZmC2164_1.pep
RQKKKNKKKKKHEFKDDDLLDHRPYRNDRRVPERHRALKRSSPAPVVGYASSAKRRRGGEVELSNILEKVVDHLRGLSGSLLFLKPVTKKEASDYLDIIRYPMDLGTIRDKVRKMVYRNRDEFRHDVAQIQLNAHIYNDTRYPHIPPLADELMEVCDHLLYENADLLTEAEDAIE

SEQ ID NO: 6076 - protein, 706 aa, Zea mays
  unsure (1)..(706): unsure at all Xaa locations
  Clone ID: TF_ZmC906_1.pep
MTPTVLMEFGQQRPMKRGYEEMVFRAASSRGYAETVGESGVAAGSPLRVDSEDSSVPKRKCISLNSVGFDVKREILVPSKMSSSERRYLRKRFRAELDSVRDLLKKPEFAAPVPLNRAPALSSSAAPRAKKPQKSQRGGTNVIRGAKGRFLPTKPRPETSTVLSEAAAFKQCEAILKKLMTQKYSHIFNVPVDIVKLQIPDYFDIVKTPMDLGTVKKKLESGSYTSPSDFAADVRLTFNNAMAYNPRGHAVHDMAIQLNKMFESRWRPIEKKLASAATEKHVEVDRADSKRRKTPPVDRSDVSMECARQTEPETPKMTAEEREAFGNCLASISDELPPHIFELLQQCIDSNADLSGDGEIEIDIHAVSDDLLFELKKHVDKYLQEKEQSQQVKSEPSENEAVNVSGLSHSSTNPCKGGEPIEEDVDICGNASPIMLDKDAQIRNSKCGSPSSSSSDSESSSSDSDSGSDSESESEKVGSPGKLAKGTKKPDQLVEQEKSDVISPADANRPAAIVGLHGEDSESKPAPGGENSEPDTQVSPDRLLRAALLRSRYADVIVKARGILSQGGDKQEELEKLQKEEKERLLAEGTAAMEACRAEAEAEKKRKRNFEREKARQALQEMERTVEINDNLHLKDLELLGTATTEHIVSSVDETSPERSHDGMAGYHPGAVNPLEQLGLFIKVDDEEDDEQCXPALKKEEKGEIS

SEQ ID NO: 6077 - protein, 121 aa, Zea mays
  unsure (1)..(121): unsure at all Xaa locations
  Clone ID: TF_LIB189-003-Q1-E1-D10.pep
KRARYKKMIRRHMDFRMLHSKIKSGAISCTKELLRDVLIFINNVITFYPKATLEHMAAVELRESACKTVKQSASLFLKSHGETGTAGAPVVKNTRVLQPRCXGPGDARPSKVFFKDATAKE

SEQ ID NO: 6078 - protein, 576 aa, Zea mays
  unsure (1)..(576): unsure at all Xaa locations
  Clone ID: TF_ZmC20581_1.pep
VPVDIVKLNIPDYFQIVKQPMDLGTIQKRMKAGMYSTPPEFAADVRLTFSNAMNYNPANNDVHLMAKTLSKNFESRWKLIEKKLPKPDEKPPQPDEKPPQPVEKPPVRKPTKKNSTKRVSIEKEDLTKKKPSKKSVPKQYIFRGEDSADSPVLQPKKRKTSPLVQDAPLVGDIVPTRKRIMTSEQKYDLSARLQSYGAFIPDHVVELIRSHADYCDANEEELELDMDALGDDTLFELLRLLDDYDRVNPSRNLTEQDPHEVKSRSQYELINASVCNEEVNELFDEDVDIGENDPPVLTFTPLVLEDETADRSRKHSASSSSSSDGESSSSGSSSSSGSDADAKAAQQNSGSKEKILPVDGVGHEKDSLDTLNLPEQSTDPVSVSAYGEGGYVSEKVSPEKQIRAALLRSRFADTILKAREKALDQTTKKDPEKLRREREELERLQRQEXRARLQAEAKAAEDACKRAEEAAAAEAAAEAKRQRDIEREAARKALQEMERTVDINGGSHFLKDLEMLRGVTGEEMPNLVGEGSPGFQLGSSNALAKLGLYMKDDEDDEEGDLADAPVVVDIEEGEID

SEQ ID NO: 6079 - protein, 95 aa, Zea mays
  Clone ID: TF_700332659H1.pep
KHAAYAWPLYKPVDVEALGLHDYCDIIKHPMDMSTIKSNLEAREYRDAQEFGADVRLMFSNCYKYNPPDHEVVAMARKLQDVFEMRFAKMPDEPE

SEQ ID NO: 6080 - protein, 515 aa, Zea mays
  Clone ID: TF_ZmC1935_1.pep
MDGLVAPSPSHSGATSGGGASHRKRKLPPSSLSDATGDEDDDTTAPSSPSTAPSSPSRPSSPSSSHSDDDDDDSLHTFNAARLDGAPSGGSASGRPPKPDSSSVSAAAAAAAAAVGGGPKPEPGSANAGDGKEDTKGLFTDNLQTSGAYSAREEGLKREEDSGRLKFLCYSNDGVDEHMIWLVGLKNIFARQLPNMPKEYIVRLVMDRTHKSMMVIRNNIVVGGITYRPYASQRFGEIAFCAITADEQVKGYGTRLMNHLKQHARDADGLTHFLTYADNNAVGYFVKQGFTKEITLDKERWQGYIKDYDGGILMECKIDPKLPYVDVATMIRRQRQAIDEKIRELSNCHIVYSGIDFQKKEAGIPRRLIKPEDIPGLREAGWTPDQLGHSKSRSSFSPDYNTYRQQLTTLMQTALKNLNEHPDAWPFKEPVDSRDVPDYYDIIKDPIDLRTMLRRVDSEQYYVTLEMFVADMKRMFSNARTYNSPDTIYYKCATRLENFFSGRITVLLAQLSTKS

SEQ ID NO: 6081 - protein, 279 aa, Zea mays
  Clone ID: TF_ZmC1935_2.pep
EIAFCAITADEQVKGYGTRLMNHLKQHARDADGLTHFLTYADNNAVGYFVKQGFTKEITLDKERWQGYIKDYDGGILMECKIDPKLPYVDVATMIRRQRQAIDEKIRELSNCHIVYSGIDFQKKEAGIPRRLIKPEDIPGLREAGWTPDQLGHSKSRSSFSPDYNTYRQQLTTLMQTALKNLNEHPDAWPFKEPVDSRDVPDYYDIIKDPIDLRTMLRRVDSEQYYVTLEMFVADMKRMFSNARTYNSPDTIYYKCATRLENFFSGRITVLLAQLSTKS

SEQ ID NO: 6082 - protein, 88 aa, Zea mays
  Clone ID: TF_700447086H1.pep
FSVCSEDQEAIQAQKIWKKAIMLVWRAAANHRYANVFLQPVTDDIAPGYHSIVQRPMDLSTIKKNIENGLIRSTAEFQRDIMLMFQNA

SEQ ID NO: 6083 - protein, 484 aa, Zea mays
  Clone ID: TF_ZmC8951_1.pep
MTSAVLAGRNEVHQAHQHHRQWAGARVPLMPKPSSNPNPRRHRAGPNPIPSGSPPEPRAAPAVAAEPSPSPSGHLNFRPSEMTPAEARHLRARLTSELCRVRAFLSRIDSWQDGQRRRRGPEPPARGPSPPPALVEAMRKRCADILMRLRRSKKSVWFNSPVDVEGLKLHDYRAIIRSPMDLGTVKQNLTAGRYPSHEAFAGDVRLTFNNALRYNPPDHHVHRYAGNLLASFEGMYKEAVSWFEQQRQQLEPPMQPDLPPPPQLPVVSVPVQAPPRMGGGGRRPKPKAREPNKREMDEEEKQKLRVEIENLPEEKMLNVLQIVQKRNSDPAFTGEVVELDFDELDMETLWELDRFVVNWRKALKKSQRNSMVNGDAAAAVNGDAIDVTVVPDDDDMVEVAVNPSVAVEIGESADVPEKEMEAEMVDDYVDIGDEMPTVNYQSVEIERDSPAAASSSSGSGSGSSSSSDSDSDSDSDGDDASAPH

SEQ ID NO: 6084 - protein, 360 aa, Zea mays
  Clone ID: TF_ZmC296488_1.pep
MASGPPSPSGKPYSRKSHASSKAPSVPSFDAHNGQLLPTVTFSLPSTTTARRELRRRLSSELSQVRAAVKRLNSLPAPAPSSALSATDPSTPHPPYPPASKHKSKKGGGVPQPHLSAEARRKLYAPVFKTCAALLSRLMKHKHSWVFNKPVDASALGLHDYHTIITKPMDLGTVKSKLGAGQYKSPREFAGDVRLTFQNAMTYNPKGQDVHFMAEQLLNMFEEKWPEIEAEIAQLSPQPPTPSSAAPKKPKPKEIDNSRPLERSDSTVHAAGIEATPKTHTGRPQVLKKPKAREPNKRDMTFWEKQRLSNNLQDLPPEKLDNVVQIIKKRNLLLIPHDDEIEGDIDSFDVETLLGLDRFV

SEQ ID NO: 6085 - protein, 190 aa, Zea mays
  Clone ID: TF_LIB3595-033-Q2-K6-E12.pep
RYQVDQPSFDDRLRYFSILFESLLSFQMEESRNKSKKQKSAIDLPKAPKEVEGPKVSELKARAEAEQHAVRRMRMCLRDICNRILYNKRFNVFHFPVLEDEVPDYRSIIHKPMDMATVLQRVDSGQYLTRAAFIKDIDLIVSNAKTYNGDDYNGSRIVSRACELRDVVQGMLSQMDPSLVSFCDKIASQG

SEQ ID NO: 6086 - protein, 508 aa, Zea mays
  Clone ID: TF_ZmC828_1.pep
RPGRPRLLICGGESVGLDHVGPAVLHELEKFSVHSLGLPSLLSDPSAKTPEEALVHIFGEAKRTTPSILYIPQFHLWWDTAHEQLRAVLLTLLNDLPSNLPVLLLGTSSVVFTDLEEECASIFSSRNVYQVDQPSFDDRLRYFSILFESLLSFQMEESRNKSKKQKSAIDLPKAPKEVEGPKVSELKARAEAEQHAVRRMRMCLRDICNRILYNKRFNVFHFPVLEDEVPDYRSIIHKPMDMATVLQRVDSGQYLTRAAFIKDIDLIVSNAKTYNGDDYNGSRIVSRACELRDVVQGMLSQMDPSLVSFCDKIASQGGPLQAVDDEDRAILQAAPVAQLVSGTRISARLRNVQPEVNLSQSYEVLRRQKKSAENEQSMTRDEKSPEDVDLSKPTDAEEAAKEPESNGTTKEANDSPAKEPEVSTSPEPMESDNGKIAAATGDDLLEQLEALKQRFMELTASYGVPQLERLYSKIMKGAIELTSKESNEDHRRLVVRYLWTFVENSNNF

SEQ ID NO: 6087 - protein, 127 aa, Zea mays
  unsure (1)..(127): unsure at all Xaa locations
  Clone ID: TF_LIB4969-022-Q1-XP1-A11.pep
MGLHDGSPKQVEKARKATDGHEELSDSGPTTPLPNKKLLLFILDRLQKKDXYGVFSXPVDPEELPDYHDIVKHPMDFSTIRKKLDKGAYSNLEQXEDDVFLIXTNAMCYNSPDXIYYRQARGIFRDR

SEQ ID NO: 6088 - protein, 183 aa, Zea mays
  unsure (1)..(183): unsure at all Xaa locations
  Clone ID: TF_LIB3632-059-Q6-K6-E4.pep
MASSLLAGRGGGHHHNWGETRAPLEPIPPNPSPSQPHPRADGSKSKPRAAAGYVKFRPASLGHREARALRDRLAVELGQVRALLSRIDTWQQQGPPPRAVLRGAMRKRCGQILSRLRKDKRSVWFNAPVEVERLGLHDYHAVIKRPMDLGTVKEGLAAGRYASHDDFAXDXRLTFTNALRYNP

SEQ ID NO: 6089 - protein, 91 aa, Zea mays
  Clone ID: TF_uC-zmflteosinte056e06a1.pep
LVCIVKIQWILVTVHKKLQSGSCTSPSDFAADARLTFNNAMAYNPWGHAVHDMTIQVNKMFESRWRPNEKKLAFAATEKFEEEDNTSYGLQ

SEQ ID NO: 6090 - protein, 349 aa, Zea mays
  Clone ID: TF_ZmC19394_1.pep
MASALLAGQGGARHHGWGETRAPLAPIPPNPNPSQPHPRADGSKSKPRAAASSPAAGYVTFRPASLGPREARALRDRLAGELTQVRALLSRIDTWQQQGPPPAGLRGEVRKRCGQILTRLRKDKRSVWFNAPVEVERLGLHDYHAVIKRPMDLGTVKEGLAAGRYASHDDFAADVRLTFTNALRYNPVGHEVHTFAGALLAYFERMYKEALACFEEDCKRPEPPRPVAPELTPPPAAEPVEAKVKPRAGNVRMRKPKAREPNKREMSLEEKNMLRVGLESLPEEKMHNVLQIVRKRNNNPEMLGDEIELDIDEMDVETQWELDRFVANFNKALKKSQRAVLKQYSTMCM

SEQ ID NO: 6091 - protein, 103 aa, Zea mays
  Clone ID: TF_ZmC1935_3.pep
STLQNLNEHPDAWPFKEPVDSRDVPDYYDIIKDPIDLRTMLRRVDSEQYYVTLEMFVADMKRMFSNARTYNSPDTIYYKCATRLENFFSGRITVLLAQLSTKS

SEQ ID NO: 6092 - protein, 264 aa, Zea mays
  unsure (1)..(264): unsure at all Xaa locations
  Clone ID: TF_ZmC531483_1.pep
MAKTRKPPAPPSPPPPPAETPSPQRRRKKKGRPSLLDLQRRSLRLQAQNPSPAASPTRRDPNPSDDDEDGTGSGRRRQKRLKSVLSGVVKEEQGEGKKDAAKATGKEDAASDGGPTGTPLPDKKLLLFILDRLQKKDTYGVFSEPVDAEELPDYFDIIDHPMDFSTIREKLLNDSYSKLEQFEDDVFLLTSNAMSYNSADTIYFRQARSIEALAKKDFENLRQPSDEEEPXTPARRGRPPKNPKTEGDVSPDLSNVKANKPEDN

SEQ ID NO: 6093 - protein, 346 aa, Zea mays
  Clone ID: TF_ZmC21171_1.pep
MTPANGAPARAAEAGPHEVESEADAFRRQVDDLVSKTDVLERRVKEVADFYDGKKHGSGGRKGGGGGRYGASSRGMPDLMRQFGVLLKEITSHKDAWPFLEPVDVVTLQLPDYHNIITQPMDFSTIQKKMERKDGTCYTNVREICSDVRLIFANAMKYNDDQNVIHLMAKSLLEKFEEKWLHFLPKVESEEKRQKEEESKGVAATNTSREVAIVKLAKDTDDELNQINRKLEELRKMVVHRCRKMTTDEKRKLGAGICHLSPDDLSKALEIVAQDNPSFQTKAEEVDLDMDAQSETTLWRLKFFVREALERQANVASGKMDENAKRKREICNALAKTTSRRIKKQP

SEQ ID NO: 6094 - protein, 247 aa, Zea mays
  Clone ID: TF_ZmC8951_2.pep
MTSAVLASRDEVHHGHPHHRRWGGARAPLMPKPSSNHNPRRYRPGPNPIVSGSPPAPRAGSAVAAEPLPSPLRHVKFRPSELTPAEARHLRERLTGELGRVRAFVSRIDSWQDGRRSSPPPALVEAMWRRCADILTRLRRSKKSVWFNSPVDVEGLKLHDYRAIIRSPMDLGTVKQNLTAGRYPSHEAFAGDVRLTFNNALRYNPPDHHVHRYAGDLLATFEGMYKEEVSWFEQQRQQLELPMQLDL

SEQ ID NO: 6095 - protein, 496 aa, Zea mays
  Clone ID: TF_ZmC16_1.pep
MVVVAVGGGGGGGGWGTWEELVLGGAVLRHGGAAWATVADELRTRSPCTFSPEECEAKFAEIQLRYSACNAWYEELRKQRVAELKRELEKSENSIGSLQSVIQSLSNSKHVDGSSECRTSHTESCPHSENTADTNSSGKETSRDRSSAASFTEEARNSQKSQKVQQCDTDSIQAINPSPDESYPQAQVEKVGPKDGLLWGSRKQRVGRARRTLLKGGDSSGDGEPTSTACIQREGLSKGCMKNFITQNLESVVPVIESVKLKLAEILNTISTQDDCKMLQHQLDTQRKRARYKKMIRRHMDFRMLHSKIKSGAISGTKELLRDILIFINNVITFYPKTTLEHMAAVELRDFACKTVKQSASLFLKSHRETRTAGAPVIKKNARALHFSRTSLHSGDARASKVSSRDAAAKEGDGKRPCSDELANQKTTKRNEPAKKRGVGRPPKSGQRIAGAQENSPIKGRKSSAGAQVDSPSKGRKRSVEAHDDSSSKGGKRSRR

SEQ ID NO: 6096 - protein, 497 aa, Zea mays
  Clone ID: TF_ZmC4386_6.pep
MGKQQQAPPARRSPAMSAPPPPKRRKKKGRPSLLDLQKRSLRLEQQQLPQGRRSNRRSAGSADEDDDGPASGSGRREKKLRLVMGLHDGSAKGEKMRKATDGREEPSDSGPTTPLPNKKLLLFILDRLQKKDTYGVFSEPVDPEELPDYHDIIKHPMDFSTIRKKLDKEAYFNLEQFEDDVFLITSNAMCYNSPDTIYYRQARGIQEIAKKDFENLRQDSDASEPEPEPEREPKPEPEPEEPKPQPRRGRPPNKNNAKQKVGKPPAERATADFSGATLATAANIGRHAQADVDLSRRVMDKAMIADVLRASFANLRNEHNWSGERKFERLEAYSGYGGTWSAKTGKRPILMEDSRRSTYYETQPSSSIYELPVSSSYNGTEKLLVPVGVQLPQSYSHSLARFAAQLGPVGWEIASRRLERSLAPGTKFGRGWVGDGETPPNPFQTPVLAAFSETMAPPSSIAASGEQPSMKSPTHKQACTGSISHRLGSPELNVPLR

SEQ ID NO: 6097 - protein, 299 aa, Zea mays
  Clone ID: TF_ZmC1240_2.pep
RGRLSRGQYRNPKEFAEDVRLTFHNAMTYNPKGQDVHFMAEQLSGIFEAQWPEIEAEVNYLASCPPLPKKFPPPPIDLHFLERSDSMRHHMALDTNSRPISHTPTYTRTPSMKKPRAKDPNKRDMTIDEKRKLSENLQNLPPEKLDAVVQVIKNKNLSVMQHDDEIEVEIDSMDAETLWELDRFVANYKKNLSKQKRKAERAMLARQDAELRAQRLIQQPQPTPVPQEPVGEKSLKQVAKDSLAGEQLPTSASEKNDENRQNASGSSNSSSSSSDSGSSSSDSDSDSSSSDGSDAANSS

SEQ ID NO: 6098 - protein, 467 aa, Zea mays
  Clone ID: TF_ZmC119_1762.pep
MECVELLDSPDLFFLDGGDAHATDFSLENHLESSSSAGAKAKAAPGHSHSHSRRAQLHGSNAPVPPPLPGTSYYGARRKAKACRRARVPEGGVLDSWDRLFLEGYQSDLRVSTDGGAEIPSHSCVLGVKSPVLRAMLEEARLRDDGFRCIRVSGAPSEAVRVFIRFLYSSRFEQEQMKEHALHLLVLSHVFSVPSLKTVCVDQLERGFLAPDNVVDMLQLARLCDAPRLALACVRMVIGDFKTISLTDGWKVMRRANPSMEQELLESLVEADTRRQERAKRMEEKKVYLQLYEAMEALVHICRDGCRTIGPRDQALKGSLAAACKFRACKGIELLVRHFSACGVRVPGGCANCRRMWQLLELHSRMCFLPDTCKVPLCRHFKEKMRNLGRKEETKWNLWCARCWSGEELWVLFPEGEKISSILRPAGSCHVAPLVFETPKPRRGFMLEKGTRRSRNKKKKNVRTAVA

SEQ ID NO: 6099 - protein, 334 aa, Zea mays
  Clone ID: TF_UC-ZMROB73012D02_FLI.pep
DITFYVDRKPVEAHRVILCARSPFFEKKFKTDWKDRKEVRFSNQKLYFGALYSLIHFFYSDRLEVAVDDMENLARACKVCKCEELQKVLDKEVVHQKYAEYKSARELDMDSSQKRFILQAQSLPEEDRLPSALQRILQTCLANSREGYCSEESNEMIRNSEDDDLADLYIKVGDKVFHCHQAEELFDVASRYLLFPLKRVVADMLLPYLEHVSPAELCHWLMMSDIYGVMKIREYILDIIACNFEMFAATREFRALLLTLPPPSGDDSLRTTRPSAPGTGGNTDQGNILDDLREKWLEAEGAELDERDESAALFDKRLEMLMLVAEKEADDEDA

SEQ ID NO: 6100 - protein, 238 aa, Zea mays
  unsure (1)..(238): unsure at all Xaa locations
  Clone ID: TF_LIB5117-027-A1-PF1-D12.pep
MSTGAGAEPEMDDGYGFDTVFNVEAFSDRTLQVEVVGRDDHAPGSGRKRRREEDKEYDGEHIDSFCTVMSTPVLRVETIYVSSAILAAKSSFFRKLFSNGMKESGQREATVRLADSEEKAFMELLRFMYMGKVDXTTEPTHLVDILMAADKFEAISCMKLCVPAVLTEAVMKFLAERYKEFLSTESQDELMRIPXAXIEAILRRNSFGFASGVAVYDFVLRWTCYQCPNSEEIRKFSS

SEQ ID NO: 6101 - protein, 301 aa, Zea mays
  unsure (1)..(301): unsure at all Xaa locations
  Clone ID: TF_ZmC13701_3.pep
MEDEDAGLGDGGEASPPHHAAASGDRARDLAASPTSSRSVTQTVNGSHRFVIQGYSLAKGMGVGKHIASDTFTVGGYQWAIYFYPDGKNPEDNSGYVSVFIALASDGTDVRALFELTLLDQSGKGKHKVHSHFDRSLESGPYTLKYRGSMWGYKRFFRRNALEQSDFLKDDCLKINCTVGVVVSTMDYSRPHSIEVPESDIGYHFGTLLDTLEGVDVIFSVAGEKFHAHKLVLAARSSFFRSEFFDHESDEEKNETGTGDEIKEIVIDDMDPVVFXAVLHFMYRDNLXNDDELMASSSDCS

SEQ ID NO: 6102 - protein, 210 aa, Zea mays
  unsure (1)..(210): unsure at all Xaa locations
  Clone ID: TF_LIB4765-040-R1-K1-C1.pep
MQYLTDVARSKDLLKVVGHSVIKAMCDGEFLMSRKWAVGGHDWEVHLRPKDHSEGHERPVTLRLVLISEARGGDVKAKLSCRLVDPTGRLKPSKENSKSHKFYKSGDYSGAIQVTGREDLEKSGYLVDDSYTVECSITVLKKAPARNTAAAAAATAMDRDAAMLPSLELHRHLXELLQKGTGADVTFHVSGEKFAAHKGILCSRVAGVHG

SEQ ID NO: 6103 - protein, 159 aa, Zea mays
  Clone ID: TF_ZmC868_4.pep
MDGEVMRMGGGLSACSPVFKSMFVHDLREKESTTVDIGDMCVKSCSALLGFVYGTIEQGQFWKRRLPLLAAADKYGIGDIKDCCEESLLEDIGSGNVLERLHVAWLYRLERLKKGCLTYLFVFGKIYDVRDEMHGFFHHADRELMHDMFQEVLSVWKPM

SEQ ID NO: 6104 - protein, 344 aa, Zea mays
  Clone ID: TF_ZmC21312_1.pep
MCEAPRLGNRAGAGDPAAADVDVVTTGGRRRIPAHSSVLASASPVLGSILERRLRKDRESGKPGRSVVRIRGVTDDAAAAFVRLLYAGRCGEDEDDDMEEHAVQVLVLAHAYQVPWLKRACEGAIGARLTADSVVDVLQLAGLCDAPRLHLRCARLLAKEFAAVERTEAWRFLQENDPWQELHVLQRLHEADMRRRKWRRKRAEQRVYMELSEAMDCLDHICTEGCTEVGPAGRAPAPAPCARYATCRGLQLLIRHFSQCHRKSCARCQRMWQLLRLHSALCDRTDRCNTPLCMRFKQQEQDKAAAKGGDDGDKWGLLVKKVKTARVFSSLANRKQMSTTTTQC

SEQ ID NO: 6105 - protein, 108 aa, Zea mays
  unsure (1)..(108): unsure at all Xaa locations
  Clone ID: TF_LIB4725-011-R1-K1-C12.pep
FKGHFLNQEKDARDIEIPNIRWEVFELMMRFIYTGSVQINSEISQDLLRAADQYLLEGLKRLCEYTIAKDVNLDNVSDMYDLSEAFHAVSLRHTCILYILEHXNKICT

SEQ ID NO: 6106 - protein, 184 aa, Zea mays
  Clone ID: TF_ZmC2364_3.pep
PAGLPGPFSHFALPPPARVTATAFHPSPTARGWRRLVGVQGTSAAEMEPDFSTVGGPSFEFAFNEANFSDRELRIEVVAGDYDAPGSTGGGSGGGGLADWARHRKRRREELFKEKGDDEQGIDPSWAAVVTPVLRVKTIYISSAILAAKSPFFFKLFSNGMKESDQRHATLRITDSGNVTILGN

SEQ ID NO: 6107 - protein, 201 aa, Zea mays
  unsure (1)..(201): unsure at all Xaa locations
  Clone ID: TF_LIB5072-031-Q1-XP1-G12.pep
MSNVQDKPLNELLSRSMVDIYVGPENTHWILHEKLLCHHSPFFRKIFYSKSSTSSRTQSFGLPDEEDLPFKTFVGWLYSSSLPVPREEADLGTAFDLYLMAEKFEIPALVADVLQVVREWYKYSDSYPGLRRVQYIYANTEESSPMRHMLVHAVARMMVVANTGIPPHXDKALRKNGQLVVDVIRAIQDWRLDEETVPDAR

SEQ ID NO: 6108 - protein, 365 aa, Zea mays
  unsure (1)..(365): unsure at all Xaa locations
  Clone ID: TF_ZmC1033_1.pep
MSPGPKSYIAHILSMFGLCGFPSKLGGNMRNVLCDSELVDLELLLADGESLSAHAGILSARCPKLLPCEKTFVRDGSVTLEWGRRSCYVVRMSDRVDSHALKKILEYAYTGLVTVDDATVKPVKTLAKYCHLRSLHLMLQKEQPRWHSCPIYDLTTALEPAKHSFSDIILEAQSNDKMECHHGSCQLSTPHIHSHKVILSVSCEYLRALFQSGMHERXFAETIRVPVGWEALRKLVQWFYSGELPRVPPDCRWKAMSTEEKLSILKSYAELSSLADFWFVDGMKEESLQVLTSCLNSSSTDASLAFIGFAANLGQWELVEAAISSVAHLYPRLRDSGRLEQLDEDVLNMLRTEHVRYLQHRSASN

SEQ ID NO: 6109 - protein, 135 aa, Zea mays
  Clone ID: TF_ZmC184317_2.pep
MVLYADLDALRASAADVRIVTSDGQTIAAHSYVLASASPVLERMIHRARRGWGAADCTVAVFGVPSDAVLAFLHLLYSSRVAPGTEEELVAAHGPQLLALAHAYRVGWLKRATEAAVSARLTADRAVDMLKLARL

SEQ ID NO: 6110 - protein, 199 aa, Zea mays
  Clone ID: TF_LIB4743-082-A1-K1-C4.pep
MDPDFSPASGGPSFEFAFNSVNFSDRVLQIEIVAGDDALGAKGATGEGCSSLADWACHRKRRREELRRDKDPANCKVEAEECDAYEEGNEPVAMIEESPPDIEADGEDGKSSDSYCSMECTQVLRVKSMYISSAILAAKSPFFYKLFSNGMKESDQRHATLRITASEENALMELLSFMYSGKLTTNQPTVLLDIVMIAD

SEQ ID NO: 6111 - protein, 246 aa, Zea mays
  unsure (1)..(246): unsure at all Xaa locations
  Clone ID: TF_ZmC5281_2.pep
MDPDFSPASGGPSFEFAFNSVNFSDRVLRIEIVAGDDALGAKGATGEGCSSLADWACHRKRRREELRRDKESRKYMPDPANCKVEAEECDAYEEGNEPVAMIEESPPDIEADGEDGKSSDSYCSMECTQVLRVKSMYISSAILAAKSPFFYKLFSNGMKESDQRHATLRITASEENALMELLSFMYSGKLTTNQPTVLLDILMIADKFEFGPXRRHCSQLLRNLPMTTESALLYLDLPSSISMAAA

SEQ ID NO: 6112 - protein, 289 aa, Zea mays
  Clone ID: TF_ZmC13121_1.pep
LKLILVSEPLRDKLRVSLSCRLVCHPPSQRHLDASKEKSVSHIFASNFKCSPVVLLFEKRKVRSSGYLVNDSLTVECTVTMLRDLDATDKEQHLPVLPPSDLHQHLGELLQTSDGADVTFRVSGESFAAHKIFLAARSPVFKAECFGGVELGSPASVYNKDMEAAVFRAMLHFMFTDMAPELDGDQEPEAAAAMAQHLLVAADRYGLNRLKLMCECKLSGGIDIGTAAATLAFAEKHDCPLLKAKCLEFVTKSPETLDAVLATDGYEHLVASCPLVLAELLRAARGRKI

SEQ ID NO: 6113 - protein, 364 aa, Zea mays
  Clone ID: TF_ZmC11136_1.pep
MGSSLSNLTDAACIVHQFKINGYSATKSMARTDSLPSKRLAVGGYEWEVHYTPSLLVDGSYMIAFRLVLLGAPRRNDVKAAFRCRLLYPSTNYGHQRGACVSDSMGNVEGQMSHAFKRAKESSGWIPLRKRNVVEAARVIENDSLTAECTITVVTELPEPDTAKTNAVLPRIRRLTGVHSLHHDLGELLGKGTGSDVVLVVCGESFAAHKAILASRSPVFMAQFFGPMKETHSQSQRVEIMDMEAAVFGAMLRFMYTDVVPELERQENGDVIAQHLLAAADRYGLDKLKSMCEDKLCGGTTVETAATTLALAEQHGCPKLKAWCVEFIAANLDAVMVTEGYKHLMTSSPLVLNDLLRAVRGTKN

SEQ ID NO: 6114 - protein, 418 aa, Zea mays
  unsure (1)..(418): unsure at all Xaa locations
  Clone ID: TF_ZmC684_2.pep
MGAGRVCRGGPFSASPAAGAAAGRPFPPLTASSSSSPSSAPSETASTSVTKTVNGSHHFKIAGYSLSKGIGVGKFIASESFNVGGFDWAIYFYPDGKSGEDGAAYVSLFIALASEGTDVRALFELTLVDQSGKGQDKVHTHFGRSLESGPYTLKYRGSMWGYKRFFKRVALETSDYLKDDCLLVNCTXVGEVQSHTXSNMALHIGQLLTSGKRTDIAFEVDGEMXMFPAHKVILSARSPVFRAQLFGPMKDKDMKCIKIEDMEAPVFKALLHFMYWDELPDIEELTGVNTTWVSTLMAQHLLAAADRYALERLKLLCELKLCEDVAINTVANTLALAEQHHCYQLKTVCLKFVALPENLKAVMQTDGFDYLQQSCPSLLTELLEYVAKIGEHSVSPCLYSTEVLDGGDANGRRVKPRI

SEQ ID NO: 6115 - protein, 332 aa, Zea mays
  Clone ID: TF_ZmC1451_1.pep
MTDGARVETAPRLAQWRVDPLPCYTYRKSLPFLIGLWNWCISVERNNKQTCVKLFAENTSSLKNGSSAPIASFIAKLIVSLPPNQQTIVHPGIFDKQLKYDGFVWTIDSTVTGRFVIEIEFLDLKVADPSGGEPASIWASRQVKQCSDSTALSSLARMLHEDVLTDITINAADGSVGAHRAVLATRSPVFRSMFSHDLREKELSTVDITDMSLDACRAFLSYIYGDVRGGEEFLANRLALLRAADKYDIGDLREACHESLLEDIDARNVLERLQTAHLYRLPRLKGGCLRFLVDFRKVYEMHDDDLNAFLQTADRELVAEVFHGVLAAWSGR

SEQ ID NO: 6116 - protein, 371 aa, Zea mays
  Clone ID: TF_ZmC2246_2.pep
MSSRAGGGKPLWSASTIVAKVASGYHILRIDGYSRTMETPTGESIASLPFSVGGRCWRIRYYPNGDKLENKEYISLYLNLHDRSVEAEKAQLMFRFVGDVAEQPLILGGLHTFEKQGWGYGKFIKRKDLEESKHLVDDSFSIRCDVAVRFNDVRVEKAPEAAAAAAMISVQPSDLHQHLGSLLLTQKGADVVFDVAGETFAAHRCVLAARSPVFTAELFGAMKEGHTGGVVRIEDMEPRAFKALLYFLYTDLLFPKTMATTMNQSEDGDVGGDDEDVLCQHLLVAADRYNLERLKSLCEKKLSECIHVGTVAIILTLAEQHRCPGLKKVCLHFLRSPANLRAVASSDAFKHLSSSCPSVMVELVAMLGNSA

SEQ ID NO: 6117 - protein, 469 aa, Zea mays
  Clone ID: TF_ZmC5281_1.pep
MDPESRKYMPDPANCKVEAEECDAYEEGNEPVAMIEESPPDIEADGEDGKSSDSYCSMECTQVLRVKSIYISSAILAAKSPFFYKLFSNGMKESDQRHATLRITASEENALMELLSFMYSGKLTTNQPTVLLDILMIADKFEVGSCMRHCSQLLRNLPMTTESALLYLDLPSSISMAAAVQPLTDTAKEFLANKYKDLTKFQDEAMNIPLAGIEAILWSNDLQVASEDAIYDFMIKWARAQYPKLEERREILGTRLLPLVRFCHMTCRKLRKVIACSDLDHEQATKCVTEALLYKADAPHRQRALAADVMTCRKYAERAYKYRPLKVVEFDRPYRQCIAYLDLKREECSRLFPSGRIYSQAFHLAGQGFFLSAHCNVDQQSAFYCFGLFLGMQEKGSTSVTVDYEFAARTRPSGEFVSKYKGYYTFTGGKAVGYRNLFAIPWPLFMADDSLFFIDGVLHLRAELTIKQP

SEQ ID NO: 6118 - protein, 347 aa, Zea mays
  Clone ID: TF_ZmC1327826_1.pep
MAGLLPQHPATVDMSDSVLISSCFTHKFKINYVETEKVAVEHSVRSEQILAGGHLWRIICFPRRIGGMKESNVEYLSIYLCHESESKDVKAVFEAFVMYKEGTPSLAHKKKLVHVFSPKAGGRHIHGWPCFVERSVLQSFYVTNSGSFVIVGAVKVLQEDPLDVPPSNLGIHLGGLLLGSTDGSDVSFVVGGERFAAHRAVLAARSPVFKAQFFGSMAEATMSSITLHGITAATFKAMLRFVYTDACPEEAPSEAFQDLLAAADRFQLDRLKILCASKLWNNVSVDTVSATLICAEIYNCPQLKRKCIGFFGEGKGFKTKAVLTDGFAQLSQQFPSILDELRKKVGA

SEQ ID NO: 6119 - protein, 369 aa, Zea mays
  Clone ID: TF_ZmC2246_1.pep
MEPKMQGGIVMAGGGKPSWSASPIVATVASGYHILRIDGYSHTMGTPTGEYIASLPFTVGGHRWHIRYYPNGRSSETKEYVSLSLYLHDWVAETVKARFKFRFVGDVAEQPLILGGLHSFDNIDNNWGRPEFIKRKDLEESKHLLDDSFSIRCDVVVPTNEVRVVATAAAAMVSVPPSDLHQHLGILLLTEKGADVVFDVAGETFAAHRCVLAARSPVFSADLFGAMEEGGHTGGVVRIEDMEPLVFKALLYFLYTDLLETETMKQGEDGDDEDVLCQHLLVAADKYNLERLKLLCEKKLCECIHVGTIATILALAEQHRCHALKKVCFHFLSSPANLRAVAATDGFEHLSRSCPSVMEELVVMLSNLV

SEQ ID NO: 6120 - protein, 218 aa, Zea mays
  unsure (1)..(218): unsure at all Xaa locations
  Clone ID: TF_LIB4741-124-A1-K1-C6.pep
MEDTLKSLSMDYLNLLINGQAFSDVTFNVEGRLVHAHRCILAARSLFFRKFFCGADQAAAGPGALLLDHLSPRSPSGTSSPRGASAAAPGAVIPVNSVSYEVFLLLLQFLYSGQVSLVPQKGEPRPGCGERACWHTHCAAAVDLALDTLAAARSFGVEELALLTQKQLAGMVEKASIEDVMKVLMASRKQDLHQLWTTCSHLVAKSGLXPPEVLAKPP

SEQ ID NO: 6121 - protein, 618 aa, Zea mays
  unsure (1)..(618): unsure at all Xaa locations
  Clone ID: TF_ZmC2364_2.pep
MYGRNNPDQWRRLWRHRIREYKNLRAGRALLLSLPATSLVSPSPSSTPPARVTATAFHASPTSRRRRLVGVHATAAAEMDPDFSPGGGGPSFEFAFNEVNFSDRELRIEVVAGDDYAPGSSGAGAGGGGLADWARHRKRRREELLKEKESTTHMSDQTNCNEVEAEECDAYEENQEEPVAMVEESPPDVGQDGDDGQGIDSSWTVVGTPVLRVKTIYISSAILAAKSPFFFKLFSNGMKESDQRHATLRITDSEETALMELLSFMYSGKLATTEPTLLLDILMAADKFEVVSCMRYCSQLLTSLPMTTESALLYLDLPCSISMAAAVQPLTDAAKDFLAVKYKDLTKFQDEVMNIPLAGIEAILSSNDLQVASEDTIYDFLLRWARAQYPKSEERREILSSRLLPLVRFSHMTCRKLRKVLTCTDIDHEQATKCVTEALLYKADAPHRQRALAADTTTCRKFAERAYKYRPLKVVEFDRPYPQCIAYLDLKREEXCSRLFPAGRIYSQAFHLAGQGFFLSAHCNMEQQSTFYCFGLFLGMQEKGSTSVTVDYEFAARTRPSGEFVSKYKGNYTFTGGKAVGYRNLFGIPWQAFMADDSLFFIDGMLHLRAELTIKQPT

SEQ ID NO: 6122 - protein, 298 aa, Zea mays
  Clone ID: TF_ZmC29433_1.pep
MSSEDSLKSLSLDYLNLLINGQAFSDVAFSVEGRLVHAHRCVLAARSLFFRKLFCGLDPSHQPPPPTAGGRAPDLVIPVSSIRYEVLVLVLQFLYSGQASVAAPKSGPLPGCGARGCWHTRCGAAVDLALDTLAAARSFGVEQLALLVQKQLEAMVKEASVDDVMKVLMASRKFEMQELWAACSHLVARSGLSADLLAKHLPIDVVAKIEEIRAKSPGGAAAAGGAGPRSPFLLTHHYLPVNGASASEAERDHRVRRMRRALDAADIELVKLMVMGEGLDLDGALAVHYAVAALRPLI

SEQ ID NO: 6123 - protein, 269 aa, Zea mays
  unsure (1)..(269): unsure at all Xaa locations
  Clone ID: TF_ZmC13701_4.pep
MDDDAGDASPPPGPAPLAATGAPSLRDMAASPTSSRSVTETVNGSHRFVIQGYSLAKGMGVGKHIASETFTVGGYQWAIYFYPDGKNPEDNSAYVSVFIALASEGTDVRALFELTLQDQSGKGKHKVHSHFDRSLESGPYTLKYRGSMWGYKRFFRRTALETSDFLKDDCLRINCTVGVVVSTIDYSGPHSIQVPDSDIGYHFGSLLDSXKGVDVILNVSGERFHAHKLVLAARSTVFRSKLFDDESEGDKTRVXESEDLKEIVLDDLE

SEQ ID NO: 6124 - protein, 196 aa, Zea mays
  unsure (1)..(196): unsure at all Xaa locations
  Clone ID: TF_LIB4757-047-Q1-K1-E12.pep
MFGKRSLASSKDKDRSGKITKQPKRSFRDASKQKAMAEKLDARKDSPMMDGGSPQLTSAIVTVIVGSDQRLFAAHEDVLCHSPYFAELLRSQFFESTNRRIDLPTEEPEIFSCILEYLYKGDYYPRLVHDKRRQTWMLEGAIASPDPNKTGDRAAAVEPTFFHXXVGDVLLRDTAVYCAADRYXLEELKKLSLAQQ

SEQ ID NO: 6125 - protein, 358 aa, Zea mays
  unsure (1)..(358): unsure at all Xaa locations
  Clone ID: TF_ZmC13701_5.pep
MEDEDAGLGDGGEASPPHHAAASGDRARDLAASPTSSRSVTQTVNGSHRFVIQGYSLAKGMGVGKHIASDTFTVGGYQWAIYFYPDGKNPEDNSGYVSVFIALASDGTDVRALFELTLLDQSGKGKHKXGYKRFFRRNALEQSDFLKDDCLKINCTVGVVVSTMDYSRPHSIEVPESDIGYHFGTLLDTLEGVDVIFSVAGEKFHAHKLVLAARSSFFRSEFFDHESDEEKNETGTGDEIKEIVIDDMDPVVFKAVLHFMYRDNLVNDDELMASSSDCSIFDSLAGKLMAAADKYELPRLRLLCESYLCKHVSVNSVATTLALADRYHAIELKSVCLKFAAENLSGYKTYNMKICLTF

SEQ ID NO: 6126 - protein, 290 aa, Zea mays
  Clone ID: TF_ZmC184_1.pep
MDCCICSPVASVYRLPRNAICAPCHQGAKAIIGFLDRDGEREEDDGGGRSVQLQPRGSAKGLRDAWEQVKEMRAREEETRQRAAFLQHGFASAWKEGIHTDIVVKPGTGPAIPAHKAILAARSEVFRHMLSGDDRCKAPAGGSISLPELSHDDLSLLLAFLYTGALEAPGEGGGEASQDQERQLHALLVAADKYDVPFLRRACEARLAAGVAPRNALRTLEVAELSSSAALMERAMGAVVEHAEEVVFSAEYERFAARNAGLCVEITRALLARMPTPARSDGPCLELGSS

SEQ ID NO: 6127 - protein, 232 aa, Zea mays
  Clone ID: TF_ZmC34319_1.pep
CFRVRCDIAIKPFAAATAGDGDAFVAAPPSDDLHRHLGDLLARKDGADVTFQLVDAGGETFSAHRCVLAARSPVFRAQLFGEMMESSKGTGVVIPVEDMEAQVFSALLAFIYTDSLPPETGSGDDDDDDDDEAMVQYQLLLAAADRYGVDRMKLVCQEKLCKHIRADSVATMLVLADRHHCPALKEACFRFLSSSGNLGSFTQTTDGFEVLNASCPAVLKELLAKLATVLIF

SEQ ID NO: 6128 - protein, 245 aa, Zea mays
  unsure (1)..(245): unsure at all Xaa locations
  Clone ID: TF_LIB4756-081-R1-K1-E6.pep
LFYPCPVAVHEHLLRTSDDFVWQVDAMSHGRFTIDVEFLDLRIATNNATESSSVWPNEGMVQKIASKSALGCLSRMLADSIHADVTINTTDGVLKAHKAVLAACSPVFKSMFVHDLREKESSTVDIGDMCVESCSALLGFVYGTIEQGQFWKHRLPLLAAADKYGIGDIKDCCEESLLEDIGSGNVLERLHVAWLYRLERLKKGCLTYLFVFGKIYDVRDEMHGFFHHADRELMXRLFQEVLSVW

SEQ ID NO: 6129 - protein, 422 aa, Zea mays
  Clone ID: TF_ZmC684_5.pep
MGAGRVCRGGPSSASPAAGRPFSTLAASSSASPSSAPSETASTSVTKTVNGSHHFKIAGYSLSKGIGVGKFIASESFNVGGFDWAIYFYPDGKSAEDGAAYVSLFIALASEGTDVRALFELTLVDQSGKGQDKVHTHFGRSLESGPYTLKYRGSMWGYKRFFKRTALETSDYLKDDCLLVNCTVGVVQSHTEGPKIYTIPVPRSNMALHIGQLLTSGKRTDIAFEVDGEMFPAHKVILSARSPVFRAQLFGPMKDKDMKCIKIEDMEAPVFKALLHFMYWDELPDIEELTGVNTTWVSTLMAQHLLAAADRYALERLKLLCELKLCEDVAINTVANTLALAEQHHCYQLKTVCLKFVALPENLKAVMQTDGFDYLQQSCPSLLTELLEYVAKAGEHSVSPCLYSTEVLDGGDANGRRVKPRI

SEQ ID NO: 6130 - protein, 169 aa, Zea mays
  Clone ID: TF_ZmC3486_1.pep
EAGGETFPAHRCVLAARSPVFAAEFFGAMEESKSGSAVHIHDMEARVFKALLHFIYTDLCWKTNEVEEEEEDDVMAQHLLVAADRYNLPRLKLICEDKLCKYIDVGTVATILALAEQHHCHGLKKACFRFLSSPENLKVAVASESFDHLSKNCPSVMKELVAMLGTLLE

SEQ ID NO: 6131 - protein, 428 aa, Zea mays
  Clone ID: TF_ZmC13701_1.pep
MEDEDTGPGDGGEASPPHHVAASSDRARDMVASPTSSRSVTQTVNGSHHFVIQGYSLAKGMGVGKHIASETFTVGGYQWAIYFYPDGKNPEDNSTYVSVFIALASDGTDVRALFELTLLDQSGKGKHKVHSHFDRSLESGPYTLKYRGSMWGYKRFFRRTALEQSDFLKDDCLKINCTVGVVVSTMDYSRPHSIEVPESDIGFHFGTLLDTQEGVDVIFSVAGEKFHAHKLVLAARSPFFRSEFFDHELGEEKNGTDTGDEIKEIVIDDMDPVVFKAVLHFIYRDNLVNDDELSASSSDCSIFDRLSGKLMAAADKYELPRLRLLCESYLCKHISVNSVATTLALADRHHAMELKSVCLKFAAENLSAVIRTEGFDYLKDNCPSLQSEILRTVAGCEEPCSSGLKSQSVWAQLSDGGDTSGRRVRPRV

SEQ ID NO: 6132 - protein, 336 aa, Zea mays
  Clone ID: TF_ZmC868_1.pep
MSGGGPGGACGPDSRVETISRLAQWRIDTFGPCSYRRSDPFKLGIWNWYLSVEKSRSIVVRLFPEPGRVAKEQPPLARFLLRVSWAGPPRRSCVSPVHEHLLRTSDDFIWQVDAMPHGRFTIDVEFLDLRIATNNATESSSVWPNEGMVQKIASKSALGCLSHMLADSIHADVTINTTDGVLKAHKAVLAACSPVFKSMFVHDLREKESSTVDIGDMCVESCSALLGFVYGTIEQGQFWKHRLPLLAAADKYGIGDIKDCCEESLLEDIGSGNVLERLHVAWLYRLERLKKGCLTYLFVFGKIYDVRDEMHGFFHHADRELMHDMFQEVLSVWKPM

SEQ ID NO: 6133 - protein, 297 aa, Zea mays
  unsure (1)..(297): unsure at all Xaa locations
  Clone ID: TF_ZmC868_3.pep
MSGGGPGGACGPDSRVETISRLAQWRIDTFGPCSYRRSDPFKLGIWNWYLSVEKSRSIFVRLFPEPGRVAKEQPPLARFLLRVSWAGPPRRSCVSPGXESSSVWPNEGMVQKIASKSALGCLSHMLADSIHADVTINTTDGVLKAHKAVLAACSPVFKSMFVHDLREKESSTVDIGDMCVESCSALLGFVYGTIEQGQFWKHRLPLLAAADKYGIGDIKDCCEESLLEDIGSGNVLERLHVAWLYRLERLKKGCLTYLFVFGKIYDVRDEMHGFFHHADRELMHDMFQEVLSVWKPM

SEQ ID NO: 6134 - protein, 432 aa, Zea mays
  Clone ID: TF_ZmC13701_2.pep
MDEDAGGASPPPVPLAHVPPLQQPTTAAPSHRDMAASPTSSRSVTETVNGSHRFVIQGYSLAKGMGVGKHIASETFSVGGYQWAVYFYPDGKNPEDNSVYVSVFIALASDGTDVRALFELTLLDQSGKGKHKVHSHFDRSMESGPYTLKYRGSMWGYKRFFRRTALELSDYLKDDCLKINCTVGVVVSTIDYSIPHSIHVPDSDIGYDFGSLLDSQEGADVILNVGGERFHAHKLVLAARSHVFGSQFFDDESDGEKSEVNETDELKEFSIDDMEPNVFKAMLHFIYRDTLVDDDELGASSSDGSIFDTPAAKLLAAADKYHLARLKSLCESYLCKGISVASVASTLALADRHHAMELKAVCLKFAAENLSAVMRSEGFIYLKDNCPSLQSEILKTVAGCEDQCSSVGKSQSVCGQLSDGGDSSCRRVRQRT

SEQ ID NO: 6135 - protein, 256 aa, Zea mays
  unsure (1)..(256): unsure at all Xaa locations
  Clone ID: TF_LIB4729-113-A1-K1-H2.pep
MESKMQGGIVMAGGGKPTWSASAIVATVASGYHILRIDGYSHTMGTPTGEXHRWHIRYYPNGRSSETKEYVSLSLYLHDWVAETVKARFKFRFVGDVAEQPLILGGLHSFDNIDNNWGRPEFIKRKDLEESKHLLDDSFSIRCDVVVPTNEVRVVATAAAAMVSVPPSDLHQHLGILLLTEKGADVVFDVAGETFAAHRCVLAARSPVFSADLFGAMXEGGHTGRRGAHRGHGTSWVFKALLYFLYTDLLTETMKQ

SEQ ID NO: 6136 - protein, 164 aa, Zea mays
  Clone ID: TF_ZmC142074_1.pep
DALFLVTEGKNPINMNSMSSSLARTGQWVFSQDIPTDVVVEVGEANFSLHKFMLVAKSNYIRKLIMESKDSDVTRINLSDIPGGPEIFEKAAKFCYGVNFEITVQNVAALHCAAEFFQMTDKYCDNNLAGRTQDFLSQVALSSLSGANRVLKSCEILLPISRDL

SEQ ID NO: 6137 - protein, 796 aa, Zea mays
  unsure (1)..(796): unsure at all Xaa locations
  Clone ID: TF_ZmC22965_1.pep
MAAPPQPHPQAAEERAAPAVPLPTAPAGPRPYDVAVAAAELRPVDCNLAALCDHVQAEGFGLGAFSDLVVEAAGATYRLHRLILSRSAYFRNMLHGPWREAGAPTVVLHIDDANVDSEAIAIALAYLYGQAPKLNDNNAFRVLAAASFLDLQDLCTICTDFIISELWTSNFLQYQLFAESQDYGSHGERVRNACWGYLCQSATLELREVLPKLSSQTLHALLTSDELWVPNEEKRFELALFTLLAKVTTCEIQVSGNETSLPSADRSMRKGKAPMNESGEELLMDSELKNLKLHDNLGNEIPHNIIAISDMNGEAPKRMEFDCSTGGPSGESTSYQFNENNWISSEQTANNYFSRTFSSGVVPTEWGRPNAPLWGGRVVGRRQIRYIRGSSCLSTDEYNAFMNIFERGSLLYCNMSFDALLSVRKQLEEFGFPCKAVNDSLWLQMLLCHRVQAIVADTCRNCCLMNSSCACKQAYVSSHTHYRQEHDRSSASDNIGNVYLADGQGDGNGVLGPVRVNVRGAVDGLAGIGRGNSNVPGAAWAPTRXVFSRVPYGLGSRNGQQFAIDESEPRIDRNGDISADGLTALVNLSQENNAAHLQDQSLFETGMQTRYRSVPSVSTPGGSSVQMQESKEHEWETTKDATISLDMKTPLSHFPPFRFGVEFDDVHRLADGHVKHSTEVFYAGSLWKVSVQAFNDEDPHGRRTLGLFLHRRKAELLDPLRKAHLYVDPREKVTARYQLICPSKREVMVFGCLKQAGTLLPKAPKGWGWRTAILFDELADLLQGGALRIAAVVQLV

SEQ ID NO: 6138 - protein, 399 aa, Zea mays
  Clone ID: TF_ZmC13598_1.pep
MAIPPRTPSPPPSWSRSVTETVRGSHQFTVRGYSLAKGMGPGRYLASDVFAVGGYHWAVYLYPDGKNAEDNSNYVSVFVALASDGIDVRALFELTLLDQSGRGCHKVHSHFDRSLKFGPYTLKYRGSMWGYKRFYKRTLLEESDFLKNDCLVMNCTVGVVKNRIETPKDIQIHVPRSDMGRCFKELLSRCIGCDITFEVRDEKVRAHKWILAARSPVFKAQFFGPIGKPDLHTVVVEDVEPVVFKAMVNFIYADELPSIPELAGSASTWTSTVVVQHLLAAADRYGLVRLRILCESKLCDELTPETVATTLALAEQHHCAELKSACLKFIALRGNLGAVMETEGFDYLEDTCPSLLSDLLATVAVVDDDLASLNRKRGVSGNQVMALVGSVERRTRRKL

SEQ ID NO: 6139 - protein, 266 aa, Zea mays
  unsure (1)..(266): unsure at all Xaa locations
  Clone ID: TF_LIB4741-097-Q1-K1-A11.pep
CTLVFRHQLGSRHYHYKTDTSRHYTVILGSHRNKRLKIEVDGNTAVDVAAVGLCCSSSFQSYWISIYDGYISIGQGKHPSNNLLFQWLDPDPNPHVQYVGLSSWDKHVGYRNISLLPSAPPNSIFWTQIEYANVHPDADARDYVRKDNCGQRVLADFLENWDFSDAVFVGGTERKVVPAHKLVLCASGDFPFEIGDGATIVLPSASYPVLHSLLEYIYTGSTQIAEWLLSSLLELSSQXXVDPLMKWCKDIIDCLEVDKKPSRSGK

SEQ ID NO: 6140 - protein, 216 aa, Zea mays
  Clone ID: TF_ZmC560263_1.pep
MPGSSGSPAAGYSRSGDGSHSASAIVAGAVTGSHVLKIVFYSRTKEVPNRQVICSRHFRLGGHTWFVKYYPNGNAADKADFISLYLAIHGAVVGKPVKAQVTISLLDQDGKPVPSYTKVTPFVDFAAKGDWGYTEFIERKALEESEHLRDDSFTVRFDVTIMSDIQTVEMPSVVVPPSDMHRHYADLLLSKEGADVKFRIGGQTFTAHRLVLSTRS

SEQ ID NO: 6141 - protein, 179 aa, Zea mays
  Clone ID: TF_ZmC1125_1.pep
FFSIVYQIILIPSTGKRFYAHRIALLASSDAFRAMFDGGYREKDARDIEIPNIRWDVFELMMRFIYTGSVQVTSEIAQDLLRAGDQYLLEGLKRLCEYTIAKDVNLDNVSDMYDLSEAFHAVSLRHTCILYILEHFNKICTRAGSAQLIQRVIPEIRNFLTKALSSSRSPSPSDRNSQT

SEQ ID NO: 6142 - protein, 610 aa, Zea mays
  Clone ID: TF_ZmC2364_1.pep
MTTLRGPAAPVPVDGGGSPFPNLAATARSLSPGHFSHFALPPPARVTATAFHPSPTARGWRRLVGVQGTSAAEMEPDFSTVGGPSFEFAFNEANFSDRELRIEVVAGDYDAPGSTGGGSGGGGLADWARHRKRRREELFKEKESTTYMPDQTNFNEVEAEECDAYEENQEEPVAMMEGSPPDVGQDGDDEQGIDPSWAAVVTPVLRVKTIYISSAILAAKSPFFFKLFSNGMKESDQRHATLRITDSEEIALMELLSFMYSGKLTTTEPTLLLDILMAADKFEVVSCMRYCSQLLTSLQMTTESALLYLDLPCSVSMAAAVQPLTDAAKDFLAVKYKDLIKFQDEVMNIPRAGIEAILSSNDLQVASEDTIYDFLLRWARAQYPKSEERREVLSSRLLPLVRFSHMTCRKLRKVLACTDIDHEQATKCVTEALLFKADAPHRQRALAADAITCRKFAERAYKYRPLKVVEFDRPYPQCIAYLDLKRDECSRLFPAGRIYSQAFHLAGQGFFLSAHCNMEQQSAFYCFGLFLGMQEKGSTSVTVDYEFAARTRPSGEFVSKYKGNYTFTGGKAVGYRNLFAIPWQKFLADDSLFFVDGMLHLRAELTIKQP

SEQ ID NO: 6143 - protein, 290 aa, Zea mays
  Clone ID: TF_ZmC1239096_1.pep
RLLVALVLVYLGAPCDGGVAVALSCHLVDQSCDLRVPLLTTTQGLNTTFRRPLDRSPPIYFGKGKVRDDVQAAAAAGRPLIFKGGSFTVECQIDVHSSRDSDSVSLPSSDLPQHLGELLRNQSGADVTFIVSGESIAAHKSILAARSPIFMAQFFGNMLERGSQCVEIQDMHPAVFKAMLHYIYTDTVPDLGTDTTTVEETAVMAQHLLVAADMYALHRLKEICEERLTRGIGIGTVASTLALADQHNLAQLKAKCIDFITGGSSENLLAVLRRKSTGIWRPATATEFEL

SEQ ID NO: 6144 - protein, 138 aa, Zea mays
  unsure (1)..(138): unsure at all Xaa locations
  Clone ID: TF_LIB189-031-Q1-E1-F6.pep
SPRVRPRVRPRVRPRVRPRVRGCLSHMLADSIHADVTINTTDGVLKAHKAVLAACSPVFKSMFVHDLREKESSTVDIGDMCVESCSALLGFVYGTIEQGQFWKHRLPLLAAADKYGIXDIKDCCXXSLLEDIGSGNVL

SEQ ID NO: 6145 - protein, 252 aa, Zea mays
  Clone ID: TF_ZmC3490_1.pep
MWCQSCKEGYDEEDAGTCKECYEEASETEEELKREIDDLRSRLLFLRLPSPTLDAASAPNCDLLLHAIPSTGAGGERDAGRTPDTPAVPAHRVILASRSPVFRAMLENEMEESRSGVIKIYDVSYDILRAFVHYMYTAEALLDEQMASDLLVLAEKYEVKHLKAYCEKFITSKVNDDNAITHYAFAHRHSAKQLLEASLSVLMANMSTLSDREEYKELVEKDPRLVVEIYEAYLNRQVNTAAGKDTNCSNRK

SEQ ID NO: 6146 - protein, 498 aa, Zea mays
  Clone ID: TF_ZmC1125_2.pep
AAAGALRTLSFKNDENKTQIVQCNALPTLILMLRSEDAAIHYEAVAIIGRLVHSSPKIKKEVLNAGALQPVIGLLSSCCTESQREAALLLGQFASADSDCKVHIVQRGAVRPLIEMLQSADVQLREMSAFALGRLAQDTHNQAGIAYNGGLVPLLKLLDSKNGSLQHNAAFALYGVADNEDYVSDFIKVGGVQKLQDGEFIVQATKDCVAKTLKRLEEKINGRVLKHLLYLMRVGEKSVQRRVALALAHLCAPEDQRAIFIDNNGLDLLLDLLISMSPKHQQDGSAALYKLANKAAALSPMDAAPPSPTPQVYLGEQYVNSSTLSDVTFLVEGKRFYAHRIALLASSDAFRAMFDGGYREKDARDIEIPNIRWDVFELMMRFIYTGSVQVTSEIAQDLLRAGDQYLLEGLKRLCEYTIAKDVNLDNVSDMYDLSEAFHAVSLRHTCILYILEHFNKICTRAGSAQLIQRVIPELRNFLTKALSSSRSPSTTDDRNLQT

SEQ ID NO: 6147 - protein, 417 aa, Zea mays
  Clone ID: TF_ZmC2315_13.pep
SCVVETQPILLVSFADQPRLCQSVCLVWLAGAIIHHSSVAEHMRGADGHGGGRVAGQLPGAEQRVVRRRHLLLDVHGDAAELLDDAEHLVDGAEAGAEFGGASAEHGVLLLDARVLRRDVGRRGPPRARSRPAGAPPPGPARPGAAASAAATAAPTRGSTAAASRAGACPPPSRRPTRTSSPPATATTTTSRHALFSPGRSGYFTSNKIPLSLALVLVLLFFGGCSGRQERREKQEGTERERERERERERERERERERARGMADPEEGKLRDHIKPVEEDDREGVEEAGAAQVSGDLHKAQRFRINMLLLLLSQTMAGENETSLQRKEPRRTPTQRFVWISGPGRAAVPGLANRAELRSWEAGLLDLWRRNELKSRQARAGCGEEGEPLQSEAERREGGGDQAERGGVFNAGTRASL

SEQ ID NO: 6148 - protein, 158 aa, Zea mays
  unsure (1)..(158): unsure at all Xaa locations
  Clone ID: TF_ZmC69637_1.pep
MTLSGGASSGSSHGTRSLGSEGDMVHRMELMRKRRMESNRESAKRSRQRKQQHLDDLNSQVDKLRTTKQQLMXALNMTSMHYAQQAAQNSVLRTQMMELQSRLCALREIICHMYATTTNVHPATVMGGAATYHTFGETAWNSGSCSMQMVDHLLHQCF

SEQ ID NO: 6149 - protein, 101 aa, Zea mays
  unsure (1)..(101): unsure at all Xaa locations
  Clone ID: TF_LIB3245-236-P1-N1-H1.pep
RRRRMIKNRESAARSRARKQAYSMEFEAQVQKLKKANXEPEKEPAKIIGIANNQGLKIVEGSIRPKKPVCSRRTFTGPCGQMPITQHKFHFLHTCRGAWDL

SEQ ID NO: 6150 - protein, 327 aa, Zea mays
  unsure (1)..(327): unsure at all Xaa locations
  Clone ID: TF_ZmC5838_3.pep
MADASPRTETSTDDTDDNNGLEPGRGGLVASDSSDRSKDKHGDQKTLRRLAQNREAARKSRLRKKAYVQQLENSRLKLTQLEQELQRARQQIFSLXGIFISSSVDQSHSMSGNGALAFDMEYARWLEEHNRQISELRAGVSAHASDTDLRSVVDKIMSHYDEIFRLKGNAAKADVFHVLSGMWKTPAERCFLWLGGFRPSEVLKLLSTQLEPLTEQQLSGISNLQQSSQQAEDALSQGMEALQQSLAETLAGSLSSSGSTGNVANYMGQMAMAMGKLGTLENFLRQTLQQMQRILTTRQSARALLVISDYSSRLRALSSLWLARPKE

SEQ ID NO: 6151 - protein, 227 aa, Zea mays
  Clone ID: TF_ZmC179456_1.pep
HWVPRGRPGCSMIDAMQAVSLISCNIANAVPHLTRPSPHACAHTHTHTHTIYLSTYTLPACLQLQLQPITIYTQLASFTYRKHPDRQDQRQRQRCRQEAGRALHSPTPAETKVMAQLPPRAPGGAAPQDHWSAAGEFLGFAAARRGAHRRSASDSAAFLEALPMEDVIGGDGFDRLDDDQLMSMFSDVDAPAVSAGDAAQLMDVADADADDDGSAVLVARRRGRRLR

SEQ ID NO: 6152 - protein, 123 aa, Zea mays
  unsure (1)..(123): unsure at all Xaa locations
  Clone ID: TF_ZmC342438_1.pep
RQAGSGRWKETTCRICRHHRCRTFFCAGLRGRKPPAVEKVVERRQRRMIKNRELAARSRGRKQAYMMELEAEVAKLKELNDELQKXQVEMLEKQKNEVLERMRRQVGPTIKRICLRRTLAGLW

SEQ ID NO: 6153 - protein, 258 aa, Zea mays
  unsure (1)..(258): unsure at all Xaa locations
  Clone ID: TF_ZmC1889_3.pep
MELYSGYLDDHFNPHKLSIAGSAVSPPEYMASASPAQFAAAPLRMGYGRPAPAPPPPVMGMWSSEPFRVDSGSAHATSASTVNTKLEETRLEDDVVALEPARSTEQETSRPPERAQRRLAQNREAARKSRLRKKAYIQQLETSRMKLSQLELELQRARQQQGAYANXGSMGDSALGYTCPIDPGVAXFEIDYWHWVDEQKRHTTELMSALQGQQTSSTSELELRLLVETGLSNYEHLFRIKAVASNADVFHVMSGVWK

SEQ ID NO: 6154 - protein, 267 aa, Zea mays
  Clone ID: TF_ZmC5008_2.pep
MDDGDLDFSNPDTYLCPALGTDPPSSCSMDSYFDEILKDTEHLACTHTHTCNPPVHDLSHTHTCVHVHTKIVAASPGDAESPSENNSNGNAASKKRPSGNRAAVRKYREKKKAHTASLEEEVVHLRALNQQLMKKLQSHAALEAEAARLRCLLVDIRGRIEGEIGAFPYQRPPAVKNVDLLSSVDQESLLGSAAAQVANSCDFRCNHQMYCNPGMQGAISGQVLGQGACDVASMQCIGSTKSGSTKLPVCGGLDTLPAVCLPNVEKK

SEQ ID NO: 6155 - protein, 213 aa, Zea mays
  unsure (1)..(213): unsure at all Xaa locations
  Clone ID: TF_ZmC5008_5.pep
MDDGDLDFSNPDTYLCPALGTDPPSSCSMDSYFDEILKDTEHLACTHTHTCNPPVHDLSHTHTCVHVHTKIVAASPGDAESPSENNSNGNAASKKRPSGNRAAVRKYREKKKAHTASLEEEVVHLRALNQQLMKKLQSHAALEAEAARLRCLLVDIRGRIEGEIGAFPYQRPPAVKNVDLLSSVDQESLLGSAAXPVANSCDFRXNHQMYCTP

SEQ ID NO: 6156 - protein, 171 aa, Zea mays
  unsure (1)..(171): unsure at all Xaa locations
  Clone ID: TF_ZmC30857_4.pep
ALTQSRRMPRSPQLSLSGCSSLFSLSSTSTSRDSAALKAPVPPRRTPLLSLSVGEEEEDEGEDEEEYLLGAGALDLQLTGPGGGSNSSGGYDDERKNIRMMRNRESALRSRARKRVRTRIXAAQPMSLSDTQTLQAYVQELEKEVRRLVNENLKLKRQCKQVTNSSTLCLL

SEQ ID NO: 6157 - protein, 109 aa, Zea mays
  unsure (1)..(109): unsure at all Xaa locations
  Clone ID: TF_LIB4666-020-R1-K1-A2.pep
MADASPRTETSTDDTDDNNGLEPGRGGLVASDSSDRSKDKHGDQKTLRRLAQNREAARKSRLRKEAYXQQLENSXAKLTQLEQELQRARQQGIFISRSVDQSHSMSGNG

SEQ ID NO: 6158 - protein, 154 aa, Zea mays
  Clone ID: TF_LIB4765-018-Q1-K1-C1.pep
RALAHLLLALLCWQWTCAEWRSIRTWFDFFISLENGQSGAMVPASNSSDRSDRSDKPMDQKVLRRLAQNREAARKSRLRKKAYVQQLESSKLKLASLEQELQKARQQGIFISSSGDQTHTMSGNGAMTFDLEYSRWQEEQNKQINELRTAVNAH

SEQ ID NO: 6159 - protein, 335 aa, Zea mays
  Clone ID: TF_ZmC1124_1.pep
MADASSRTDTSTVLDMDDKNQRLENGQSGAMALASNSSDRSDRSDKPMDQKVLRRLAQNREAARKSRLRKKAYVQQLESSKLKLASLEQELQKARQQGIFISSSGDQTHAMSGNGAMTFDLEYSRWQEEENKQINELRTAVNAHASESDLRLIVDGIMAHYDEIFRLKGIAAKADVFHILSGMWKTPAERCFLWLGGFRSSELLKLLVNQLEPLTEQQLMGLSNLQQSSQQAEDALSQGMEALQQSLAETLAGSLGPSGSSGNVANYMGQMAMAMGKLGTLENFLRQADNLRQQTLHQMQRILTIRQAARALLAIHDYFSRLRALSSLWLARPRE

SEQ ID NO: 6160 - protein, 360 aa, Zea mays
  unsure (1)..(360): unsure at all Xaa locations
  Clone ID: TF_ZmC1124_2.pep
MADASSRTDTSTVVDMDDKNQRIILRNFNFSLWDIXWYRSWRDACKVLENGQSGAMVPASNSSDRSDRSDKPMDQKVLRRLAQNREAARKSRLRKKAYVQQLESSKLKLASLEQELQKARQQGIFISSSGDQTHTMSGNGAMTFDLEYSRWQEEQNKQINELRTAVNAHASDSDLRLIVDGIMAHYDEIFRLKGIAAKADVFHILSGMWKTSAERCFLWLGGFRSSELLKLLVNQLEPLTEQQLMGLSNLQQSSQQAEDALSQGMEALQQSLAETLAGSLGPSGSSGNVANYMGQMAMAMGKLGTLENFLRQADNLRQQTLHQMQRILTIRQAARALLAIHDYFSRLRALSSLWLARPRE

SEQ ID NO: 6161 - protein, 151 aa, Zea mays
  Clone ID: TF_ZmC1124_8.pep
MADASSRTDTSTVVDMDDKNQRLENGQSGAMVPASNSSDRSDRSDKPMDQKVLRRLAQNREAARKSRLRKKAYVQQLESSKLKLASLEQELQKARQQGIFISSSGDQTHTMSGNGAMTFDLEYSRWQEEQNKQINELRTAVNAHASDSDLR

SEQ ID NO: 6162 - protein, 252 aa, Zea mays
  unsure (1)..(252): unsure at all Xaa locations
  Clone ID: TF_ZmC592431_1.pep
RPLCKRRGGRRPLNLNQWQQRVHPPPPAASPRPCPGSLLAAPASLPSNDLGIDPGLLLFENYSPYLEFLPADYNGFDGATWDFGNIANNNNTTAATNDNDVQNFSGDGLFDNIMIPELNVLDTQSSLDVAGDGFLSQEQPLLTVNSTTPIEYPATASSSSSTPHPPPTIRTKSPTSTSAIPGTSTFSLHPSPSSSSSSSSSRKRKSSPEEEDSAVTLKRQRNTLAARKYXQKRIDRITELEEALAAKAKECD

SEQ ID NO: 6163 - protein, 395 aa, Zea mays
  unsure (1)..(395): unsure at all Xaa locations
  Clone ID: TF_ZmC104_72.pep
EALIHGGGAASAGGGVDPGVIIKNDVAQAKXGNSQSVGSTGTDSSSAQNTMSQMELVSPASSAPRQEVMMVTTDDYSYKPGLAAAPAAAAPPSFQQHHPLPLQLHGGEGGGDHDKTERRLAQNREAARKSRLRKKAYVQQLETSRIRLQQVEHELQRARSQGLFVGGCSAAGDMSSGAAMFDMEYARWLDDDTKRLAELRGGLQAHLLDGNLGLIVEECMQHYDELFQLKAALARSDVFHLLTGSWATPAERCFFWMGGFRPSELLKILIPQLDPLTEQQLLGICNLQQSSEQAEEALAQGLHQLHQSLADTVAAGTLNDGAAAPNYMNIMAVALEKLASLENFYQQADNLRHQTLHQMRRILTTRQAARCFLSIGEYYSRLRALSNLWASRPRE

SEQ ID NO: 6164 - protein, 375 aa, Zea mays
  Clone ID: TF_ZmC14082_3.pep
MESRRGGSVAEDASGAMTSFGPPQHGINTDVNSMQPSRVTDFGALAQSAGFRIEDLVNLNANALFNLKSNTHTINNIPLQFGSYGKFEQGLVAVPTASDSSDKSRDKLDQKTLRRLAQNREAARKSRLRKKAYIQNLESSRLKLTQLEQELHQTRQQGIFISTSGDQPQSTSGNGALAFDMEYARWLEEHNKHVNELRLAVNAHAGDNDLRGIVGSVMAHYDEFFRLKGVAARSDVFHVLSGMWKTPAERCFMWLGGFRSSEVLKQSSQQAEDALSQGMEALQQSLAETLASGSLGPAGPSGNVANYMGQMAMAMGKLGTLENFLRQADNLRLQTLQQMQRILTTRQSARALLAISDYFSRLRALSSLWLARPRE

SEQ ID NO: 6165 - protein, 449 aa, Zea mays
  unsure (1)..(449): unsure at all Xaa locations
  Clone ID: TF_ZmC14082_4.pep
MESRRGGSVAEDASGAMTSFGPPQHGINTDVNSMQPSRVTDFGALAQSAGFRIEDLVNLNXNNTDVNSMQPSRVTDFGALAQSAGFRIEDXLTLMQGLKYPSLLIICLSALENWGESAMAGSPMTDTSTDPDTDERNQMFEQGLVAVPTASDSSDKSRDKLDQKTLRRLAQNREAARKSRLRKKAYIQNLESSRLKLTQLEQELHQTRQQGIFISTSGDQPQSTSGNGALAFDMEYARWLEEHNKHVNELRLAVNAHAGDNDLRGIVGSVMAHYDEFFRLKGVAARSDVFHVLSGMWKTPAERCFMWLGGFRSSEVLKLLAGHLEPLTDQQLVGISNLQQSSQQAEDALSQGMEALQQSLAETLASGSLGPAGPSGNVANYMGQMAMAMGKLGTLENFLRQADNLRLQTLQQMQRILTTRQSARALLAISDYFSRLRALSSLWLARPRE

SEQ ID NO: 6166 - protein, 181 aa, Zea mays
  unsure (1)..(181): unsure at all Xaa locations
  Clone ID: TF_LIB4729-141-A1-K1-C7.pep
MENGSGAVVPSNSSDRSDRSDKPLDQKTMRRLAQNREAARKSRLRKKAYVQQLESSKLKLAQLEQELQKARQQGIFISSSGDQTHAMSGNGALTFDIEYARWLEDQNKQINELRTAVNAHASDSDLRLIVDGIMAHYDEIFKVKGVAAKADVFHILSGMWKTPGXKCFLWXLXGFRPSELL

SEQ ID NO: 6167 - protein, 172 aa, Zea mays
  Clone ID: TF_LIB4766-040-R1-K1-D1.pep
MPTRLAPHRRSHTMENGSGAVVPSNSSDRSDRSDKPLDQKTMRRLAQNREAARKSRLRKKAYVQQLESSKLKLAQLEQELQKARQQGIFISSSGDQTHAMSGNGALTFDIEYARWLEDQNKQINELRTAVNAHASDSDLRLIVDGIMAHYDEIFKVKGVAAKADVFHILSGM

SEQ ID NO: 6168 - protein, 118 aa, Zea mays
  unsure (1)..(118): unsure at all Xaa locations
  Clone ID: TF_ZmC1124_10.pep
MADASSRTDTSIVLDDNDKNHRMENGSGAVVPSNSSDRSDRSDKPLDQKTMRRLAQNREAARKSRLRKKAYVQQLESSKLKLAQLEQELQKARQQGIFFSSSGDQTHAMXSGNGAFDF

SEQ ID NO: 6169 - protein, 185 aa, Zea mays
  Clone ID: TF_ZmC1124_3.pep
MADASSRTDTSIVLDDNDKNHRMENGSGAVVPSNSSDRSDRSDKPLDQKTMRRLAQNREAARKSRLRKKAYVQQLESSKLKLAQLEQELQKARQQGIFISSSGDQTHAMSGNGALTFDIEYARWLEDQNKQINELRTAVNAHASDSDLRLIVDGIMAHYDEIFKVKGVAAKADVFHILSGMWKTP

SEQ ID NO: 6170 - protein, 283 aa, Zea mays
  unsure (1)..(283): unsure at all Xaa locations
  Clone ID: TF_ZmC1124_4.pep
MAGGSVPSVQVGLTSSGPKFRPGPSARPPDSPLGGVGFVSPTTHPPLSSPLLQGLACLVSCVPPPPAMPTRLAPHRRSHTMENGSGAVVPSNSSDRSDRSDKPLDQKTMRRLAQNREAARKSRLRKKAYVQQLESSKLKLAQLEQELQKARQQGIFISSSGDQTHAMSGNGALTFDIEXARWLEDQNKQINELRTAVNAHASDSDLRLIVDGIMAHYDEIFKVKGVAAKADVFHILSGMWKTPAERCFLWLGGFRPSELXKLLANHLEPLTEQQMLGLTNLQQ

SEQ ID NO: 6171 - protein, 207 aa, Zea mays
  unsure (1)..(207): unsure at all Xaa locations
  Clone ID: TF_ZmC1124_6.pep
MIAMNPDMVLLSWKQMENGSGAVVPSNSSDRSDRSDKPLDQKTMRRLAQNREAARKSRLRKKAYVQQLESSKLKLAQLEQELQKARQQGIFISSSGDQTHAMSGNGALTFDIEYARWLEDQNKQINELRTAVNAHASDSDLRLIVDGIMAHYDEIFKVKGVAAKADVFHILSGMWETPAXRCFLWLXGFRPSELXKLLANHLEPLTE

SEQ ID NO: 6172 - protein, 127 aa, Zea mays
  unsure (1)..(127): unsure at all Xaa locations
  Clone ID: TF_ZmC1124_7.pep
GSHYALAPLKVFVGYDQTISTNFEQAFLQLVLPLAYQMENGSGAVVPSNSSDRSDRSDKPLDQKTMRRLAQNREAARKSRLRKKAYVQQLESSKLKLAQLEQELQKARQQGIFISSSGDXTHAMSGN

SEQ ID NO: 6173 - protein, 329 aa, Zea mays
  Clone ID: TF_ZmC5838_1.pep
MADASPRTETSTDDTDDNNGLEPARGGLVASDSSDRSKDKHGDQKTLRRLAQNREAARKSRLRKKAYVQQLENSRLKLTQLEQELQRARQQGIFISSSVDQSHSMSGNGALAFDMEYARWLEEHNRQISELRAGVSAHASDTDLRSVVDKIMSHYDEIFRLKGNAAKADVFHVLSGMWKTPAERCFLWLGGFRPSEVLKLLSTQLEPLTEQQLSGISNLQQSSQQAEDALSQGMEALQQSLAETLAGSLSSSGSTGNVANYMGQMAMAMGKLGTLENFLRQADNLRLQTLQQMQRILTTRQSARALLVISDYSSRLRALSSLWLARPKE

SEQ ID NO: 6174 - protein, 146 aa, Zea mays
  Clone ID: TF_ZmC30857_3.pep
RSPQLSLSGCSSLFSLSSTSTSRDSAALKAPVPAPPAGAVPPRRTPLLSLSVGEEEEDEGEDEEEYLLGAGALDLQLTGPGGGSNSSGGYDDERKNIRMMRNRESALRSRARKRELEKEVRRLVNENLKLKRQCKQVTNSSTLCLL

SEQ ID NO: 6175 - protein, 375 aa, Zea mays
  unsure (1)..(375): unsure at all Xaa locations
  Clone ID: TF_ZmC1889_1.pep
MTPAASPAQFAPAPLRMGYGRPAPVMGMWSSEPFKVDSGGHATCSASTVMEADTKLETSRLEDVPQVALEPERSTDQETSRPPERVMRRLAQNREAARKSRLRKKAYIQQLETSRMKLSQLELELQRARRQQGAYANSXMGDPALGYTCPIDPGVAGFEIEPKAHQRTRRRRIVAVRCILSQAVKSSGGRKKRPHRKKKKKKMFKIKAAAANADVFYVMSGLWKTPAERFFLWIGGFRPSEVLKILSPQLEPLAEAQRMLVGGLQHTSAQAEDALSQGMEKLQQNLAETLTAEADPFGPPDPYMLQMATAVGILKELVNFVTQADHLRLTTLQQMHKILTPRQAARGLLALGDYFQRLRTLSSMWAARPREAAVS

SEQ ID NO: 6176 - protein, 131 aa, Zea mays
  Clone ID: TF_LIB4759-003-R1-N1-G7.pep
RSFQPPQAKVMRRLAQNREAARKSRLRKKAYIQQLETSRMKLAQLELELQRARRQQGAYANGSMGDSALGYTGSIDPGVAAFEIEYRHWVDEQKRHTAELMSALQGQQTSSTSELELRLLVETGLSNYEHL

SEQ ID NO: 6177 - protein, 146 aa, Zea mays
  Clone ID: TF_LIB3900-010-Q1-K6-E6.pep
IASVRYLSPAAGAASLRPHYRDDFLFQFQYSDLLLAPAHPSLYQDVADHLVLGASFPAAGDNRSSSEESDAYLQRSLAEERRKRRMVSNRESARRSRVRKQKQLSELWAQVVHLRGTNRQLLDQLKCSTVSRRIRSQPTRPLVLDR

SEQ ID NO: 6178 - protein, 498 aa, Zea mays
  Clone ID: TF_ZmC2115_2.pep
EGALIVCVRHRRMGDTSSSSHSRQDPSLLGYGFHGAIANSTPPANFFDQGGGGTYFGELEEAFMHQVASLRRTQQAATVSAPHHGDTKPFPTAAGATAATATATARPPPTLDIFPAWPMRSRLHTPKECSNVTADSTDDSESSSKNHSNHSSDQLGAAAAANMASQFEQASQQQLQHKNMATSSTPRTGKALDPKVIRRLAQNREAARKSRLRKKAYIQQLESCKLKLSQMEQDMQRARTQGLFLGGDPGASTSSGAAMFDVEYARWLDNHSRRLAELNGALHAHLADGDLRAIVDDALTHHDELFQLKAMAAKSDVFHLITGVWTTPAERCFLWMGGFRPSDLLKTLLPQLDPLTEQQVVGICSLQQSSQQAEEALSQGLEQLHQSLADTMAGGSLTDDANMSFMSQMALALGKLANLEGFVIQADNLRQQTLHQMHRILTVRQAARCLLAIGEYHNRLRALSSLWASRPREILVTDEGNCEISIAAQPSQNQFSTF

SEQ ID NO: 6179 - protein, 129 aa, Zea mays
  unsure (1)..(129): unsure at all Xaa locations
  Clone ID: TF_ZmC2202_6.pep
SQLISQASFDGDIDGASLVTNSNVIEDDDFQGKPTNSGTSKELSDDDGDLEENTDPANAKKMRRMVSNRESARRSRKRKQAHLTDLESQVNXENASLLKRLADMTQKYKDASVDNKNLTVDVETMRRKV

SEQ ID NO: 6180 - protein, 314 aa, Zea mays
  unsure (1)..(314): unsure at all Xaa locations
  Clone ID: TF_ZmC2640_1.pep
RDRMENGSGAVVPSNSSDRSDRSDKPLDQXTMRRLAQNREAARKSRLRKKAYVQQLESSKLKLAQLEQELQKARQQGIFISSSGDQTHAMSGNGALTFDIEYARWLEDQNKQINELRTAVNAHASDSDLRLIVDGIMAHYDEIFKVKGVAAKADVFHILSGMWKTPAERCFLWLGGFRPSELLKLLANHLEPLTEQQMLGLTNLQQSSQQAEDALSQGMEALQQSLAETLAGSLGPAGSSGNVANYMGQMAMAMGKLGTLENFLRQADNLRQQTLHQMQRILTIRQASRALLAIHDYFSRLRALSSLWLARPRE

SEQ ID NO: 6181 - protein, 468 aa, Zea mays
  Clone ID: TF_ZmC14082_2.pep
MESRRGGSSAAAAEDAGGAMPSFGPTQHAIRADVNSMQPSRVTDFGALAQSAGFRIEDLANLNANALFNLKPNSHTIDNSPLQFGNYGKSISSHINTTEATTAATRIDPQLSAQQTGAQPILVALPTGNMENWGESAMADSPMTDTSTDPDTDERNQMFEQGLVAVPTASDSSDKSRDKLDQKTLRRLAQNREAARKSRLRKKAYIQNLESSRLKLTQLEQELQRARQQGIFISTSGDQPQSTSGNGALAFDMEYARWLEEHNKHVNELRAAVNAHAGDNDLRCIVDSIMVHYDEIFKLKGVAAKADVFHVLSGMWKTPAERCFMWLGGFRSSELLKLLAGHLEPLTDQQLVGISNLQQSSQQAEDALSQGMEALQQSLAETLASGSLGPAGPSGNVANYMGQMAMAMGKLGTLENFLRQADNLRLQTLQQMQRILTTRQSARALLAISDYFSRLRALSSLWLARPRE

SEQ ID NO: 6182 - protein, 121 aa, Zea mays
  unsure (1)..(121): unsure at all Xaa locations
  Clone ID: TF_LIB3159-013-Q1-K1-D3.pep
SDSFSHDDDDSRPRDKVQRRVAQNREAARKSRLRKKAYIRNLETSRVKLAQLEQELIMARRQQVRXGAYGVGGGVAPPAAPVDPRVAAFELEYAHWVEEQSRQATELRAALQSHAPDVQLR

SEQ ID NO: 6183 - protein, 152 aa, Zea mays
  unsure (1)..(152): unsure at all Xaa locations
  Clone ID: TF_LIB4741-023-Q1-K1-G4.pep
MASASPAQFAAAPLRMGYGRPAPAPPPPVMGMWSSEPFRVDSGSAHATSASTVNTKLEETRLEDDVVALEPARSTEQETSRPPERAQRRLAQNREAARKSRLRKKAYIQQLETSRMKLSQLELELXRARQQQGAYANSGSMGDSALGYTCPI

SEQ ID NO: 6184 - protein, 213 aa, Zea mays
  unsure (1)..(213): unsure at all Xaa locations
  Clone ID: TF_LIB4765-063-R1-K2-F8.pep
MTPAASPAQYMTPAPLRMGYGRPAPVMGMWSSEPFKVDSGGHATCSASTVMEADTKLETSRLQDDVPQVALEPERSTDQETSRPPERVMRRLAQNREAARKSRLRKKAYIQQLETSRMKLAQLELELQRARRQQGAYANGSMGDPALGYTGSIDPGVAAFEIEYRHWVDEQKRHTAELMSALQGQQTSSTSELELRLLVETXLSNYEHLFRIK

SEQ ID NO: 6185 - protein, 164 aa, Zea mays
  Clone ID: TF_ZmC30857_2.pep
GSHSPGDEPPSPAPAHRPSSLPWSAALPVPHHPDLLPLVVVAAAAVAAATGPRQLQIQGAGPQQVLLLVLTLVLFLLADAERQERGAPWGHRRLQGGAVAARTGAGQGEERAAAAQAQLRAPRHPPWIGLELRAAGSTIAASGQRRTHTDGLDHAKCDSSSLPG

SEQ ID NO: 6186 - protein, 349 aa, Zea mays
  unsure (1)..(349): unsure at all Xaa locations
  Clone ID: TF_ZmC34730_1.pep
MMMANAKLHKQALLPPRSPFPTAAPYADRGPIARPQVGSTHHRHGHHQRTSSESFIEEQPPSWLDDLLNEPETPAARQSGRAGHRRSSSDSFALFDGGAAXLVLTPMVSRGWGEEVGNLRRGAVCRSTMPSWPRLGGHMAGRGSKACRIRRASGMVVACQCPQKIRLVGIMGHRKCRGSMTMAXDKRTDDAGHDQKVGAKEGVPPKHAQSEADNKRAKQQYAQRSRVRKLQYIAELESRVQALQSEGVEVSAEMEFLSQQNIMLDLENKALKQRVESLAQEQLIKRFQQEMFEREIGRLRTIYQQQQQQQAPALVRSNSRDLDVQFANLSLKHKDPNTGRDALSGPLRT

SEQ ID NO: 6187 - protein, 150 aa, Zea mays
  unsure (1)..(150): unsure at all Xaa locations
  Clone ID: TF_LIB5117-060-A1-PF1-H9.pep
MADASSRTDNSTVLDNDGKIYRLEQGQSGGAIMASNSSDRSDRSDKPLDQKTLRRLAQNREAARKSRLRKKSYVQQLESSKLKLAQLEQELQKARQQGIFISSSGDQTHAMSGNGAMTFDLEYTRWLEDXXXQIHELRTAVNAQCSDSDL

SEQ ID NO: 6188 - protein, 363 aa, Zea mays
  Clone ID: TF_ZmC1399_1.pep
LREAQEKSGSLSSDSNSEMAYASPGTDDTSTDLDTDEKNHMLELGQLVSLTASDSGNKAKDKLLGQKALRRLAQNREAARKSRLRKKAYVEQLENSRLKLSQLEQELQRARQQGIFIPTPGDDQQPNSTSEKGALAFDKDYAGWEDEHRKQISELRAALSAHAGDDELRRIVDGVMAHHHEAFRLKCVAARADAFHVLSGMWKTPVERCFMWLGGFRPSEILKFLASHLDPLTERQLASVHGLQQSSQQAEEGISQRVQALQQSVAETLASSGSPCLPVPAGRAPPPGDDAAPDCSGTMAAAVAKLVALESLVHEADGLRRQTLEQMQRVLTTRQSARALLVISDYLSRLRALSSLWIARPRE

SEQ ID NO: 6189 - protein, 363 aa, Zea mays; identical to SEQ ID NO: 6188
  Clone ID: TF_ZmC1399_2.pep

SEQ ID NO: 6190 - protein, 179 aa, Zea mays
  unsure (1)..(179): unsure at all Xaa locations
  Clone ID: TF_ZmC1399_3.pep
LREAQEKSGSLSSDSNSEMAYASPGTDDTSTDLDTDEKNHMLELGQLVSLTASDSGNKAKDKLLGQKALRRLAQNREAARKSRLRKKAYVEQLENSRLKLSQLEQELQRARQQGIFIPTPGDDQQPNSTSEKGAXLAFDRDYAGWEDEHRKQISELRAALSAHAGDDELRRIVDGVMAH

SEQ ID NO: 6191 - protein, 452 aa, Zea mays
  Clone ID: TF_ZmC3233_1.pep
LEAWPRELQPAAAAPYYFGELEEALIHGTRTSVDHGMIGSDVDTERKTAGYLAARPPTLEIFPSWPMSHLQQPYSGNSHSVGSTTESSSGQNSMPQTELVSPGSMRADSGQRQELLMVTVDDYNYEQGLGAAATTAPIFQQHAAGQDKGKHGSTRKDGRLLDAKTERRLAQNREAARKSRLRKKAYVQQLETSRIRLQQIEQELHGARSQGLFPGGGGAAGDLSSGAVIFDMEYARWLEDDASRMTELQAVLQPQIIDANLGAIVEDCMRHYDELFHLRAMLARSDVFHLMTGLWATTAERCFLWMGGFRPSEILKMLIPQLDPLAEPQLLGMYNLQRSSEQTEEALVQGLQQLHQSLADAVGASPLSDGANVANYTALMALALDRLDTLESFYRQADSLRQQTLHQMRRILTTRQTARCFVSISEYHRRLRALSSVWASSRPPTPPSEGVV

SEQ ID NO: 6192 - protein, 105 aa, Zea mays
  Clone ID: TF_LIB3279-234-Q6-N6-E9.pep
VDRRQKRMIKYHESAARSRARKQAYTIELENKVARLEEENKRLIELKVLKPLEPLEPPPAEQNKKQPPPQPKRKQPQPPPPPPPPIQQLPPKHRHDLRRTNSATF

SEQ ID NO: 6193 - protein, 108 aa, Zea mays
  unsure (1)..(108): unsure at all Xaa locations
  Clone ID: TF_LIB3060-074-Q1-K6-A2.pep
XGERLSSKNGGWRRRRRRRGGGELRRQRRRRPRRIRRGAQEEARPVLRRRRQIHGDIDGASLVTNSNVIEDDDFQGKPTNSGTSKELSDDDGDLEENTDPANAXKMRS

SEQ ID NO: 6194 - protein, 218 aa, Zea mays
  Clone ID: TF_ZmC3114_3.pep
KGKGKGGGASPEKGSSGAPSGEDDSRSSDSGSDESSETRDDDTDHKGSSAPKKRKSGNTSAEGEPSQAAVVRYATVESPYPAKGRSASKLPVSAPGRAALPSATPNLNIGMDIWNTSPALAVPAVQGEANPGLALARRDSVTQLDERELKRERRKQSNRESARRSRLRKQVVLESVHPHFLQNGMVKNIQTHAHTRTCSLVPVNLVKICLQDNSRQVG

SEQ ID NO: 6195 - protein, 382 aa, Zea mays
  unsure (1)..(382): unsure at all Xaa locations
  Clone ID: TF_ZmC3100_2.pep
MAQLPPRIPTEVHHWPEGGQHGAAAAAWADDFAEFAAARRGAHRRSLSDSVAFVEVAPADGGAGEFDRLDDDQLLSMFPPDEAGGSGGGGGSSAAGSENGGSSDSDGDKRGARGGPAGGAPSTGSGGGEQNGVVDAQAPATGGQAAVVASTELIRDPKRVKRILANRQSAQRSRVRKLQYISELERSVTTLQLTCCXVHAEPCSRRLHSAAHVVLHVYWNLKPECKGGKKKNPDQSKNMHGDSFSFMVSSTVPRVKNFVGVACLLACYCSARCCVVVTLXPTVCLPCACLQNEVSVLSPRVAFLDQQRTILSVGNSHLKQRIAALAQDKIFKDAHQEELKKEIERLRRVYDQQNLRMSAGGAAASDHGPPPPVVRAEKELMS

SEQ ID NO: 6196 - protein, 153 aa, Zea mays
  unsure (1)..(153): unsure at all Xaa locations
  Clone ID: TF_LIB4699-001-R1-K1-D1.pep
VVWLVXPXXRCGACAGRRWXWRPPGWAPPWXAXAGRPPXSPPXCPWXRRXXPRXVGAPRCRCGGGRXARRRGPXARCSLAXRGCSGSXCRRRGPXRARCRPAGAXPPXXARXGAAASXAGXAAPXRGSXAGASRACACPPPCRRPXRXSSPPS

SEQ ID NO: 6197 - protein, 320 aa, Zea mays
  Clone ID: TF_ZmC15860_2.pep
MSRSPHLPPRCPPLGPQITRRDDGMFTQSCRFPSGDTFIGEPPCWLDDLLEDSGKAPKLPPLRRACSDSDAILDALSTFQSPIYPIEECDLNSGGEAEDLLGGVEGDESGSVVEASCFYGPNSPRQKSRLTTSESSMVNAVLENVPGNPLQYLTIDACSDVNGNVANVTADACDAFGHPDQDKSFKRRSGQRSRVRKLQYIAELERTVESLQNIGADLAVRVSSLFQLHNALSMENKQLRVQISSLQRAKLIKDGQTQALKNEAERLKRMSARRSRSATASCYDPGSFSFGADASSVSWQMPDMARLSLNGGSPRGSYGL

SEQ ID NO: 6198 - protein, 240 aa, Zea mays
  Clone ID: TF_ZmC13996_1.pep
MRGGGQVASLAGAPEFFPEPASFGRPWESRQMYRQGGGMPMPGREKNGGRHGPSSSFGEHELGHVPNGVNRKAHGDAAYDQRIVIERKEGLRHSQSETDTKRAKQQYAQRSRVRKLQYIAELERRVQSLQTEGIEVTAEMDFLGQQNIMLDLENKALKQRLESLSQEHLIKRYQQEMFEREIGRLRTLFQQQQQQQHVPQQQAPTHSRSNSRDLDSQFANLSLKHSDPSSGRDAISGLRI

SEQ ID NO: 6199 - protein, 144 aa, Zea mays
  unsure (1)..(144): unsure at all Xaa locations
  Clone ID: TF_LIB4762-034-R1-K1-F3.pep
MPQTAVSTTAGRTSGSDGDSWADTHRREKGRLSNRETPREAGLRKQHNLDELEQEVARLXADNARVGARATDIAYYDTRVKQDNTVLRTRADELIDRVQFVHEVLNLGEELSDEDVDRYERDXPDDDPVVHTWYEEYPDVMMPM

SEQ ID NO: 6200 - protein, 115 aa, Zea mays
  Clone ID: TF_LIB4698-005-R1-K1-E1.pep
SCWTRVAGCKPVACSKREVKQYKSTLSLDGGDKNLNHVKLLKKTKKTMLILCHYIFLSFFCSNLDVGHQYRDSLTFFLSLLFLAASLFWASLLSVCRRVHYSMVHKQGTKLVQQK

SEQ ID NO: 6201 - protein, 105 aa, Zea mays
  unsure (1)..(105): unsure at all Xaa locations
  Clone ID: TF_jC-zmX700344307a1.pep
IRLEVINTDWHKQSNRDFARRYTLREQHECEELARKVTNLTTDNSAFRVYLDNLKKACQDMEAANPRMXGMGLADTQLPSVTTTLRMSIEPPNLQLQLXQHYDEE

SEQ ID NO: 6202 - protein, 156 aa, Zea mays
  unsure (1)..(156): unsure at all Xaa locations
  Clone ID: TF_700217015_FLI.pep
RNRDSAMKSRERKKSYIKDLETKSKHLEAECRRLSYALQCYAAENMALRQSLLKDRPLGAPTATQESAVLTGKTXTLPLVSLLWLVSIVCLFLMPVLPNRSPAAPSSGGRDLVMAAGKTSSETPEILELILHGRRCKSTRAKIKLCILPFHAGAAC

SEQ ID NO: 6203 - protein, 183 aa, Zea mays
  Clone ID: TF_ZmC3114_4.pep
HDHKDSSAPKKRKSGNTSAEDEPSQATVVRYAAVESPYPAKGRSASKLPVSAPGRAALPSATPNLNIGMDIWNASPALAVPAVQGEVSPGLALVRRDGVTQLDEREIKRERRKQSNRESARRSRLRKQQECEELARWGHVESPPLQPCIIYGSSRCALCFFVCCVKTIDVTKPREPRGFFYVC

SEQ ID NO: 6204 - protein, 105 aa, Zea mays
  unsure (1)..(105): unsure at all Xaa locations
  Clone ID: TF_LIB3245-262-P1-N1-F7.pep
GQVAVGAQSALGAKKRGRTAGDKEQNRLKRLLRNRVSDQQAQXRENAFITELDVKVNGLELRNAXLEQIVCTLQNENNTLRQILKNTTAHASMTYRGLRGCHGKV

SEQ ID NO: 6205 - protein, 141 aa, Zea mays
  unsure (1)..(141): unsure at all Xaa locations
  Clone ID: TF_LIB4762-036-R1-K1-F3.pep
GRSAWDRRRRGVDTHRXEKRRLSNRESARGAGLRKQKNLDELEQEVARLXADNARVGARAVDIAYYDTRVEQENTVLRARADELGDRLRFCNEVLRLGEELSGDDMDIXKEMPEDDPVLHTWYLAYPDAVMPIGAQDMLHY

SEQ ID NO: 6206 - protein, 117 aa, Zea mays
  Clone ID: TF_ZmC19483_3.pep
MDDGADLPCQLLFSHPEMPHSFDEFFSGATTTTTCTHTHSCDPPGPSAAMHTHTCLHTHTQVLGSGGEDDGSAKPRRPLGNREAVRKYREKKKARASFLEGGVKKLRAANQQLVRRL

SEQ ID NO: 6207 - protein, 307 aa, Zea mays
  Clone ID: TF_ZmC2115_1.pep
MCQQVIRRLAQNREAARKSRLRKKAYIQQLESCKLKLSQMEQDMQRARTQGLFLGGDPGASTSSGAAMFDVEYARWLDNHGRRLAELQGALQAHLPDGDLQAIVDDALTHHDELFQLKAMAAKSDVFHLITGVWTTPAERCFLWMGGFRPSDLLKTLLPQLDPLTEQQVVGICSLQQSSQQAEEALSQGLEQLHQSLADTMAGGSLIDDANMSFMSQMALALGKLANLEGFVIQADNLRQQTLHQMHRILTVRQAARCLLAIGEYHNRLRALSSLWASRPREILVTDEGNCEISIAAQPSQNQFSTF

SEQ ID NO: 6208 - protein, 197 aa, Zea mays
  Clone ID: TF_ZmC11397_2.pep
PRVRDRAADCLFARSKERKSRYITELERKVQTLQTEATTLSAQLTLFQRDTTGLSAENAELKIRLQAMEQQAQLRDALNDALKQEVERLKIATGEMPKSNEQFNMGMQHVSYSGPSFFHLPEQHVDIQLPHHFQQPPRNVQMLSHPNSLSDMAQQDSLGRLRGLDIGKGSMAMKPEAEVVVKSEGSSVSAGESNTTF

SEQ ID NO: 6209 - protein, 141 aa, Zea mays
  Clone ID: TF_ZmC42267_1.pep
KKKKTARRGARGSPASPLDYSGASTSGGEDGAFCSRPEPALPPAAACQQLAAPTPPSKVGGLAGRRTTPPVPVPVPLPPPRPAGQRARKKMRLPEIQQMVRSLSVENDALRKEMRALRRDCTALSQENGKLETRLHQSVTL

SEQ ID NO: 6210 - protein, 191 aa, Zea mays
  Clone ID: TF_ZmC11397_1.pep
SKERKARYITELERKVQTLQTEATTLSAQLTLFQRDTTGLSAENAELKIRLQAMEQQAQLRDALNDALRQEVERLKIATGEMSKSNNEHFNMGMQHVSYSPSFFQLSEQHTMQQHGNIQLPHHFQQPPLTVPSHQMLSHPNSLSNMVQQDSLGRLQGLDIGKGSMAVKSEAEVVVKSEGSSISAGESNTTF

SEQ ID NO: 6211 - protein, 229 aa, Zea mays
  Clone ID: TF_ZmC19483_1.pep
MDDGADLPCQLLFSHPEMPDSFDEFFNSATTTCTHTHSCNPPGPSVAMHTHTCLHAHTLVLGSGGEDDDDAREDSAKPRRPLGNREAVRKYREKKKAHAAFLEEEVKKLRAANQQLQRRLQGHAALEAEVARLRGLLLDIRGKIDAEVGGVLPFQKPCSVGSVACADPALCFNGNSEVGGGWEESSRPAAADCRIDEVRGMSREIDVPEGLRHSMDVVASFVSSDPLAE

SEQ ID NO: 6212 - protein, 151 aa, Zea mays
  unsure (1)..(151): unsure at all Xaa locations
  Clone ID: TF_ZmC2315_12.pep
MSSSSLSPTAGRTSGSDGDSAADTHRREKRRLSNRESARRSRLRKQQHLDELVQEVARLQADNARVGARAADIASQYTRVEQENTVLRARAAELGXRLRSVNEVLRLVEEFSGVAMDIQEEMPADDPLLRPWQLPYPAAAMPIGAPHMLHY

SEQ ID NO: 6213 - protein, 371 aa, Zea mays
  unsure (1)..(371): unsure at all Xaa locations
  Clone ID: TF_ZmC491_1.pep
MGSSGADTPSKEQQPPATSGAAIPPVYPDWSSFQAYPPIPPHGFFPSPVASSPQGHPFMWGAQAMIPPYGTPPPYVMYPPGVYAHPSMPPGAHPFTPYAITSPNGNADAXSGNTDGKPSEGKDKSPTKRSKGSLGSLNMLTGKNPSEHGKSSGASGNGVTSQSGESGSDSSSEGSEGNSHNDSHHKESGQEHDGDVRSSRNGVSRLQSEGKLNQAMAILPIPSSGPATDPTTNLNIGMDYWANTASSAPAIHGKATSTTVPGAVVPAEQWTQDEHELKKQRRKQSNRESARRSRLRKQAECEELAQRADVLKQENASLRDEVNRIRKEYEELLSKNNSLKEKLEGKQHKTDEAGLNNKLQHSGNDIQKKGN

SEQ ID NO: 6214 - protein, 382 aa, Zea mays
  Clone ID: TF_ZmC491_2.pep
MGSSGADTSSKPNKASAPQEQQQPATSGAATPAVYPDWSSFQAYPPIPPHGFFPSPVASSPQGHPYMWGAQPMIPPYGAPPYVMYPPGVYAHPSMASGAHPFTPYAITSPNGNADATGTTAVACDTDGKPSEGKDKSPTKRPKGTLGSLNMLTGKNPSEHGKTSGASANGATSQSGESGSDSSSEGSEGNSHNDSYKHSGQEQDGDVRSSQNGASRSPSEGKFNQAMAIMPMPSSGPVTGPTTNLNIGMDYWANTASSAPVIHGKVTPTTVPGAVVPAEQWIQDERELKRQKRKQSNRESARRSRLRKQAECEELAQRADVLKQENASLRDEVNRIRKEYEELLSKNNSLKEKLEGKQHKTDEAGLNNKLQHSGNDIQKKGN

SEQ ID NO: 6215 - protein, 382 aa, Zea mays; identical to SEQ ID NO: 6214
  Clone ID: TF_ZmC491_3.pep

SEQ ID NO: 6216 - protein, 175 aa, Zea mays
  unsure (1)..(175): unsure at all Xaa locations
  Clone ID: TF_LIB3594-052-Q1-K7-B11.pep
GKPEEEARGREDATAAAAAAAGAEQKAHDAAPGAGXXPXSXXXAXSXXDXNTRKGTGNXXXHXXXXNHNXRXPAXXTTXEXQXXNXAXAAAXPTXXTNXXXKESQXXGGTRXXDXDSXXXXDNEGGPXEQSTNPQDXKRXRRXGXNREXXRRARKRKQAHPXDXETQXDQXRSEN

SEQ ID NO: 6217 - protein, 202 aa, Zea mays
  Clone ID: TF_ZmC458523_1.pep
LGTSRPAGTLQRLATSQSFQRVSSGMQQSCAAANLARLPLPVVPGLEDLASLFLARNGPVPAHDYSSSFDLDVAVGLDPAYYYYCPHSCDGGVAIATPVSSVSAERKRRRLASNRASARRSRARRQRRLHELSLRAAELLGANQRLLVELNRVVARHGAVARENARLREEAAGLRRRLGEVEEVGEAAAAAAAGQGPLRAPS

SEQ ID NO: 6218 - protein, 202 aa, Zea mays
  Clone ID: TF_ZmC19483_2.pep
MDDGADLPCQLLFSHPEMPDSFDEFFNSATTTCTHTHSCNPPGPSVAMHTHTCLHAHTLVLGSGGEDDDDAREDSAKPRRPLGNREAVRKYREKKKAHAAFLEEEVKKLRAANQQLQRRLQGHAALEAEVARLRSLLLDIRGKIDAEVGGVLPFQKPCSVGSVACADPALCLTARVGGARRLQRKLMSQKACVIPWMLLRAS

SEQ ID NO: 6219 - protein, 342 aa, Zea mays
  Clone ID: TF_ZmC25151_1.pep
LVPRAGTRRSQSDIPFGFAQLSPPLPPPAPVKREVTAAADGCRSDGGGGDDAALYDLVNAYMDLDGLDPLNSSEDRHDDRDSRASGTRAGSAAESSENEAESQSTSADRKDGGKSRHCRSLSIDSFMGKLSFAAGEESPKLPLPSPGGSLTRSGSGSLEGGAVALFNMEFTNGEFTDSEKKKIMANERLAEIALTDPKRVKRILANRQSAARSKERKMRYIQELEHKVQVLQTEATTLSAQLTMLQRDSAGLATQNNELKIRLQAMEQQAQLRDALNEALTAEVQRLKLATGEVTDGRMPKGLQQQMNSQMLQIQQLQVQQQAPQAQQQGQRQQQQQPQKSA

SEQ ID NO: 6220 - protein, 213 aa, Zea mays
  Clone ID: TF_ZmC25151_2.pep
QLRRRDESPKLPLPSPRASGSLTRSGSGSLEGGAVALFDMEFSNGEFTESEKKKIMANERLAEIALTDPKRVKRILANRQSAARSKERKMRYIQELEHKVQVLQTEATTLSAQLTMLQRDSAGLATQNNELKIRLQAMEQQAQLRDALNEALTGEVQRLKLATGEMTDGPMPKGLQQQMNSQMLQLQQLQIQQQAPPQQTQQQGQRQQPQKSA

SEQ ID NO: 6221 - protein, 168 aa, Zea mays
  Clone ID: TF_ZmC9417_4.pep
MQEQPASSRPSSSERSSSSAHHMDMEVKEGMESDEEIRRVPELGLELPGASTSGREVGPGAAGADRALAQSSTAQASARRRVRSPADKEHKRLKRLLRNRVSAQQARERKKAYLTDLEVKVKDLEKKNSEMEERLSTLQNENQMLRQILKNTTVSRRGSGSTASGEGQ

SEQ ID NO: 6222 - protein, 153 aa, Zea mays
  Clone ID: TF_LIB4744-124-Q1-K1-A3.pep
GSTTPPSHMRQERGQSQQGRRRRGRGSDAGPRLQGGEREAAQREEPARLAGAARERGGLGAEPRVLAAHGEVVPRQGLQPGLQLLLLGAEPRRRLAELLQPLLLPRARPLRREPVRHLAALTPEPLLVLRVRVPRRLGLGLGQRRRDDAAGLE

SEQ ID NO: 6223 - protein, 278 aa, Zea mays
  Clone ID: TF_ZmC3100_1.pep
MAQLPPRVPTAVHRWPEGGHHGAAAWADDFAEFAASRRGAHRRSLSDSVAFVEVAPAAGEFDRLDDDQLMSMFPDEAAAGGGGGGSSAAGSENNGGSSDSYGDRRGGGGPAAGGTSTTTSCNGFDGGEHNEAADAQATGQAAAAAAASTELIRDPKRVKRILANRQSAQRSRVRKLQYISELERSVTTLQNEVSALSPRVAFLDQQRTILTVGNSHLKQRIAALAQDKIFKDAHQEALKKEIERLRQVYEQQNLKMSAGAAASDHGPPPVRAEKELMS

SEQ ID NO: 6224 - protein, 412 aa, Zea mays
  Clone ID: TF_ZM3393.C1.o2.fg.pep
MASEMSKNVKALDEQEVTSQHSRAQTSDAAEEQQQQQQAVDPLARQSSIMSLTLEELQNSLCEPGRNFGSMNMDEFMANIWNAEEFQAATAGCNKEGAEREPVPVATTTGTGENGGGGGSGRGLVRQGSFALPPPLSRKTVEEVWAEISQGPADFQASAAPQPVAQPQAASGGGVAASGRQATLGEMTLEDFLVKAGVVRGAFAGHGHGVGMVPAGPMGMQHNAAPPMMYQVAAAAAPPPGAVYPVMGDGMGYHGGGYPGGVAVVPPPPPSQCVAAAASPGSSDGMSAMTQAEMMNCIGNGGVVRNGGGGARKRDFPEDGCTEKTVERRQRRMIKNRESAARSRARKQAYTVELEAELNHLKEENERLRAEERTILLSKKKMLVEKMMEQARENVSAKKVGPGLRRWGSAMW

SEQ ID NO: 6225 - protein, 563 aa, Zea mays
  Clone ID: TF_ZmC2896_1.pep
MAEPALLAPDPFADLPFPEFQAPIDGDSFALEDFDLEDLDLDVDFDLDLFASDGQPSQPPPLATSSSSAGSPVGGSSSSGAVGDGGGLRNEESSESSSRSASGTDGSGKGKGEEDEAKRRARQVRNRESAHLSRQRKKQYVEELEGKVKAMQATIADLSARISCVTAENAALKQQLGGAAGAAPPPMPMYPTMYSLPMPWMHPSYPMRGSQVPLVPIPRLKPPQPASAVAEPPAKKARKTKKVASVSLLGLICVAMLCGCLIPAVNRMYDSVDAGEGAAYGPSHRGRVLAVEGPHDNVSDGVDPKPPQRASETLPALLYLPKNGKHVKINGNLVIKSIVASEKASLQMSGNDGKRPQNQEEETRLAIPGYVTPLKAGEVMESTEGMMNNELLALAPADGSMYREEDGLLPQWFSEAMSGPLLSSGMCTEVFQFDVSPSSAHPNGIIPVYSNAMSNSSQNFTQDLPPARVRTVKNRRISYSEAIPLRGSTSNDTEHLKSFGSTKPVSSVVVSVLADPREAGDGDGEGRISSKSLSRILVVVLIDSVKYVTYSCVLPFKSHSPHL

SEQ ID NO: 6226 - protein, 356 aa, Zea mays
  Clone ID: TF_ZmC13853_5.pep
MEFKNCGSSSQPRPAVVVGEAALARQGSVYSLTFDEFQSALGGAAAGGGGGGSIPKGFGSVNMDELLRSIWTAEETQAMASASAGAGAGMPPTPLQRQGSSLTLPRTLSTKTVDEVWRNLVRDEPPQGADGGGHQQPHRQSTLGEMTLEEFLVRAGAVKENPASAPPAPPPMVPPRPVPVAPKSSAFFGDLPGADDDAATAAVGFAPVGMVDLALIPPRAAGMGGSAMAVQTAVSQLDSVGKGYSDLSSLTEPQTFSFERMIRGRRHGGGVEKVVERRRRRMIKNRESAARSRARKQAYTMELEAEVQKLREQNQELERKQAEIMEMQNNEVSEMLKDPFGRKKRLCLRRTLTAPW

SEQ ID NO: 6227 - protein, 276 aa, Zea mays
  Clone ID: TF_ZmC5008_1.pep
MDDGDLDFSNPDTYLCPALGTDPPSSCSMDSYFDEILKDTEHHACTHTHTCNPPVHDLSHTHTCVHVHTKIVAASPGDDTADSPSENNTNGSGGNGSNAASKKRPSGNRAAVRKYREKKKAHTASLEEEVVHLRALNQQLVKKLQSHAALEAEVARLRCLLVDIRGRIEGEIGAFPYQRPPPAAKNVDLVSGVDQGGFLAGAAAQVTSSCDFRCNDQMYCSPGMQGAVGGQVLGQGACDVSSIQCVGSTRSASTKLPVCGGMDAVPAACLPNVQNK

SEQ ID NO: 6228 - protein, 276 aa, Zea mays
  Clone ID: TF_ZmC5008_3.pep
MDDGDLDFSNPDTYLCPALGTDPPSSCSMDSYFDEILKDTEHHACTHTHTCNPPVHDLSHTHTCVHVHTKIVAASPGDDTADSPSENNTNGSGGNGSNAASKKRPSGNRAAVRKYREKKKAHTASLEEEVVHLRALNQQLVKKLQSHAALEAEVARLRCLLVDIRGRIEGEIGAFPYQRPPPAAKNVDLVSGVDQGGFLAGAAAQVTSSCDFRCNDQMYCSPGMQGAVSGQVLGQGACDVSSIQCVGSTRSASTKLPVCGGMDAVPAACLPNVQNK

SEQ ID NO: 6229 - protein, 274 aa, Zea mays
  Clone ID: TF_ZmC5008_4.pep
MDDGDLDFSNPDTYLCPALGTDPPSSCSMDSYFDEILKDTEHLACTHTHTCNPPVHDLSHTHTCVHVHTKIVAASPGDAESPSENNSNGSGGNGSNAASKKRPSGNRAAVRKYREKKKAHTASLEEEVVHLRALNQQLVKKLQSHAALEAEVARLRCLLVDIRGRIEGEIGAFPYQRPPPAAKNVDLVSGVDQGGFLAGAAAQVTSSCDFRCNDQMYCSPGMQGAVSGQVLGQGACDVSSIQCVGSTRSASTKLPVCGGMDAVPAACLPNVQNK

SEQ ID NO: 6230 - protein, 159 aa, Zea mays
  Clone ID: TF_ZmC7838_2.pep
MASSSGSGSSGFLSAALDAAATAGTEEELRALMAQRRAKRMLSNRESARRSRMRKQRHLDELTAQAAHLRRENAHVATALGLTAQGLLAVDAENAVLRTQAAELAARLGSLNDILACMNTTNAAAASSDPYLAFDGAATALDDLLKSCPDSMMFEYQLC

SEQ ID NO: 6231 - protein, 310 aa, Zea mays
  Clone ID: TF_ZmC2202_1.pep
MAGGGAGDDDVVVVSCGGRGGGDPGAYAAVLKRKLDLYCAAVAKSMEAKSQEHSLGYPNSQASDASQLISQASFDGDIDGASLVTNSNVIEDDDFQGKPTNSGTSKELSDDDGDLEENTDPANAKKMRRMVSNRESARRSRKRKQAHLTDLESQVSRLTSENASLLKRLADMTQKYKDASVDNKNLTVDVETMRRKVNIAEEAVRRLTGITLMLPTAFEKPASSAPLSSCPSDAASASASAAIEDSVKHFLQAPLENSGIIPNAAVFQTKPASLHRVASLENLQKRIVGDAMYSETASTTFSDPEALADR

SEQ ID NO: 6232 - protein, 312 aa, Zea mays
  Clone ID: TF_ZmC2202_2.pep
MLVWPGLRLLPTPILPLPEYEVLERERLSSKNGGWRRRRRRRGGGELRRQRRRRPRRIRRGAQEEARPVLRRRRQIHGDIDGASLVTNSNVIEDDDFQGKPTNSGTSKELSDDDGDLEENTDPANAKKMRRMVSNRESARRSRKRKQAHLTDLESQVSRLTSENASLLKRLADMTQKYKDASVDNKNLTVDVETMRRKVNIAEEAVRRLTGITLMLPTAFEKPTSSAPLSSCPSDAASASASAAIEDSVKHFLQAPLENSGIIPNAAVFQTKPASLHRVASLENLQKRIVGDAMYSETASTTFSDPEALADR

SEQ ID NO: 6233 - protein, 200 aa, Zea mays
  Clone ID: TF_ZmC2202_5.pep
MAGGGAGDDDVVVVSCGGRGGGDPGAYAAVLKRKLDLYCAGGAKSMEAKSQEHSLGYPNSQASDASQLISQASFDGDIDGASLVTNSNVIEDDDFQGKPTNSGTSKELSDDDGDLEENTDPANAKKMRRMVSNRESARRSRKRKQAHLTDLESQVSRLTSENASLLKRLADMTQKYKDASVDNKNLTVDVETMRRKVRSS

SEQ ID NO: 6234 - protein, 106 aa, Zea mays
  Clone ID: TF_jC-zmX148064Q1E1B1b1.pep
ADTHRPPKRRMANRETARRTRLRKQQHQDELEQEVARLQADNAREAARAADRATQNTRVEQENTGLRARAAELGDRRRSDNEVLPPREEFSGVAMDKQEEMPADDP

SEQ ID NO: 6235 - protein, 185 aa, Zea mays
  Clone ID: TF_ZmC773_10.pep
MAAQEHEHEHEHEKQQAKTSTTSSLPSSSERSSSSAPNNLREGAAGAGVESDEEIRRVPELGGASASASASSGAGKEDGARAVAAGAQGHPPAAGKKRGRAPGDKEQNRLKRLLRNRVSAQQARERKKAYLTELEVRAKDLELRNAELEQRVSTLQNENNTLRQILKNTTAHASKRSGGGGGKGG

SEQ ID NO: 6236 - protein, 173 aa, Zea mays
  Clone ID: TF_ZmC3503_8.pep
MDGATSPFEGESALSSGLPDYAKKAMPAERIAELALIDPKRAKRILANRQSAARSKERKIKYTSELERKVQTLQTEATTLSAQLTLLQRDTSGLTTENRELKLRLQAMEEQAKLRDEHYEANALNDALREEVQRLKIAAGQVPNMNGNPFNGGLSQQQQVPSYFLHTQQMQYF

SEQ ID NO: 6237 - protein, 428 aa, Zea mays
  Clone ID: TF_ZmC947_1.pep
MASEMTKNVKALDEQEVTSQHSRAQTSDAAEEQQQQQQAVDPLARQSSIMSLTLEELQNSLCEPGRNFGSMNMDEFMANIWNAEEFQAATAGCNKEGAEREPVPVATTTGTGENGGGGGSGRGLVRQGSFALPPPLSRKTVEEVWAEISQGPADFQASAAPQPVAQPQAASGGGGVAASGRQATLGEMTLEDFLVKAGVVRGAFAGHGHGVGMVPAGPMGMQHNAAPPMMYQVAAAAAPPPGAVYPVMGDGMGYHGGGYPGGVAVVPPPPPSQCVAAAASPGSSDGMSAMTQAEMMNCIGNGGVVRNGGGGARKRDFPEDGCTEKTVERRQRRMIKNRESAARSRARKQTRSRSAPGMMPMLVQAYTVELEAELNHLKEENERLRAEERTILLSKKKMLVEKMMEQARENVSAKKVGPGLRRWGSAMW

SEQ ID NO: 6238 - protein, 405 aa, Zea mays
  Clone ID: TF_ZmC191_2.pep
MERVFSVEEIPNPYWVPPHPQSAAAGAVAAPAGEAAGLMNRCPSEWYFQKFLEEAVLDSPVPVAGASRGSVGAGVEAAESKTPGAAAPAAASSSVVDPVEYNAILKQKLEKDLAAVALWRASGAAPPDHSPAGSSLPSVDVPHAGPLKPIGGTGSLVQNKLPGAPGGGSSPHVLQNADIPVKQTTSSSSREQSDDDDMEGDAETTGNGNPVQHRLQRRKQSNRESARRSRSRKAAHLNELEAQVAQLRVENSSLLRRLADVNQKFNEAAVDNRVLKADVETLRAKVKMAEDSVKRVTGMNTLFPAVSDMSSLSMPFNGSPSDSASDAAVPIQDDLNSYFANPSEIGGSNGYMPDIASSVQEDDDFVNGAQVAGKMGSTDSLQRVASLEHLQKRMCGGPASSGSTS

SEQ ID NO: 6239 - protein, 270 aa, Zea mays
  Clone ID: TF_UC-ZMROTEOSINTE106E02_FLI.pep
LKPIGVWSGLDIGHVSGTGSLVQNKLVGAPGGGSSPHVVQNADIPVKQTTSSSSREQSDDDDMEGDAETTGNGNPVQHRLQRRKQSNRESARRSRSRKAAHLNELEAQVSQLRVENSSLLRRLADVNQKFNEAAVDNRVLKADVETLRAKVKMAEDSVKRVTGMNTLFPAVSDMSSLSMPFNGSPSDSASDAAVPIQDDLNSYFANPSEIGGSNGYMPDIASSAQEDDDFVNGAQVAGKMGSTDSLQRVASLEHLQKRMCGGPASSGSTS

SEQ ID NO: 6240 - protein, 258 aa, Zea mays
  Clone ID: TF_ZmC2730_1.pep
MAQLPPRAPSAAPQDHWPPAAGEFLGFAAARRGAHRRSASDSAAFLEAVPIDDDVVIGGGGGGGDDFDRLDHDQLLSMFSDVDVSVSVSVSGSAGERAQLMDAGGAGADDGVADSSPAAADGVAEPKRVKRILANRQSAQRSRVRKLQYISELERSVTSLQMEVSALSPRVAFLDHHRSLLTVGNSHLKQRIAALAQDKIFKDAHQEALEKEIQRLRQVYQQQQVKVATTGGADIATAASPSMQARQELLACEGAAIR

SEQ ID NO: 6241 - protein, 150 aa, Zea mays
  Clone ID: TF_ZmC233616_1.pep
AELEIGMDLWTGSPVKAETSGQGEINAATHSHHGSTLSMMDEREQKRERRKQSNRESARRSRLRKQQECEELAQKVTDLTVVNGTLRSELDELKKACEDMEAENSQLIGELEQSEAPSVVTTLSIQIDTTKAHHRSSDQHGNKNNTGSNG

SEQ ID NO: 6242 - protein, 418 aa, Zea mays
  Clone ID: TF_ZmC3114_1.pep
MFTLTMSHGPPVLAPPRTSGGASRSRRAAQASMASSSDEQSKPPESPAAAAVVTAAAPPQTHAEWVASLQAYYAAAGHPYAWPAQHLMAAAAAGAHFGTPVPFPVYHPGAAAAYYAHASMAAGVPYPTCEAVPAVALPTGRKFTSIGERGSASPEKGGNEHPAAKDASRSDDSGSDESSETRDDDTDHKDSSAPKKRKSGNTSAEGEPSQAAVVRYAAVESPYPAKGRSASKLPVSAPGRAALPSATPNLNIGMDIWNASPALAVPAVQGEVSPGLALARRDGVTQLDEREIKRERRKQSNRESARRSRLRKQQECEELARKVADLTTENSALRAELDNLKKACQDMEAENSRLLGGVADAQVPSVTTTLGMSIEPPKLQLQLQQHHDEEGQLHKKSSNNSNGNCAGGSHKPEANTTR

SEQ ID NO: 6243 - protein, 168 aa, Zea mays
  unsure (1)..(168): unsure at all Xaa locations
  Clone ID: TF_ZmC3114_5.pep
FCCNCTCLAVPAVQGEVSPGLALARRYGVTQLFLVSXDEREIKRERRKQSNRESARRSRLRKQQECEELARKVADLTTENSALRAELDNLKKACQDMEAENSRLLGGVADAQVPSVTTTLGMSIEPPKLQLQLQQHHDEEGQLHKKSSNNSNGNCAGGSHKPEANTTR

SEQ ID NO: 6244 - protein, 338 aa, Zea mays
  Clone ID: TF_ZmC3503_1.pep
MDPRFPPPAPSSCFGGGGELPARGHHRRAHSETFIRLPDADLLLDPDADFGFSDIDFPSLSDDSPAASDPTPQPQAPPLQPPLQQAASPASAAPPRPPSGAHMRSLSLDAAFFDGLSLQGGGGGGGVRGGVAGHKRSGSMDGDTSPFEGESAPPSVLPDYAKKAVPDDKLAELALLDPKRAKRILANRQSAARSKERKIKYTSELERKVQTLQTEATTLSAQLTLLQRDTSGLTTENRELKLRLQAMEEQAKLRDALNDALREEVQRLKIAAGQVPNMNGNPFNGGLSQQQQMPSYFSQPQQMQYFSGHQGQHHHPKHDPQNSSNGGGQPLSDSMDFM

SEQ ID NO: 6245 - protein, 201 aa, Zea mays
  Clone ID: TF_ZmC3503_5.pep
MDGATSPFEGESAPTSVLPDYAKKAVPDDRLAELALLDPKRAKRILANRQSAARSKERKIKYTSELERKVQTLQTEATTLSAQLTLLQRDTSGLTTENRELKLRLQAMEEQAKLRDALNDALREEVQRLKIATGQVPNINGNPFNGGLPQQQQQQVPSYFSQPQGMQYFSSHQGQHQHPNHHPQSSSNGGGQSLSDSMDFM

SEQ ID NO: 6246 - protein, 351 aa, Zea mays
  Clone ID: TF_ZmC562_1.pep
MEMPAGSGAPALARQGSVYSLTFDEFQTTLGGASKDFGSMNMDELLRNIWTAEESNAMAAAAPATATATAAASVDAHAQQQQQQQHGAPIQRQGSFTLPRTLSQKTVDEVWREIVSLTSGEDAQQVAAPAPAPAPEPEPAPAPAPLPAQAQAQQTLGSMTLEEFLVRAGVVREDMGGHQTLLLQPHAQGLFSQGNAVAPQTLQLGNGMVAGVVGQGLGGGVTVAAPTTPVVFNGLGKVEAGDLSSLSPVPYPFDTALRMRKGPTVEKVVERRQRRMIKNRESAARSRARKQAYIMELEAEVAKLKDQNEELQKKQVEMLKKQKDEVLERINSQHGPKAKKLCLRRTLTGPW

SEQ ID NO: 6247 - protein, 228 aa, Zea mays
  Clone ID: TF_ZmC737128_1.pep
RQNHQKPATHRSRRVDLSSTTTSPLEGPQQQARMLHQHQHHYHGGVASLHSYLSNPDQAFHAHYYHHSNIIATPLPPTPSFHHLWPSTAQTFEQPVVHEAPAAVAAGNSPAGSGSADDGGGGGTAEAERRRRRMASNRESARRSRMRKQRQLTELWAQVVHLRGANRRLLDELNRAVRGCSDMRREKARLQKEKTDLGTKLQRLTQPQNAALPSSSSEPQPQHDAATE

SEQ ID NO: 6248 - protein, 125 aa, Zea mays
  unsure (1)..(125): unsure at all Xaa locations
  Clone ID: TF_LIB3245-007-P1-N1-G2.pep
ARNSARVKPCVSTGSDLKVSGATXTEWPAKDDKESKRERRKQSNRESARRSRLRKQAETEELARRVELLTAENTSLRSEISRLTESSQKLRMENSALMEKLADGTSDQAQEASAGHQTTPTAPSS

SEQ ID NO: 6249 - protein, 121 aa, Zea mays
  Clone ID: TF_ZmC241156_1.pep
RARRAAAITEEERRRNRMASNRLSARKSRMKQQQHVDDLTAVAERLRRENEAMRAGVGGVVRQSIELEQENRVLAAHARQLCATLLLRNSQLRLLGDVAGLPLDVPLVPDHLVQLYGMLEF

SEQ ID NO: 6250 - protein, 210 aa, Zea mays
  Clone ID: TF_ZmC32804_1.pep
GDAKLAELALVDPKRAKRILANRQSAARSKERKMRYIAELERKVQTLQLEATTLSAQLAMLQRDTTGMTSENSDLKIRVQTMEQQVQLQDALNDRLRDEIQQLKVATGQVNASIGKTGNSGMSSFGGNPQSYQRSHIQSLLAAQHLQRLRIHSQHQQQQTHFQQQQQPQPQLLLQEAHPFPVDLKMRGFSLSSHAQNAGASDSHAAKSEP

SEQ ID NO: 6251 - protein, 166 aa, Zea mays
  Clone ID: TF_LIB4764-072-R1-K1-C5.pep
MAQLPPRVPTAVHRWPEGGHHGAAAWADDFAEFAALRRGAHRRSLSDSVAFVEVAPAAGEFDRLDDDQLMSMFPDEAAAGGGGGGSSAAGSENNGGSSDSYAAASTELIRDPKRVKRILANRQSAQRSRVRKLQYLSELERSVTTLQNEGSALSPRVAFLDQQRTI

SEQ ID NO: 6252 - protein, 179 aa, Zea mays
  Clone ID: TF_LIB3354-121-Q1-K6-H1.pep
HHLQASYQQPAAASPATCYGPRPRNALTEAEKEAKRLRRVLANRESARQTILRRQAIRDELARKVADLSSQNENMKKEKDVVMQEYLSLKEANKQLKEQVARTTAKKAPAGSLAAAASPPATPPRPGLSAAPPPVPVWGSWPPAAAVAGFELLGRPPPPPLCLLPCAWSFPVVAAAPRG

SEQ ID NO: 6253 - protein, 176 aa, Zea mays
  Clone ID: TF_ZmC30857_1.pep
PNPRRMPRSPQLSLSGCSSLFSLSSTSTSRDSAALKAPVPAPPAGAVPPRRTPLLSLSVGEEEEDEGEDEEEYLLGAGALDLQLTGPGGGSNSSGGYDDERKNIRMMRNRESALRSRARKRAYVQELEKEVRRLVNENLKLKRQCKQLKLDMAALVQQSSSKSSSHIRRTSSSTQL

SEQ ID NO: 6254 - protein, 381 aa, Zea mays
  Clone ID: TF_ZmC874_46.pep
MGKGDVATRSKSQKSPAIQNEQSTPANPPTAYPDWSQFQAYYNAAGTAPVTPPFFHPSVAPSHQGHPYMWGPQMMSPYGTPPPYAAMYAQGTPYQQAPMPPGSHPYSPYPMQLPNGTVQTPTSGAGGTATDKSNKNKRKASLKRSKGSLGSLDVVAVKNNKSPAKPSTSSSNEGSSQSESGSGSSSEGSSTNSKSGSRVKDNSEQGQGNDARSKCTQSSVVEPTQPSSGSVVLNPMMPFWPVPPPMAGPATTLNMGVDYWGTPASVPMHGKVIAAPTSAPSSNSRDIVLSDPTIQDGRELKRQKRKQSNRESARRSRLRKQAEWEEVANRAVLLKQENSSLKEELKQLQEKCDGLTSENTSLHEKLKALEDEKSNGNWYKD

SEQ ID NO: 6255 - protein, 103 aa, Zea mays
  Clone ID: TF_LIB3236-081-P1-N1-F12.pep
RAGHALPSTPVSLAGFVGNEVDMEVQQASGDDRRSIRMMRNRESALRSRARKRAYVENLEKEVRRLVDDNLKLKKQCKELKREVAALVLPTKSSLRRTSSTQF

SEQ ID NO: 6256 - protein, 114 aa, Zea mays
  unsure (1)..(114): unsure at all Xaa locations
  Clone ID: TF_ZmC9417_8.pep
GPGAAGADRALAQSSTAQASARRRVRSHADKEHKRLKRLLRNRVSAQQARERKKAYLTDLEVKVRDLEKKNSEMEERLXSTLQNENQMLRQILKNTAVNRRGSGSTASGEGHGQ

SEQ ID NO: 6257 - protein, 147 aa, Zea mays
  Clone ID: TF_ZmC2730_2.pep
TERHQSPDGGVGAVPKRVKRILANRQSAQRSRVRKLQYISELERSVTSLQMEVSALSPRVAFLDHHRSLLTVGNSHLKQRIAALAQDKIFKDAHQEALEKEIQRLRQVYQQQQVKVATTGGADIATAASPSMQARQELLACEGAAIR

SEQ ID NO: 6258 - protein, 118 aa, Zea mays
  Clone ID: TF_ZmC773_20.pep
METSKSPQSSKNSHIVVPSDSNGPRFDNDGFSSEAASNQMVVLNSEAGDKEQDELGENRLQKSIITRGISPSIGAFTVQCAKCFKWRLIATKEKYEEIRERIIEEPFVCKRAREWRPD

SEQ ID NO: 6259 - protein, 79 aa, Zea mays
  Clone ID: TF_ZmC2202_4.pep
LNFGVVIRMVSNRESARRSRKRKQAHLTDLESQVSRLTSENASLLKRLADMTQKYKDASVDNKNLTVDVETMRRKVRSS

SEQ ID NO: 6260 - protein, 189 aa, Zea mays
  Clone ID: TF_ZmC745477_1.pep
MYPAAEIASVPYLSPAASFKPHYHVATDDGGGFLYQQYSNLLLPHPPSYYQEVAYDQLVLEASFPVGGNNRSNSESDEYQRSVAEERRKRRMVSNRESARRSRMRKQKQLSELWAQVVHLRSTNRQLLDQLNHAIRDCDRVLRENSQLRDEQTKLQQQLEMLPVETTREWCHESWLLKYLLFQVVDEII

SEQ ID NO: 6261 - protein, 86 aa, Zea mays
  unsure (1)..(86): unsure at all Xaa locations
  Clone ID: TF_LIB3960-021-Q1-K6-G3.pep
SKESARRSRLRKQAECEELAQRADVLKQENASLRDEVNRIRKEYEELLSKNNSLKEKLEGKQHKTDEAGLNNKLQHSGXDIQKKGD

SEQ ID NO: 6262 - protein, 104 aa, Zea mays
  Clone ID: TF_jC-zmX700222555b1.pep
MRGRGGPVPPAVSPRPVTASAFGKMEGDDLSSLSPSPVPYIFGGGLRGRKPPAMEKVVERRQRRMIKNRESAARSRQRKQVNTFVGGFCLYLVVSIRHVSCLYY

SEQ ID NO: 6263 - protein, 376 aa, Zea mays
  Clone ID: TF_ZmC491_4.pep
MGSSGADTPSKEQQPPATSGAAIPPVYPDWSSFQAYPPIPPHGFFPSPVASSPQGHPFMWGAQAMIPPYGTPPPYVMYPPGVYAHPSMPPGAHPFTPYAITSPNGNADATGTTAAAGNTDGKPSEGKDKSPTKRSKGSLGSLNMLTGKNPSEHGKSSGASGNGVTSQSGESGSDSSSEGSEGNSHNDSHHRESGQEHDGDVRSSRNGVSRLQSEGKLNQAMAILPIPSSGPATDPTTNLNIGMDYWANTASSAPAIHGKATSTTVPGAVVPAEQWTQDEHELKKQRRKQSNRESARRSRLRKQAECEELAQRADVLKQENASLRDEVNRIRKEYEELLSRNNSLKEKLEGKQHKTDEAGLNNKLQHSGDDSQKKGN

SEQ ID NO: 6264 - protein, 376 aa, Zea mays
  unsure (1)..(376): unsure at all Xaa locations
  Clone ID: TF_ZmC491_5.pep
MGSSGADTPSKEQQPPATSGAAIPPVYPDWSSFQAYPPIPPHGFFPSPVASSPQGHPFMXGAQAMIPPYGTPPPYVMYPPGVYAHPSMPPGAHPFTPYAITSPNGNADATGTTVAAGNTDGKPSEGKDKSPTKRSKGSLGSLNMLTGKNPSEHGKSSGASGNGVTSQSGESGSDSSSEGSEGNSHNDSHHKESGQEHDGDVRSSRNGVSRLQSEGKLNQAMAILPIPSSGPATDPTTNLNIGMDYWANTASSAPAIHGKATSTTVPGAVVPAEQWTQDEHELKKQRRKQSNRESARRSRLRKQAECEELAQRADVLKQENASLRDEVNRIRKEYEELLSRNNSLKEKLEGKQHKTDEAGLNNKLQHSGDDSQKKGN

SEQ ID NO: 6265 - protein, 360 aa, Zea mays
  unsure (1)..(360): unsure at all Xaa locations
  Clone ID: TF_ZmC13853_2.pep
MEFKNCGSSSQPRPAVVVGEEAALARQGSVYSLTFDEFQSTLGGAATGGGGGGSIPKGFGSVNMDELLRSIWTAEETQAMASASXAGAGAGMPPTPLQRQGSSLTLPRMLSTKTVDEAWRNLVRDEPLQGADGGGHQPHHRQSTLGEMTLEEFLVRAGAVRENPAPAPPAPPPMIPPRPVPVAPKSSAFFGNLPGADADTAAAAAALGFAPVGMGDLAQIPPRAAGMGGGAMAVQAAVNQLDSGGKGYSDLSSPTEPLPFSFEGMIRGRRHGGGVEKVVERRQRRMIKNRESAARSRARKQAYTMELEAEVQKLKEQNQELERKQAEIMEMQKNELPEMLKDPFGRKKRLCLRRTLTGPW

SEQ ID NO: 6266 - protein, 359 aa, Zea mays
  Clone ID: TF_ZmC1437_1.pep
MGSNDPSTPSKASKASEQVLETVDQPPATTSSGTVSVYPEWPSFQAYQAIPPHGFFPPTVAANPQAHSYMWGAQPMVPPYGTPPPPYVMYPPGAVYAHPSTPPTMHPFSHYPMPTNGHAETPGTAPSAPEMNGKSEPGRTSAPSANGITSHSESGSESESEGSDANYENDSHSKDNDGKEDGNSQNSISYSASQGVLNQTMAMLPIQPGAMVGGVSSSTANLNIGVHYWEAPGSAAVSATHGKAPAGSARGDQWDERELKKQKRKQSNRESARRSRLRKQAECEELGQRAETLRSENSSLRAELERIRKEYEQLLSQNASLKEKLGGSSDPIPDMNEQNDGNGSDKKQSDSDAQPGSES

SEQ ID NO: 6267 - protein, 176 aa, Zea mays
  Clone ID: TF_LIB4739-086-R1-K1-F4.pep
MASASPAQFAAAPLRMGYGRPAPAPPPPVMGMWSSEPFRVDSGSAHATSASTVNTKLEETRLEDDAQVALEPARSTEQETSRPPERAQRRLAQNREAARKSRLRKKAYIQQLETSRMKLSQLELELQRARQQGAYANSGSMGDSALGYRCPIDPGVSVFEIDYSHWVDEQKNTRRS

SEQ ID NO: 6268 - protein, 70 aa, Zea mays
  Clone ID: TF_ZmC874_33.pep
SARRSRLRKQAEWEEVANRADLLKQENSSLKEELKQLQEKCDGLTSENTSLHEKLKALEDEKSNGNWYKD

SEQ ID NO: 6269 - protein, 148 aa, Zea mays
  Clone ID: TF_ZmC9417_1.pep
MEDDSPLTKTMKGAVTGLAAGTIWGTVVATWYDVPRVERHVALPGLIRTLKMCGTYGATFATIGGLYIGVEQLVQSQRKKRDFVNGAVGAFVAGASVCGYRGKSIQSALIGGSCLAFTSAVLDIGGNTTRVDNGKEYYAYTTEKKPAN

SEQ ID NO: 6270 - protein, 119 aa, Zea mays
  unsure (1)..(119): unsure at all Xaa locations
  Clone ID: TF_ZmC59181_4.pep
SXDVGPSAILESYSDGHISSPMMGALSDSPMPGRKRGSPGDVADKLVERRQKRMIKNRESAARSRARKQAYTNELENKVSRLEEENKKLTTLKELENILFSEPLPEPKYQLRRTGSATF

SEQ ID NO: 6271 - protein, 102 aa, Zea mays
  Clone ID: TF_ZmC585007_1.pep
MSSPSRRSSSPESNIDGGSGSGSAGDERKRKRMLSNRESARRSRARKQQRMEELIAEASRLQAENERVEAQIGAYTTELSKVDGENAVLRARHGELAGRLQA

SEQ ID NO: 6272 - protein, 459 aa, Zea mays
  unsure (1)..(459): unsure at all Xaa locations
  Clone ID: TF_ZmC1757_1.pep
MEHVISMEEILGPFWELLPPPAPEPEPEREQPPVTGIVVGSVIDVAAAGHGHGGGDMMDQQHATEWTFERLLEEEALTTSTPPPVVVVPNSCCSGALNVDRPPVMEEAVMMAPAAVSSAVVGDPMEYNAILRRKLEEDLEAFKMWRAASSVVTSDQRSQGSNNHTGGSSIRNNPVQNKLMNGEDPINNNHAQTAGLGVRLATSSSSRDPSPSDEDMDGEVEILGFKMPTEERVRKRKESNRESARRSRYRKAAHLKELEDQVAQLKAENSCLLRRIAALNQKYNDANVDNRVLRADMETLRAKVKMGEDSLKRVIEMSSSVPSSMPISAPTPSSDAPVPPPPIRDSIVGYFSATAADDDASVGNGFLRLQAHQEPASMVVGGTLSATEMNRVAAATHCAGAMELIQTAMGSMPPTSASGSTPPPQXIMSCWVQMGPYTWTCIRHCGFRDRWEHFICRRR

SEQ ID NO: 6273 - protein, 474 aa, Zea mays
  unsure (1)..(474): unsure at all Xaa locations
  Clone ID: TF_ZmC1757_2.pep
MPPTTHHIYGYLLLGMEHVISMEEILGPFWELLPPPAPEPEPEREQPPVTGIVVGSVIDVAAAGHGHGGGDMMDQQHATEWTFERLLEEEALTTSTPPPVVVVPNSCCSGALNVDRPPVMEEAVMMAPAAVSSAVVGDPMEYNAILRRKLEEDLEAFKMWRAASSVVTSDQRSQGSNNHTGGSSIRNNPVQNKLMNGEDPINNNHAQTAGLGVRLATSSSSRDPSPSDEDMDGEVEILGFKMPTEERVRKRKESNRESARRSRYRKAAHLKELEDQVAQLKAENSCLLRRIAALNQKYNDANVDNRVLRADMETLRAKVKMGEDSLKRVIEMSSSVPSSMPISAPTPSSDAPVPPPPIRDSIVGYFSATAADDDASVGNGFLRLQAHQEPASMVVGGTLSATEMNRVAAATHCAGAMELIQTAMGSMPPTSASGSTPPPQXIMSCWVQMGPYTWTCIRHCGFRDRWEHFICRRR

SEQ ID NO: 6274 - protein, 271 aa, Zea mays
  unsure (1)..(271): unsure at all Xaa locations
  Clone ID: TF_ZmC3114_2.pep
HASAHASGKGKGKGGGASPEKGSSGAPSGEDDSRSSDSGSDESSETRDDDTDHKGSSAPKKRKSGNTSAEGEPSQAAVVRYATVESPYPAKGRSAXKLPVSAPGRAALPSATPNLNIGMDIWNASPALAVPAVQGEANPGLALARRDGVTQLDERELKRERRKQSNRESARRSRLRKQQECEELARKVADLTTENSALRAELDNLRKACQDMEAENSRLLVSTVPSVTTTLGMSIEPPKAQQHHDDEGQLHKKSSNNSNGKGSHKPEANTR

SEQ ID NO: 6275 - protein, 147 aa, Zea mays
  Clone ID: TF_LIB4740-086-A1-K1-E10.pep
MAANYHHYQMAVHAAAAAAAWRREPDSPQLSFVSGCSSLFSISTLQDDDDDRAAAVVIAAGHALPSTPVSLAGFVADEVDMEVQQASGDDRRSIRMMRNRESALRSRARKRVSIVNSLHKNMYVGLYYKVYIYKTDRTFVFGYSTFS

SEQ ID NO: 6276 - protein, 156 aa, Zea mays
  Clone ID: TF_ZmC3533_1.pep
MSSGTSSGSSRWVQSSRSEDDLDLQAQMERRRKRRKESNRESARRSRQRKQEHLDDLTSQVNQLKDQNKQLSMALSITSQNLVAVQAQNSVLQTQKMELDSRLGALTEILWYMNSSTSTSTAPTNPAIANDFTAWSRASDILGGTSYSAIDLYQCF

SEQ ID NO: 6277 - protein, 128 aa, Zea mays
  Clone ID: TF_ZmC245141_1.pep
MASEWRAQPLSIATGATLDSIYSDDQITSPSFGALSDPQTPGRKRGALGEVVDKVVERRQKRMIKNRESAARSRARKQAYTNELENKVFRLEEENKRLKKQQELDEILSSAPPPEPKYQLRRTGSAAF

SEQ ID NO: 6278 - protein, 192 aa, Zea mays
  unsure (1)..(192): unsure at all Xaa locations
  Clone ID: TF_ZmC773_12.pep
MAAQEQEQEKQQAKTSTTSSLPSSSERSSSSARNNLTEGGAESDEEIRRVPEMGGASASASSGAGADERPKGEDGKQXAGGGGGAAXAGGKKRGRTAGDKEQNRLKRLLRNRVSAQQARERKKAYLTELEAKAKGLELRNAELEQRVSTLQNENNTLRQILKNTTAHASKRSGGGAGGKGGDGGKKHHLAKS

SEQ ID NO: 6279 - protein, 196 aa, Zea mays
  unsure (1)..(196): unsure at all Xaa locations
  Clone ID: TF_ZmC773_19.pep
MAAQEQEQEQEKQQAKTSTTSSLPSSSERSSSSARNNLTEGGAESDEEIRRVPEMGGASASASSGAGADERPKGEDGKQXAGGGGGAAXAGGKKRGRTAGDKEQNRLKRLLRNRVSAQQARERKKAYLTELEAKAKGLELRNAELEQRVSTLQNENNTLRQILKNTTAHASKRSGGGGGGGGKGGDGGKKHHLAKS

SEQ ID NO: 6280 - protein, 152 aa, Zea mays
  Clone ID: TF_ZmC2315_11.pep
MSSSSLSPAGRTSGSDGDSAADTRRREKRRLSNRESARRSRLRKQQHLDELAQEAALLQAENARVAARAADVASQHARVEQENAVLRARAAELGARLRSVNEVLRVVEEFSGVAMDIQEEVPPADDPLLRPWQLPCYPAVAMPIGAPHMLRY

SEQ ID NO: 6281 - protein, 135 aa, Zea mays
  unsure (1)..(135): unsure at all Xaa locations
  Clone ID: TF_LIB4765-003-R1-M1-E5.pep
MEKRRKPRKESNRESAGRSRLRKQQHHXDLTSQVDQLKGQNKQLNMALSMTSQNLVAVQAQNSVLQTQRMELASRLGALTEILWCISSSTGTAAPTNPAMADGITTTWSWSDASGDILGASAWNQQQQPIDAYRC

SEQ ID NO: 6282 - protein, 366 aa, Zea mays
  Clone ID: TF_ZmC34339_1.pep
SDTAAGAAVPRSLSSPGGSEQQVPSASGLPPRGAGHRRSRSDFLVGFSRPNQLSLPMTPAAGEYRSREASVLEELFRSYRDPNLSSSGDNNSERNDHLGRQLTGQGAWSPGDSSDNDAESWAASGSAAAGTSASHTRHCRSLSVDSIMGNLNFGGLDQVSLRVPPLSPVADASVSLSRTGTGASGGAVATASSQPANGEFSESEMKKIMANDRLAELALVDPRRVKRILANRISAAKSKERKVKYMGELERKVRVLQMETSTLSSKAASSQRECEALRILNNEMKIRLQAMEQQAQLKDALNEALTAEVQRLKQIAGEASDPHVPNMSRKIVEQQLQKQPSEAQLAEQQQPQESEEFKAQQKQWNH

SEQ ID NO: 6283 - protein, 153 aa, Zea mays
  Clone ID: TF_ZmC3163_1.pep
LASLTSGTRRSACMPSCSENTSAGPGGLLGLGEVMMREGNFGRTSSWKTDGQPTKLRQNLPLSPWKADGRHSTGDEISAEPPPGKLMIKGAKFGRTSLDPLWKWMFRSRNFGRTSPWDRQQVQVSETRGWMESPNFASTIRSTQTGRTGGVCQ

SEQ ID NO: 6284 - protein, 351 aa, Zea mays
  Clone ID: TF_ZmC31647_1.pep
MQQQPEPADPPGRALPPPAVPAPAPVAARAAHHRRARSEVAFRLPDDLGIGGGGGPDGDTFDDIGSEDDLFSTFMDIEKISSSGPSDRDRAAETSSPPRPKHRHSSSVDGSGLFFSPGIGGGAGKDAAASLAEVMEAKKAMTPEQLAELAAIDPKRAKRILANRQSAARSKERKARYMTDLERKVQTLQTEATTLSAQLTLFQRDTTGLSTENAELKIRLQAMEQQAQLRDALNDALKQELERLKHATGEMTNSSEAYNMRFQHVPYNSSFFPLSQQNASPHLGSTQLPLPFHPPHPNVPNHQMVSHRNTLPDIMQQESLGRLQGLDIGKGPLVVKLESSSISASESSSTF

SEQ ID NO: 6285 - protein, 220 aa, Zea mays
  Clone ID: TF_ZmC99570_1.pep
QRRREPRRARLEERAIIMYHHHFHGEVASLRFLSPPNASTSFAAHHHMNMALPPPSYFQDDDATLAAIDGGGDAACFDELDTIVVVREADAAAAARCHLTGSNNGGLSGSDQLLDAAVIMAADEERRRRRMVSNRESARRSRMRKQRQLSELWAQVSHLRGANRRLLDDLNRALRSCADARRESARLREEKAELTKKLEQLLQAEKGSLSEAAEPCKSYC

SEQ ID NO: 6286 - protein, 338 aa, Zea mays
  unsure (1)..(338): unsure at all Xaa locations
  Clone ID: TF_ZmC1391_4.pep
MGHDEAVVTQNSVKAPSPPKDQPAIYPCFDWSTMQTMPPAAFGKSYAAIYPHAGGFLHQLMPLVVNPLSAEPAKSGNSKHASLNMNLKEIHGSAVSSCISQKTPGDPRLAGSGDGESFAKGVNXRRRRGDCLRACLPLKSPCQHHCSPRSRPPCLSHVNVESLLXAKPCVSTGSDFKVSGPTSTEWPAKADKESKRERRKQSNRESARRSRLRKQAETEELARSVXLLSEENTSRRSXISRLTESAQKLRMENSALMEKLADGTSDQAQEASAGHQTTPTAPSSACVVKNLLWMMDGEAASRGGGVSGFLSRRRDHGAPMLRQLLSSGPLAADAVAAS

SEQ ID NO: 6287 - protein, 420 aa, Zea mays
  Clone ID: TF_ZmC11253_1.pep
MHPVRPRAVVPRVPSSPAANLNIGGDYWAAPGCAAVPAGHGKAPAGSATFQPIGFLELNQLTPTPRPSKASKASEQDQPPATTTSSGTASVYPESPSFQAYSAIPPHAFFPPTVAANPQAHPYMWGAQPIVPPYGTPPPPPYVMYPPGTVYAHPSTPPAMHPFGHYPMPTNGHVETHGAAPSAPEISGKSEPGRTSAPSANGITSHSESGSESESEGSDDNSQNDSHSKDNDGKEDGNSQNGMSYSGSQGVVNQTMAMLPMQPGAMVGGVPSSTAANLNIGVDYWAAPGSAAVPAAHGKAPAGSARGDQWDERELKKQKRKQSNRESARRSRLRKQAECEELGQRAEALRSENSSLRAELERIRKEYEQLLSQNASLKEKLGAASSDSLPDMNEQNDQNDGDGGYRKQPDSDGHQPGSES

SEQ ID NO: 6288 - protein, 149 aa, Zea mays
  Clone ID: TF_ZmC11253_2.pep
GVDYWAAPGSAAVPAAHGKAPAGSARGDQWEKYILLTTDCDERELKKQKRKQSNRESARRSRLRKQAECEELGQRAEALRSENSSLRAELERIRKEYEQLLSQNASLKEKLGAASSDSLPDMNEQNDGDGDGGYRKQPDSDGHQPGSES

SEQ ID NO: 6289 - protein, 193 aa, Zea mays
  Clone ID: TF_ZmC5008_9.pep
MDDGDLDFSNPDTYLCPALGTDPPSSCSMDSYFDEILKDTEHLACTHTHTCNPPVHDLSHTHTCVHVHTKIVAASPGDAESPSENNSNGNAPSKKRPSGNRAAVRKYREKKKAHTASLEEEVVHLRALNQQLMKKLQSHAALEAEAARLRCLLVDIRGRIEGEIGAFPYQRPAAVKNVDLLSSVDQESLLGSA

SEQ ID NO: 6290 - protein, 369 aa, Zea mays
  Clone ID: TF_ZmC27955_1.pep
MSDDSDGQRQCRRGVTVDVELGAAMALADMAGVAGPGGEQPPPVRRATPAPSAHQEDEASTRLSLELGEVSIQASPCSSSSSFGGHPPPPPSHQAAYQQPAVPEPATTGYGPRPRHAVTEAEKEAKRLRRVLANRESARQTILRRQAIRDELARKVADLSSQNESMKKEKDVVMEEYLSLKEANKQLKEEVAKTSRKPAMPAQQQAAESLVPAPPRPGFLYSAAPPAPVPVPYVWGSWPPSAAAGSEQHGSPPPLCLQPCAWYYPAVADPRGSPSSAHAQQPPAFQDPRAATGEEDTDDDPCSLTLGLEVDKRSAPVGIVAGPASGSGSGGGGAQSDRDRAAQARRRRRDLTKLKHTHAAARPGSSEQW

SEQ ID NO: 6291 - protein, 170 aa, Zea mays
  Clone ID: TF_ZmC3163_2.pep
MSSGSSFGSSQWTQRSRSAEDDLDLDLQAEMEKRRKRRKESNRESARRSRLRKQQHHDDLTSQVDQLKGQNKQLNLALSTTSQNLVAVQAQNSVLQTQRMELASRLGALTEILWCISSSTGTAAPPTNPAMVNGGVTTTWSWSDASGDILGASAWNHQQQQPIDAYRCYY

SEQ ID NO: 6292 - protein, 332 aa, Zea mays
  Clone ID: TF_ZmC3503_2.pep
MDPRFPLPAAAAPSTGGGGGARGHHRRAHSETFLSFHDADLLLDPDGDFFSDLDFPSLSDDSPAASDPTPPPHPQQQPPQASPAPRPPGGTHTRSLSLDAAFFEGLAFQGPSGSAGGGGGPGHKRSGSMDGDTSPFEGESALSSGLPDYAKKAMPAERIAELALIDPKRAKRILANRQSAARSKERKIMYTSELEKKVQTLQTEATTLSAQLTLLQRDTTGLTAENRELKLRLQSMEEQAKLRDALNEALREEVQRLKIAAGQVGNMNGNPFNGGLQQQIPSYFVQQQHRMPYFGGHQAQLHNQNQNHRHQISSNVGQTLSGQSLNDSMDFM

SEQ ID NO: 6293 - protein, 159 aa, Zea mays
  Clone ID: TF_ZmC28236_1.pep
RAPLVPPLQFGNGFVSGAVGQQRGGPVPPAVSPRPVTASAFGKMEGDDLSSLSPSPVPYIFGGGLRGRKPPAMEKVVERRQRRMIKNRESAARSRQRKQAYMMELEAEVAKLKELNDELQKKQVEMLEKQKNEVLERMRRQVGPTAKRICLRRTLTGPW

SEQ ID NO: 6294 - protein, 171 aa, Zea mays
  Clone ID: TF_ZmC7838_1.pep
MASSSGSGSSGSLSAATAALAAAAGTEEELRALMEQRRAKRMLSNRESARRSRMRKQRHLDELTAQAAHLRRENAHVATALGLTAQGLLAVDAENAVLRTQTAELAARLGSLNDILACMNTNAVGAVAVSLTAAAAAAAASSDPCLAFDGATALDDLLRSCPENMFQYQLC

SEQ ID NO: 6295 - protein, 161 aa, Zea mays
  Clone ID: TF_ZmC95773_1.pep
PTRPAASSGAGARGGGGAAEMTLEDFLARDSCAMAAVMEGDMALGFPDGDGDAAGSVAGGVGGVRGGGKRALLDPADRAVMQRQKRMIKNRESAARSRDRKQAYVAELESQVMQLEEEQTELLREQEDRRQKRLKELTERAVPVIRKKSPQDLRRTNSMEW

SEQ ID NO: 6296 - protein, 135 aa, Zea mays
  Clone ID: TF_ZmC1133_1.pep
MSSSRRSSSPDSNDTTDERKRKRMLSNRESARRSRARKQQRLEELVAEVARLQAENAATQARTAALERDLGRVDGDNAVLRARHAELAGRLQSLGGVLEVLQMAGAAVDIPEMVTDDPMLRPWQPSFPPMQPIGF

SEQ ID NO: 6297 - protein, 325 aa, Zea mays
  Clone ID: TF_ZmC1133_2.pep
GSDSQNPMGCIGGKDGCQGRSMGSSVTISGMSTAAPAIWSTSRTPPSDCRRPASSAWRARSTALSPSTLPRSRSSAAVRACVAAFSACRRATSATSSSSRCCFRARDRRADSLLDSIRFRLRSSVVSLLSGLELRRDDDMDACLVGLNLFGGGWGGGRMGRNKSPRDGFKRLSKRERERERERETAKDQQVERGDAFMRRRRTSRGRRRRRSGSGGYGARSASSEHGGRQRNWWVNMGVGTVCSSDGRIYAGTGGGTGEQEFEETRGAGCKSSFTERRVLDLDGSQIERKKQEKREELRGPECKKKRGGRDLAEREERHSLSFIR

SEQ ID NO: 6298 - protein, 135 aa, Zea mays; identical to SEQ ID NO: 6296
  Clone ID: TF_ZmC1133_3.pep

SEQ ID NO: 6299 - protein, 332 aa, Zea mays
  Clone ID: TF_ZmC1133_4.pep
GSDSQNPMGCIGGKDGCQGRSMGSSVTPPGMSTAAPAIWSTSRTPPSDCRRPASSAWRARSTALSPSTLPRSRSSAAVRACVAAFSACRRATSATSSSNRCCFRARDRRADSLLDSIRFRLRSSVVSLLSGLELRRDDDMDACLVGLNKGTCVWWGVGWGETRALEMDSKDYLRERERETAKDQQVERGDAFMRRRRTSRGRRRRRSGSGGYGARSASSEHGGRQRNWWVNMGVGTVCSSDGRIYAGTGGGTGEQEFEETRGAGCKSSFTERRVLDLDLDGLLADRKKQEKREELRLRGPECKKKRGGRDLAEREERHSLSFIRRWGTRPGR

SEQ ID NO: 6300 - protein, 253 aa, Zea mays
  Clone ID: TF_CC-ZMPO148024B07_FLI.pep
ALIPRVEPTRGAGSRSRPWRSCRPRSPPWRRRGRSSGAGTSSSAAPPWARSSPPRPCSRRGWTSSSTSPPPSAARTAAPSATPWPSSSPSDHNSINDEKTDRGDAEEAQSKCHGAAAATAVDPKRVKRILANRQSAQRSRVRKLQYISELERSVTSLQTEVSALSPRVAFLDHQRSLLTLGNSHLRQRIAALAQDKIFKDAHQEALRKEIERLRQIYQQQSLKSGREPDAAPSVRDDKDMIGSEGTAAPGPPS

SEQ ID NO: 6301 - protein, 287 aa, Zea mays
  Clone ID: TF_ZmC2362_1.pep
MAQLPPKIPTVAPAWPEFGGGHQQQRSPSVGTFLAAAPMQPSWVDEFLDFSAAKRGAHRRSVSDSVAFLEPEPGPGDGNAGAHDFDRLDDDQLLSMFSDDLQPPPPQPQTQAAPAPVASSSSPSDHNSINDEKTDRGDAEEAQSKCHGAAAATAVDPKRVKRILANRQSAQRSRVRKLQYISELERSVTSLQTEVSALSPRVAFLDHQRSLLTLGNSHLRQRIAALAQDKIFKDAHQEALRKEIERLRQIYHQQSLKSGREPDAAPSVRDDKDMIGSEGTAAPGPPS

SEQ ID NO: 6302 - protein, 204 aa, Zea mays
  Clone ID: TF_ZmC1049640_1.pep
AKKAMSAANLAELALIDPKKAKRIINNRQSAARSKERKMRYIAELERKVQFMQREATALATQLALLQRDTAGLTVENGDLKIRLESTEQQIHLQDALNGALKSEMQRLKMATGQAGNQMMNFAEPPHTFGGANQQVFHHPGQAVPPFLVAMQQQQQLLLPHMNQPLHPLQSQPLHQAATLSIDMAGLPAPPPGQWQWGGDTWSE

SEQ ID NO: 6303 - protein, 151 aa, Zea mays
  Clone ID: TF_ZmC2315_10.pep
MSSSSLSPTAGRTSGSDGDSAADTHRREKRRLSNRESARRSRLRKQQHLDELVQEVARLQADNARVAARAADIASQYTRVEQENTVLRARAAELGDRLRSVNEVLRLVEEFSGVAMDIQEEMPADDPLLRPWQLPYPAAAMPIGAPHMLHY

SEQ ID NO: 6304 - protein, 151 aa, Zea mays; identical to SEQ ID NO: 6303
  Clone ID: TF_ZmC2315_14.pep

SEQ ID NO: 6305 - protein, 151 aa, Zea mays; identical to SEQ ID NO: 6303
  Clone ID: TF_ZmC2315_15.pep

SEQ ID NO: 6306 - protein, 151 aa, Zea mays; identical to SEQ ID NO: 6303
  Clone ID: TF_ZmC2315_9.pep

SEQ ID NO: 6307 - protein, 215 aa, Zea mays
  unsure (1)..(215): unsure at all Xaa locations
  Clone ID: TF_LIB3596-021-Q6-K6-F2.pep
EWRETRSTGRRTSLSPAXYVVSDASGPSSAPAGAGAGAGATPALCCGIWAAYDAIARSLRASAXASARSRAFWQRTARPCRARACRLASSSRFSPRSRAASARSSSSCCCFRARDRRADSRFDSLRRCRRRRSSSSSSSGSGCLAAAAGVDAAITCSRLGHDSGPHGVNPHVVTSIVVPQLDDASSRASCTDSISPCSFSPHGCRCTTYDVSAIP

SEQ ID NO: 6308 - protein, 352 aa, Zea mays
  unsure (1)..(352): unsure at all Xaa locations
  Clone ID: TF_ZmC13853_7.pep
MEFKNCGSSSQPRPAVVVGEEAALARQGSVYSLTFDEFQSAPGGAAAIFRXGGGSIPKDFGSMNMDELLRSIWTAEETQAMASASGAGAGGGMPPTSLQRQGSSLTLPRTLSTKTVDEVWRNLVRDEPXXXXXXXXXXQHHRQSTLGEMTLEEFLVRAGVVRENPAPAPPAPPPMIPPRPVPVAPKSSAXXGNLPGADADTAAAAAALGFAPVGXXXLAQIPPRAAGMGGGAMAVQAAVNQLDSGGKGYSDLSSPTEPLPFSFEGMIXXXXXXXXXEKVVERRQRRMIKNRESAARSRARKQAYTMELEAEVQKLKEQNQELERKQAEIMEMQKNEVTVNSKLRVFDPCILS

SEQ ID NO: 6309 - protein, 293 aa, Zea mays
  Clone ID: TF_ZmC3110_1.pep
ILFLDENDEELFSMFLDVDKLNSSCGASSEAEAESSSAAGGGGEGAELADAPRPRHQHSQSMDGSMSIKAEQLVGAPGMEGMSSAEAKKAVSAAKLAELALVDPKRAKRIWANRQSAARSKERKMQYIGELELKVQTLQTEATTLSAQLALLQRDTTGLTTENSELKIRLQTMEQQVHLQDALNDTLKTEVQRLKVATGQVGNGGGGMMLNFGAMPRLVGGNQQMFHSSQAMQSVLATHQLQQLQLHSQPQQQQLHSLQLQQVARDLKMKGHLGGQGQWGDGKSGSGSRSSGS

SEQ ID NO: 6310 - protein, 106 aa, Zea mays
  Clone ID: TF_ZmC69637_2.pep
MTLSGGASSGSSHGTRSLGSEGDMVHRMELMRKRRMESNRESAKRSRQRKQQHLDDLNSQVNLTQSKSQMKKTRLVLQDMLKQANSDNARCPLISQGPPPNKIDSK

SEQ ID NO: 6311 - protein, 259 aa, Zea mays
  Clone ID: TF_ZmC2931_1.pep
MASSRVMPSSSPSHTASDLARLAQAASRPGGGGSGLGSMNVEELLRGIYSDMPTPAPPASEPERPRSPAPAPEVATRRTAEEVWKEITGGGGSGEAVAPVAAQAVAPDGGAGTGGPEVTLEDFLARESAVKEDEVKISVPPAPVMGLPGGAEGVSVPGGGGGRERKRQLMDPVDRAAMQRQKRMIKNRESAARSRERKQAYIAELESLVTHLEEENAELLREQEERHQKRLKELLERVTPVILRKKPSGDLRRTNSMQW

SEQ ID NO: 6312 - protein, 356 aa, Zea mays
  Clone ID: TF_ZmC2884_1.pep
MDLNECERRGPAGPDPLSRQGSIYSLTFDEFQNTLGGMGGGLGKDFGSMNMDELLRSIWTAEESQAMASASASASASVSALGAAVDGGAALQRQGSLALPRTLSVKTVDEVWRDFVREAPPGTAGGEEPQPNRQPTLGEMTLEEFLVRAGVVRDNPAAAAAAVPAQPVAPRPIQAVSNGASIFFGNFGGANDAGAGAMVFAPVGIGDQAMGNGLMPGVAGMAGGAVTVSPVDTSVAQLDSMGKSDEDLSSPMAPVPYPFEGVIRGRRSGAGVEKVVERRQRRMIKNRESAARSRARKQAYTMELEAEVQKLKEQNAELQKKQEQIMEMQQNQVPELVSNPYAQKKRCLRRTLTGPW

SEQ ID NO: 6313 - protein, 99 aa, Zea mays
  Clone ID: TF_LIB5075-003-R1-XP1-H2.pep
QRLQRRKQSNRESARRSRSRKEDHLNELEAQVAEVRVENSSLLTRLAAVNHKLNETAGDNTVLKADVENLLPNVNMGEDSAKRPTGMNPLYPGETDMAS

SEQ ID NO: 6314 - protein, 665 aa, Zea mays
  Clone ID: TF_ZmC15321_1.pep
MAEPAILDPSPFDLRHYPAHLFDPDIPLAAADFPLGEFAGDDGCDGLDFDVPVDFSIDDFLLRSPDRGHDGDDSGEGSAAGSGPTASSLASPATSGTNSAVANVGNRKVKHEDSDEGRSGATPNWSLKRKQVSPGEATSDGAKCRRSGDGDVSPSASASRAATEDSDERGVGGEEEDKRRTARLMRNRESAQLSRQRKKRYVEELEEKVKSMHSVINDLSCKISFIAAENATLRQQLGGVGVSGPPPGVYPPPPPGIHFPWVSGYAMRPHGSHVPLVPIPRLKPQHAAAAVKVSKKPDVKKSVESKSKTKTKTKTKKVASISLLGLLFVAFVFGAFVPGFNHSLGLRGRSDNVMFGNFGQSDARVFSVTNHGKGPKGSFNSSDMISTDHDMMTGHDDGAGQKHRAANNSSEILPALLYVPRNGKHVMINGNLIIHSVMASEKAVAHKGSNSQSVKDHKETSVAIARYLSPPGKDMNSKEMFPPDAPLPQWFREGMEGPVLNSGMCSEVFQFDISPASAKSGGIIPASAKSASSVNATQKILKPSPAYRGKLKNRRIMYNEAIPLTGKTANNTKPQAFNSTAESSKVPDTDSKPASSVIVSVLADPREAGNGDGDPRVSPKPLSRIFVVVLLDGVRYVTYSCTLPFKSASPHLVELTLGPVQLSGP

SEQ ID NO: 6315 - protein, 147 aa, Zea mays
  Clone ID: TF_LIB5025-063-A1-XP1-D12.pep
MSSNSSNTDLINQLLSLPVDFTMDPLVIPTTTNVVRPKKSRVTLEDKDQKTKERILRNRAAAQESRDKKRRYVSDLESSNKRLEEENGQMKKKMKHLEEENMSLACQLESISKQFAALQAQIKFNTNSTFLFNDFCSARIVKEIICG

SEQ ID NO: 6316 - protein, 410 aa, Zea mays
  Clone ID: TF_ZmC191_1.pep
MERVFSMEEIPNPYWAPPHPQPAAGGAVAAPGGVGGAGDAAGAMNRCPSEWYFQKFLEEAVLDSPGPVAGVGRSSGQAGVEAAESKPLGAAAPASVSSSVVDPVEYNAMLKQKLEKDLAAIAMWRASGAAPPDLSATAASLPSVGVPHAAPLKPVGGTESLVQNMLAGAPVGGSGPHVVQIADIPVKQTTSSSSREQSDDDDMEGDAETNGNGNPVQQRQQRRKQSNRESARRSRSRKAAHLNELEAQVAQLRVENSSLLRRLADVNQKFNEAAVDNRVLKADVETLRAKVKMAEDSVKRVTGMNALYPAVSDMSSLSMPFNGSPSDSASDGTVPIQDDLNSYFANPSEIGGNNGYMPDIASSVQQDDNFVNGYQAAGKMGRTDSLQRVASLEHLQKRMCGGPASSGSTS

SEQ ID NO: 6317 - protein, 345 aa, Zea mays
  Clone ID: TF_ZmC191_3.pep
LTRGRTRGGFCPAARRSASIRNGARLLHGGDPQPLLDPVEYNAMLKQKLEKDLAAIAMWRASGAAPPDLSATAASLPSVGAPHAAPLKPVGGTESLVQNMLAGAPVGGSGPHVVQIADIPVKQTTSSSSREQSDDDDMEGDAETNGNGNPVQQRQQRRKQSNRESARRSRSRKAAHLNELEAQVAQLRVENSSLLRRLADVNQKFNEAAVDNRVLKADVETLRAKVKMAEDSVKRVTGMNALYPAVSDMSSLSMPFNGSPSDSASDSTVPVQDDLNSYFANPSEIGCNNGYMPDIASSVQQDDNFVNGYQAAGKMGRTDSLQRVASLEHLQKRMCGGPASSGSTS

SEQ ID NO: 6318 - protein, 300 aa, Zea mays
  Clone ID: TF_ZmC3759_1.pep
MDIDLFPDIDLDALLASFSGDPAAVSGLIIPSPPPPAPATAHDAEAGSPESVTSRTNPLGEVALSEIERLLMQEGEAELGGEVDGISVDQFFDALYDGEEAKGEREAGASADVDSGRDDVLEVVTPEAGTVEVDGDDPISKKKMRQMRNRDSAMKSRERKKSYIKDLETKSKHLEAECRRLSYALQCYAAENMALRQSLLKDRPLGAPTATQESAVLTETLPLVSLLWLVSIVCLFLMPVLPNRSPAAPSSGGRDLVMAAGKTSSETPEILELILHGRRCKSTRAKIKLCILPFHAGAAC

SEQ ID NO: 6319 - protein, 196 aa, Zea mays
  Clone ID: TF_ZmC382380_1.pep
FCNCSRTPRTASSLLSPHCKPPSLLHSEMQQNWAADLACLPGLDLGSLFLPQNDDPMYDFSTFDMVDLDPYPCSCNGSVTTTTVSSVSAAAADKHQERRGNDVERKKRRLASNRESARRSRVRKQRRLYELSLQVAELLGTNQRLLVELNHVTAKHALLARENAKLREEAAGLQRRLSEMELMGEAEAAALSPEVA

SEQ ID NO: 6320 - protein, 332 aa, Zea mays
  Clone ID: TF_ZmC3890_1.pep
MKKCPSELELEAFLRGREDATAAAAAAAVAEQKPAHDVAALAPFGAGGVFPSSDLSAFSFADSNTLNGTGNIHNHLWSHNHNVRHPAVSTTIESQSSICAAAAASPTSATNLYLKESQALGGTSGSDSDSDSLLDIEGGPCEQSTNPQDVKRMRRMVSNRESARRSRKRKQAHLADLETQVDQLRGENASLFKQLTDANQQFTTAVTDNRILKSDVEALRVKVKLAEDMVARGALSCGLGSLGLSPALNPRQACRGPDVLSVSGLDFPGADDACFTGLSPAEQLQLQSSPLQSIAASLESLDNRMASEVTSCGGPGVDVWPWDHHSNGGLSK

SEQ ID NO: 6321 - protein, 246 aa, Zea mays
  Clone ID: TF_ZmC3890_2.pep
LTVPTTEFNHWHAAAAAASPTSATNLYLKESQALGGTSGSDSDSDSLLDIEGGPCEQSTNPQDVKRMRRMVSNRESARRSRKRKQAHLADLETQVDQLRGENASLFKQLTDANQQFTTAVTDNRILKSDVEALRVKVKLAEDMVARGALSCGLGSLGLSPALNPRQACRGPDVLSVSGLDFPGADDACFTGLSPAEQLQLQSSPLQSIAASLESLDNRMASEVTSCGGPGVDVWPWDHHSNGGLSK

SEQ ID NO: 6322 - protein, 75 aa, Zea mays
  unsure (1)..(75): unsure at all Xaa locations
  Clone ID: TF_700154561H1.pep
GFRRRRPVAGDGRRRRDHEGSGGGGGVREQDRFLPIANISRIMKKAVPANGKIAKDAKETLQECVSEFISSXTAR

SEQ ID NO: 6323 - protein, 160 aa, Zea mays
  Clone ID: TF_LIB4729-029-R1-K1-G4.pep
MSPATADEPSVAMEEQPGKESEEAADAMEEQLGKESEEAAESAEAARQVEVEPEEGVDPAEAMEKAGEEAEAEEGASLRPALPVGRVKRIMRVDRDIKKVTSEAALLIAAATELFLGSLATGAHAAAARRSRRTVRAVHVRAAGRAHRPTADFLLDCLAA

SEQ ID NO: 6324 - protein, 142 aa, Zea mays
  unsure (1)..(142): unsure at all Xaa locations
  Clone ID: TF_LIB4744-036-R1-K1-A1.pep
MEPSSQPQPMMGVGSQPYPAAAPYVPVPGSLAVPPGSQPAAAFPNPTQLSAQHQMVYQQAQQFHQQLQQQQEQQLREFWTTQMDEIKQANDFKIHTLPLARIKKIMKADEDVRMISAEAXVVFAKACEVFILELTLRSWMHT

SEQ ID NO: 6325 - protein, 137 aa, Zea mays
  Clone ID: TF_LIB3689-246-Q1-K6-E11.pep
MEPSPQPMGVAAGGSQVYPASAYPPAATVALQSGQPFPANPGHMSAQHQIVYQQAQQFHQQLQQQQQQQLQQFWVERMTEIEATTDFKNHNLPLARIKKIMKADEDVRMISAEAPVVFAKACEIFILELTLRSWMHT

SEQ ID NO: 6326 - protein, 189 aa, Zea mays
  unsure (1)..(189): unsure at all Xaa locations
  Clone ID: TF_LIB4826-107-A1-N1-C9.pep
KISAGSNPLEEYTIPKGTITRIMRQVLPQDSRVTGGAKETMDQCIVQFSTALVRAATQECRRDRRXTITADDLIVGFANLGLADYVQPMSVYLRLYREAVNNQQQAVAPPAPTVQRGTTTAVPPPPPNLTLQLGLPSVPDVTELARDTDVYALWHGAAPAAGTTSASSVAPMPPPAGALQTKKVSYGSK

SEQ ID NO: 6327 - protein, 302 aa, Zea mays
  unsure (1)..(302): unsure at all Xaa locations
  Clone ID: TF_ZmC4739_2.pep
MDPMDIVGKSKEDVSLPKXTTMFKIIKEMLPPDVRVARDAQDLLVECCVEFINLLSSESNEVCSREEKKTIAPEHVIKALSDLGFREYIEEVYAAYEQHKLDTLDSPKAGKFTGIEMTEEEAVAEQQRMFAEARARMNNGAPKPKETEQEPPQQPQAQPQLQLHTEPQQPVQSQVQLHSPTQHSLQPQVQLHPQPQQLPQVQVHSQTQLHPQPQQPQVQVHPQLQQLPQLQAHSQPPQPQVQXPPQPQQPPQVQLQSSVQQTSQPQPQVHLYNHRGGSQAQLQPQLPGQLQTQGQTGPGIDS

SEQ ID NO: 6328 - protein, 262 aa, Zea mays
  Clone ID: TF_ZmC30175_1.pep
MNNPQNPKASAPCTLPSELPKEAVATDEAPPPMGNNNNTESATATMVREQDRLMPVANVSRIMRQVLPPYAKISDDAKEVIQECVSEFISFVTGEANERCHTERRKTVTSEDIVWAMSRLGFDDYVAPLGAFLQRMRDDSDHGGEERGGPAGRGGSRRGSSSLPLHCPQQMHHLHPAVCRRPHQSVSPAAGYAVRPVPRPMPASGYRMQGGDHRSVGGVAPCSYGGALVQAGGTQHVVGFHDDEASSSSENPPPEGRAAGSN

SEQ ID NO: 6329 - protein, 248 aa, Zea mays
  Clone ID: TF_ZmC2163_1.pep
MEPSPQPMGVAAGGSQVYPASAYPPAATVAPASVVSAGLQSGQPFPANPGHMSAQHQIVYQQAQQFHQQLQQQQQQQLQQFWVERMTEIEATTDFKNHNLPLARIKKIMKADEDVRMISAEAPVVFAKACEIFILELTLRSWMHTEENKRRTLQKNDIAAAITRTDIYDFLVDIVPRDEMKEDGIGLPRAGLPPMGAPADAYPYYYMPQQQVPGSGMVYGAQQGHPVTYLWQEPQQQQEQAPEEQQSA

SEQ ID NO: 6330 - protein, 177 aa, Zea mays
  Clone ID: TF_LIB4764-066-R1-K1-E2.pep
MEPSSQPQPVMGVGSQPYPAAALYVPLPGALAVPPGSQPAAAFPNPTQLSAQHQMVYQQAQQFHQQLQQQQEQQLREFWTTQMDEIKQANDFKIHTLPLARIKKIMKADEDVRMISAEAPVVFAKACEVFILELTLRSWMHTEENKRRTLQKDDIAAAITQTDIYDFLVDIIPRDEM

SEQ ID NO: 6331 - protein, 174 aa, Zea mays
  Clone ID: TF_LIB3732-044-Q6-K6-C4.pep
PASEEGYGHQGHLLSPVGSPLSDNESGAAAAAGGGGCGSSVGYCGGGGGESPAKEQDRFLPIANVSRIMKRSLPANAKISKEAKETVQECVSEFISFVTGEASDKCQREKRKTINGDDLLWAMTTLGFEAYVAPLKSYLNRYREAEGEKAAVLGGGARHGDGGGAADDAGPLAG

SEQ ID NO: 6332 - protein, 200 aa, Zea mays
  Clone ID: TF_ZmC10894_3.pep
MEPKSTTPPPPPVMGAPIAYPPPPGAAYPAGPYVHAPAAALYPPPPLPPAPPSSQQGAAAAHQQQLFWAEQYREIEATTDFKNHNLPLARIKKIMKADEDVRMIAAEAPVVFSRACEMFILELTHRGWAHAEENKRRTLQKSDIAAAVARTEVFDFLVDIVPRDEAKDADSAAMGAAGIPHPAAGLPAADPMGYYYVQPQ

SEQ ID NO: 6333 - protein, 189 aa, Zea mays
  unsure (1)..(189): unsure at all Xaa locations
  Clone ID: TF_ZmC11482_1.pep
RKIKAKRQRRTAAWRPATTGSRRTGTTGASPSRSSGGEPDRLLPIAERRAGSMKEIXLPPNAKISKEAKETMQECVSEFICFVTGEASDKCHNEKRKTINGDDLCWAFGALGFDDYVDPMRGYLHKYREVEGDRAAAAASSSRGGGDHHPASASTSTSPPAAAPPAGHFMFGAAAIDRPDNNTSSARPF

SEQ ID NO: 6334 - protein, 211 aa, Zea mays
  Clone ID: TF_ZmC587803_1.pep
MDPMDIVGKSKEDVSLPKSTMTKIIKEMLPPDVRVARDTQDLLVECCVEFINLLSSESNDVCSRDDKKTIAPEHVIRALQDLGFKEYVEEVYAAYEQHKLETLDSPKATKFTGIEMTEEEAVAEQQRMFAEARARMNNGAAKPKEPALEPQNQPQQPPQPQLQLHPTAQQPPQPQSQLHHPQSQQPLHPQLQPYTQAAPQQPLHPQLQPYT

SEQ ID NO: 6335 - protein, 212 aa, Zea mays
  Clone ID: TF_ZmC11482_2.pep
MPDSDNESGGPSNAEFSSPREQDRFLPIANVSRIMKKALPANAKISKDAKETVQECVSEFISFITGEASDKCQREKRKTINGDDLLWAMTTLGFEDYVEPLKLYLHKFRELEGEKAATTSASSGPQPPLHRETTPSSSTHNGAGGPVGGYGMYGGAGGGSGMIMMMGQPMYGGSPPAASSGSYPHHQMAMGGKGGAYGYGGGSSSSPSGLGR

SEQ ID NO: 6336 - protein, 175 aa, Zea mays
  Clone ID: TF_ZmC9362_1.pep
MPRKITLVKEGEPQPVDAAQGEPAPAPAAPTAALTEAEVDELPRAIVRRLVKDKLSHVAGGEGAEVIVNKDAMAAFAESARIFIHYLSATANDMCKESKRQTINADDVLNALDDMEFSEFVEPLRTSLQEFRNKNADKRSEAKKQQKEKRRKLNEETLPQKENDPADDAKENGVA

SEQ ID NO: 6337 - protein, 256 aa, Zea mays
  Clone ID: TF_ZmC10894_1.pep
MDNQPLPYSTGQPPAPGGAPVAGMPGAAGRHEKHLPLPLPPPPNPPRLTTLAAPESMDPNKSSTPPPPPVMGAPVAYPPPAYPPGVAAGAGAYPPQLYAPPAAAAAQQAAAAQQQQLQIFWAEQYREIEATTDFKNHNLPLARIKKIMKADEDVRMIAAEAPVVFARACEMFILELTHRGWAHAEENKRRTLQKSDIAAAIARTEVFDFLVDIVPRDDGKDADAAAAAAAAAAGIPRPAAGVPATDPLAYYYVPQQ

SEQ ID NO: 6338 - protein, 143 aa, Zea mays
  Clone ID: TF_ZmC10894_4.pep
MEPNSSIPPPVMGAAVAYPPAAGAAYSAGPYAHAHAALGALYPPPPAPGPPSSHQGGAAAAQLQLFWAEQYREIEATTDFKNHNLPLARIKKIMKADEDVRMIAAEAPVVFARACEMFILELTHRGWAHAEENKRRTLQKSDI

SEQ ID NO: 6339 - protein, 251 aa, Zea mays
  Clone ID: TF_ZmC598014_1.pep
MEPSSQPQPMMGVGSQPYPAAAPYVPVPGSLAVPPGSQPAAAFPNPTQLSAQHQMVYQQAQQFYQQLQQQQEQQLREFWTTQMDEIKQANDFKIHTLPLARIKKIMKADEDVRMISAEAPVVFAKACEVFILELTLRSWMHTEENKRRTLQKNDIAAAITRTDIYDFLVDIIPRDEMKEEGLGHNPIVGLPPAMGAPADHGSHPYYYVPAQQVQGAGMMYGGQQGHPVTYMWQTPQGQAAEPPEEEQQQSA

SEQ ID NO: 6340 - protein, 245 aa, Zea mays
  Clone ID: TF_ZmC10894_2.pep
MDNQPLPYSTGQPPAPGGAPVAGMPGAAGLPPVPHHHLLQQQQAQLQAFWAYQRQEAERASASDFKNHQLPLARIKKIMKADEDVRMISAEAPVLFAKACELFILELTIRSWLHAEENKRRTLQRNDVAAAIARTDVFDFLVDIVPREEAKEEPGSALGFAAPGTGVVGAGAPGGAPAAGMPYYYPPMGQPAPMMPAWHVPAWDPAWQQGAADVDQSGSFSEEGQGFGAGHGGAASFPPAPPTSE

SEQ ID NO: 6341 - protein, 127 aa, Zea mays
  Clone ID: TF_uC-zmflteosinte066e07b1.pep
SDFKNHQLPLARIKKIMKADEDVRMISAEAPVLFAKACELFILELTIRSWLHAEENKRRTLQRNDVAAAIARTDVFDFLVDIVPRPPSDRSARLLALASWLSYMCMMSIVQCAMLCILYRNVVMELL

SEQ ID NO: 6342 - protein, 99 aa, Zea mays
  Clone ID: TF_uC-zmflb73001e01b1.pep
AIVPLYGMAFFMMRLMLPMGRFLSCSLRLPPPPPPLGLPLLWLPPLPPWLPQASPICSSRIHISPGAISVHATQRRRPRTGAGPRCETLGQGCQRKIGP

SEQ ID NO: 6343 - protein, 297 aa, Zea mays
  Clone ID: TF_ZmC4739_1.pep
MDPMDIVGKSKEDVSLPKSTMVKIIKEMLPPDVRVARDAQDLLVECCVEFINLLSSESNEVCSREEKKTIAPEHVIKALSDLGFREYIEEVYAAYEQHKLETLDSPKAGKFTRIEMTEEEAVAEQQRMFAEARARMNNGAPKPKEPEQEPPQLPQAQPQLQLHTEPQQPMQSQVQLHSQTQHSLQPQLQLHHQPQQLPQVQLHSQPQLQPQVHLHPQPQLPPQLQVHQQLQQSPQVQVHEQPQVQPQEAQLQSSAQQTSQPQPQAQLQSQGHSQAQLQAGLLGQLQTQAQTGPGMDS

SEQ ID NO: 6344 - protein, 280 aa, Zea mays
  unsure (1)..(280): unsure at all Xaa locations
  Clone ID: TF_ZmC4739_3.pep
MDPMDIVGKSKEDVSLPKSTMFKIIKEMLPPDVRVARDAQDLLVECCVEFINLLSSESNEVCSTEEKKTIAPEHVIKALSDLGFREYIEEVYAAYEQHKLDTLDSPKAGKFTRIAMTEDDAAAEHQRMFAVARARMNNGAPKPKEPEQEPPQLPQAQPQLQLHTEPQQPMQSQVQLHSQTQHYLQPQLQLHSQPQLQPLSXQLPPQLQVHQQLQQPPQVQVHQQPEVQPQEAQLQSSAQQTSQPQPQAQLQSQGHSQAQLQAGLLGQLQTQAQTGPDMDS

SEQ ID NO: 6345 - protein, 169 aa, Zea mays
  unsure (1)..(169): unsure at all Xaa locations
  Clone ID: TF_ZmC29745_2.pep
MDSSFLPAGADNGSAGGANNGGAAAXQAPPIREQDRLMPIANVIRIMRRVLPAHAKISDDAKETIQECVSEYISFITGEANERCQREQRKTITAEDVLWPMSRLGFDDYVEPLSVYLHRYREFQGEARGVRLAPAPPCSDHQHHHSAAPPKLNKTREPASGAAMLPHPH

SEQ ID NO: 6346 - protein, 180 aa, Zea mays
  unsure (1)..(180): unsure at all Xaa locations
  Clone ID: TF_LIB4172-014-Q1-L1-H5.pep
GTPAGTGPEFPGRPTRPNVARIMKNAIPQTGKIAKDAKECVQECVSEFISFITSEASERCHQEKRKTINGEDILFAMSTLGFDSYVEPLKLYLQKFREAMKGEKGIGGAVSATDGLSEELTEEAFTNQLPAGLITADGQQQNVMXLHNVLPTDFWCPANSVFMIGRTDGTGLVWRESDGV

SEQ ID NO: 6347 - protein, 280 aa, Zea mays
  Clone ID: TF_ZmC29745_1.pep
MDSSSFVPAAGAENGSAAGGANNGRVAQQQAPAIREQDRLMPIANVIRIMRRVLPAHAKISDDAKETIQECVSEYISFITGEANERCQREQRKTITAEDVLWAMSRLGFDDYVEPLGAYLHRYREFEGDARGVGLVPGAAPSRGGDHHPHPHSMSPAAMLKSRGPVSGAAMLPHHHQHHHDMQMHGAMYGGTAVPPPAGPPHHGGFLMPHPQGSSHYLPYAYEPTYGGEHAMAAYYGGAAYAPGNGGSGDGSGSGGGGGSASHTPQGSGGLEHPHPFAYK

SEQ ID NO: 6348 - protein, 663 aa, Zea mays
  Clone ID: TF_ZmC16020_1.pep
MKERSSLCESAADGNWGLKYKRKRSKLTVSPSNENEATSPTSDSPMSHGSTKKKLKHDTNISPSAKKIRGHDGYFFECVECDLGGNLLCCDSCPRVYHLECLNPPLKRLPPGKWQCPRCRPKKGSLKMLGNAEVGTSKHEKSTRTYAGTTSGSPPSHTKVSFKTRNSTQDKTGSKKKKKGGARDLMNGGETNTKNNEVEKKKTLILHLKKRSTKELSENTKPSKSEFVELSEEKIVKHGSVLKLKKHPHRMDLSPSKSKTRRQSSQRESKRSGTKKIKYSMSDDDSVSSSEPSTSLDNSESPPKRKHSDGKAPSSSTKKGKKKVKFVEKKHSEEQGVVGDKMMTTQEDQQVDRILGCRLQMSQINPPSHASLEQFESANLQVDGMVLPHASAGIPNRPHDGTESSRNGTIEDICADESANHSGHNLEMRKDTDSKSHEKESHKREQVKKILSVCSGDETNIMRDDQVVRENVSASKKGEDETSDLPAEKDDTILPVTRACTMIRTNQDHTDESKQHGKIEQITNKDYNDAGYEFLIKWVGKSNIHNSWVSESEVKILAKRKLENYKAKYGMSLINICKEQWCQPQRVIGLRASVDEVEEVLIKWCGLPYDECTWERSDEPTLMKYSHLVTQFKNFECQALDKDVVKDYANARNRHELNVLVDQ

SEQ ID NO: 6349 - protein, 138 aa, Zea mays
  unsure (1)..(138): unsure at all Xaa locations
  Clone ID: TF_5108360.pep
SRRQRINGHLAKLRSLLPNTTKXLQIPVQVLQRRMNTSGVAQGLIKWSGLSSSLATWEDLETLKQTFPNAPAWGQAGSRRRGDVTSRAPQAAEPEGAGAKLDNVGRSKEKEEPAGPRRGTRERKLNQRLLGPEWVNSM

SEQ ID NO: 6350 - protein, 169 aa, Zea mays
  Clone ID: TF_LIB3060-107-Q1-K6-E10.pep
MVGDMVYLKLQPYVQSSLVKRANHKLAFKFFGPYPVIAKIGSVAYKLGLPPSSSIHPVFHVSLLKKALGSNMQVSSTLPPLPDSLQKPVRILQRRQMQTHTGVVPQLLIQWTDWPEELATWEDEAAIIARFPEVAAWGQAVTEGGENVMTSNEPTVRSRPRRERGPTQG

SEQ ID NO: 6351 - protein, 1432 aa, Zea mays
  Clone ID: TF_ZmC1278165_1.pep
MAGAEQKGEERWERMLTAVERLTGKMEAMEVGQRKAEEDRALMARQLQETEQTVSRLRLELLAKDLEGNESNSEREHRVHRGDERGGGFGREGGRERREQWGEGREFRPSSLPKWSFPKFHGNDPGIWFDRCVEYFTVYQVPEWIWASTASTHMEGNASKWLQVYKLKHGLGDWEQFTHAVREKFGVEEYPHAMRALVNVKQQHGVEEYSQAFNDIRYAATLHNPELDETLFVTHYVRGLKPEIQSQVMARTPKTVDKAMRLAQLYQEIAEKNRMRSQKGVMGIKTQAIGSRSGILNPELNKERQLRDYRRANGLCYICGDKFEPGHQAKCPKRVVTQIHQLTVEDMSTVLTDEVLLKLEQEEEHIVEGLHQLSWNAIKGTECDGCMRVLSLIQDQVLVMLIDSGSSTTFISQRMVTKLGLSTEDCPPVKVKVANGEIMVCEKNVREVKWKAGGHVYRTAMRVLALEAYDVILGYDWLKQHSPMHCDWINKVLTFCDQGVEVKLQGEADLKREVQQVSVLQLEKWVKGDEVWVFVMLEEVKGEEDEAGNETLTGILEEFADVFAVPTQLPPTRPYDHHIPLLPGSIPVNSRPYRYSPHHKTEIEKQVSELLAAGLIVPSVSPFASPVLLVQKKDGSWRFCVDYRKLNDMTIKNRFPMPLVEEILDELAGTKFFTSLDMTSGYHQIRMGAEDEFKTAFKTHHGHYQFRVMPFGLTNAPASFQCAMNSILQSFLRKFVMPRNVTELRGFLGLTGYYRRFVKNYGLLAKPLTRLLQKQQGFAWSEEAQIAFENLKQAMASTPVLALPRFDLPFTVETDASDIGLGAVLMQQGRPIAFISKALGEKNKHLSIYEKEFLALILAVDRWRQYLQRGAFVIKTDHKSLTYLGDQQLQSDLQKKAMTKLMGLQFQVVYKKGTENVVADALSRVEHMMGLSVLSEIQPIWIQEVVNSYATDEDAQQLITQLLIQSPDEQGFSLQQGIIRKANRIWIGCNSALRTKLIAALHDSAVGGHSGIQATYQRVKKVFWWKGLKNDVTQYVQQCAICQKAKAERVHPAGLLQPLPVPQGIWEDVTMDFIEGLPKSEGFDTILVVVDRFSKYSHFLPLKHPFTAKGVAQVFLENVVKLHGVPRSIVSDRDKVFTSAFWKNLFQLMGVKLLMSTAYHPQTDGQSERVNQCLEMYLRCAVHDQPNKWKSWLALAEYWYNTTYHSVLGCTPFKVLYGYEAPLLVAPKTLGMEDREIADWFAERNAFSVMLKEQLARAQLRMKQYADKGRTPREFQVGDLVLLKLQPYAQKTVVNRSCPKLAFKYFGPFKVISRIGEVAYKLELPGDAQVHPVFHVSQLKPFLPCYSPVFSELPPAVDLSQGGIEPEQVLDRRMVRKGNRAIVQVLVKWSGVPKEAATWEDYAVARARFPEANAWGQALSEARGDVMTEDAD

SEQ ID NO: 6352 - protein, 75 aa, Zea mays
  Clone ID: TF_700168802H1.pep
LNITSDKWSCPECVSPLTEMERILDIEVLEAPREDSSSTEPRSKKMERYLIKWKGLSYIHCSWVSEKRIFRSREY

SEQ ID NO: 6353 - protein, 738 aa, Zea mays
  Clone ID: TF_ZM4892.C1.o1.fg.pep
MEEHVLQVKQVFQKLKDHQLKLKLSKCRFAQTTLEFLGHIISAEGIATDPEKVQVIRDWPIPNNVKEVRSFLGMAGYYRRFVAHYGIISKPLTSLLKKDQIFVWNDEAQKAFEALKAALVQAPLITGALTSNMENFFIKTDQQSLTHLEDQKLSTIWQQKAITKLLGLQFRIIYKKGVENRVADALSRRPNLCTDGSKLQLNVLATSTVVPSWLTEVTNSYEENEEAKSILSTLAAGDTIEPFTLVSGVIKHKGRIWLGSSNQVQLKVMTALHDSPIGGHSGFPVTYHRIKKLFYWAGMKGQIKEFVQSCEICTKAKADRNRYPGLLLPLPIPDQAWQVISLDFISGLPTSRRFNCILVVVDKFSKYAHFLAMSHPFTALSVAKLFLSQVYKLHGLPLSIISDRDPIFTSNLWQELFKLVGTKLCLSSAYHPQSDGQTEWVNQCVEAYLRCFVHGCPKQWSNWLSLAEFWYNTCFHTALGQSPFEVLYGHTPSQLGLSTIEQCQSADLQTYLATRQLMLQRAKLHLQRAQDRMKKQADKGRSERVFQVGQRVFLKLQPICQSSMGSRLNTKLSFRYFGSFLITKQVNPVAYKLALPEGSAIHPVFHVSQLKSAEETRITTDATMPDLLQELKIPTEVLESRLLRKGNKVIPQLLIRWSNWPASLSTWEDEHAIKQQFPRAPAWGQAVCQGEGDVSSTGHLNTGKDAAMEEADAEVQEAKRSTRAKRPNPKYIENVWMN

SEQ ID NO: 6354 - protein, 397 aa, Zea mays
  Clone ID: TF_ZmC1646_4.pep
MDKPIQVRARVDDGGIMWSENIVPNCNWESGETMFYSEFKVLLLKGITSDIEWAGDDHLIYITTESILRPGLQASESKRYLFVKSGSKNTRFIFYLDILKQNKELAVLTPCVYGVDTTPSHCGNHVFMKRRSDELYNSELVACPLDNVAEITSPDHCSSPELQDLLHTRQQMLQQVQMHLQRAQVRMKRQAGKGRMERSFSVGDRVYVKLQPYCQSSAAERVNHKLAFKFFGPLSMVRKVNPVAYEVALPEGSNVHPVFHVSQLKSFVPANVISSSVLPALTPDYQIPEEVMDSRLQRRAGKEVPQLLVRWTSWPPSLAIWEDEHWIKEQFPRAPAWGQAVSEGGGDVNDAGIQDGMGKATQGGAGESPAGGEGDAVPAAQARPADHKAQQEEVHRP

SEQ ID NO: 6355 - protein, 103 aa, Zea mays
  Clone ID: TF_uC-zmromo17027b12a1.pep
QNPPFFHVSQLKPFTPNYGPVFSKLPKVLDLGHEIVQPMDILDKRLVKKGGAALTQVLIKWSGLPVTATTWEDYNVIRARFPNALPWGQASIPGGANVPAEGD

SEQ ID NO: 6356 - protein, 242 aa, Zea mays
  unsure (1)..(242): unsure at all Xaa locations
  Clone ID: TF_ZmC925537_1.pep
FLRCFVNACPSKWVSWLHLAEFWYNSSPHSAIGRSSFVALYGYEPRHFGIQPDTVVASSDLDTXLRDREAMTALIKQHLARSRARMRRQADKHHSERRFQEGDMVWVKLQPYIQSSLAPRANQKLAHRFFGPYKVIARIGSVAYKFDLPASSXLHPVFHVSQLKKSAPRDVXVIAAVPSDITHLRVPESFLRRRLLSHGLRPHHQVLVKWSQWPESLATWEDEDLLRRQFPSAPAWGQASAQ

SEQ ID NO: 6357 - protein, 1626 aa, Zea mays
  Clone ID: TF_ZM4576.C1.o6.fg.pep
MAAADVAVSLPALAGSLVVMTQEIARAFSPRTSQLVSEARRHPSRSRIQAGGSVAVKRWREVADTAPNKPSAQARHLVAAMEDVEKRLAEKFQQALDSSATTLMELSKKMDGIGVLASKLGEIESRQMESDKMVQYLQAKMDLSMKSLAQVSQEQTKLANMVTNAARGMASTSKSPAGDGLMGAHPIGPQVWQNVPPKQTLNVEGGFKRVEDLGNIGEVDSANKRVWLPKMDFPIFEGEDARVWIDHCEAYFALYSIPEEFKVSAAYLHLKGRAAHWFQSCRESVELFEWFQFRLAVLNEFEVSTHADKMLELLTLKQTGTALEYKIQFEKLVYHIRLFDKSISETFLVTQFVLGLKMELRACVEVQFPKSVSMAAQLALKHEAFQSRQGTGNKRFGLVKPAFVSHVNNRESSDLHGEVWKAKQLKEYRRVNGLCYKCGEKFVPGHKCKTAVQPQLNVIAIEEGGDGGPILDDEVLDYLETGIHQDGDEVTLSLNAMRGTDNSKCIKLRALINNQVILQLLDSGSSNTFVSNMTLARLHCELQQIEPVDVKVANGQVLRCTQKAIQLEWWSCGRTFHADAFVIPVAAYDMVLGMDWLEQYSPMLCAWDQKWVEFYYEGSIIRLQGEKDKRNKEILEVSGDQIQGWTKRNDIWAMALLQKVEVEEKKNAETVPPVVEDLLEQFSGVFKVPNSLPPYRDYDHAISLLPGSAPVNCRPYRYSPLQKDEIERQVKEMLQTGLITRSVSPFASPVLLVKKKDGSWRFCVDYRKLNDITVKNKFPMPIIDEFLDELVGATCFSKLDMASGFHQIRMAAGDEEKTAFKTHHGHFQFRVMPFGLTNAPATFQCLMNAIFQHCMRKFVLIFMDDILVYSSSLEQHVNHLQEVFSVLQKHQLYAKRSKCSFAVKHIEYLGHVISENGVSTDPSKTAVMQKWPIPTSHTDLRGFLGLTGYYRKFVQHYGILAKPLTMVLQQKQFVWPPAAQEAFEALKAAMATTPVLALPNFAETFVVETDACDKGVGAVLSQKGHPIAYYSKALGVQNSKLSIYEKEFLAILMAVDKWRCYLQRGLFIIKTDHKSLTHLQDQTLATELQKKAMAKLAGLQFKIQYKKGAENKVADALSRVAPNMELTAISVGTPVWIQEIVKSYELDVQSQNLLRELAVQSPNSQGFRLKDGLIYKNHQLMVGQNVGLQTKLIAAFHSSAVGGHSGIQATYQRIKRLFYWQGIKNDVETFVKQCQVCQRAKHEHCKYPGLLQPLPIPQNCWQDISMDFIEGLPKSSGYSVIMVVVDRLTKYAHFIPIKHPYTAHSIAHTFFSNVVKLHGLPKSIVSDRDKIFTSLFWQELFKLTGTQLHLSSAYHPQTDGQTERVNQCLEMFLRCAVHDTPSQWAKWLDSAELWYNSSYHTSLKCSPFKALYGVDPNVGMMPFEMGERENDASITFQNRHHYLEMIKAHLAAAQNKMKYYADQNRSFRQYQEGDMVYVKLQPFAQSSVAHRPCAKLSFKYFGPFQILSRIGSAAYKLNMPESAAVHPVFHVSQLKTHVPNNTPVYSQLPSAAFAEGVSPEPEVILDRRLVQKGAAAVVQVLIKWVGLPAEMSSWEDYTVLKDRFPDAIIWSPDAARGGENVMTQGA

SEQ ID NO: 6358 - protein, 114 aa, Zea mays
  Clone ID: TF_LIB5075-002-R1-XP1-E11.pep
MDPVSKGAWQKRFFSVAPPAALVFFFVLIFVAGAAVTLDHKEPQCILQRRLVKKGGAAIVQVLVRWQGLPADSATWEDWTVMQARFPDSSAWGQASIPGGGDVTPAPTITGVTA

SEQ ID NO: 6359 - protein, 165 aa, Zea mays
  Clone ID: TF_LIB4172-012-Q1-L1-E4.pep
GRLQVPVRNSRVDPRVRFAVESIRKKRVRKGKVEYLVKWKGWPPKYSTWEPEEHILDPRLVMAYEEKEERDRASGYRKRGPKPRRLLLQESAAPDVVQTPGDWEPMEQAPEEEAEADLTNGPPPWTPTLPSSEVTVTDITANSVTVTFREAQAAEGFFRDRNEKL

SEQ ID NO: 6360 - protein, 363 aa, Zea mays
  Clone ID: TF_UC-ZMROTEOSINTE048H12_FLI.pep
EGLPRSDGFNCILVVVDRLTKYAHFIPLRHPFTANQVASAVLTHVVKLHGVPASIVSDRDRIFTSAFWKGLFKLLDTKLLVSTAYHPQTDGQTERVNQCLEMYLRCTIYNSPAKWKAWLPLAELWYNSSYHSSLQCSPFKALYGYEPKLPSFPVLADVSTTDLSSLIKERDLHLELLKHNLLAAQTRIKLQADKKRIDRQFAEGEMVLLKLQPYTQSSVASRPFPKLAFKYFGPYKILQKIGVAAYKLELPAGSLVHPVFHVSQLKPYTADYSPVYADLPKIPDLTQRDLQPQCILQRRLVKKGGAAIVQVLVQWQGLPADSATWEDWTVMQARFPDSSAWGQASIPGGGDVTPAPTITGVTA

SEQ ID NO: 6361 - protein, 380 aa, Zea mays
  Clone ID: TF_ZmC38719_1.pep
MRRNRKDSGYPTAALGEEDEAEELTEEGDEEEEEQTEEGCGEEDEVEAETPAQEAVEPPKLAEGYFEIEAIRRRRLRKGQLQYLVKWRGWPESANTWEPLENLKACSDIVDAFNKRSRSPRSCGKRKRKTPTTPTSDPNASRGKRGRPPRSEARSMHSIHASEVKKLPCRTSSRRANNNSNKTSPGGLGAAVNLLGQRIVQEGSSGVVSAGFPSQEAPLSVSLTDQQDVQHPANGSLKMDNEIRAITPQGGQVTGAKKRKSGCVRRFKQDEVTQEQGDIRDRTSDKPGNETVDSTEGDPGDKNKGEDSGNQIHMPKIIKIIKPVRYFATVMDGVQQVAITFKALRSDGEMVFVDDKQLKAKEPLVLIDYYEQHLRYNPTS

SEQ ID NO: 6362 - protein, 222 aa, Zea mays
  unsure (1)..(222): unsure at all Xaa locations
  Clone ID: TF_ZmC290186_1.pep
QRYKRALSREEVEVHDVGKEMELDLIKQYSQVERIFADRVSKADGDDLVPEYLVKWQGLPYAESTXKFXETDIDFAQDAIDEYKAREAASDILGKTVDFQRKKSKASLRRLDGQPEWLKAGKLRDYQLEGLNFLVNGWRNDTNVILADEMGLGKTIQSVSMLGFLHNAQEINGPFLVVVPLSTLSNWAKEFRKWLPNMNVVVYVGNRASRKMCQQHEFFSDK

SEQ ID NO: 6363 - protein, 1384 aa, Zea mays
  Clone ID: TF_ZM3648.C14.o2.fg.pep
MGRLLLPQRRRRGWEVGDEWGSTWSTGLTKDHFDGSSVSKPVSAERRQGVMDPNTKMILDEMEKKFSAMDLKWEKRFSAFADAKEERLSAVEVAAEDLAVWRVKMDTTMEDVKLDLRKLNKHWDRASLEAATEPGLLQKPVAAIGRALGGPEGEGFGGIREEPILPEQGFGSVTTYVPTSNKGMHHFVPPPVQSSACCPGLAFDVGGSRHRNFESGFHSLGKLPQLPFPTFEGDNPRLWISRCENYFDMYFVDPDSWIRSLLDRYGKNQHQALLRQLFRIRQTNSVSDYIARFSTLMDQLSAYGAVSDPLYFTTRFLDGLRDEVRAVVIMQRPGDLDAACSLALLQEEVADSGRRRAFPRFESGSWSKSEGKGPFPLPSPPSGDRNVSSNSDKRPVSPSKSVDERLGALRAFRRAKGLRDRCAEKWHKGHTCAATVQLQAMQEGYIFHQDLKVLPLQHYDMILGMDWLEVHRPMHVHWRHKWLSITYHGSFVTLYGSDYGASESLLIQISSVYVPEPASESSKFYPEIESLLSQFSSVTSAPTSLPPVRSCDHAIPLLVGAKPVNIRPYRYPPALKDEIEAQVTVMLQQGLIRPSSSPFSSPVLLVRKKDGSYRFCVDYRYLNALTVKGKFPIPVFDQLMDELAGSSWFSTLDLVSGYHQVRLKSGEEFKTAFQTHGGHYEFVVMPFELAGAPGTFQGAMNTTLATLLRKYVLVFFDDILVYSRTFEEHLNHLRDVLLLLQQDHWHIKLSKCQFAQRTISYLGHIISEQGVATDSAKVAAVRDWPSPLNVKELRSFLGLAGYYRKFIRHFAILTKPLTELLRKGVLYVWTSDHEISFTAVKQALCTAPVLALPDFNKTFCIETDACKSGVGAVLLQEGHPLTFISKALGIKTQGLSTYEKEYLAILIVVEQWRPYLLHAEFIIFTDQNSLVHLNDQRLHTPWQQRVFTKLLGLQYKVVYKQGIQNRVTDALSRRTHEEKSIQEFVASCDICQQAKPDRSKYPGSLQPLAVPAGAWQTITLDFVEGLPLSRGKNCVLVVVDKFSKYGHFIPLKHPFTAASVAHVFMQQVYRLHGLPFAIVSDRDRIFTSQLWKSLFSLAGVALNMSSAYHPQSDGQTERVNQCLETFLRCFVNACPHKWVQWIYLAEFWYNAACPAPQLADWLQEKSVMSALVHQHLARAQQRMKIQADKHRSERHFAVGDSVYLKLQPYVQSSLAPRSNQKLAFRFFGPFSVIAKVGSVAYKLTLPASSHIHPVFLVSQLKKAVPSSVTVDQLPVSLAGFQIPELVLQRRLDSKGNTQALIKWSGLPPSLATWENLEVVQQAFPLSPAWGQAGLRRPGNVSKPVSAEVTEVLGQEDKTESVHRLKRSDRIRRKNVRLSGPEWMA

SEQ ID NO: 6364 - protein, 413 aa, Zea mays
  Clone ID: TF_ZmC5789_3.pep
PDHAWQVVTMDFISGLPVSHKYNSDAWADAWLDAWAHFLALAHPFTALTVAKLYLSDIYKLHGLPSSIVSDRDPIFTSKLWQELFRLAGTKLCMSSAYHPQSDGQTERVNQCLEAYLRCFVHSCPKQWYSWLSLAEFWYNTCYHTALGKSPFEVLYGHAPSQLGLDTVDQCSVPDLQTWLLGHQQMLQQVKFHLQRAQDRMKKQADKGRVERTYTVGDQVFLKLQPFCQRSVADRPVSKLAFRFFGPFEVIEQINPVAYELALPSGSAIHPVFHVSQLKSANGVRVPSTDSLPDIFTGLQVPEEVLESRLLRKGGKVISQLLIKWSNWPVSLSTWEDEEAIKQKFPQAPAWGQAVVKEGGNVSRADHMDHAEERTQAVQQKAQTEGVKEDNQSPRSRRVPKPNTKYIGAEWRV

SEQ ID NO: 6365 - protein, 40 aa, Zea mays
  Clone ID: TF_LIB3245-566-P1-K1-F10.pep
MAAAARHLRTVKWFNDTKGFRFIYPEDGSEDLFLHQSWIK

SEQ ID NO: 6366 - protein, 64 aa, Zea mays
  Clone ID: TF_LIB3070-015-Q1-N1-A3.pep
IGSTEPKAVIFITRDNGSDDLFIHEAYIKDDGFRSLNDGDDVEYTVRSGCYCLSSGSSMSLVPG

SEQ ID NO: 6367 - protein, 69 aa, Zea mays
  Clone ID: TF_LIB3354-053-P1-K1-D1.pep
MHREAVKRFNDTKGLGFIYPEDGSEDVLVHQALIKSEGFRSLAEGEEVELLLLNGDPGLIQAVDFTTPH

SEQ ID NO: 6368 - protein, 55 aa, Zea mays
  Clone ID: TF_LIB3332-019-P1-K1-B4.pep
GSCVGNAFAARHLCTVKCFNDTKGFGVISSEDGSEDLFVHHSCIKSEGFRSFAEG

SEQ ID NO: 6369 - protein, 78 aa, Zea mays
  unsure (1)..(78): unsure at all Xaa locations
  Clone ID: TF_LIB3180-013-P2-M1-D2.pep
MAAAARHRGTVKWLNDTKGFGFIYPXDGSEDLFVHQSLIKSEGLRSLAEGEEVQFSNFDGDYGPSKGGPTNHRSGCIQ

SEQ ID NO: 6370 - protein, 86 aa, Zea mays
  Clone ID: TF_LIB3137-035-Q1-K1-C7.pep
GSGVARAAAVTQRRTVKWFNDTKVFGFICPEDGSKHLFVHQSYIKSDGFHSLADGDDVEFSIYHGDYGRTKAVDLTIPDGSFLRGC

SEQ ID NO: 6371 - protein, 169 aa, Zea mays
  Clone ID: TF_ZmC519941_1.pep
MGERVKGTVKWFNVTKGFGFISPDDGGEDLFVHQSSIKSDGYRSLNENDAVEFEIITGDDGRTKANDVTAPGGGALSGGSRPVEGGGDRGGRGGYGGGGGGYGGGGGGYGGGGGGYGGGGGGYGGGGYGGGGGGGRGCYKCGEEGHISRDCPQGGGGGYGGGEYGGRDR

SEQ ID NO: 6372 - protein, 101 aa, Zea mays
  unsure (1)..(101): unsure at all Xaa locations
  Clone ID: TF_LIB3587-283-Q1-K6-B1.pep
LPRDGSEEGFVHQSSIKSEGFRSLAEGEEVEFSVSEGDDGRTKAVDVTGPDGSFVRGGGGGXGXXXXLXGGGGGGGGGCYNCGQAGHMARDCPSRGGRGGR

SEQ ID NO: 6373 - protein, 75 aa, Zea mays
  unsure (1)..(75): unsure at all Xaa locations
  Clone ID: TF_LIB3245-117-P1-K1-D5.pep
GCWRRXXXTVKWFNDTKGFGFISPEDFSEDLFIHQSSIKSEGFRSLAEGEEVEFSVSDGDDVLTKAHYMTSPYKS

SEQ ID NO: 6374 - protein, 323 aa, Zea mays
  Clone ID: TF_ZmC218_40.pep
MAAAARQRGTVKWFNDTKGFGFISPEDGSEDLFVHQSSIKSEGFRSLAEGEEVEFSVSEGDDGRTKAVDVTGPDGSFVRGGGGGGGGGGGGYGSRGGGGSGGGGRSYGGSWGGGRRSAPDAAFGSVLSGTAGDAAPSDQWFVDALNAPAPHPIERVRSESSSIVSDVPDYLFSLDSPSDDPSPGPSAARAKSDATETPHHHGDDVPPSARQIPHVAGGASSWPAPPPPYMAQPMYYFPVPPPVHYLDQSAQSGYMPRPIYHIVGGGGSEAPGGDLHAAGGVYGVSHHMQGFPPMMYAPPRAVIYNYKSEGMPSLPPEGGAHSS

SEQ ID NO: 6375 - protein, 230 aa, Zea mays
  Clone ID: TF_ZmC218_88.pep
MAAAARQRGTVKWFNDTKGFGFISPEDGSEDLFVHQSSIKSEGFRSLAEGEEVEFSVSEGDDGRTKAVDVTGPDGSFVRGGGGGGGGGGGYGSRGGGGSGGGGRSYGGSWGGGRRSGGGGGPGACYKCGEPGHMARDCPSADGGGGYGGGGYGGGGYGGGGGGGGGCFKCGEPGHMARDCSSGGGGYGGGRRRRGGGGGGGRFGGGGGGGGDRSCYNCGEAGHIARDCPT

SEQ ID NO: 6376 - protein, 249 aa, Zea mays
  Clone ID: TF_ZmC218_73.pep
MAAAARQRGTVKWFNDTKGFGFISPEDGSEDLFVHQSSIKSEGFRSLAEGEEVEFSVSEGDDGRTKAVDVTGPDGSFVRGGGGGGGGGGGGYGSRGGGGSGGGGRSYGGSWGGGRRSGGGGGPGACYKCGEPGHMARDCPSADGGGYGGGGYGGGGYGGGGGGGGGGCFKCGEPGHMARDCSSGGGGYGGGGGGGGGGCYNCGQAGHMARDCPSGGGGGGGRFGGGGGGGDRSCYNCGEAGHIARDCPT

SEQ ID NO: 6377 - protein, 267 aa, Zea mays
  Clone ID: TF_ZmC218_80.pep
GCCSLPSLSWLSLRAPPPRIQAARQRGTVKWFNDTKGFGFISPEDGSEDLFVHQSSIKSEGFRSLAEGEEVEFSVSEGDDGRTKAVDVTGPDGSFVRGGGGGGGGGGGYGSRGGGGSGGGGRSYGGSWGGGRRSGGGGGPGACYKCGEPGHMARDCPSADGGGGYGGGGYGGGGYGGGGGGGGCFKCGEPGHMARDCSSGGGGYGGGGGGGGGGGGCYNCGQAGHMARDCPSGGGGGGGRFGGGGGGGDRSCYNCGEAGHIARDCPT

SEQ ID NO: 6378 - protein, 245 aa, Zea mays
  Clone ID: TF_ZmC218_90.pep
MAAAARQRGTVKWFNDTKGFGFISPEDGSEDLFVHQSSIKSEGFRSLAEGEEVEFSVSEGDDGRTKAVDVTGPDGSFVRGGGGGGGGGGGYGSRGGGGSGGGGRSYGGSWGGGRRSGGGGGPGACYKCGEPGHMARDCPSADGGGGYGGGGYGGGGGGGGGCFKCGEPGHMARDCSSGGGGYGGGGGGGGGGCYNCGQAGHMARDCPSGGGGGGGRFGGGGGGGGGDRSCYNCGEAGHIARDCPT

SEQ ID NO: 6379 - protein, 138 aa, Zea mays
  Clone ID: TF_ZmC218_74.pep
MAAAARQRGTVKWFNDTKGFGFISPEDGSEDLFVHQSSIKSEGFRSLAEGEEVEFSVSEGDDPGHMARDCSSGGGGYGGGGGGGGGGCYNCGQAGHMARDCPSGGGGGGGRFGGGGGGGDRSCYNCGEAGHIARDCPT

SEQ ID NO: 6380 - protein, 297 aa, Zea mays
  unsure (1)..(297): unsure at all Xaa locations
  Clone ID: TF_ZmC353770_1.pep
MERLWSLMLLKEKRVRRQQMLQALVEFQFKAVNTQQTVTIIDAIHVVGVLHAITSKITRIVRVGKRTRDRKALLKARPNNAGPIAGEGSHLTTCGDPMRVDHSIPXPPVQGEVMEGADNQGAGEQGRPVRQNMYRGYRPRFRRGPPRQRQPREDGNEEDKENQGDETQGQQPPQRRYRRNFNYRRRRPENPKPQDGKETKAADPPAENSSAPEAEQGGXSKCRLTISTIIRFSHPTRRXYEIPAIRNEQKIGAEDLXSACFLPVDQIXELSALSMQHGVLYYFYLKTSLFGNNKRVF

SEQ ID NO: 6381 - protein, 159 aa, Zea mays
  unsure (1)..(159): unsure at all Xaa locations
  Clone ID: TF_LIB4762-117-Q1-K1-E3.pep
MASDRVLGTVKWFNGTKGFGFITPDDGSEDLFVHQSSIKSDGYRSLNDGDAVEYTVGSGNDGRAKALDVTAPGGGPLAGGERPDGGNGGGRGGYGGGDRGXGGGGXAAYGGGGDRGYGGGDRGYRVGGGATAANGGDRGFTGEAAAYGGWTVEGGRGGG

SEQ ID NO: 6382 - protein, 208 aa, Zea mays
  Clone ID: TF_ZmC3007_1.pep
MASDRVLGTVKWFNGTKGFGFITPDDGSEDLFVHQSSIKSDGYRSLNDGDAVEYTVGSGNDGRAKALDVTAPGGGPLAGGERPDGGNGGGRGGYGGGDRGYGGGGDRGYGGGGDRGYGGGDRGYGGGGDRGYGGDRGYGGGGGYGGGYGGGGGGGGRGCFKCGEEGHMARDCSQGGGYGGGGGGGRGSECYNCGQEGHISRDCPNKRR

SEQ ID NO: 6383 - protein, 120 aa, Zea mays
  Clone ID: TF_LIB5116-059-A1-PF1-B9.pep
MAMEARMKGTVKWFNDTKGFGFISPDDGSEDLFVHQSSIKADGFRSLAEGEVVEFAVSEGDDGRTKAVDVTGPDGSFVQGGAGGGGGGGGFGSRGGGGSRGGGGFGGRGGDGSGGYGGGY

SEQ ID NO: 6384 - protein, 122 aa, Zea mays
  Clone ID: TF_LIB4764-069-R1-K1-C6.pep
MVFSSLPIFLDPPNWGQMQMQMQPPLQCLLGSGGGSDHHHLMPPPSLAPLPGGPADTAASAPAGGVSSTSVSVQAAAGAGAGAQPRPVVSMAERARLARVPLPEPGTLRCPRCDSTNTKICY

SEQ ID NO: 6385 - protein, 95 aa, Zea mays
  Clone ID: TF_LIB3159-016-Q1-K1-C5.pep
HFFKNRLMYRTAGGSMRNLPKGAGPHKNNNASATFHFLQKVKAGLPVDPLVCAAANTNGTVLNFCSAMFSLNLTEHNKHLKEKLVPIAGDQPSNG

SEQ ID NO: 6386 - protein, 121 aa, Zea mays
  unsure (1)..(121): unsure at all Xaa locations
  Clone ID: TF_LIB3689-248-Q1-K6-G7.pep
MRELCNGEWPELLHRCCPWVRRKVHRLLPNKGVRLASSSLANANVVAHPTPISLAQRAQLALMPHPEPSINSPRCXNTTNTNFCYYNNYCMTHPRHLYKXCRRYWTRGGSLCNVHKRGGWR

SEQ ID NO: 6387 - protein, 153 aa, Zea mays
  unsure (1)..(153): unsure at all Xaa locations
  Clone ID: TF_LIB4739-052-Q1-K1-F6.pep
PVRERRRATAAGRHGIDGHGSNRLAPAAVLPAAASDGHVAEGPTLGSVAASVLPQVLVLARLGVRRLVHRDVPQRLXDDPTPRAPRRQPRRRGPPPPRRRPPDHEQPPQRRGQHGAQEEQRRRTARVHGSGAFGLGAEWGVELVRVSGSDRFP

SEQ ID NO: 6388 - protein, 141 aa, Zea mays
  unsure (1)..(141): unsure at all Xaa locations
  Clone ID: TF_8368141.pep
DVAQRAPVRPVAAARAAEVARLRRAVVVVVAELGVXXERQXAAHXQLAACRGLLAHLQRGLVAPAXLLGGAXGGGSSVREXSXQTSEVGPGRLERRRQGGWRERHGXLQALMSTKKTHPRMPXGGASGGFNRRPAXAAXER

SEQ ID NO: 6389 - protein, 151 aa, Zea mays
  Clone ID: TF_ZmC511329_1.pep
MAPAVSILSATASAKRKRPATSDADELPHDDSSAPHQQVQGQGQQPRQQQQLECPRCRSTNTKFCYYNNYSTAQPRHFCRACRRYWTHGGTLRDVPVGGASRRAATGGGGGKRRRVSAEPSSPPPSVADACLPSAFPFLSDGSFFPQLDLV

SEQ ID NO: 6390 - protein, 206 aa, Zea mays
  unsure (1)..(206): unsure at all Xaa locations
  Clone ID: TF_ZmC564558_1.pep
MEAQTCRLQPPTMAPFAPLPHQYNNTCKHLNTTTMAATSGNNNSNGSTATAAGGAAADGMAAYLQHLQQAGAEAAAKSGGGGGAARGEQCPRCASRDTKFCYYNNYNTSQPRHFCRACRRYWTLGGSLXRNVPVGGSTRKRPRLAHHHQHARLAPPAPHVFGLTPMMPPPLQPSSSTSSSQGQGQGQGQSGGLLGSLFALGAARRG

SEQ ID NO: 6391 - protein, 159 aa, Zea mays
  unsure (1)..(159): unsure at all Xaa locations
  Clone ID: TF_ZmC241107_1.pep
QPRQQQQLECPRCRSTNTKFCYYNNYSTAQPRHFCRACRRYXTHGGTLRDVPVRGASGRAATGSGGKRRRVSAEPSSPPPSVADACLPSAFPFLSDGSFFPQLDLVGGVALAPPAFSSSWQSVLVPDLYDGLAPWDDGATAGTWGDIGGLDLSWTLPGN

SEQ ID NO: 6392 - protein, 225 aa, Zea mays
  Clone ID: TF_1061305.pep
KGYPVPVAKEERPAPGGDPCPRCGSRDTKFCYYNNYNTSQPRHLCKSCRRYWTKGGSLRNVPVGGGTRKSSSSSSSSSAATTTTTTTSTSPGAAPKATKRSKNSKRRRVAPAPDPAAPGTDASTADVASTAPSAATVAASEKPSATEHAAAAVATEKPPAAPPVSVGAFADTSPAPDAGSGGVRELLPHPSRFEWPSGCDLGPPYWGWGTSVLADTDPALFLNLP

SEQ ID NO: 6393 - protein, 244 aa, Zea mays
  Clone ID: TF_ZmC13570_1.pep
MQEEPGRRPVPPFAGVDLRRPKGYPVAVAKEEERPAPGGDPCPRCGSRDTKFCYYNNYNTSQPRHLCKSCRRYWTKGGSLRNVPVGGGTRKSSSSSSSSSSSATTTSTSPGAAPKATKRSKNSKRRRVAPAPDPAAPGTDASTADVASTAPSAATVTASEKPSATEHAAAAVATEKPPAALPVSVGAFADTSPAPDAGSGGVRELLPHPSRFEWPSGCDLGPPYWGWGTSVFADTDPALFLNLP

SEQ ID NO: 6394 - protein, 238 aa, Zea mays
  Clone ID: TF_ZmC1074_1.pep
MQEASSAAAAGAEPGRRAAQHQFAGVDLRRPKGYAAPAPAPAVGEGDPCPRCASRDTKFCYYNNYNTSQPRHFCKGCRRYWTKGGTLRNVPVGGGTRKKPSSSSSSSSYVAAADADRQPKKKPASKKRRVVAPAPELATAADPGKTATTTTTTSEITTETGALEDSDSLAHLLLQPGTEDAEAVALGLGLSDFPSAGKAVLDDEDSFVWPAASFDMGACWAGAGFADPDPACIFLNLP

SEQ ID NO: 6395 - protein, 151 aa, Zea mays
  Clone ID: TF_LIB4744-032-R1-K1-G1.pep
MLSSHRESLLPYAPGRRAAVLLDHRRYRPNVEVAPSCPRCDSPNTKFCYYNNYSLSQPRYFCKGCRRYWTKGGSLRNVPVGGGCRKNRSRGKPVRAVAVDSVAPSSGGAAAFTHRASASSSSASPATLRPDMLLGGMLGSPSELCQLTVTD

SEQ ID NO: 6396 - protein, 232 aa, Zea mays
  unsure (1)..(232): unsure at all Xaa locations
  Clone ID: TF_ZmC25364_3.pep
MLSSHRESLLPYAPGRRAAVLLDHRRYRPNVEVAPSCPRCDSPNTKFCYYNNYSLSQPRYFCKGCRRYWTKGGSLRNVPVGGGCRKNRSRGKPVRAVAVDSVAPSSGGAAAFTHRASSSSSSSXPATLRPDMLLEGMLGSPGGLCQLTVTDDDAAENPAVAPDGPRIDLALLYAKFLNQQPPAPERRAVLPESLVVDTLSGSSSSDVGPVVPSRDHQPFTTQDDGLGELSAA

SEQ ID NO: 6397 - protein, 378 aa, Zea mays
  Clone ID: TF_ZmC14032_1.pep
CAVAAPCACCRQSLGLVKPLEEMLMAASAGAANPSQGSNPNPPPLAAPLTDAGSTERRARPQKEKALNCPRCNSTNTKFCYYNNYSLQQPRYFCKTCRRYWTEGGSLRSVPVGGGSRKNKRSSSSSSSSSSSAAAASASTSSSATSSSMASTPGAASKSPELAHEGAHDDLNLAFPHHGGLHAAEFAAFPSLESSNDMCDQGGGMTSNGRGGGAGPAVGALSATELLRSSGCYMPLQMPGGDYTAAGFALGEFRTPLLPPPSSQSPLGFSLDAHGPGSSGAAAAAGYGSSAGLPQGVPGNAGRLLFPFEDLKPPVSPGGGGVGGGGASATGGAGDGNSSHDQFDHNKERGGGGGRGAGAGHDTPGFWSSMIGGSGASW

SEQ ID NO: 6398 - protein, 317 aa, Zea mays
  unsure (1)..(317): unsure at all Xaa locations
  Clone ID: TF_21216063.pep
HEAASAPINNQQEAVVSSPTRKEQARNPKXXXXXXXXXXXXXXXRPRPPPDAAHSCPRCSSTNTKFCYYNNYNLTQPRYFCKTCRRYWTHGGTLRNXXXXXXXXRNKRASSSSSPFPGPSXXXXXXXXXEKTVSTRLMLMATSTMAMPSPTAGLFVPDDMSPAXXXXXXXXXXXDLAGMDEQHQQGFLPFSPLSLSDQAPELAPGGXXDTTPSFLDMLTGGYLDGGGYGGMSGGSDAMDMPFSLPEMGXPTTDPMPFQLQWTSSELGYAAGPAAGVQQQQINGGDHQKQDENKEAGNGKGNDYSFWMNTSSSDGAQG

SEQ ID NO: 6399 - protein, 88 aa, Zea mays
  Clone ID: TF_14645985.pep
CLRRPAWRRCAEVLLTRRRALQREAARPPRCRRRREQGQGRGRRQPRPVVSMAERARLVRVPLPEPGTLRCPRCDSANTKFCYFNNYS

SEQ ID NO: 6400 - protein, 383 aa, Zea mays
  Clone ID: TF_ZmC2150_2.pep
SSRRGQSTRSHPPDWNNQQQQGQQPRASGGADAPLLPMGPMAATAAASEPGGLPRSSSTSSAALAMHARPNSMAERARLARIPNPEPALKCPRCDSTNTKFCYYNNYSLSQPRHFCNMCRRYWTRGGSLRNVPVGGGCRRNKRSSKSSSSSAGSSSSKMSPSGRLLGGPSATPSTTPGTTGAIITPGLSSFSHHLPFLGSMHPSGPNLGLAFSAGLPLVGMQHLDTVDQFPVASGGGTTIGASLEQWRVRQQQQQFPFMTGGILDLSQPPTYQFGLEANRGGSGSAAVAFNSGQTTTTSATTGRQEGSSKKIRDCKGEEVSLQKQYMVPLRHGSGSHGVWDGSAGGTGSNGGGTGNGGSSWPMNMIPGFHSSSTSGCNDSGLS

SEQ ID NO: 6401 - protein, 511 aa, Zea mays
  Clone ID: TF_ZmC24704_1.pep
MAAPGGLDQDCAQDAAIKLFGRSIPVLHSSVFAATAAAESEVSTKLANDVRSKDGMPCLPNMSLIVKTNPFPSKSNMKNGLQAISSQHGKMEADSNSEEAKNSLQAIISQPGKRYDSKSEEAKTESGGSGQEKVLKKPDKILPCPRCNSMETKFCYFNNYNVNQPRHFCRNCKRYWTAGGTMRNVPVGSGRRRNKDPSHHHHFTKVCDYTIATNGDVSDATQRQSVAAKLCLLQGSGKQNETACKSVSPVSNIKEQNNADLISLVSGDNKEEKSCASSAVVSGSSENWMPENTVKKEEDNTSAYGNGVKLPDHKMQSHHAGPVSVFSRNPAAVMATNQCSEDGIHTPGNGTVSPLSLPPLPMVPTPGICAPAVPFPFPLVPAFVSCIPGWPSGLWGAPWPGSSAPTLLSLPPNGLAGSNSGVLGKHTRVANLQEEQKAEKKFWVPKALRIDNPEEAAKSSIWASLGIKPDDRIIFKSFQSKDLKNSATKMPESLQANPAAFSRSQTFQERA

SEQ ID NO: 6402 - protein, 332 aa, Zea mays
  unsure (1)..(332): unsure at all Xaa locations
  Clone ID: TF_ZM4161.C1.o10.fg.pep
MVFSSVPVYLDPSNWSQHHQAQEQQQHAQHGQLPSDGGMDAHAHHHHDQPPPVRPPHGGALMAPRPDMAVVVSASGNGPTGGGSAIRAGSMSERARLAKIPQSEPGLKCPRCESTNTKFCYFNNYSLSQPPSRLSPTPLMQHPLVGGDHYNISASRLGFLGLSSLDPMDYHQFGTGAGASSATIGLEQWRLPQIQRFPFLSGQPDVVQPTMSGIYPFDMEGQSGDTPVLPGGHMLGGSKMPGSAGLITQLASVKMEDNPASVAMASSSSRDFLSVTGNLQFWVDDSDNDGASGNNEGGVGNAGGGSGGGAVAPGTSWVDLSGXNSSSSGKLL

SEQ ID NO: 6403 - protein, 222 aa, Zea mays
  unsure (1)..(222): unsure at all Xaa locations
  Clone ID: TF_LIB4744-008-R1-K1-G4.pep
GFCYYXNYSLSQPRHFCKACKRYWTRGGTLRNVPVGGGCRKNKRSSRSGGGGRNGSSSSFSSSSADSTALPLPPPPTTMGSLPSSLGLPGGASLLLGSALPGGAGDHHHLGLFQAAMQSVVSSDATAYDEMQQQQQTQLDHLLGLGYGGGAGAQIQLKPWMQEAAGASGAPGIMDSFYAPLLSSSLVPGLEELHVKAEAAGAGDHQQKPSSREQQSASWDWE

SEQ ID NO: 6404 - protein, 217 aa, Zea mays
  Clone ID: TF_ZM4642.C3.o6.fg.pep
MGLAAGGFKLFGKVITQCAESAPPASLVARERDDPDERDQPVVKREAAAASDSDSAVVLVDKQRRSGGPAESEDSKGQHHPRPRQPQQQDTAEARAAASAPPLPCPRCRSRNTKFCYFNNYNVNQPRHFCKDCHRYWTAGGALRNVPVGAGRRKNRPLGAAPIPLAVSVPAQHLQHPQHPAAAAGHGLGLPGQHPSCPTSPSPAYAGRWPVCPDRRF

SEQ ID NO: 6405 - protein, 140 aa, Zea mays
  Clone ID: TF_LIB4730-013-R1-K1-B6.pep
MQLSHTAPRMQEPGRRPVPPFAGVDLRRPRGYPAPAAKEAEEEPAPAPAPGGDPCPRCGSRDTKFCYYNNYNTSQPRHFCKSCRRYWTKGGSLRNVPVGGGTRKSGSSSSATATPTSTGAAPKSPRSSKNSKRRRVGPAP

SEQ ID NO: 6406 - protein, 326 aa, Zea mays
  Clone ID: TF_ZM4824.C3.o2.fg.pep
MAPGGFKLFGKVITQCAESAPPAPPEAAAAASRATAFARERDDPDERDQPMVKREAAASDHDFAAVDKHHQHSGGSGGPGPGPDESDDSKGQQQQQHHPRPRHHQHHHQQQQDTVEARAAAAASSAPPLPCPRCRSRNTKFCYFNNYNVNQPRHFCKDCHRYWTAGGALRNVPVGAGRRKNRPLGPVVAGAVPVPVPVPAHHHHHHLHPAAAAAAAAAGFVLGFPGQQHPSSPTSPSPSPVYADRWPTRDRSKTRGQRACSTSADEGDAIPCCPVQSLARIPGVVGDHRTTNPALYIPSWEKVTTDGVLMLCLCAQMELTALASQR

SEQ ID NO: 6407 - protein, 313 aa, Zea mays
  Clone ID: TF_ZmC3845_1.pep
MGGALPDGGGGGGGGGQVGGPAKPMSMAERARLARIPLPEPGLKCPRCDSTNTKFCYFNNYSLTQPRHFCRACRRYWTRGGALRNVPVGGGYRRHAKRAKPKQQQQHAAAGTGAANGAMQQPPAGSMASSAAACTATTTMTTNALDAGPGGGMLPMLPPLLRLADFDAMSLGSSFSGISSMGKPGSIGAACYPHSVGGLEQWRVQQMQSFPFLHAMDQGPLGPPLAMAMAAPGGMFQLGLDTTSDNSRGGGGGGGEDGSSAGEALHMMQAATKRESYPAPPRAMYGDQHHNHLAAAGGYTSYSTNAAAGNHLL

SEQ ID NO: 6408 - protein, 159 aa, Zea mays
  Clone ID: TF_ZmC8312_1.pep
AICVHHQGLGLGKPMEEMLMAGNANLNQNPNPPPAAPSAPGAQRAGAPAAVAAAPPSAGATGGAGPERRARPQKEKALNCPRCNSTNTKFCYYNNYSLQQPRYFCKTCRRYWTEGGSLRNVPVGGGSRKNKRSSSAVRRRLRPPPPPPRLCLARSPWGS

SEQ ID NO: 6409 - protein, 351 aa, Zea mays
  Clone ID: TF_ZmC22467_1.pep
MDMNSNANNSTAAAASAPINNQQEAVVSSPTRKEQARNPKKARAAPQQAGGSGEPRPRPPPDAAHSCPRCSSTNTKFCYYNNYNLTQPRYFCKTCRRYWTHGGTLRNVPVCGGCRRNKRASSSSSPFPGPSSTAATSAAMEKTVSTRLMLMATSTMAMPSPTAGLFVPDDMSPAFTPTTGGSGFDDLAGMDEQHQQGFLPFSPLSLSDQAPELAPGGGGDTTPSFLDMLTGGYLDGGGYGGMSGGSDAMDMPFSLPEMGPPTTDPMPFQLQWTSSELDNYINDDGGYAAGPAAGVQQQQQQQQQQINGGDHQKQDENKEAGNGKGNDDGGGGSSSVYSFWMNTSGSDGAEG

SEQ ID NO: 6410 - protein, 387 aa, Zea mays
  unsure (1)..(387): unsure at all Xaa locations
  Clone ID: TF_ZmC2150_1.pep
MVFPSPSVQVYLDPHPPNWNNQQQQGQQPRANGGADAPLLPLGPAAATSAAPEQGGLPRSSSMANAAVAAHARPNSMAERARLARMPHPEPALKCPRCESTNTKFCYYNNYSLSQPRHFCKTCRRYWTRGGSLRNVPVGGGCRRNKRSSKSSSAGSSSSKXSPSGRLLGGPSATPSTTPGTTGAIITPGLSSFSHHLPFLGSMHPSGPNLGLAFSAGLPLVGMQHLDTVDQFPVASGGGTTIGASLEQWRVRQQQQQFPFMTRGILDLSQPSTYQLGLEASRGGSGSDAVAFTLGQSTTSAATITARQEGSAMKMGDDSKGQDASLQKQYTAPLRHGSGSHGVWDGSAGGTGSNGGGTGNGGSSWPMNMIPGFHSSSTSGCNDSGLS

SEQ ID NO: 6411 - protein, 326 aa, Zea mays
  Clone ID: TF_ZmC25364_2.pep
MLPYAPGPPPSLLLDRRYKQGGEAAPSCPRCDSPNTKFCYYNNYSLSQPRYFCKGCRRYWTKGGSLRNVPVGGGCRKNRRGKSSLRSAADSIASCGGGGRDAAFGHRFPGPVRPDLVLEGMVGNHPSNPAGQAAMPGGVPAAADGSTIDLAMLYAKFLNHPPAVEGVGAVAPESAGQVDEAFDASSDLMSPGALAPVQFDPCQPQDGFGEWSGVPVSSAGPSSTASTTAATTMLCTDVSVQAAFGELNFAMDQNCFDSLGLPTDDVGNLSSSWCSIVPGLSTLEDAKYDLDSFPDDALSLHDEGMISGTDHDWSVDCQGLETLYMP

SEQ ID NO: 6412 - protein, 432 aa, Zea mays
  Clone ID: TF_ZmC914_1.pep
MGEGRAGDGLIKLFGKTIPVPETAAVGEAAKDIQQSGGSGSGTTDPKGQENNVQDSTGSPPQQEVADTEDSSADKQQGEAGNPKEKLKKPDKILPCPRCNSMDTKFCYYNNYNINQPRHFCKNCQRYWTAGGAMRNVPVGAGRRKSKSASATSHFLQRVRAGLPVDPLVCAAAKTNGTVLSFGSAMSSLDLTEQMKQLKEKLVPIAGDERSVGSRTQGPSAKAEDPDRKENVTADKSARVVQHPCMTNGVAMWPFSCAPPVPASACYGPGSIAIPFYPAAAAAAAYWGCMVPGAWSGAWPPHSGQSETGSSITSASPAASTKSNICFTPGKHPRDRDEEGGAKGNGKVWVPKTIRIDDVDEVARSSILSLIGIGGDKAGKDGGRGCKLARVFEQNEEAARTATPHSAAISGLPFLQGNPAALSRSLTFQEGS

SEQ ID NO: 6413 - protein, 90 aa, Zea mays
  unsure (1)..(90): unsure at all Xaa locations
  Clone ID: TF_LIB3245-209-P1-N1-A3.pep
MQEASSTTAAGAEPGRRAAHHQFASVDLRRPKGYPAPAPAPTTGEGDPCPQSASRDTKFCYYNNYNTSQPRHFCKGXRRYWTKGGTLSNV

SEQ ID NO: 6414 - protein, 148 aa, Zea mays
  Clone ID: TF_ZmC3039_27.pep
MAANLPDADAAGFKLFGKVIQPPDAQKRGADEGDDPTPQTALPPPPPPPPPPPPQQAPAAGGPGAEPLPCPRCGSRETKFCYFNNYNVRQPRHLCRACRRYWTAGGALRRVASASPGRRRPRPTARSAPVAAAASSAPAAAEEVGGPR

SEQ ID NO: 6415 - protein, 66 aa, Zea mays
  unsure (1)..(66): unsure at all Xaa locations
  Clone ID: TF_ZmC3039_2.pep
LWQREAASLRQQLHNLQESHKYDLAMDSKIMXETLFQCCRQLMGEELSGLGVRDLQSLENQIGMSL

SEQ ID NO: 6416 - protein, 159 aa, Zea mays
  unsure (1)..(159): unsure at all Xaa locations
  Clone ID: TF_ZmC3039_11.pep
MANLPDADAAGFKLFGKVIQPPDAQRAAGDGDGAGAPPPSPPVLPPPPPPPPPPPQPLPLQQAAGAGGTGGEPLPCPRCGSRETRDENXTKFCYFNNYNVRQPRHLCRACRRYWTAGGALRRVASASPGRRRPRPNARSAAAAAAPSASAAAREVGGER

SEQ ID NO: 6417 - protein, 339 aa, Zea mays
  Clone ID: TF_ZmC12646_1.pep
MVFSSLPIFLDPPNWGQMQMQMQPPLQCLLGSGGGSDHHHLMPPPSGLAPLPGGPADTAASAPAGGVSSTSVSVQAAAGAGAGAQPRPVVSMAERARLARVPLPEPGTLRCPRCDSTNTKFCYFNNYSLSQPRHFCKACRRYWTRGGALRNVPVGGGCRRNTKRSSKKSSRGGGAGATAATSSSSTTSTSTTATTTTTTSAAMAAAEAIAGMQAQLPHLGLPPAAAAAALEASLEGYHHYLPLQMQPQFLQQAGLHGYHFADDGTGVLAADGFPRGVVASGLLAQLAAVKMEEHGSNGGGAIAAHHEQQSYWPGSTGGGGGWPVEFLSGFSSSSSGNVL

SEQ ID NO: 6418 - protein, 188 aa, Zea mays
  Clone ID: TF_LIB3116-015-H12_FLI.pep
MQEFQSIPGLAGRLFGGAAAPGDLRRAQAAQHGPGGARCGGASPAAPEAVKCPRCESTNTKFCYYNNYNLSQPRHFCKSCRRYWTKGGVLRNVPVGGGCRKAKRASPSASASASSPASSSAPSTPASADAAKNPRRASASPRSNSGSASPTAAAATTPTPTDPSTSATPSSNGVAFTGSHHSSNPFST

SEQ ID NO: 6419 - protein, 410 aa, Zea mays
  Clone ID: TF_ZmC1430_11.pep
MELAGAASPHPPPESHVAPPRPPPQPPEEDVCEDRGNMSVTGEKPCTHRESDVGQTNSCSLNNSSECENHTPSNDEISEPESNLEMAKTEGGDVPSGEKVLKKPDKILPCPRCNSMDTKFCYYNNYNIKQPRHFCKSCQRYWTAGGSMRNIPVGAGRRKSKSSSASCRSVLIPVPGSSSVANPGGEASLFPLSVKANQAAVSFGPDSPLCTSMASVLKIGGGGEQVKSCSPASAAAQPRNGETQTQTCAPSSAATTPSDGPGNGSQKGAESAHQNQNQNQNGIIGHSNGVTPVHPIPFFPGPPFVYPWSPAWNGIPAMGSGGVRSPSDKRRSDFIRREDLEQRRTTDAQTGDGPSESSAEVGLFCAHPYQRLAETCRRILLNITLAQSNNDVTNTLPSLKNAQEIAQKTI

SEQ ID NO: 6420 - protein, 224 aa, Zea mays
  Clone ID: TF_ZmC1430_18.pep
MELAGAASPHPPPESHVAPPRPPPQPPEEDVCEDRGDMSVTGEKACTHRESDVGQTNSCSLNNSSECENHTASNDEISEPESNLEMAKTEGGDAPSGENVLKKPDKILPCPRCNSMDTKFCYYNNYNIKQPRHFCKSCQRYWTAGGSMRNIPVGAGRRKSKSSSASCRSVLIPVPGSSSVANPGGEASLFPLSVKANQTCHICSVQYDWQHRCCCCTRQRAPLL

SEQ ID NO: 6421 - protein, 515 aa, Zea mays
  Clone ID: TF_ZmC1430_2.pep
MELAGAASPHPPPESHVAPPRPPPQPPEEDLCEDRGDMSVTGEKPCTHRESDVGQTNSCSLNNSSECENHTPSNDEISEPESNLEMAKTDQGGDVPSGEKVLKKPDKILPCPRCNSMDTKFCYYNNYNIKQPRHFCKSCQRYWTAGGSMRNIPVGAGRRKSKSSSASCRSVLIPVPGSSSVANPGGEASLFPLSVKANQAAVSFGPDSPLCTSMASVLKIGGGGEQVKSCSPASAAAQPRNGETQTQTCAPSSAATTPSDGPGNGLQKGAESAHQNQNQNQNGIIGHSNGVTPVHPIPFFPGPPFVYPWSPAWNGIPAMAAAVCAAPATAEAAISSEHGTASSTVQWNVPPAIVPVLPPGFCGPIPVPVIPPPSVWPLITPWPNAAWSAPWLGPSASVPPGSSRSSGSSTCSDSGCGSGSPVLGKHSRESRPQGDEKAERRCLWIPKTLRIDDPVEAAKSSIWTTLGIEPGDRGMFRPFQSKHGRQQELQASGAARALQANPAALSRSQSFQETT

SEQ ID NO: 6422 - protein, 345 aa, Zea mays
  unsure (1)..(345): unsure at all Xaa locations
  Clone ID: TF_ZmC8284_3.pep
MAGAGCAXSCAAAGGGGGXAAVARTGVGAGGAVADPRAEALRCPRCDSANTKFCYYNNYSLSQPRHFCKACKRYWTRGGTLRNVPVGGGCRKNKRSSRGSGGGRNGSFSSSADSTALPLPPPPTTTGSLPSSLGLPGGASLLLGSALPGGAGDHHHLGLFQAAMQSVVSSDATAYDEMQQTQLDHLLGLGYGGAGAQIQLKPWMQEAAGAGGAAGIMDSFYAPLLSSSLVPGLEELHVKAEAAGAGDHQQKPSSRDQQSASWDWELPTPSSSNVDANVTASDALMAAAAAAAAASMNPAVSVSSTPSAAPTAPSSFLYWGNGGIGGAAAAWPDLANCGSSIATLF

SEQ ID NO: 6423 - protein, 141 aa, Zea mays
  Clone ID: TF_ZmC8284_4.pep
MAGAGGATAVKQPAAGAPDAGASRSGVGAGAAGAPVADPRAEALRCPRCDSANTKFCYYNNYSLSQPRHFCKACKRYWTRGGTLRNVPVGGGCRKNKRSRSSGGPGAGGRNGSSAAAAAAAAAVVVTFSSVPVTLALPLYT

SEQ ID NO: 6424 - protein, 328 aa, Zea mays
  Clone ID: TF_ZmC752_1.pep
MDMISGSTAATSTPHNNQQAVMLSSPIIKEEARDPKQTRAMPQIGGSGERKPRPQLPEALKCPRCDSNNTKFCYYNNYSMSQPRYFCKACRRYWTHGGTLRNVPIGGGCRKNKHASRFVLGSHTSSSSSATYAPLSPSTNASSSNMSINKHMMMVPNMTMPTPTTMGLFPNVLPTLMPTGGGGGFDFTMDNQHRSLSFTPMSLPSQGPVPMLAAGGSEATPSFLEMLRGGIFHGSSSYNTSLTMSGGNNGMDKPFSLPSYGAMCTNGLSGSTTNDARQLVGPQQDNKAIMKSSNNNNGVSLLNLYWNKHNNNNNNNNNNNNNNNNKGQ

SEQ ID NO: 6425 - protein, 394 aa, Zea mays
  unsure (1)..(394): unsure at all Xaa locations
  Clone ID: TF_ZmC604766_1.pep
MARLPSGGNGGGGGGMDTHAHHHHHQLPPVPPPPSGALMAPRPDMSAXSPAASGGGGPTSGGTAIRPGSMTERAKLAKIPQPEPGLKCPRCESTNTKFCYFNNYSLSQPRHFCKTCRRYWTRGGALRNVPVGGGCRRNKRTKSSKSNSSSAAASASGGAGGTSSSTSSTATGGSSSAGAIMPSHQGQLQPFLASLHHPLAGGGGGGDHYSTGASRLGFPGLSSLDPMDYHQFGAGAGAGASSAAIGLEQWRLPHIQQFPFLSGRPDPVQPTMSSIYPFDLEGHGGDAPGFPGGHMLGASKVPGSAGLITQLASVKMEDNPASAAMASSSPREFLSLPGNLQFWGGGGNNNGGASGNNGGGAGNGGGGGGGGAVAPGSSWVDLSGFNSSSSGNVL

SEQ ID NO: 6426 - protein, 342 aa, Zea mays
  Clone ID: TF_ZmC25364_1.pep
MLSSHHEAMLPYAPPPPPPSLLVDRRYRQLQQAGEAAPSCPRCDSPNTKFCYYNNYSLTQPRYFCKGCRRYWTRGGSLRNVPVGGGCRRNRRAKSSLRSAVGGGGGGHRFPGPVVRPDLVLEGMVSNPAQEMPGVPAAADGSTIDLAMLYAKFLDHHPPAEEGLGSAVTPELAVALAGPGRVDEALFDTFSDLSPPAGVLAAPPVQFDPPCGHDDGFDDWSSGAPVRSAGPSSTASTATATTTMPPCADVSVHAAFGEEFNFAKDQSCLLFDSLGLPTDDVGDLSSSSWRSIVPGLSTLEDTEYDLLDSSFPDDALSLHEGMVSGTDHDCWSVVDCQGLEAL

SEQ ID NO: 6427 - protein, 84 aa, Zea mays
  Clone ID: TF_LIB4738-118-A1-K1-G10.pep
ARAQGPANARQQQLECPRCHTNMTKFWYYNNYSTAQPRHFCRACRRYWTHGGTLRDVPVGGASHRAATGRVGKRRRKLRRDLIP

SEQ ID NO: 6428 - protein, 413 aa, Zea mays
  Clone ID: TF_ZmC604766_2.pep
MVFSSVPVYLDPPNWNQHQHQPQHEQQQAHHGQLPSDARGGGGGGVDAHAHHHQLPPMPPSAPGGALMAPRPDMAAVVAASGGSTSGGGGPTGGGSPIRPGSMTERARLAKIPQPEPGLKCPRCESTNTKFCYFNNYSLSQPRHFCKTCRRYWTRGGTLRNVPVGGGCRRNKRTKSSKSNSSSAASASSAGGTSSSTSSTATGGSGSAASIMPPHQGHGGQPQFLASLHHPLVGGDHYSTGASRLGFPGLSSLDPMDYHQFGAGAGGAIGLEQWRLPQIQQFPFLSSRPDAVQPPMSGIYPFEVEGHGGEGSGFAGHMLGDPKVSGSAGLITQLASVKMEDNPTSAAMASSSPREFLGLPRNLQLWGASGNGGASGNNGGGTGNAAGGGDTIPPGSSWVDLSGFNSSSSGNVL

SEQ ID NO: 6429 - protein, 127 aa, Zea mays
  Clone ID: TF_LIB3078-017-G3_FLI.pep
MIFPPAFLQDSSSWNDNQQQQHHQQQQGHGHLLVAVSGSGDANHELLQQPIMGGALPDGGGGGGGGGQVGGPAKPMSMAERARLARIPLPEPGLKCPRCDSTNTKFCYFNNYSLTQPRHFCRACRRY

SEQ ID NO: 6430 - protein, 282 aa, Zea mays
  Clone ID: TF_ZmC3039_32.pep
MAMALAPLRRRRRSFLLLLLLPRPRRSLCPCSRRPGPGAPAASRCRARGAAAGRLGMKTVGNGIYSFGLPLSSLRETKFCYFNNYNVRQPRHLCRACRRYWTSRGALRRAVDASPVRSLNGCSAAYRIIRLVPNIENFRTALGCLQCWANSRRVYSNVTGFLGGVNWALLVARVCQLYPNAVPSMLVSRFFRVFTQWQWPNPVMLCSIEEDELGFPVWDPRKNPRDKCHHMPIITPAYPCMNSSYNVSTSTLRVMVEQFQFGNKICQVIFAPLKLLFQKYLP

SEQ ID NO: 6431 - protein, 284 aa, Zea mays
  Clone ID: TF_ZmC1430_6.pep
MELAGAASPHPPPESHVAPPRPPPQPPEEDVCEDRGNMSVTGEKPCTHRESDVGQTNSCSLNNSSECENHTPSNDEISEPESNLEMAKTDQGGDVPSGEKVLKRPDKILPCPRCNSMDTKFCYYNNYNIKQPRHFCKSCQRYWTAGGSMRNIPVGAGRRKSKSSSASCRSVLIPVPGSSSVANPGGEASLFPLSVKANQAAVSFGPDSPLCTSMASVLKIGGGGEQVKSCSPASAAAAAQPRNGETQTQTCAPSSFQTPPSDGTQVGSELRPVCVPLIQKVKAV

SEQ ID NO: 6432 - protein, 182 aa, Zea mays
  unsure (1)..(182): unsure at all Xaa locations
  Clone ID: TF_LIB4315-019-R1-K1-G5.pep
PPPAADASHGFGNPSLAVLASAPTNETPHGQWPGEWTPLGPFVPRWPPFPRAVGTSRPPPEATPVAVSQEEEMPAPGRDPCPXRCGSRDPQVSCFFHHFNTSQPRHLCKSCRPFWTQGGSLRNVPVGGGTRKNSSSSSSSSSSATTTSTSPGAAPKATKRSKNSKRRRVAPAPDPAAPGNGR

SEQ ID NO: 6433 - protein, 125 aa, Zea mays
  Clone ID: TF_21216762.pep
MTAAEVEAAKDIAEEKAVVPLPPSPAKPADDDSKAIVALVVKDAYLAKIVSEKRLSLITAWEESQKARADNRSNCRRRRRRTRRSSRTSWRCCRRPGPARRPSWRRRWPPSTEPRARAPPSSLAS

SEQ ID NO: 6434 - protein, 185 aa, Zea mays
  Clone ID: TF_ZmC1128497_1.pep
PRRACTPVALSPMASRSSTPVRRRQEGPVGVTTAIVAGTLTEQVAAADEVACVGDERPVAGHVPSVNSLESRAAAWDEAERAKFMARYKREEVKIQAWENHEKRKAETKMKKMQMKADQMKARGQEELSNRLATTRRMAEEKRASAEAKLNERANRTSEKANYIRRTGHLPSSFRISGLCGSSFE

SEQ ID NO: 6435 - protein, 69 aa, Zea mays
  Clone ID: TF_5791336.pep
KSNLPYALKHLRNFFGATLKAPGLSCHLLSLENFFTMLGHNHRSLFLGLLMDDCLLVFHLLSIFSHFLL

SEQ ID NO: 6436 - protein, 108 aa, Zea mays
  Clone ID: TF_LIB3587-206-Q1-K6-C5.pep
SKIAAWQIAEVAKVNNRFKREEVVINGWEGDQVEKSGAWLNKYERKLEEKRAKAMEKAQNEVARARHKAEAKRASAEAKRGTKVARVLELANFMRAVGRAPSAKRSFF

SEQ ID NO: 6437 - protein, 92 aa, Zea mays
  Clone ID: TF_LIB4766-035-R1-K1-A8.pep
HMDPIYKPREEKRKEREENNWHPVMDDTDRHHRGTSRRSTYTAYSFFSLQLGSRMQQRAYIDHTQAGRDGGGRGSRLARRRSAWWAPCRRPS

SEQ ID NO: 6438 - protein, 584 aa, Zea mays
  Clone ID: TF_ZmC145_1.pep
MLRPEPALGFLAAGPVRACKPPPERRRKKQPPTRRRRPASAATVVGLGPRGAADPDPAHSSALLPLTSGGSGSGFASRGTVAPDEEEGRDGASSAESQEVAEAANDSFSYSLRECQKQRRLKSERSALVRPPASHKLNNAGGIELLVLSPRCLIGGNPGGMSKSSTTSSRSRSGTGTFPSPGTPSCNRHCAGSMQYSKGWSSERVPLGTGRNRRYGGSGVVLPFNNGRKLPSKWEDAEKWILSPVSCDGMGRMSAPAPHHRRPKSKSGPLGHPAGIPGAYAAVSPLVPCFDGVLAAANFAAHSPFSAGVLIPEHGRIGDFSSGRDRCGDDGSSRSYSAEKESYILRSASIHAWTETLMEASAFANISEETVQDDKLQRQTEATSMISSPIIKKDIGTQMSPEDSISSPKARHSCSSLPSRHLIKETNSHIPKPEIRDVQVDDQVTVTRWSKRHVTRGSDKRSTNIIEWRKKTVETRAPSFDEKEREGCMSKCKREEAKITAWENLQKAKAEAAIRKLEMKLEKKRSSSMDKILGKLRSAQKKAQDMRSVVSSSEGQCSVRATKKTSSSVKTGRPFSCCFTYRAC

SEQ ID NO: 6439 - protein, 295 aa, Zea mays
  Clone ID: TF_ZmC1445_2.pep
MLSEQTAASTSSGEHQERSVVEDRRLQPVGENEEAEFRDIHALSPPPSQPSSYRRSRHASVGSDTAPSEPFPTMSREFSAMVAAAAAIANGAAADRLGEAEDEETNPLAIVPDSNPIPSPRRARGPPTPGAGAAHANGDGGVSVGQVRKEEVESKIAAWQIAEVAKVNNRFKREEVVINGWEGDQVEKAGAWLNKYEVVSPSHRSTPPHSLTSVVRTVQCLLTDTNACNVQRKLEEKRAKAMEKAQNEVARARHKAEAKRASAEAKRGTKVARVLELANFMRAVGRAPSAKRSFF

SEQ ID NO: 6440 - protein, 141 aa, Zea mays
  Clone ID: TF_ZmC1586_1.pep
DGGSPPGLAAADRDETAPGAPTTTAVSPAATWDAAERAKHMARYRREEMKIQAWENRRRQKAELQMKVAEAKAERMKLRAQEKTASKLASAQAAAREKRAQAEAKLNRRAARVDRADALRRTGHLPSSSSVFSLKLPLMCR

SEQ ID NO: 6441 - protein, 103 aa, Zea mays
  Clone ID: TF_ZmC1445_3.pep
REKSPGGQVNNRFKREEVVINGWEGDQVEKASAWLKKYERKLEEKRAKAMEKAQNEVAKARRKAEERRASAEAKRGTKVARVLELANFMRAVGRAPSTKRSFF

SEQ ID NO: 6442 - protein, 106 aa, Zea mays
  Clone ID: TF_ZmC145_4.pep
MKKKEKDACQSLRCKREEAKITAWENLQKAKAEAAIRKLEMKLEKKRSSSMDKILGKLRSAQKKAQDMRSVVSSSEGQCSVRATKKTSSSVKTGRPFSCCFTYRAC

SEQ ID NO: 6443 - protein, 129 aa, Zea mays
  Clone ID: TF_ZmC145_2.pep
SYTIFFFAISKKENSYTEDINLLHFVFRDLFICVLRCKREEAKITAWENLQKAKAEAAIRKLEMKLEKKRSSSMDKILGKLRSAQNKAQDMRSVVSSSEGQCSVRATKKTSSSVKTGRPFSCCFTYRAC

SEQ ID NO: 6444 - protein, 67 aa, Zea mays
  Clone ID: TF_ZmC1445_6.pep
MAQRKLEEKRTKAMEKAQNEVAKARRKAEEKRASAEAKRGTKVARVLELANFMRAVGRAPSTKRSFF

SEQ ID NO: 6445 - protein, 466 aa, Zea mays
  Clone ID: TF_ZmC509_1.pep
MQRSQVHGPPPKSANLHFLSSLSPPPPRRPASRATTGASPPRMEYERIHEPLPRRQSGGFSPAKLRAMLRGLEKHQRNSGEDTSPEANDSGELDDRRSLECSTSTEMSSNSGHRSRNRAPDDDSFDSESSSSGPPTVKRSAAVAALLPPFSRPTPSKWDDAEKWISSPTSNRTGRAGPTAGTMPKKSALAFPEHGARQPAVAKVVTDVPTIAGPLVKNSDGLAHPDLLKPAHDASIVDGPAPAVRSVSMRDMGTEMTPIASQEPSRTATPMIASSPTSSRTPTPQRTTEFSVSNIDSNKMAMSEEEVHISTRQEIMDLGERLGKTTIAAWASKEEKAAARSTDTAADNAVDVNRENRAADWQEAEKAKYLARFHREEAKIQAWENLQKAKIEAEMKRIEAKIERKRAREQDRLASKLAAVSHRAEAKREAAEARRDQEAARTEEQAAQIRETGHTPSSFSCWCWCL

SEQ ID NO: 6446 - protein, 268 aa, Zea mays
  Clone ID: TF_ZmC2853_1.pep
MLHEQQAPPPAVAAPPPSINPDDDGARDVEVTTFRDIHPLTPDAPPPASASWDTASHRSLSSSDDQQYMTMSREFTAMVAAGATMQPGGYDGAADQLTSIGEDELEETNPLAIVPDSHPIATPARSRASGLEVVPAGPAPQPQPQPPAHLEASQVKKEEVETKVTAWQTAEVAKINNRFKREDVVINGWETEQVEKASAWLKKIERKLDEQRAKALEKTQNDIAKARRKAEEKRASAEAKRGLKLAKVLELANFMKAVGRVPTKRSFF

SEQ ID NO: 6447 - protein, 83 aa, Zea mays
  unsure (1)..(83): unsure at all Xaa locations
  Clone ID: TF_LIB3689-224-Q6-N6-G2.pep
WGNPKKANIKAXLKRFRDHWKKKRLXFSEKIKNKVSIIPKEAQKKRTMVEAKPGXEVLKAQEMVSKYRAPGPAPKKLIGCFGA

SEQ ID NO: 6448 - protein, 91 aa, Zea mays
  unsure (1)..(91): unsure at all Xaa locations
  Clone ID: TF_LIB3632-055-Q6-K6-C12.pep
TEKRNSFIKPWEENEKTKALNKAANKEFAILSWENTTKANIELLLNKIEEQLXRSMLYMHDNMKNKAALIHRGAQEKRAMVEAKRGEEASE

SEQ ID NO: 6449 - protein, 116 aa, Zea mays
  unsure (1)..(116): unsure at all Xaa locations
  Clone ID: TF_21214887.pep
IRDLLLKGGNGEEDSLIKAWEDNEKAKADNKATKKVSVILSXEAEMKKIEEQLEKKKAEYAEKMXXKVAMIHREAEEKRAMVEAKRGEEVLKAEEMAAKYRATGHAPKKPIGCFGA

SEQ ID NO: 6450 - protein, 93 aa, Zea mays
  Clone ID: TF_LIB4764-010-R1-M1-F7.pep
KLVERLQKKKPVYDVQIKPKLAMVHRTPEETREQTEARQGKHIFLAEEMAAKNRAKVEGLSNLFGLFLAWPLLWIMLCFVCVLVSYSHLVLFL

SEQ ID NO: 6451 - protein, 426 aa, Zea mays
  Clone ID: TF_ZmC509_2.pep
MEYERIHEPLPRRQSGGFSPAKLRAMLRGLEKRQRNSGEDTSPEANDSGELDDRRSLECSTSTEMSSNSGHRSRNRAPDDDSFDSESSSSGPPTVKRSAAVAALLPPFSRPTPSKWDDAEKWISSPTSNRTGRAGPTAGAVPKKSALAFPDYGGRPPAVAKVVAGCAYQRWTRCGFIFSGLAHPDLLKAGHNASVVVDGAAPAVRSVCMRDMGTEMTPIASQEPSRTATPIIASSPTSSRTPTPQRTAEFSVSNIDPNKIEMPEEEVQMSTRQEIMDLGERLGKTTIAAWASKEEKSAARFTDTTAYKAVDIGRETRAADWQEAEKARYLARFQREEAKIQAWENLQKAKIEAEMKGIEAKIERKRAREQDRLASKLAAVSHRAEAKREAAEARRNQEAARTEEQAARIRYTGHTPSSFSCWCWCP

SEQ ID NO: 6452 - protein, 183 aa, Zea mays
  Clone ID: TF_ZmC1422_1.pep
MTAAEVEAAKDIAEEKAVVPLPPSPAKPADDDSKAIVALVVKDAAAGKPSTAIIGGSTERDAYLAKIVSEKRLSLITAWEESQKARADNRAAKKLAFITSWENAKKAEMEAELRKIEEQLQKKKAAYEEKLKNKLAMLHRTAEERRAQTEARRGEETILAEEMAAKYRAKGEGPTKLFGLLKA

SEQ ID NO: 6453 - protein, 154 aa, Zea mays
  Clone ID: TF_ZmC1422_4.pep
DDDSKAIVALVVKDAAAGKPSTAIIGGSTERDAYLAKIVSEKRLSLITAWEESQKARADNRAAKKLAFITSWENAKKAEMEAELRKIEEQLQKKKAAYEEKLKNKLAMLHRTAEERRAQTEARRGEETILAEEMAAKYRAKGEGPTKLFGLLKA

SEQ ID NO: 6454 - protein, 56 aa, Zea mays
  Clone ID: TF_LIB3159-017-Q1-K1-G7.pep
KPTAACAYTYITFNASLSLCSFLMLDEKHSCFLFNMSPFLLLLLTFNTDIFFFFFV

SEQ ID NO: 6455 - protein, 540 aa, Zea mays
  Clone ID: TF_ZmC4686_1.pep
MEYERIHQKAQPGALSPTKLRMKILGAHNRVRVITSNSSSRTSPAKTIEASQAQNRLLVCDVLEEDSADSTKHPSATNKTEAVEKVQKDPAVDISQVQNASTSSAAKPATGSSSMIQIHPLRPAEEDSTTECDSGLDNASTSSFEFHGVEKAAATQNPAAGYLSRQTSISSKWNDAEKWIVSRQNVSQKNNVAKGALQNQTVNQMSSAAARGAVVPKISARPVQKMKRVNPALSAPRSILERLSFASYQPKLVRHADVCPVSNAGANSEHHKATDTGSSIEVKPCNDTNDIPTVQSSVSVRDVGTEMTPIPSQEPSRTGTPLGSRTPTRSPNCSVPSTPVGGRSIASPPGEDCTDDGPFFHRKCGVHANELSDTETRLKTRQEIAALGIQLGKMNIATWASKEELELVSAAPSIADLERIRKEYAARAASYEEAENTKHTARFKKEEVKIEAWEGRQRAKIEYEMRRIEEFAERMRSEAMEKMAEKLEMTRRIAEEKRASANAKMNQQAAIAVQKAEKIRQTGRVPGSSILRCGGCFCGP

SEQ ID NO: 6456 - protein, 481 aa, Zea mays
  Clone ID: TF_ZmC4686_2.pep
DLLEEVSDSADSAKHPSASNINKTEAVEKYSAVDNSQVQNASTSSAAKPATGSSSMIQIHPVRPAEEDSTTECDSGLDNASTSSFEFHGVEKATAATQNPAAGYLSRQTSISSKWNDAEKWIVSRQNVSQNNVAKGALQNQTVNQMSSAAARGAVVPKISARPVQKMKRVNPALSAPRSILERLSFASYQPKLVRHADVCPVSNAGANSEHHKATDTGSSIEVKPCNDTNDIPTVQSSVSVRDVGTEMTPIPSQEPSRTGTPLGSRTPTRSPNCSVPSTPVGGRSIASPPGEDCTDDGPFFHRKCGVHANELSDTETRLKTRQEIAALGIQLGKMNIATWASKEELELVSAAPSIADLERIRKEYAARAASYEEAENTKHTARFKKEEVKIEAWEGRQRAKIEYEMRRIEEFAERMRSEAMEKMAEKLEMTRRIAEEKRASANAKMNQQAAIAVQKAEKIRQTGRVPGSSILRCGGCFCGP

SEQ ID NO: 6457 - protein, 186 aa, Zea mays
  Clone ID: TF_ZmC262_9.pep
FFSSCSSIFFSSASMFAFFVFSHERIADTFLAALFSAFVFSFSSQALIKEFLFSVSTLARARSLSLEPPCFAGAGFSGAGSSATFSTMARALESSAGGGGGGGSVAGMTALSSATSSFAAASGSLVTSTSTFLASSSAMLLSCGRGLAVAVECVCVCVCVCLCERGGGRVLIATGFNCWPCLLDSV

SEQ ID NO: 6458 - protein, 131 aa, Zea mays
  Clone ID: TF_LIB3137-040-Q1-K1-F12.pep
ARNSLSIYQSISPSSAEPNSEAMAELQTKVEPVTVPAPVDPEPPLAEAPPLEKKAVAVPPPVPAAAEETKALVIVEKEKENEKIPEPVKKNASRGSLDRDIALAEIEKEKRLSNVKAWEESEKSKAENKAQ

SEQ ID NO: 6459 - protein, 264 aa, Zea mays
  Clone ID: TF_ZmC262_7.pep
LLGHLTPKQKDIIYKLEAHDRFKRNAVGSALYIHPCLSELSEVNAEHRANTFRDDLVDSLVDSITVRDGVKANFFMNILSLANSAGEKVLAFSQYISPMIFFERLLVKKKGWHVGKEIFMISGDTSQEDRELATDHFNNSADAKIMFGSIKACGEGISLVGASRVVILDVHLNPSVTRQAIGRAFRPGQQKKVFVYRLVAADSDEVKVHETAFKKEVIPKLWFEWSEHCTTEDFKLGQIDIDDSGDELLDTKAIRKDIKALYRR

SEQ ID NO: 6460 - protein, 182 aa, Zea mays
  Clone ID: TF_ZmC1422_2.pep
MAAEVEAAKDIAEEKAVVPLPPSPAKPADDDSKAIVALVVKDAAAGKPSTAIIGGSTERDAYLAKIVSEKRLSLITAWEESQKARADNRAAKKLAFITSWENAKKAEMEAELRKIEEQLEKKKAAYEEKLKNKLAMLHRTAEERRAQTEARRGEETILAEEMAAKYRAKGEGPTKLFGLLKA

SEQ ID NO: 6461 - protein, 276 aa, Zea mays
  Clone ID: TF_ZmC1445_1.pep
RQEQPVAENEEEEEEQEEFRDIHALSPPPSQPSSYGRARGGEPWGSAAGGSRHTSVRSVGSDTAPSEPFPTMTREFSAMVAAAASAAAASRDADSDVVGRAEEEEEEELEETNPLAIVPDSNPIPSPRRGPPPAAPGADAAALVAADGHGSREGGGVSVGQVRKEEVESKIAAWQVAEVAKVNNRFKREEVVINGWEGDQVEKASAWLKKYERKLEEKRAKAMEKAQNEVAKARRKAEEKRASAEAKRGTKVARVLELANFMRAVGRAPSTKRSFF

SEQ ID NO: 6462 - protein, 164 aa, Zea mays
  Clone ID: TF_ZmC119_1926.pep
AKVLCTSPCFYVTIYINITNKVLLDQFFDHAIGINVPRSRFLPVKATSDLQLVQSDLYTLVDGFVTRNSARTNPSNPSIELGPEFKKVGSFLGRFKSIPSIVELDSLKVSGDVWFGSGIVLKGKVTITAKPGVKLEIPDGAVIGNKDNFGKGKRKQYQMPYNLN

SEQ ID NO: 6463 - protein, 763 aa, Zea mays
  unsure (1)..(763): unsure at all Xaa locations
  Clone ID: TF_ZmC220_3.pep
MRFRERRNASAGQEQGPKKRRITEDSNMCHQCQRNDSGRVVRCQGCAVRKRKYRYCVKCIKRWYPHLSEDDFANNCPVCQNNCNCKACLRGDITRANSRKKKKLLQINSGGYSVSEQDKIKFSMRIVHFLLPWLKQFHQEQMQEKSAEAATKGIDADKLEVPLTICGKKERIYCNNCRTSIVDFHRTCNKCNYDLCLQCCQELRRGLVSGNDGKVDGGGKQDFLSGVSHDKIISKGPSDGQNDMLIDSVVPGENNTSSLRQWSVNKDGTIPCPPNAFGGCGSSLLELKCLFKEKFIAELLEKANSALNNEMEVKIEGSKCPCFTESGDMDDGISRKSSCRENSCDNYIYCPTATDVQNGSLDHFQEHWLKGEPVIVRDTLALTSGLSWEPMVMWRALREKKEKVERLSVLALECLGWCEVCNILMTVNSXRNNKTFWVQTICPXLLKLKDWPPHSSFEERLPRHGAEFMSALPFREYTDPKWGPLNLAVKLPDNVNKPDLGPKTYIAYGVSKELGIGDSVTKLHCDMSDAVNILTHTDEIKLKAKRIAAVEKKKRTKKIEEGNASGLIAVAPESEDDDDAPFIDGNQAEGGALWDIFRREDVSKLHDYLMKHADEFRHCNFEPVKQVTHPIHDQCFYLTIEHKRKLKEEYGVEPWTFEQKLGEAVFIPAGCPHQVRNLKSCIKVALDFVSPENVRECIRLTEGFRLLPKWHKVNEDKLEVKKIALHAFNQAIKDITDESSNSNERMKPNGYTWSRAHKILMCW

SEQ ID NO: 6464 - protein, 209 aa, Zea mays
  Clone ID: TF_ZmC119_1493.pep
QRRVAGKHTISHIEEPNTNNSEGSLAGAVWDVFRRQDLPKLNEYLAVHREDCAARCQAVSSVKYPIYDQTVYLNDYHKKVLKDQYGIEPFTFHQHIGEAVFIPAGCPFQLKNLQSTVQLALNFLSPESLPESVRLSQEIRCLPNGHLAKLKMLEVKKISLYAASSAVREIQRITLDPKFNLDASFEDQNLTRAVSENLARVNKRKVSCS

SEQ ID NO: 6465 - protein, 102 aa, Zea mays
  unsure (1)..(102): unsure at all Xaa locations
  Clone ID: TF_LIB3115-030-P1-K1-C5.pep
RVWNSGSDHSRPPTLPGPLGHRLKFREEFGIKPWTFVQRLGNPVLIPVGGPNKDRNLRVCTKIVLDFVXPENIHKCFTLTEVFRRLQGGPRAKKEKLEVIKI

SEQ ID NO: 6466 - protein, 225 aa, Zea mays
  Clone ID: TF_ZmC1114_1.pep
LCSHLSDAVNVLMHTIRVVPSEEQKEGIRDLKIRHAEQDKKECLGNSSIDGNKTSMEHAHISSVSCEDGGGALWDIFRREDVGKLKEYLTKHSKEFRHMYCCPVEKIFNPVHDETFYLTSGHKRKLKEEYGIEPWTFVQRLGDAVFIPAGCPHQVRNLKSCTKIALDFVSPENIQQCLSLTEDFRRLPVGHRAKEDKLEVKKMIVYAVEHALAILKEPCTPRESA

SEQ ID NO: 6467 - protein, 279 aa, Zea mays
  Clone ID: TF_ZmC119_1806.pep
MKLLIAHGSHQELGKGDSMTNLMINMCDVVHMLMHATEVHYQCPKRVRVQSDVSERIANGTSVHVNTHVQNLNLDIEEQSHKHSISHIEEPNTNNSEGSLASAAVWDVFRRQDLPKLNEYLAVHREECAARCQAVSSVKYPIYDQTVYLNDYHKKMLKDQYEGLKTIEQITMDSASVETNMFKLCKVRFVQFGQKGIPYLNTYDGRAIRYLDPLIKANDTIKIDLQTNKIMDFIKFDVDNMVMVTGGRNTRRVGVIKNREKHKGSFETIHVLLGAFCYV

SEQ ID NO: 6468 - protein, 149 aa, Zea mays
  Clone ID: TF_LIB4172-054-R1-L1-D4.pep
NSARGIYCPTATDVVITSLDHFQEHWLKGEPVIVRDTLALTSGLSWEPMVMWRALREKKERVERLSVLALECLGWCEVDVNIHMFFAGYSSGLVGPDDLPLLLKLKDWPPHSSFEERLPRHGAEFMSALPFREYTDPKWGSLNLAVKLP

SEQ ID NO: 6469 - protein, 579 aa, Zea mays
  Clone ID: TF_ZmC3861_1.pep
ESKSVREAASRKGSSDNFLYCPVATGIQDDDIVHFQMHWAKGEPVVVSDVLQLTSGLSWEPMVMWRALRERSKGKAEDEQFAVWAIDCLDWCEVEINIHRFFSGYTTGRTHARTHWPQMLKLKDWPPSSSFDKRLPRHGAEFISALPFREYTDPRYGPLNLAAKLPAGVLKPDLGPKSYIAYGFYKELGRGDSVTKLHCDMSDAVNILTHTAEVTCQTDIGLIEKIQKDMREQDLQELYGGLNSRSELKLSPAPTECRDESVDEGLKTSYSREGNCVNRDNYNGLDINALPPDDDGDIAKDKESSPGSEWQSELGQSSDHNNGVNTTDEMYNGAHYISHNQKSTGRKVGIKPQEEKSEKADCSGTCAYLKGSSEDNPEMPIVESSEEQSTGGALWDIFRRQDSDKLQDYLRKHCSEFRHIYCNPVKKVFHPIHDQSFYLTEEHKRKLKEEYGIEPWTFEQKLGEAVFIPAGCPHQVRNLKSCIKVALDFVSPENVGECVKLTEEFRRLPSFHKAKEDKLEIKKMAVHALNEAVNFLDPRSSEELKIGVGENICEDESVDEKELPPRRGVEVSGVDEKPK

SEQ ID NO: 6470 - protein, 164 aa, Zea mays
  Clone ID: TF_UC-ZMFLMO17207D05_FLI.pep
AKVLCTSPCFYVTIYINITNKVLLDQFFDHAIGINVPRSRFLPVKATSDLQLVQSDLYTLVDGFVTRNSARTNPSNPSIELGPEFKKVGSFLGRFKSIPSIVELDILKVSGDVWFGSGIVLKGKVTITAKPGVKLEIPDGAVIGNKDNFGKGKRKQYQMPYNLN

SEQ ID NO: 6471 - protein, 243 aa, Zea mays
  unsure (1)..(243): unsure at all Xaa locations
  Clone ID: TF_ZmC220_2.pep
MSDAVNILTHTDEIKLKAKRIAAVEKKKRRLGMKILWISDIRGALSVGVLTYYLQLWDLISGIELQPEVDDKHIFSIAPNGVYSAKSTYEGLFLGSVTFGHYKRIWKSWALPKCRFFLWLVAHKRCWTTDRLAKRGLNHPEQCLLCDQEEENMDHLLVQCSFSREFWYLLLRKFGLHSLAPQPTANSFLGWWEVVGGAVLGLTKKGLNSXILGAWTLWNHRNKCIFDGCNPSMSLCLRAADGK

SEQ ID NO: 6472 - protein, 384 aa, Zea mays
  Clone ID: TF_ZmC3861_2.pep
GKDWPPSSSFDQRLPRHGAEFISALPFPEYTDPRYGPLNLTVKLPDGALKPDLGPKTYIAYGFYQELGRGDSVTKLHCDMSDAVNILTHTAQVPYARYQLEKIEETRKKMKEQDLQELYGVSELNLSSPFTDSRNISADEMSKTSCLDVNDVPPVNTESEVQSGAGQCSDYIDKDRSYAGMHNGERTGGALWDIFRREDSDKIQDYLRKHATEFRHIFCNPVKQVIHPIHDQTFYLTEEHKRKLKEEYGVEPWTFEQKLGEAVFIPAGCPHQVRNLKSCIKVAMDFVSPESVNECMKLTGEFRRLPPDHRAKEDKLEIKKIALHALNQVVNFLDPSSEWSKSWFAQPKNKKKAGAEEQEKPKRKRGRPCRKSNDEAAGDRHRKK

SEQ ID NO: 6473 - protein, 105 aa, Zea mays
  Clone ID: TF_ZmC220_4.pep
LLFKCPRLDSIFFLKLGEAVFIPAGCPHQVRNLKSCIKVALDFVSPENVRECIRLTEGFRLLPKWHKVNEDKLEVKKIALHAFNQAIKDITDESSNSNESKWIRR

SEQ ID NO: 6474 - protein, 74 aa, Zea mays
  Clone ID: TF_uC-zmroteosinte038a09b1.pep
VKIEGSKCPCFTESGDMDDGISWKSSCRENSCDNYIYCPTATNVQNGSLDHFQEHWLKGEHVHIGREIGNGIRL

SEQ ID NO: 6475 - protein, 668 aa, Zea mays
  unsure (1)..(668): unsure at all Xaa locations
  Clone ID: TF_ZmC119_1620.pep
LHCLLVYVLPVLKGIYSDQCFEIGVETRSSGPKTDVLRAKITSDEQMCCDFCKVPVFDYHRYCPRCSYDLCLDCCHDIRHSRANVARGEYTEGYVEDKGRDSFNRRARLEPSAESVNDKSLSWPIDINNIDIKSLFPTWRVNNDGSITCGPHEAGGCGSSKLVLRRIFKINWIAKLVKSSEEMVNGCKVHDLEDGCLSCSDGRRSEFTGQQNLGLSKCSNSDGIGRNCLYSPVLEDLKYEGIIHFRKHWKNAEPIIIREAFEPSLSSSWDPLSIWRGIQEIMDEEMDEDVIVKAVDCXEPIRDIELKQFIKGYSDGSKGGDGHLLMLKLKEWPRPSVLEAFLLCQRPEFIVNFPLVDFIHPRWGLLNLAAKLPPDALQPELGMKLLIAHGSHRELGKGDSMTNLMINMSDVVHMLMHATEVHYQCPKRVRVQSDVSEMIANGTSVHVNAHTPVQNLNLDIEEQSHKHSKSHIEEPNTNNSEGSLAGAVWDVFRRQDLPKLNEYLAAHREECAARCQAVSSVKYPIYDQTVYLNDYHKKMLKDQYGIEPFTFHQHIGEAVFIPAGCPFQLKNLQSTVQLALNFLSPESLPESVRLSQEIRCLPNGHLAKLKMLEVKKISLYAASSAVREIQRITLDPKFNLDPSFEDQNLTRAVSENLARVNKRKVSCS

SEQ ID NO: 6476 - protein, 229 aa, Zea mays
  Clone ID: TF_ZmC3788_1.pep
MRVKPEDRGRAYLFGTTNSKDGSKRFSMRRHSSSLENEPSNVVGSSEGANNSLELWKAESDGSIPCPPKELGGCGGSILDLKCFFPEKMLSNLEERADRIMRSEVFAKAVAKRSDQCPCYDHSGNIRTQDVRETANTKGSSDNHLYCPVATAIKEDDLAHFQMHWTKGEPVIVSDVLHLTSGLSWEPLVMWRALREKKTNGDVEDEHFAVRALDCLDWCEVRSYISLNV

SEQ ID NO: 6477 - protein, 84 aa, Zea mays
  Clone ID: TF_ZmC3523_1.pep
QKTPQWRAGPEGAKTLCNACGVRYKSGRLLPEYRPACSPTFVSSIHSNSHRKVLEMRRKKDGDLGQLPLPVPAALLLGPAVESF

SEQ ID NO: 6478 - protein, 68 aa, Zea mays
  unsure (1)..(68): unsure at all Xaa locations
  Clone ID: TF_LIB3245-468-P1-K1-F6.pep
YGFSSPNPINPSTDRCCPLFPPARAPTPIFSADRRKIDGIVVTEKGARSCVXCRATTTPMWRNGPTVP

SEQ ID NO: 6479 - protein, 89 aa, Zea mays
  Clone ID: TF_jC-zmXLIB3526P034dh01a1.pep
NDRLGPSGPRSLCNACGLFWANRGALRDLSKRHQEHSLPPVEQVDEGNDSDCRTATADPAHNNLHAFSEHDNPALVADHKVFQSQKMLK

SEQ ID NO: 6480 - protein, 330 aa, Zea mays
  Clone ID: TF_ZmC151453_1.pep
MIATSLSLLIPGCKLPFRHNNHCTSRFGSPLPTLHISHPDLHSSPNHTRSAYIAPSDLERKFLSVHPMSAIYMSQLSTALPLMEGDHQDHHHHHQGHFQAFTLPKETPILFPFVISNSSASEGSLSYGSAADHHLLRQRHQAMLEPQHMIGGSSTATGNSVFSTPFPTVESIRDDMIEPASYDPYDMGKLQVGGSMDACSWTPAAAKMRITRKATADPSAGKKPRRRAQAGYDDTMSGQPNLGVIRVCSDCNTTKTPLWRSGPCGPKSLCNACGIRQRKARRAMMAAASGSVSAVPTDSGKASPSNAAVAAAAAHPKVKKEKRVDVDRSL

SEQ ID NO: 6481 - protein, 195 aa, Zea mays
  Clone ID: TF_ZmC175881_1.pep
MGMEIDMETYPNLNTSPSAATASGDAKACANCHTTKTSLWRGGPEGPKSLCNACGIRYRKRRQAIGLDAGAAAAANSQQDLQQPKKKAAVDPQQQDQHQLRKKTTAVANPQQDRHQPRKRAAAAAAATDPQHTSITKKDTDKKDQQVTVDLHVVGFGKEATFKQRRRMRHNKCMSEEERAAVLLMALSSGVIYAS

SEQ ID NO: 6482 - protein, 360 aa, Zea mays
  Clone ID: TF_ZmC2051_1.pep
HWRPRCGPGPAGPAHRDASASAFFAAAGNDVFGTRGVVGAHIGSCGEIDSNFAQPEWFSGLFDDASIPHEPVFPGATAGGAPPIMTSFALAAGALVLPDEMEDPLLFHSSASISVLLHGSSRSAGASATLPSFSSSSSSIASSESFFGSGSGRERGRSGTAQAGASPAPEWLLHFRGRGLHDRSRASASTSAAAGAGGSREDILVPTPMYSSGSAHSDPESIAESSPHPAPPMKKKKKAKKPAPPAPAASSDDNDGDADYEEGGELAEPQGGAVRRCTHCQIEKTPQWRAGPLGPKTLCNACGVRYKSGRLFPEYRPAASPTFVPSIHSNSHKRVVEMRQKAVRSGDPSCDLLHFIRRRD

SEQ ID NO: 6483 - protein, 87 aa, Zea mays
  Clone ID: TF_LIB4172-036-R1-L1-E10.pep
MSSAAGRAPAPTPMGSADRCKVHPSALVSALSSSPLLRALSSRSASCDPPLQIDGIVAAEKATRSCVECRATTTPMWRSGPTGPRVS

SEQ ID NO: 6484 - protein, 200 aa, Zea mays
  Clone ID: TF_ZmC33566_2.pep
GGGTTSAGQDSGVAAAPGRGARSRRSRATAAAAAAWHSLVPRPPSQSSPSSSSCSSSDFPSSNKPARPNGGGGSRGKKVPGPPGGGPAGGEAGLEGGGVRRCTHCASEKTPQWRTGPLGPKTLCNACGVRFKSGRLMPEYRPAASPTFVLTQHSNSHRKVMELRRQKELILIRGSHRDAAAGSPPGGPRPELMFRDYGVC

SEQ ID NO: 6485 - protein, 139 aa, Zea mays
  Clone ID: TF_ZmC154_1.pep
MSSAAGRAPAPTPMGSADRCKIDGIVAAEKATRSCVECRATTTPMWRSGPTGPRSLCNACGIRYRKKRRQELGLDRKLQQQQNNGEAKTDEAKDSSSNSSSGSSNLQVVQKRRLLMGVEEAALLLMTLSSSPTSTLLHG

SEQ ID NO: 6486 - protein, 170 aa, Zea mays
  Clone ID: TF_ZmC154_2.pep
MSSAAGRAPAPTPMGSADRCKVHPSALVFALSSSPLLRALSSRSASCDPPLQIDGIVAAEKATRSCVECRATTTPMWRSGPTGPRSLCNACGIRYRKKRRQELGLDRKLQQQQNNGEAKTEEAKDSSSNSSSGSSNLQVVQKRRLLMGVEEAALLLMTLSSSPTSTLLHG

SEQ ID NO: 6487 - protein, 112 aa, Zea mays
  unsure (1)..(112): unsure at all Xaa locations
  Clone ID: TF_LIB3354-090-Q6-K6-E5.pep
LNGVSTPAASEDGTRGGAVVSASGVPRQEEEKSVSARKPWRPPKSAKQCLHCGSSWTPQWREGPLGRSTLCNACGVRYRQGRLLPEYRPLASPTFEPXEHANKHSQVMQFHR

SEQ ID NO: 6488 - protein, 201 aa, Zea mays
  Clone ID: TF_ZmC33566_1.pep
HAALAVVAAGNGGGGTSAGQDSCVTAAPAGRGARSKRSSRAPAAAAWHSLVSRPPSQPSPSSSSCSSSDFPSSSNRPARGRKSPGPGGDAVAGSDGGVRRCTHCASEKTPQWRTGPLGPKTLCNACGVRFKSGRLVPEYRPAASPTFVLTQHSNSHRKVMELRRQKELILIRGSHRDAAAAAGAGSAGPRPELMFRDYGVC

SEQ ID NO: 6489 - protein, 543 aa, Zea mays
  Clone ID: TF_ZmC3086_1.pep
MGKQGPCRHCGVTSTPLWRNGPPDKPVLCNACGSRWRTKGSLANYTPMHRNDNIDDDEPRVSKLKPPTSKLKSQKKKTNHIIMENGPFSSQNFRKMGDDDPSYRSSSGSAVSYSGSCAPYGAADASEMTGSAQSHAWESLVPSRKRSCVTRPKPSPVEKLAKELNSIMHEEKLYYLSESSEEDLLYHSETPIGSFEIGSGSVLLRHPNSKSLEEESKTSSIPADNKSYITSESYSDSASFVVHSGNKAAINLNLPTARSKKSPLHMEDNARRDKLHYENQHVLESVDSPLVSVDLEDVINYTNFMKYLTKEDRRQLLKFLPPVDSLTPPESLRSMFSCIQFSDAIDSYQMLLREGILDPSLCGDEEWKKVKTLALTNLTKCSWLECYKQKKGAKETGGVGGISGPEGFTKSTMKPLKRPRDTHFQSDAELDGTMRSPLRVLKSGALALQFESSSLPKSSYATEDSTCTGGAPNLFMLPLEKLPLLVPSQYAVSDQDLLLEIPLNARHPEAELLCQPSQLMSSITSSSTSMGGVAEGEGYLKQP

SEQ ID NO: 6490 - protein, 140 aa, Zea mays
  Clone ID: TF_ZmC3086_2.pep
MGKQGPCRHCGVTSTPLWRNGPPDKPVLCNACGSRWRTKGSLANYTPMHRKDDIDDDEPRVSKLKPPTSKLKSQKKKPNHIIMENGPFSGQNFRKMGDVDQSYRSSSGSAVSYSESCAPYGAADASEMTGSAQSHAWGSP

SEQ ID NO: 6491 - protein, 85 aa, Zea mays
  unsure (1)..(85): unsure at all Xaa locations
  Clone ID: TF_LIB3637-245-Q6-N6-D4.pep
ESRDAPPLLGQQEKRCAPCLSSKTPQWRAGPLGPKTLCNACGVRFKSGRLLPEYRPANXPPFVSCLPSNSPKKVMQIRQAVAQQQ

SEQ ID NO: 6492 - protein, 281 aa, Zea mays
  Clone ID: TF_ZM4332.C3.o2.fg.pep
MRQLSYLSGLDGLDDGVADCDGSCGLRDDGPPCLLHSGLCCPIGPLDDETDTVAIAIDNDKELLQDLAVAAGRVAASPLSSGNSPSSSAVETTTTLPPTPWRFVVPRRKRRKRRDRRPVVMRGSIRPGIPTLHAAAMSSSSSSSGNNRPCSLTAETSSPPQLWRLVVPTRKRDRRPVVMRGSIKRPCSLGTTPGIPTPHAAGNSNPSSSSGGGSTGARRQLESLQVRPRPPPTNRQRVQRVCSNCGSTETPLWRTGSDGSATLCNKCGLRLSRNRQAAQAS

SEQ ID NO: 6493 - protein, 357 aa, Zea mays
  Clone ID: TF_ZmC30321_1.pep
MSHHDGSKPYQPRRGPERHPQPADGIAAPPPAAVAPSVEHLVAAAAEAEALNRFAAEQQQQLQGHEQEVGEEEEEEDEQEDEMEEEDEDEHEGAHGGIGGEHVPMDADAAAAAAAAAVSQMDPHSALVAGTVPPMATNQLTLSFQGEVYVFDSVSPDKVQAVLLLLGGRELSSLGGASSSAPYSKRLNYPHRVASLMRFREKRKERNFDKKIRYSVRKEVALRMQRNRGQFTSSKPKPDEIAASEMASADGSPNWALVEGRPPSAAECHHCGTNATATPMMRRGPDGPRTLCNACGLMWANKGLLRDVTKSPVPLQATQSAPHLDGGNGSAMSAPGSELENAAAAMTNGHESSSSGV

SEQ ID NO: 6494 - protein, 184 aa, Zea mays
  unsure (1)..(184): unsure at all Xaa locations
  Clone ID: TF_LIB4719-002-R1-K1-E6.pep
TLGLAGESNQLTLVFXGEVYVFESVTPEKVQAVLLLLGRGELPPGLAGMVLPNQNDNKGYDDILQRTDIPAKRVASLIRFREKRKERNFDKKIRYAVRKEVALRMQRRKGQFAGRASLEGESPAPGCDPGSQGSGLDFASRESMCQNCGTSEKMTPAMRRGPAGPRTLCNACGLMWANKVQLHA

SEQ ID NO: 6495 - protein, 156 aa, Zea mays
  Clone ID: TF_LIB5116-045-A1-PF1-C5.pep
MSPAEMESHKMVEVEAAADPEERTASGDPKACDDCNTTKTPLWRGGPNGPKSLCNACGIRYRKRRRVAMGLDPEAKRKPKRDDAILSKAEASSTKEEEEEDNKASTNKIKTKTTTHTVELHMVGFAKDAVPKQRRRMRMRRRKPSCLGEEERAAIL

SEQ ID NO: 6496 - protein, 178 aa, Zea mays
  Clone ID: TF_LIB4727-001-R1-K1-C3.pep
TRQIEKKKKKKKKKKKKKKKILQRTDIPAKRVASLIRFREKRKERNFDKKIRYAVRKEVALRMQRRKGQFAGRASLEGESPAPGCDPGSQGSGLDFASRESMCQNCGTSEKMTPAMRRGPAGPRTLCNACGLMWANKGTLRSCPRAKVESPAVATEQGTSDNKALATLNNNNVAASNG

SEQ ID NO: 6497 - protein, 300 aa, Zea mays
  Clone ID: TF_ZmC42806_1.pep
MPDADVDTVIREAAAAAAPAGDDDSEGDTEEEEEEGDEVDEDEDDDEEELPAEAPAPDEEQPAPAPISTLPGNPNQLTLVFQGEVYVFESVTPEKVQAVLLLLGRGELPPGLAGMVLPNQNENKGYDDILQRTDIPAKRVASLIRFREKRKERNFDKKIRYAVRKEVALRMQRRKGQFAGRASLEGESPAPGCDPGSQGSGLDFASRESMCQNCGTSEKMTPAMRRGPAGPRTLCNACGLMWANKGTLRSCPRAKVESPAVATEQGTSDNKALATLNNNNVAASNGEATSAAEKGVPKAP

SEQ ID NO: 6498 - protein, 109 aa, Zea mays
  Clone ID: TF_ZmC11827_1.pep
MAAADGPLNWALVEGRPPSAAECHHCGINATATPMMRRGPDGPRTLCNACGLMWANKGLLRDLSKSPVPLHSIQQSAPILNGGQNGSAMSALGSELENAAAAMGNGHEP

SEQ ID NO: 6499 - protein, 128 aa, Zea mays
  Clone ID: TF_ZmC3131_1.pep
MGSADRSKIDGIVVTEKGARSCVECRATTTPMWRSGPTGPRSLCNACGIRYRKKRRQELGLEHNKQQQQQQNNGEAKTGVKDSSSNSSSSGSSNFHVVQKRRLLMEVEEAALLLMTLSSSPASTLLHG

SEQ ID NO: 6500 - protein, 156 aa, Zea mays
  unsure (1)..(156): unsure at all Xaa locations
  Clone ID: TF_LIB5116-002-A1-PF1-G8.pep
MGKEGPCCHCGVTSTPLWRNGPPHKPVLCNACGSRWRTKGSLENYTPMHSRDDIDADQPRVSKLKPPTLRLKEQRQLKKKPSHSIRENGAFSDQNFWKMGDADPSRSSSGSALSYSESCAPYGSADASEMGSAQSHAWESWVPSKRRXCVTRTKSS

SEQ ID NO: 6501 - protein, 39 aa, Zea mays
  Clone ID: TF_LIB3594-007-P1-K6-G4.pep
CRATTTPMWRSGPTGPRSLCNACGFRSRKKRRQELGLEH

SEQ ID NO: 6502 - protein, 116 aa, Zea mays
  unsure (1)..(116): unsure at all Xaa locations
  Clone ID: TF_LIB4171-052-R1-K1-B5.pep
PGPPGEVMXVGVEGGVXRCTHCASETXPQWRTGPLGPKTLCNACGVRFKSGRLVPEYRPGSSPPFVLTQHSNSHRKVMELPPQKELVLIRGTPRDPPAAAAGSPGPELMFRDYGVC

SEQ ID NO: 6503 - protein, 96 aa, Zea mays
  Clone ID: TF_ZmC34296_1.pep
MDSSVEKQGSVALDPDERAPASGETKACTECHTTKTPLWRGGPCGPMSLCNACGIRYRKKRREAMGLESSSKAATAGGSEHQQQQRKKKATAAARG

SEQ ID NO: 6504 - protein, 299 aa, Zea mays
  Clone ID: TF_ZmC3304_1.pep
MDVRPANAADDSSLGDLFPHQPAGLESDESNTEWLSGYVEDCFSSSTSYTNPVSAMASEGVGKPKLPPPPSSNGRRKKRSLASVMTNGDYQQFVLPLYVEPPLILIDQKHWMAESELIHPKKDDDDREVCQQQGQEQEKGVRRLVKMCSNCLSSQTPRWRDGPSGRQMMCSACGMRLKPETRLSAEQQCGQEEPTRKEQEPDRKRKKAAKKTCYESSDAPPSSDQQEKRCAHCLSSKTPQWRAGPLGPKTLCNACGVRFKSGRLLPEYRPANSPTFVSCLHSNSHKKVMQMRQAVAQQQ

SEQ ID NO: 6505 - protein, 171 aa, Zea mays
  Clone ID: TF_ZmC736_1.pep
RLLAEATPKGILKLMNTDGLTIYHIKSHLQKYRIAKYMPVSSTSEGKEEKRAAAANDVQNLDLGTGMKITEALRVQLDVQRRLHEQLEIQRNLQLRIEAQGKKLQKMFEEQMKTSRTVMGPPQGADVAFIGAGEQEEEVEVEDAFDDVQLLAAVSSASVGYRDGGFQSKIS

SEQ ID NO: 6506 - protein, 58 aa, Zea mays
  Clone ID: TF_ZmC80080_1.pep
MSSLGGQQQHGRGDEARARLRWTRQLHGRFVLAVAQLGGADKATPKSAMRSMAASGLT

SEQ ID NO: 6507 - protein, 142 aa, Zea mays
  unsure (1)..(142): unsure at all Xaa locations
  Clone ID: TF_ZmC2322_2.pep
QQXQQQQXKAXRCWSPELXRXFVAALHXLGGPQVATPKQIREVMQVDGLTNDEVKSHLQKYRLHNRRSSPGAAAAPVSQSIMLVDGVWAAQEQSSGSQSGSRQGPLQFSRAGMAVGGGDDSSSSNDDEDDDKSEDGYSLKCV

SEQ ID NO: 6508 - protein, 270 aa, Zea mays
  Clone ID: TF_ZmC1401_1.pep
MASSLGVGGQQQGHGHGHGEARARLKWTRQLHDRFVLAVAQLGGADKATPKSVLRAMAVPGLTLYHLKRHLQKYRLVAVSRGVASPLGDSGDGTDERSSSSSENQPADECDDGTVAEPHGDSSRSVARMQRKLQEQIEVQRHLQLRIEAQGRYLQSVLRRAQEVLADHGLGSAAGAEAELASAVDTGSLSSSCCCSPTRRRSADSCVTSSSSEAESQAPVGGATWLHTCAGTRDCSVEQQPVQGEKSTFLQRHGAAEDGTSSEIDPNGNR

SEQ ID NO: 6509 - protein, 263 aa, Zea mays
  unsure (1)..(263): unsure at all Xaa locations
  Clone ID: TF_ZmC18574_4.pep
MLSSTSRLRLQGVLADTLRGYGVHHHQQQHLDRLAAVRYMPRFLASMRVMRAPRMLWTSSLHAXFVHTGELLGXHEWATPKSELELMDVKDLTLAHVKSHLQMYRTVKSTDKSATTSSGGPPVDGGGDDDDLPSARRAQSSSSSPAGRRDGSSPQAFTRHRSAASSEGAASLAGGDDVECSSSADDSDCGRARSASSSRDQLLPPSAGSAGTLPSVGVSSSTTEDMEPAYRSVGLQQAPNHEMSCPPSLEFRLGRPIWNGAEH

SEQ ID NO: 6510 - protein, 91 aa, Zea mays
  Clone ID: TF_LIB3150-031-Q1-N1-H9.pep
MYSAIRSLPFNGSVRYYQRSSDGTNLPNDACLVLTTDPKPLLLLTAELHERFVDANTQLCGPDKSTPKTILITIRSKSLTLYYLKSHLYKY

SEQ ID NO: 6511 - protein, 112 aa, Zea mays
  Clone ID: TF_ZmC2861_1.pep
MERDYSSTDGGGCEMPGKKARKPYTITKPRERWSTEEHARFVDALLMFGRDWKKIEEHVGTKTTVQIRSHAQKYFLKVQKLGLAAGLPPMYPRRHFAIQQQQSSVADGSSAA

SEQ ID NO: 6512 - protein, 64 aa, Zea mays
  unsure (1)..(64): unsure at all Xaa locations
  Clone ID: TF_LIB4738-030-R1-K1-D12.pep
ARRGGFVKSSTGRTVCLRVNPADTVHTVKTKIQEQQYLVYDGVQXEDDRTLADYGMEHKXVLDL

SEQ ID NO: 6513 - protein, 74 aa, Zea mays
  Clone ID: TF_ZmC761_1.pep
WIGATPKLVLQTMNVRGLSIAHVKSHLQMYRSKKLDHESAGAGHDRAAIYSGSQFSSQFSLPSASPHPRLQILV

SEQ ID NO: 6514 - protein, 151 aa, Zea mays
  unsure (1)..(151): unsure at all Xaa locations
  Clone ID: TF_LIB4738-122-A1-K1-D8.pep
MKIFVKSSTGRTVCLRVNPADTVHTVKTKIQEQRYLVYDGVQLEDDRTLADYGIEHKSVLDLKEKMQIFIVETLAGTTITLEGERSETIDNIKERIKESEGXPKGQEGLIFGHKEVETXQDLVGQHISEGSTLLLGLRHMLLRGTMHISIY

SEQ ID NO: 6515 - protein, 159 aa, Zea mays
  unsure (1)..(159): unsure at all Xaa locations
  Clone ID: TF_LIB4767-071-Q1-K1-C2.pep
SRSCLATHEGLPRPQRYHTVWQWHWHHGRGARRLTDKEEAGPSSPAASRAHVAEMGGAGGGGRNGAATRRYNRSKVPRLRWTSELHRNFVRAVDCLGGQDSTFCSCLLTSHAKHACIHTYMSXGLVSSLYLSFLVGQNGPGLIHVLSSWSMSTACRSYS

SEQ ID NO: 6516 - protein, 226 aa, Zea mays
  unsure (1)..(226): unsure at all Xaa locations
  Clone ID: TF_ZmC4296_2.pep
HVHGAIVHPSYSWSSQTGLITAVAQLGGPDXCTPKAVMRTMGVKGLTLFHLKSHLQKYRLGRQSGKELTEHSKDASYLMEAQSGTTLSPRGSTPDVKESQEVKEALRAQMEVQRRLHEQVEVQKHMQIRMEANQKYIDTILDKAFKIVSEQLSGFSISDQDLPILTSARAMLSPADHLSSSVFPQLSVSSVSLHNPGPGGGKGLPHVADSHVFSQRPPEQFKRKSR

SEQ ID NO: 6517 - protein, 185 aa, Zea mays
  Clone ID: TF_UC-ZMFLB73117F06_FLI.pep
NENKHAHHILERRAEQVAVSAADIAQKPGPPPQVPTLKATPCLCRNVLFSPCTGCCSTEQSRVPAHVWSHVAPPTGAWLSASEEEDVTQLSAERRRVGEQQQEEDRDPVSTAEASSASAPAAEPRPWSARTSCARRSTDCRYLPCASILSCRCRCTCHHVWMCVVMNGRARLDQQPSTNRRHTIG

SEQ ID NO: 6518 - protein, 84 aa, Zea mays
  Clone ID: TF_LIB3354-025-P1-K1-G1.pep
RGMRAPRIRWTSSLQARFVHAVELLGGHERATPKSVLELMDVKDLTLAHVKSHLQVEFRPMRSWFFNSVYPCDSLIILCSSGRV

SEQ ID NO: 6519 - protein, 138 aa, Zea mays
  Clone ID: TF_ZmC424_12.pep
PRRQHRQHQRRRRRRAVATPKQIRELMKVDGLTNDEVKSHLQKYRLHTRRASSDGGDQHAGGLWSSAPDQQYTTSQHSTSQSQSQSGSPQGPLQLAVSSRAMSATAGDSCDAGDEAQGGRSESYGWEMPQHGTKASSS

SEQ ID NO: 6520 - protein, 58 aa, Zea mays
  Clone ID: TF_ZmC34324_3.pep
MVTDLYSQFVATMNQLGGPHVATPKKIRELMKVNGLINDEVKSHLQVRHAPCLLSLSI

SEQ ID NO: 6521 - protein, 185 aa, Zea mays
  Clone ID: TF_ZmC761_2.pep
AVRQYNRSKLPRLRWTPDLHMAFVHAVERLGGQERATPKLVLQTMNVRGITIAHVKSHLQMYRSKKLDQESAGHERAATSSVFSPMDFHMMRTGDHHRYHDMFLHRPAAGSAISSRLLHGGEFFGSRNAAVSPEARRLYELLLRRQPTMQTFDFKGYSSGSGLRDQEWRFSQHAAATARAVSIND

SEQ ID NO: 6522 - protein, 291 aa, Zea mays
  unsure (1)..(291): unsure at all Xaa locations
  Clone ID: TF_ZmC12579_2.pep
SSYDIYIYIYSRVLTLQAQRLRNELFGIYCGEWTQRPTAWRRHEQTEHGRRGAAHRPCQCQTRSHVRCSASCSPAAQCSIRSPWRVELPDRISPSNASTFCTSMYSSSSSSSAAADSSKSCRRAGALPFLPHPPKREQQQQQQSSSSPSLLVCTDLGNGGQDEAEAEHPAELKDFLNLSGEASWRGGFHGESSGVAFRFGEQVEFQFLSEQLGIAITDHDESPRLDDIYDRPPQTSSCPVLSCSDQEEGLQRAGSPVKAQPSSSRAASCNNKPRLRWTLELHEXFVKAVNK

SEQ ID NO: 6523 - protein, 176 aa, Zea mays
  Clone ID: TF_LIB4739-003-Q1-K1-F8.pep
MTTTTMTTTTTAAPDLSLHISPPSPPEPRLLLGLELDDDTAAAVAAKAATKKADDAAMREYNNLRQVQRRQLHQPSQTAGHGFKRGTSGSAAAGAGGRRSSRAPRMRWTTALHAHFVHAVELLGGHERATPKSVLELMNVKDLTLAHVKSHLQMYRTAKQQGADRPCVAVAGHGHA

SEQ ID NO: 6524 - protein, 276 aa, Zea mays
  Clone ID: TF_ZmC1401_4.pep
ARLRWTRQLHDRFVLAVAQVGGADKATPKSSVMRAMAVSGLTLYHLKSHLQRYRLAVSQGTASPVGEGDNGGGANERSSSSESQLDEYDDGSVADLHGDSSGSMAARVQREAKRKRHEQMQIEVQRHLQLRIEAQGRYMQSVLRRAQEALADHILGSPAGAEAELSELASAVETGTGCLSSTSCCSTSPSPVRHRSADSCVTSSSSSSSEAESQAPAGANTCAGTRDCSVERPVQDEESTFLQRHEDEDEAEEADVGAAAAAEDEDGTSSEIDLNR

SEQ ID NO: 6525 - protein, 229 aa, Zea mays
  Clone ID: TF_ZmC2088_2.pep
MATTAAAAPDLSLHISPPSPPDDARSSDMLFSKQTLCLGLVQTTTAAAAHDQDGQCDDVQQQQRLHQPSQIQRFKKTSSSSAPLLSAGGGTTRSGNGNSGGGKRSSRAPRMRWTTALHAHFVHAVELLGGHERATPKSVLELMNVKDLTLAHVKSHLQMYRTVKGTTADRSCAAGHVQMRDMGFLHRGCELNGFEAFSNGTSNATANNRDGGPAEARISKTLPPPRRSS

SEQ ID NO: 6526 - protein, 87 aa, Zea mays
  unsure (1)..(87): unsure at all Xaa locations
  Clone ID: TF_ZmC637236_1.pep
EKRIRLYNRSXVSRMRWTEELYRLFVEAVXCLGGQDEXTPNRILQLMGAKGATISHIKSHLQMYRGSISCSSSTHHQSSLQKSYINR

SEQ ID NO: 6527 - protein, 219 aa, Zea mays
  Clone ID: TF_ZmC1230639_1.pep
MSRGCCWGVSTGGGVGVQTTAAAVPDLSLHISPPSPPAGGVEVLPEPRLLLGLGLGPGPGLELDDDDAAVATKKVDDDDDAAAAAREHNLHAQRLRLQLHQPSQTAHGFKKSSSGTAAGGGRRSSRAPRMRWTPALHAHFVHAVELLGGHERATPKSVLELMNVKDLTLAHVKSHLQMYRTVKGSTDRSCVAAAAGHGGHAGDMVILRRRGAGEGDGGY

SEQ ID NO: 6528 - protein, 217 aa, Zea mays
  unsure (1)..(217): unsure at all Xaa locations
  Clone ID: TF_ZmC519380_1.pep
MTVEGRVGGGGKDKFPAGMRVLAVDDDPTCLKVLENLLRRCDYHVTTTGQAATALRMLRENKDQFDLVISDVHMPDMDGFKLLELVGLEMDLPVIMLSANGETQTVMKGITHGACDYLLKPVRLEQLKTIWQHVIRRNTKNRGSDNDDAGQKGPNAEGENGGANRNKRQSRRDRDDNGDDGDDSDENSNDNGDSSSQKKPXRVVWSVELHRKFVAAV

SEQ ID NO: 6529 - protein, 111 aa, Zea mays
  Clone ID: TF_uC-zmflteosinte056b03b1.pep
MYHQQQLHTHNQHLSSSRPGLPPEKQFLLHGAGGGGDAGLVLSTDAKPRLKWTPELHERFVEAVHQLGGPDKATPKTIMRLMGIPGLTLYHLKSHLQKYRLQQNFQAQAHT

SEQ ID NO: 6530 - protein, 108 aa, Zea mays
  Clone ID: TF_LIB3597-003-P1-N6-G6.pep
ASPSAASSAVTDAAGAHRRQHAQQRKARRCWSPGLHRRFVAALQRLGGAQVATPKQIRELMKVDGLTNDEVKSHLQKYRLHTRRASSDGGDQHAGGLWSSAPEQHYTT

SEQ ID NO: 6531 - protein, 206 aa, Zea mays
  Clone ID: TF_LIB5117-022-A1-PF1-A5.pep
MNTKKFRPPGDVVGSAALCDPSSPQQLSSSLHQEELENSATSSQQHCAGCRLHEDYTPWSALAQSCLGTDNAAFDCAESLFDYPPGMLLMPIARTHYQYQSSENDRCRPRPQRDAMETTPAQLHKQPLPPPPQQQQERDHGLFSFSNASTTWSRGGEPKTCSFSPLVAAPDTILPAMENQKVPLPGNCMDAPVTPRRRRRRQGASC

SEQ ID NO: 6532 - protein, 123 aa, Zea mays
  Clone ID: TF_LIB3355-001-P1-K1-E9.pep
APAFAPLCLRTDDKAAAARVGVPDLSSLLSSPATMPPADAGAEESRRQVVGFAQAAARAAAMAPSAPALGLQSQQQQQQARKARRCWSTELHRKFVAALDQLGGPQVATPKQIRELMKVDGLT

SEQ ID NO: 6533 - protein, 669 aa, Zea mays
  Clone ID: TF_ZmC10296_1.pep
MLLGAAAARMEEKRVITGRERDQFPVGMRVLAVDDDPVCLKVLETLLRRCQYHVITTNQAITALKLLRENRDMFDLVISDVHMPDMDGFKLLELVGLEMDLPVIMLSVNGETKSVMKGITHGACDYLLKPVRIEELRDIWQHVVRDAWGKRERSNLDVYKDFNRLPGADPCHSHGHGHGQTTAGASDQSGRIGRKRKEMHSDEEDDGEENDFQEGDEPSAAKKPRVVWSIELHRKFVAAVNQLGIDKAVPKRILELMNVEKLTRENVASHLQKYRLYLKRLSAVASQQASIVAAFGGRDPFLHMGAFEGLQSYQPFAPCAALSSFIPHHGSLGRTTAAAFGVPELAPAITVQAAASNGMISHCAGDASKFQLSGIQENQQPNLGQGSATSLGLPQLQQKWIQQETGDLSAVFSGSALANTLSGALQRVASSPLPPQELLEGVQTKVSAQPPITMASVSSELVERTVGVSANLQDSGISPQGTLPINDGFTADKLQLQDPFDSNGGTNFSVNMPVCPSGSLTASSNAKGGASSCSPVLLAPDTGRHSNYLQFGVAGNSGHDMNDIKQDHLHQGLSTGGFNHDFGTCMTEQTDPNVPYLMPQMKPNTLSSEDKLKQRNIYDLGIPKLHGGFSSSSCNFDGLLNSMIKAEKDDLSFTDSDLGCDFFPLGACI

SEQ ID NO: 6534 - protein, 461 aa, Zea mays
  Clone ID: TF_ZmC21783_1.pep
MLEVSTLRGPTSSGSKAEQHCGGGGGFVGDHHVVFPTSGDCFAMVDDNLLDYIDFSCDVPFFDADGDILPDLEVDTTELLAEFSSTPPPDDLLAVAVFGADDQPAAAVAQEKPSSSLEQTCGDDKGVAVAAARRKLQTTTTTTTTEEEDSSPAGSGANKSSASAEGHSSKKKSAGKNSNGGKRKVKVDWTPELHRRFVQAVEQLGIDKAVPSRILEIMGTDCLTRHNIASHLQKYRSHRKHLMAREAEAATWAQKRHMYAPPAPRTTTTTDAARPPWVVPTTIGFPPPRFCRPLHVWGHPPPHAAAAEAAAATPMLPVWPRHLAPPRHLAPWAHPTPVDPAFWHQQYSAARKWGPQAAAVTQGTPCVPLPRFPVPHPIYSRPAMVPPPPSTTKLAQLHLELQAHPSKESIDAAIGDVLVKPWLPLPLGLKPPSLDSVMSELHKQGVPKIPPAAATTTGATG

SEQ ID NO: 6535 - protein, 134 aa, Zea mays
  unsure (1)..(134): unsure at all Xaa locations
  Clone ID: TF_LIB4744-075-Q2-K1-H12.pep
EGKARQGVERIECSLPPEKQASTGAANPNDRPMCGQGGDSGGLVLTTDPKPRLRWTPELHDRFVDAVAQLGGPDKATPKTIMRVMGVKGXTLYHLKSHLQKFRLGKQHKELGDHTAMEMQRIVASFSGMIARSM

SEQ ID NO: 6536 - protein, 157 aa, Zea mays
  Clone ID: TF_LIB3632-054-Q6-K6-E9.pep
MVTTHVHKRACEVAGHPTKYISYWQPAAGCWQVVLRVVCSLRLRPGDDHCFVHAIHKLGGQDKATPKRVLQLMGVGGLTISHVKSHLQMYRNMRNDIGMQGTTMQLVHRAEEHVYGRGGMHMELCADTQRRRQPQPQPQCGHDECDGPACCCIVVCR

SEQ ID NO: 6537 - protein, 359 aa, Zea mays
  Clone ID: TF_ZmC2322_1.pep
MGLDVGEIGMGLDLGLDLRLFAARSAGGMAKGAAPAGIQSCIRSLEVERRKIEVFRRELPLCLRLLADVIDELKEEAAKRGEDDDGATVVDDGDKRKWMSTAQLWVDSDAKSDESDKEQQSEITSPPEPKLLGGGAPTPIRAAVSAVAVPPPLPPPLFRREDSSASSGLSLVSLSPATKAAVPISPPVVAASGTTTSARFCGTTMPPSGSEVINMHSQAQQQASRKARRCWSPELHRRFVAALHELGGPQVATPKQIREVMQVDGLTNDEVKSHLQKYRLHNRRSSPGAAAAPVSQSIMLVDGVWAAQEQSSGSQSGSRQGPLQFSRAGMAVGGGDDSSSSDDDEDDDKSEDGYSLKCV

SEQ ID NO: 6538 - protein, 196 aa, Zea mays
  Clone ID: TF_LIB4740-007-R1-K1-F4.pep
MYSPKPESSFGPNPNSGTHQQQMELTGANMGPGNGANNNTNMAGRQRLRWTNELHERFVEAVTQLGGPDRATPKGVLRIMGVQGLTIYHVKSHLQKYRLAKYIPDASTDGNKTDNKDPGDLLAGLEGSSGLQISEALKLQMEVQKRLHEQLEVQRQLQLRIEAQGKYLQKIIEEQQRLTGVKSETPAGRCFCHCIK

SEQ ID NO: 6539 - protein, 312 aa, Zea mays
  Clone ID: TF_ZmC785_1.pep
MYSPKPESSFGPNPNSGTHQQQMELTGANMGPGNGANNNTNMAGRQRLRWTNELHERFVEAVTQLGGPDRATPKGVLRIMGVQGLTIYHVKSHLQKYRLAKYIPDASTDGNKTDNKDPGDLLAGLEGSSGLQISEALKLQMEVQKRLHEQLEVQRQLQLRIEAQGKYLQKIIEEQQRLTGVKSETPAGGASVTVSSDQFPDSERTEPSTPAPASESPTQVGASNRDTGDRTEATKSTCHGDSLSRNEPLTPDSNCQNGSPVASPNHERAAKRQRGSGTEFLDSEAEFSLPRHIFESSSGSEFQQYSMSYSGQ

SEQ ID NO: 6540 - protein, 149 aa, Zea mays
  unsure (1)..(149): unsure at all Xaa locations
  Clone ID: TF_LIB4744-062-R1-K1-C9.pep
PRLRIRTRACGGILGSLPPHDHAVDYSPRPTGAPGTAGSGKQRLRRTSDLDNRFKDAIAQIGGPDRATPKGVLTEMDVPRITINHEKSHLQKYRLAKYIPDTRDEGPKDEKINYSDSLSNTDSEREXQITEALKMQKEVKKLLHEQIEG

SEQ ID NO: 6541 - protein, 306 aa, Zea mays
  Clone ID: TF_ZmC34044_2.pep
MDQIATPDETAHASAPSVHKLFDAKLGHHSVMDGTLASTSQSSNIKTQLIRSSSLSRSISVNLEKRSPESDPESPQSHVSHPKFAEPMFSNSSTFCTSLFSSSSTTEPCRQMGTLPFLPHPPKCEQQVSAGHSSSSSLLLSGDTGLDVAEQSDDLNDLLNLSGDASDGSFHGENNALAFDEQMEFQFLSEQLEIAITDNEKNPHLDDIYGTPPQLSSLPVSSCSNQNLGSPVKVQLSSSQSSSSSATANKSRLRWTLELHERFVEAVKKLEGPEKATPKGVLKLMKVEGLTIYHVKSHLQKYRLAK

SEQ ID NO: 6542 - protein, 213 aa, Zea mays
  Clone ID: TF_LIB3603-002-P1-K6-E9.pep
RACGGILGSLPPHDHAAASSPRPPGAPGTAGSGKQRLRWTSDLHNRFVDAIAQLGGPDRATPKGVLTVMGVPGITIYHVKSHLQKYRLAKYIPDSPAEGSKDEKKDSSDSLSNTDSAPGLQINEALKMQMEVQKRLHEQLEVQRQLQLRIEAQGRYLQMIIEEQQKLGGSIKASEDQKLSDSPSLDDYPESMQPSPKKPRIDALSPDSERDTT

SEQ ID NO: 6543 - protein, 257 aa, Zea mays
  Clone ID: TF_ZmC11254_1.pep
MMYHAKNFSVPFAPQRAQDNEHASNIGGIGGPNISNPANPVGSGKQRLRWTSDLHNRFVDAIAQLGGPDRATPKGVLTVMGVPGITIYHVKSHLQKYRLAKYIPDSPAEGSKDEKKDSSDSLSNTDSAPGLQINEALKMQMEVQKRLHEQLEVQRQLQLRIEAQGRYLQMIIEEQQKLGGSIKASEDQKLSDSPPSLDDYPESMQPSPKKPRIDALSPDSERDTTQPEFESHLIGPWDHGIAFPVEEFKAGPAMSKS

SEQ ID NO: 6544 - protein, 338 aa, Zea mays
  Clone ID: TF_ZmC2322_6.pep
MGLDVGEIGMGLDLGLDLRLFAARSAGGMAKGAAPAGIQSCIRSLEVERRKIEVFRRELPLCLRLLADVIDEFKLEAAKRGEDDDGATVVDDGDKRKWMSTAQLWLDSDAKSDESDKEQLSEITSPEPKLLGGAPMPIRAVAAVPPLPPPFFRREDSSSGSGLSLVPPAAKPPIPPMSASDNASGRFCATMPPSGSGVNLHSQAQQQARKARRCWSPELHRLFVAALHQLGGPQVATPKQIREVMKVDGLTNDEVKSHLQKYRLHNRRSPGVVAPVSQSVMLAGGLWAPPHQEQSSSQSGSPQGPLQFSGSGVAATVGGDSSSSDEDDKSEGYSRKYV

SEQ ID NO: 6545 - protein, 474 aa, Zea mays
  Clone ID: TF_ZmC1122_1.pep
MLAVSPSPVRCADAEECGGGGASKEMEETAVGPVSDSDLDFDFTVDDIDFGDFFLRLDDGDDALPGLEVDPAEIVFADFEAIATAGGDGGVTDQEVPSVLPFADAAHIGAVDPCCGVLGEDNDAACADVEEGKGECDHADEVAAAGNNNSDSGEAGCGGAFAGEKSPSSTASSSQEAESRRKVSKKHSQGKKKAKVDWTPELHRRFVQAVEELGIDKAVPSRILEIMGIDSLTRHNIASHLQKYRSHRKHMLAREVEAATWTTHRRPMYAAPSGAVKRPDSNAWTVPTIGFPPPAGTTPRPVQHFGRPLHVWGHPSPTPAVESPRVPMWPRHLAPRAPPPPPWAPPPPADPAFWHHAYMRGPAAHMPDQVAVTPCVAVPMAAARFPAPHVRGSLPWPPPMYRPLVPPALAGKSQQDALFQLQIQPSSESIDAAIGDVLTKPWLPLPLGLKPPSVDSVMGELQRQGVANVPQACG

SEQ ID NO: 6546 - protein, 361 aa, Zea mays
  Clone ID: TF_ZmC24081_2.pep
MHNRIEEMYHHQQQLQSHSHFLSSRQTFPPERHMLLQGGSIPAEPGLVLSTDAKPRLKWTPELHERFVEAVNQLGGPDKATPKTIMRLMGVPGLTLYHLKSHLQKYRLSKNIHAQANGVNAKNVIGCTMAMDKPLEGNGSPASHLNLGTQTNKSVHIGEALQMQIEVQRRLHEQLEVQRHLQLRIEAQGKYLQSVLEKAQETLSKQNAGSVGVETAKMQLSELVSKVSTECLQHAFTGFEEIDGSQILQGHTIQLGDGSVDSCLTACDGSQKDQDILSISLSAHRGKEIGGMTFDIQEKERGREDLFLDKLSMTPPGQLDRRERGSFSMTRKAAKLDLNINDTTDGPQNCKKIDLNGFNWT

SEQ ID NO: 6547 - protein, 233 aa, Zea mays
  Clone ID: TF_ZmC1401_5.pep
MASSLGVGGQQQGHGHGHGEARARLRWTRQLHDRFVLAVAQLGGADKATPKSVLRAMAVPGLTLYHLKRHLQLKYRLVAVSRGVASPLGDSGDGTDERSSSSSENQPADECDDGTVAEPHGDSSRSVARMQRKLQEQIEVQRHLQLRIEAQGRYLQSVLRRAQEVLADHGLGSAAGAEAELASAVDTGCLSSSSCCSPTRHRSDSCVTSSSSEAENQAPVGGATWLHTCAGTR

SEQ ID NO: 6548 - protein, 111 aa, Zea mays
  Clone ID: TF_LIB5117-031-A1-PF1-G6.pep
MMYHAKKFSVPFAPQRAQNSEHVSNIGAFGGSNISNPANPVGSGKQRLRWTSDLHSRFVDAIAQLGGPDRATPKGLLTVMGVPGITIYHEKSHLQKYRLVKYITQSPAEGS

SEQ ID NO: 6549 - protein, 312 aa, Zea mays
  Clone ID: TF_ZmC21090_1.pep
MGSGRNGAVVRRYVRSKEPRMRWSADLHRSFVQAIDSLGGQHKATPKLILQFMGARGLTISHVKSHLQMYRAASLGAERGGGTPAQLLQRRYSCSGDERGGPKEEFLCCPPPPPLKRARMGYESMQGSHGVSDARTTAGGGGLYCIDDYMQAMAVGWRIKEEGLIRWQRRDAAAAAAAPSNLQAMGCLVQESAPFKVRRPEAHRLGSALKQQDDDDSSKEDGNGRPQSSNAAKEDGPSEQCSLSLSLGNLDAKCGRGTAAAASSRSGESSCILTASPARRSSSDDCSGHSGCFVVGPGGVVSLELSLSICGS

SEQ ID NO: 6550 - protein, 398 aa, Zea mays
  Clone ID: TF_ZmC12579_1.pep
MVAVKQLTGPARPAHTCAAHAHQLLSARYDHRGASQAELPDRISPSNASTFCTSMYSSSAADSSKSCRQAGALPFLPHPPKREQQQQQSSSSPSLLVCTDLGNGGQDEAEAEHPAELKDFLNLSGEASWRGGFHGESSGVAFRFREKVEFQFLSEQLGIAITDHDESPRLDDQEDIYDRPPQTSSCPVLSCSNQEEGLQRAGSPVKAQLSSYRAACNNKPRLRWNLELHELFVKAVNKLGGPEKATPKGVLKLMKVEGLTIYHVKSHLQKYRFAKYLPETKEDMKSSSEDKMPGSNPGRKKILKSLQVAEALRMQMEVQKQLHEQLEVQRQLQVRIEEHAKYLQKILEQQKARNSLSATTSSIQTELSESTKEEKPETQADTSSAQLPNKKNSDTDME

SEQ ID NO: 6551 - protein, 175 aa, Zea mays
  Clone ID: TF_LIB4764-010-R1-K1-G5.pep
MLSSTGRLHLQGVLADTLRGYGGAHHHRQHLGSLAAARYMPKLPASRRGMRAPRMRWTSSLHARFVHAVELLGGHERATPKSVLELMDVKDLTLAHVKSHLQMYRTVKSTDKPPAATSSVGGGGPPVDGGGGSGDDDHPSDWRRAPSSSAGRDVSPQAFTGHRSAFSDGAASHAG

SEQ ID NO: 6552 - protein, 451 aa, Zea mays
  Clone ID: TF_ZmC21783_2.pep
MLEVSTLRGPTSSGSKAEQHCGGFVGDHHVVFPTSGDCFAMVDDNLLDYIDFSCDVPFFDADGDILPDLEVDTTELLAEFSSTPPPDDLLAVAVFGGDEQPAAAVAQEKPSSSLEQTCGDDKGGGVAVASRRKLQTTTTEEDSSPAGSGAKSSASAEGHSSKKKSAGKNSNGGKRKVDWTPELHRRFVQAVEQLGIDKAVPSRILEIMGTDCLTRHNIASHLQKYRSHRKHLMAREAEAATWAQKRHMYAPPAPRTTTTTDAARPPWVVPTTIGFPPPRFCRPLHVWGHPPPHAAAAEAAAATPMLPVWPRHLAPPRHLAPWAHPTPVDPAFWHQQYSAARKWGPQAAAVTQGTPCVPLPRFPVPHPIYSRPAMVPPPPSTTKLAQLHLELQAHPSKESIDAAIGDVLVKPWLPLPLGLKPPSLDSVMSELHKQGVPKIPPAAATTTGATG

SEQ ID NO: 6553 - protein, 219 aa, Zea mays
  Clone ID: TF_ZmC7194_1.pep
MGEEAVDDYELHMVCYGSDEDERVMEWESGLPGADELTPLSQPLVPPGLAAAFRIPPEPGRTLLDLHRASEATVARLRRAPPSSPGTSSSPHGHQEARGGEGADSAAATTTNSNRRPRLVWTPQLHKRFVDVVAHLGIKKAVPKTIMELMNVEGLTRENVASHLQKYRLYVKRMRGQGPSPSDHIFAPTPVHGVAVGMVPMVSGQAYHYLYNGGGGGDR

SEQ ID NO: 6554 - protein, 57 aa, Zea mays
  unsure (1)..(57): unsure at all Xaa locations
  Clone ID: TF_LIB5116-072-A1-PF1-H11.pep
MMDQTVFASLPARQRLRWTDEXHEQFVXAVTQLGGPDRATPKGVLRIMGTPGLTIYH

SEQ ID NO: 6555 - protein, 366 aa, Zea mays
  Clone ID: TF_ZmC2593_1.pep
MYHQQQLHTHNQHLSSSRPGLPPEKQFLLHGAGGGGGGDAGLVLSTDAKPRLKWTPELHERFVEAVHQLGGPDKATPKTIMRLMGIPGLTLYHLKSHLQKYRLSKNLQAQAHTASAKNALVGCRTGADNALCQGSASPPPPPPPPHLNLDPPQINRSMHISEALQMQIEVQRRLHEQLEVQRHLQLRIEAQGKYLQSVLEKAQEALAKQSGGADETTTTQQQMLPDLISRATATRRGHVQQEHLHLQHHLGGDGSVDSCLTACEGSRCQRERDQDLLSIGLSSAPPPTPSRGYNDRGGGGSASCEEFLQFLDEPSRRGAGGGGGPRMSSRSLTSASAAAGAIQGLAAAKAKGSTSTDPAGTEWSSF

SEQ ID NO: 6556 - protein, 68 aa, Zea mays
  Clone ID: TF_uC-zmroteosinte018b06b1.pep
KSVLRLMGMKGLTLYHLKSHLQKYRLGKQTKKDTGLDAGRVAFAAQGINFSTPVPPPSIPSTASDNTG

SEQ ID NO: 6557 - protein, 108 aa, Zea mays
  Clone ID: TF_LIB5116-037-A1-PF1-G10.pep
MMYHAKKFSVPFAPQRAQNSEHVSNIGAFSGSNISNPTNPVGSGKQRLRWTSDLHSRFVDAIAQLGGPDRATPKGVLTVMGVPGITIYHVKSHLQKYRLAKYIPESPA

SEQ ID NO: 6558 - protein, 240 aa, Zea mays
  Clone ID: TF_ZM4583.C7.o5.fg.pep
MQGSYGYDGAASRDPKPRLRWTPDLHQRFVDAVTKLGGPDRATPKSVLRLMGMKDLTLYQLKSHLQYFAHRASVQPQRILLQVFLIKGRTQDHVLLDCEYGTVEVQKKLQMRIEAQGKYLKTILEKAQTNISFHTNASNGIESTRSQLMDFNLDGFMNNATQVCKEHREQLVKAMSDENDKDSLGLQLYHLGSQEAKEVKCTPKTEDSLLLDLNIKGGYDLSSRGMQACELELKINQQIV

SEQ ID NO: 6559 - protein, 271 aa, Zea mays
  Clone ID: TF_ZmC3576_1.pep
MQGSYGYDGAASRDPKPRLRWTPDLHQRFVDAVTKLGGPDRATPKSVLRLMGMKDLTLYQLKSHLQKYRLGIQGKKSTGLEPASGGVLRSQGFGSTTAHPPPGVPDQGKNTREIALSDALRYQIQVQRKLQEQTEVQKKLQMRIEAQGKYLKTILEKAQTNISFHTNASNGIESTRSQLMDFNLDGFMNNATQVCKEHREQLVKAMSDENDKDSLGLQLYHLGSQEAKEVKCTPKTEDSLLLDLNIKGGYDLSSRGMQACELELKINQQIV

SEQ ID NO: 6560 - protein, 154 aa, Zea mays
  Clone ID: TF_ZmC359589_1.pep
SCAEVDARSATPQSYLCFHTESERSVPDPFNCDKLGADNLPSSNTAPKPRMRWTPELHERFVDAVNKLGGSEKATPKAVQKVMKVDGLTIYHVKSHLQKHRIVQHHSETSCAGVTGRRGRHTQADDDSIPQSKGEGGIEGGLVSQIGLQKQLHE

SEQ ID NO: 6561 - protein, 228 aa, Zea mays
  Clone ID: TF_LIB5023-008-A1-XP2-F4.pep
MMPSSDGGEGVADVPRGPDGRSSPSNSSTVELDGDGGGARKAGASPSSSVRPYVRSKNPRLRWTPELHLCFLRAVDRLGGQDRATPKLVLQLMNVKGLSIGHVKSHLQMYRSKKIDGSGQVIGGGGSWRGRLHRQLQDGGQAAYSLGHLSLHHGAGQTTAASSAILSARSGAWPHWNSFHDDPSYSMLLHGGHHHLLGSNPTATTTTHQQQLKLQQLLHPLTTVLRSR

SEQ ID NO: 6562 - protein, 195 aa, Zea mays
  unsure (1)..(195): unsure at all Xaa locations
  Clone ID: TF_LIB3600-022-Q6-K6-H5.pep
VVPQAALRLAXERGARAPRMRWTTSLHARFVHAVELLGGHERATPKSVLELMDVKDLTLAHVKSHLQMYRTIKTTDHKPANSASSYGQAAAAKPVIDIPDPDDDSLFDLITTSAGSDQSSSSAQHSNPDGGGGNEHGSSMCALWCSSSTSISRGGWFHDRPRDDDAATPGPGDDIKSFEDVQSHSLLDDVADLNS

SEQ ID NO: 6563 - protein, 168 aa, Zea mays
  Clone ID: TF_LIB4758-020-R1-K1-B5.pep
MRDMINLPFSPRPDSSLGTQTGATPKSVLELMDVKDLTLAHVKSHLQMYRTVKSTDKPATTSSGGPPVDGGGDEDHDDLLSARRAQSSSSSPAGRRGGRSPQAFTRHRSAASSEGAASLAGGDDVECSSSADDSDCGRARSASSSSSCVVSCNTTTPSMIFLPGMKAI

SEQ ID NO: 6564 - protein, 257 aa, Zea mays
  Clone ID: TF_LIB4570-003-R1-K1-G3.pep
NSESEKADAKGGSKSEVSGEQRVPSVRQYNRSKLPRLRWTPDLHMAFVHAVERLGGQERATPKLVLQMMNVRGLSIAHVKSHLQMYRSKKLDQDGRPRGAVSSVYSPMDFHFMRADHRRFHNMSFFQRAAASASSSGGQERGGFFASRNFSTPELSRLYGLLHHRPAPTQTFDFRNSSFRNHEWPWAASSNQQEAMTISRKHVVMPPSTSPQTHASLASSAALRSDRRWWPFTEAGAAVAAGEHRAGTGVTSVKFDN

SEQ ID NO: 6565 - protein, 199 aa, Zea mays
  Clone ID: TF_ZmC306667_1.pep
TASEGEAAALPELALAPADKDAADADRKPYLDAAAAGSNNGGVLSARRDVVQSGVVKPAPEGQQAAPPQTHRKARRCWSPELHRRFVNALQILGGAQVATPKQIRELMKVDGLTNDEVKSHLQKYRLHTRRPMPAPPAPATAAPQLVVLGGIWVPPEYASQAAGQAIYGAHPATQPHYTAAAQEYYPSPAAVHHLQHHP

SEQ ID NO: 6566 - protein, 279 aa, Zea mays
  Clone ID: TF_ZmC13106_1.pep
MNMFDGMESAGYGGGAGPMGGVVLSRDPKPRLRWTPDLHERFVEAVTKLGGADKATPKSVLRLMGMKGLTLYHLKSHLQKYRLGKQTKKDTGLDAGRVAFAAQGINFSTPVPPPSIPSTASDNTGETPLADALKYQIEVQRKLHEQLEVQKKLQMRIEAQGKYLQTILEKAQSNLSYHATGAANLEATRSQLTDFNLALSGFMDNVTQACEQNNGELVKAMSEDGLRANNLDFQPYHGVHDGDDVKCATDEGLLLLDLNIRGGYGHRISTDLKMNQHMR

SEQ ID NO: 6567 - protein, 267 aa, Zea mays
  Clone ID: TF_ZmC4296_1.pep
MFPSLIHHASHGRPDVAVAEDAPRSGCGLGLPGHGGGPSVVLTADPKPRLRWTADLHDRFVDAVAQLGGPDKATPKAIMRTMGVKGLTLFHLKSHLQKYRLGRQSGKELTEQSKDASYLMEAQSGTTLSPRGSTPDVKESQEVKEALRAQMEVQRRLHEQVEVQKHMQIRMEANQKYIDTILDKAFKIVSEQLSGFSISDQDLPILTSARAMLSPADHLSSSVFPQLSVSSVSLHNPGPGGGKGLPHVADSHVFSQRPPEQFKRKSR

SEQ ID NO: 6568 - protein, 270 aa, Zea mays
  Clone ID: TF_ZmC1401_2.pep
MASSLGVGGQQQGHGHGHGEARARLRWTRQLHDRFVLAVAQLGGADKATPKSVLRAMAVPGLTLYHLKRHLQKYRLVAVSRGVASPLGDSGDGTDERSSSSSENQPADECDDGTVAEPHGDSSRSVARMQRKLQEQIEVQRHLQLRIEAQGRYLQSVLRRAQEVLADHGLGSAAGAEAELASAVDTGSLSSSCCCSPTRRRSADSCVTSSSSEAESQAPVGGATWLHTCAGTRDCSVEQQPVQGEKSTFLQRHGAAEDGTSSEIDPNGNR

SEQ ID NO: 6569 - protein, 284 aa, Zea mays
  Clone ID: TF_ZmC2088_1.pep
LMNVKDLTLAHVKSHLQMYRTVKGTTADRSCAAGHVQMRDMGFLHRGCELNGFEAFSNGTSNATANNRMQAAAGSPAGKHAEVAWFLRPPLAHQSSGGGGGGGGAVPLPLPLPCPYLMSAHHNRYLLSQNQGWRTRGAHQQDAAAPPPLVLGQQDSARRLHPGFPDTAISSSRPSSWSAGVASRWSSTAAAAPSPSSGRSSISSGTEQPAACSWTMMTTNKQKQQQQPPSTSSSSRVVAVPNLEMSLGRQGWQHDLQDHHPQQQQQQRSGESTAPKELTLLKCL

SEQ ID NO: 6570 - protein, 89 aa, Zea mays
  Clone ID: TF_LIB3227-031-P1-K1-F10.pep
MFPSKKATSSAAAAAAAVSSNDSRQQAMCVQADSGSGLVLTTDPKPRLRWTVELHERFVDAVTQLGGPDKATSKTIMRVMGVKGLTLYH

SEQ ID NO: 6571 - protein, 589 aa, Zea mays
  Clone ID: TF_ZmC4646_1.pep
MAAASTPARSSAHLSQPVRVVLRVRPFLSSEAASATAPCVSLLGCHPGGGVTVQLKDQHTSRSEQYKLDAFFRQEDSVSQIFDQEVRAVIPSIFEGINATVFAYGATGSGKTYTMQGTEDFPGLIPLAASTILALCTGTWCSVEISYYEVYMERCYDLLEPKAKEIMALDDKDGNMQLKGLSWVPVRSMEEFQELYSIGVQRRKVAHTGLNDVSSRSHAVLSLRVSSTDVVKGKLNLIDLAGSEDNKRTLNEGIRLQESSKINQSLFALSNVISALNKNEHRIPYRQSKLTRLLRDSLGGGSRTVMIACLNPAEYQESANTVSLAARSCHIENFTSSSKQETPKLKIDMEAKLRAWLESKGKTKSIQRMDGLFSPIASKTPLSVSHMKQPTSSRIPCRVKAMDQDGGKIKKILFDPVVHVPTENIPREHRQTEVNTPKKVVLPSVTPCNEKHEASLRKALSPISSNMVPVEQQIPDNGNCPVLLEPQTPIEKRNIVEETPGATPLERFNALGSNLKEALVQQYLDLLNVANKEELQQLKGIGARRAEYILELREDSPKPFKTLEDLGNIGLSSKQIRDILKKTATGIFK

SEQ ID NO: 6572 - protein, 340 aa, Zea mays
  Clone ID: TF_ZmC39584_1.pep
MSSSSAHQKASPPIEEEATEHGPFPIEQLQASGIAALDVKKLKDAGLCTVESVAYSPRKDLLQIKGISEAKVDKIIEAASKLVPLGFTSASQLHAQRLEIIQLTTGSRELDQILDGGIETGSITEMYGEFRSGKTQLCHTLCVTCQLPLDQGGGEGKALYIDAEGTFRPQRILQIADRFGLNGADVLENVAYARAYNTDHQSRLLLEAASMMVETRFALMVVDSATALYRTDFSGRGELSARQMHLAKFLRSLQKLADEFGVAVVITNQVVAQVDGAAMFAGPQIKPIGGNIMAHASTTRLFLRKGRGEERICKVISSPCLAEAEARFQISSEGVTDVKD

SEQ ID NO: 6573 - protein, 340 aa, Zea mays
  Clone ID: TF_ZmC4042_1.pep
MSSAAQQQQKAAAAEQEEVEHGPFPIEQLQASGIAALDVKKLKDSGLHTVEAVAYTPRKDLLQIKGISEAKADKIIEAASKIVPLGFTSASQLHAQRLEIIQVTTGSRELDKILEGGIETGSITEIYGEFRSGKTQLCHTLCVTCQLPLDQGGGEGKALYIDAEGTFRPQRLLQIADRFGLNGADVLENVAYARAYNTDHQSRLLLEAASMMIETRFALMVVDSATALYRTDFSGRGELSARQMHMAKFLRSLQKLADEFGVAVVITNQVVAQVDGSAMFAGPQFKPIGGNIMAHASTTRLALRKGRGEERICKVISSPCLAEAEARFQLASEGIADVKD

SEQ ID NO: 6574 - protein, 397 aa, Zea mays
  unsure (1)..(397): unsure at all Xaa locations
  Clone ID: TF_ZmC9705_1.pep
MDGGREQQAPPESQPGKNLIKIPSYQEVFGTGASTSSSKPPSYNPPVATSAAAAASSSSSSSGSFSQAFSFLKSSEFYSPPPPPPQPTTTPRPTQASPSAPTPQSKNSILVSHRQRGNPLLKHIRNARWTFADVVPDYVLGQSSCALYLSIRYHLLHPDYLYYRIRELQKNFRLRVILCHVDVEDVIKPLHEITRTALLHDCTLLCGWSLEECGRYLETIKVYENKPADSIREHMDNDYLSRLTHGLTSIRHVNKTDVVTLGSXYLQSLSQIMNGSMDELARCPGIGERKVRRLYDTFHEPFKRVPARPRPNLVVPDTPDREKAKGQPSSTDGSSLQDAVEKPDASKKTKKGSDVRSALTVAFAKYSEKIRSQGRDAPNEAGESTGGSTVEAERAGD

SEQ ID NO: 6575 - protein, 201 aa, Zea mays
  Clone ID: TF_ZmC490976_1.pep
MDSSSSSVPAAAAAEGAPPAGENLAVFWHEGMLAHDAGRGVFDSGRDPGFLDVLDHHPENADRVRNMVSILRRGPIAPFLSWHSGTPAHASDLLSFHSPEYIEELAQANASGPKKLCEGTFLNPGSWGAALLAAGTTLSATRHILDGHGKIAYALVRPPGHHAQPDHADGYCFLNNAGLAVQLALDSGRAKVAVVDIDVHY

SEQ ID NO: 6576 - protein, 172 aa, Zea mays
  unsure (1)..(172): unsure at all Xaa locations
  Clone ID: TF_LIB3960-017-Q1-K6-C4.pep
MLEKDRISYFYDGDVGNVYFGPNHPMKPHRLCMTHHLVLSYGLHQKMEIYRPHKAYPIELAQFHSADYVEFLHRITPDSQHLYASELTRCMDAGVFSFQTILQDCXFTMKYMPYNLGEDCPVFDNLFEFCQIYAGGTLDAARRLNHKICDIAINWAGGLHHAKKCEASGFCY

SEQ ID NO: 6577 - protein, 430 aa, Zea mays
  Clone ID: TF_ZmC1898_1.pep
MLEKDRISYFYDGDVGNVYFGPNHPMKPHRLCMTHHLVLSYGLHQKMEIYRPHKAYPIELAQFHSADYVEFLHRITPDSQHLYASELTRYNLGEDCPVFDNLFEFCQIYAGGTLDAARRLNHKICDIAINWAGGLHHAKKCEASGFCYINDLVLGILELLKYHARVLYIDIDVHHGDGVEEAFYFTDRVMTVSFHKYGDLFFPGTGDIKDIGEREGKYYAINIPLKDGIDDTSFTRLFKTIIAKVVETYLPGAIVLQCGADSLARDRLGCFNLSIEGHAECVKFVKKFNIPLLVTGGGGYTKENVARCWAVETGVLLDTELPNEIPKNEYIEYFAPDYTLKVPNLNMDNLNSKTYLSSIKVQVMESLRYIQHAPGVQMQEVPPDFYIPDFDEDELDPDERVDQHTQDKQIHRDDEYYEGDNDNDHDDGTR

SEQ ID NO: 6578 - protein, 496 aa, Zea mays
  unsure (1)..(496): unsure at all Xaa locations
  Clone ID: TF_ZmC29703_3.pep
MDASAGGGGNSLPTTGADGSKRRVCYFYDAEVGNYYYGQGHPMKPHRIRMTHALLGRYGLLDQMQVFRPHPARDRDLCRFHADDYVSFLRSVTPETQQDQIRALKRFNVGEDCPVFDGLYSFCQTYAGGSVGGAVKLNHGHDIAINWAGGLHHAKKCEASGFCYVNDIVLAILELLKYHQRVLYVDIDIHHGDGVEEAFYTTDRVMTVSFHKFGDYFPGTGDIRDVGHSKGKYYSLNVPLDDGIDDESYQSLFKPIMGKVMEVFNPGAVVLQCGADSLSGDRLGCFNLSIKGHAECVRFMRSFNVPLLLLGGGGYTIRNVARCWCYETGVALGHELTDKMPPNEYYEYFGPDYTLHVAPSNMENKNTRHQLDDIKSKLLDNLSKLRHAPSVQFQERPPEAELPEQDEDKENPDERHDADSDVEMNDAKPLQDSGRMSIXVAAEHSRGTGPVADGVGSSKQTFPNATSRMAIDEPNXLRVEQEGSNKLQDQPSMHLK

SEQ ID NO: 6579 - protein, 119 aa, Zea mays
  unsure (1)..(119): unsure at all Xaa locations
  Clone ID: TF_LIB3150-049-Q1-N1-F11.pep
MAASGEGAXLPTTTGGEDAHRPRLSYLYKPPIVNYYYSQGYPMKPELIQMDHSIVVXYDLQRLHKLXRSYPNSEAYIRRLHSDDYVSFVAYATGNAGVLDPRANNHFNVREDCTMFDGL

SEQ ID NO: 6580 - protein, 138 aa, Zea mays
  Clone ID: TF_ZmC1028609_1.pep
HASETFNLPLLMLGGGGYTIRNVARCWTYETAVALDCEIPNELPYNDYFEYSGPDFKLHISPSNMTNQNTPEYMEKIKQRLFENLRMLPHAPGVQMQAIPEDAVHEDSGDEDGEDPDKRISIRASDKRIACDEEFSDS

SEQ ID NO: 6581 - protein, 115 aa, Zea mays
  Clone ID: TF_LIB3245-437-P1-N1-C7.pep
YSYQRTQKKTRQKTNCPGHPPKKKKGERTHTHKPQSPAAAIDPSSPASGGNSLPSVHPDGQKRRVNYFYNPDVDNYYYGQGHPMKPHRVRMTHYTLARYNLLNQMQVYRPNPPRN

SEQ ID NO: 6582 - protein, 81 aa, Zea mays
  unsure (1)..(81): unsure at all Xaa locations
  Clone ID: TF_LIB3152-001-Q1-K1-B2.pep
MLSGMAASGEGASLPSPAGGEDAHRRRISYFYXPSIGNYYYGQGYPMKPHRILMAHSLAVHYGLHRLLXAXRPYPVSEADI

SEQ ID NO: 6583 - protein, 364 aa, Zea mays
  unsure (1)..(364): unsure at all Xaa locations
  Clone ID: TF_ZmC1898_5.pep
MLEKDRISYFYDGDVGNVYFGPNHPMKPHRLCMTHHLVLSYGLHQKMEIYRPHKAYPIELAQFHSADYVEFLRRITPDSQHLYASELTRYNLGEDCPVFDNLFEFCQIYAGGTLXAFYFTDRVMTVSFHKYGDLFFPGTGDIKDIGEREGKYYAINIPLKDGIDDTSFTRLFKTIIAKVVETYLPGAIVLQCGADSLARDRLGCFNLSIEGHAECVKFVKKFNIPLLVTGGGGYTKENVARCWAVETGVLLDTELPNEIPKNEYIEYFAPDYTLKVPNLNMDNLNSKTYLSSIKVQVMESLRYIQHAPGVQMQEVPPDFYIPDFDEDELDPDERVDQHTQDKQIHRDDEYYEGDNDNDHDDGTR

SEQ ID NO: 6584 - protein, 701 aa, Zea mays
  Clone ID: TF_ZmC19940_1.pep
MAEPAPAPPVTAPLVGLLYDERMCAHATPNGEEHPENPERLRSIWRKLNAAGVASRCVALKAKEAEDKYIASVHSKRHIKLMKEISSTIYDASRNKIARKFNSIYFNKGSSESAVLAAGSVIEVAEKVAAGELSSAIALVRPPGHHAEHDEAMGFCLFNNVAVAANYLLNERPDLGIKKILIVDWDVHHGNGTQKMFYDDPRVLFFSVHRFDYGSFYPAEGDASHCFIGEEAGKGYNINVPWEHGKCGDADYIAAWDHVLLPVTKVFDPDIILVSAGFDAALGDPLGGCCITPNGYALLLTKLLGFAQGRIVMALEGGYNLRSIANSVCACAKVLLGDKFTFNTPEMQPFESTWRVIQAVRNELKTCWPVLSSKLPENVSLRIKPAPSELYASSDSESDSEDVDELLGTVASVNVIEATGVAISEHLSKMKLDDDSLAVKTNSSCSAAEQHPVDSVKVHNNASVVLTKKISDLSLEWRSDLSKTDVWYASFGSNMWRPRFLCYIQGGKAEGMNIPCCGSRDTSSPKGTVWKTVPHRLLFGRSSTPCWGTGGVAFLNPEINYNEKLYVCMYKITLEQFNDILFQENRLVLEDGKDGNTVYPDSPLIGSSEIKFISTNRAVHLEPIKDSWYSNVLYLGNEDEVPILTMTCPASDIERYKSGELRLAPPSETYAATLIKGLVEGKQMDADGAASYINAAAARAL

SEQ ID NO: 6585 - protein, 206 aa, Zea mays
  Clone ID: TF_ZmC2148_2.pep
AVAARYAQHQHGLKRVMIIDFDVHHGNGTSDSFYDDPDIFFLSTHQLGSYPGTGKINEVGQGDGEGTTLNLPLPGGAGDYAMRCAFDEVIAPSAHRFKPDIILVSAGYDAHALDPLAGLQFTTGTFYMLASSIKQVTKELCGGRCVFFLEGGYNLQSLSSSVADTFRAFLDEPSLAAQFDDPAILFEEPTRKIKEAIEKAKSIHSL

SEQ ID NO: 6586 - protein, 334 aa, Zea mays
  unsure (1)..(334): unsure at all Xaa locations
  Clone ID: TF_ZmC1898_2.pep
FSLLPLPRPSGVKRCWRKTGYPTSTTRPHKAYPIELAQFHSADYVEFLHRITPDSQHLYASELTRYNLGEDCPVFDNLFEFCQIYAGGTXRVMTVSFHKYGDLFFPGTGDIKDIGEREGKYYAINIPLKDGIDDTSFTRLFKTIIAKVVETYLPGAIVLQCGADSLARDRLGCFNLSIEGHAECVKFVKKFNIPLLVTGGGGYTKENVARCWAVETGVLLDTELPNEIPKXNECIEYFAPDYTLKVPNLNMDNLNSKTYLSSIKVQVMESLRYIQHAPGVQMQEVPPDFYIPDFDEDELDPDERVDQHTQDKQIHRDDEYYEGDNDNDHDDGTR

SEQ ID NO: 6587 - protein, 224 aa, Zea mays
  unsure (1)..(224): unsure at all Xaa locations
  Clone ID: TF_LIB4739-063-Q2-K1-C9.pep
TISPKLHVLGGQWTFYSMGSWVNSLPSFRPYGKKCGARYFYNPEEGNYYYGEGHTMKTERIRMIHSLLRRYRRLKQMKVNRPNPDSYRELCRNHVDYYLDLLLSSRPXSTQHDHTRLLKRFNCLEDCPVFHSPYSFCHSYGXGLPNTESASSTHSSRPLNATGSSGLHDDKKREGTGFCYPTDVVLAILELREHHHRARHAHSYILHGDEEDDACYTTETAMTA

SEQ ID NO: 6588 - protein, 432 aa, Zea mays
  Clone ID: TF_21207384.pep
MIASLPIYFITPIVGDVGNVYFGPNHPMKPHRLCMTHHLVLSYGLHQKMEIYRPHKAYPIELAQFHSADYVEFLHRITPDSQHLYASELTRYNLGEDCPVFDNLFEFCQIYAGGTLDAARRLNHKICDIAINWAGGLHHAKKCEASGFCYINDLVLGILELLKYHARVLYIDIDVHHGDGVEEAFYFTDRVMTVSFHKYGDLFFPGTGDIKDIGEREGKYYAINIPLKDGIDDTSFTRPFKTIIAKVVETYLPGAIVLQCGADSLARDRLGCFNLSIEGHAECVKFVKKFNIPLLVTGGGGYTKENVARCWAVETGVLLDTELPNEIPKNEYIEYFAPDYTLKVPNLNMDNLNSKTYLSSIKVQVMESLRYIQHAPGVQMQEVPPDFYIPDFDEDELDPDERVDQHTQDKQIHRDDEYYEGDNDNDHDDGTR

SEQ ID NO: 6589 - protein, 147 aa, Zea mays
  Clone ID: TF_uC-zmflteosinte76f08b1.pep
MASESSPPPAGAPPPGLGDKLAVFWDEGMLAHDAGRGVFDSGRDPGFLDVLDQHPENADRVRNMVSILRRGPIAHFLSWHSGRPAHASELLSFHSSEYIEELVQTNATGAKKKLCEGTFLNPGSWGAALLADGTTLSAAKHILDGQG

SEQ ID NO: 6590 - protein, 517 aa, Zea mays
  unsure (1)..(517): unsure at all Xaa locations
  Clone ID: TF_ZmC29703_2.pep
MDPSSAGSGGXXXXXXXXXGQKRRVCYFYDPDVGNYYYGQGHPMKPHRIRMTHSLLARYGLLNQMQVXXXXXXXXRELCRFHAEEYINFLRSVTPETQQDQIRLLKRFNVGEECPVLDGLYSFCQTXXXXXXXXXXKFNHGHDIAINWXXXLHHAKKCEASGFCYVNDIVLAILELLKHHERVLYVDIDIHHGDGVEEAFYTTDRVMTVSFHKFGDYFPGTGDIRDIGHSKGKYYSLNVPLDDGIDDESYQSXXKPIMGKVMEVFRPGAVVLQCGADSLSGDRLGCFNLSIKGHAECVRYMRSFNVPLLLLGGGGYTIRNVARCWCYETGVALGQEPEDKMPVNEYYEYFGPDYTLHVAPSNMXXXXXXXXXDDIRSKLLDNLSKLRHAPSVHFQERVPDTEIPEQDEDQDDPDERHDPDSDMEVDDHKAVEESSRRSILGIKIKREFGENATRVQDGGRVASEHRGLEPMAEDIGSSKQAPQADASAMAIDEPSNVKNEPESSTKLQGQAAAYHKP

SEQ ID NO: 6591 - protein, 221 aa, Zea mays
  unsure (1)..(221): unsure at all Xaa locations
  Clone ID: TF_ZmC515833_1.pep
MAASGEGASLPSPAGGEDSRRRRVSYFYEPTIGDYYYGQGHPMKPHRIRMAHSLVIHYGLHRLLELSRPFPASEADISRFHSDEYVSFLASATGNPTILDPRAVKRFNVGEDCPVFDGLFPFCQASAGGSIGAAVKLNRGDADITVNWAGGLHHAKKGEASGFCYVNDIVLAILELLKFHRRVLYVDIDVHHGDGVEEAFFPXNRVMTVSFHKYEDFFSWN

SEQ ID NO: 6592 - protein, 391 aa, Zea mays
  Clone ID: TF_ZmC13115_2.pep
MASESSPPPAGAPPPGLGDKLAVFWDEGMLAHDAGRGVFDSGRDPGFLDVLDQHPENADRVRNMVSILRRGPIAHFLSWHSGRPAHASELLSFHSSEYIEELVQTNATGAKKKLCEGTFLNPGSWGAALLAAGTTLSSAKHILDGQGNLAYALVRPPGHHAQPDHADGYCFLNNAGLAVQLALDSGRAKVAVVDIDVHYGNGTAEGFYRTDTVLTMSLHMMHGSWGPSHPQSGSVDEIGEGKGLGYNLNIPLPNGSGDAGYEYAMNELVVPSIDKFQPQLLFLVVGQDSSAFDPNGRQCLTMEGYRKIGQIMRRLADRHCNGQILVVQEGGYHITYSAYCLHATLEGVLDLEAPLLDDPIAYYPEDDKYTMKVVDMIKSYWKESVPFLKEI

SEQ ID NO: 6593 - protein, 517 aa, Zea mays
  Clone ID: TF_ZmC29703_1.pep
MDPSSAGSGGNSLPSVGPDGQKRRVCYFYDPDVGNYYYGQGHPMKPHRIRMTHSLLARYGLLNQMQVYRPNPARDRDLCRFHADDYINFLRSVTPETQQDQIRLLKRFNVGEDCPVFDGLYSFCQTYAGASVGGAVKLNHGHDIAINWSGGLHHAKKCEASGFCYVNDIVLAILELLKHHERVLYVDIDIHHGDGVEEAFYTTDRVMTVSFHKFGDYFPGTGDIRDIGHSKGKYYSLNVPLDDGIDDESYQSLFKPIMGKVMEVFRPGAVVLQCGADSLSGDRLGCFNLSIKGHAECVRYMRSFNVPLLLLGGGGYTIRNVARCWCYETGVALGQEPEDKMPVNEYYEYFGPDYTLHVAPSNMENKNTRQQLDDIRSKLLDNLSKLRHAPSVHFQERVPDTEIPEQDEDQDDPDERHDPDSDMEVDDHKAVEESSRRSILGIKIKREFGENATRVQDGGRVASEHRGLEPMAEDIGSSKQAPQADASAMAIDEPSNVKNEPESSTKLQGQAAAYHKP

SEQ ID NO: 6594 - protein, 253 aa, Zea mays
  Clone ID: TF_LIB4730-005-R1-K1-C11.pep
SRSRPGKKKKKTDSLSGDRLGCFNLSIKGHAECVRYMRSFNVPLLLLGGGGYTIRNVARCWCYETGVALGQEPEDKMPVNEYYEYFGPDYTLHVAPSNMENKNTRQQLDDIRSKLLDNLSKLRHAPSVHFQERVPDTEIPEQDEDQDDPDERHDPDSDMEVDDHKAVEESSRRSILGIKIKREFGENATRVQDGGRVASEHRGLEPMAEDIGSSKQAPQADASAMAIDEPSNVKNEPESSTKLQGQAAAYHKP

SEQ ID NO: 6595 - protein, 391 aa, Zea mays; identical to SEQ ID NO: 6592
  Clone ID: TF_ZmC13115_1.pep

SEQ ID NO: 6596 - protein, 458 aa, Zea mays
  Clone ID: TF_ZmC29909_1.pep
MAASGEGASLPSPAGGEDAHRRRVSYFYEPSIGDYYYGQGHPMKPHRIRMAHSLVVHYGLHRLLELSRPYPASEADIRRFHSDDYVAFLASATGNPGVLDPRAIKRFNVGEDCPVFDGLFPFCQASAGGSIGAAVKLNRGDADITVNWAGGLHHAKKSEASGFCYVNDIVLAILELLKFHRRVLYVDIDVHHGDGVEEAFFTTNRVMTVSFHKYGDFFPGTGHITDVGAAEGKHYALNVPLSDGIDDTTFRGLFQCIIKKVMEVYQPDVVVLQCGADSLAGDRLGCFNLSVKGHADCLRFLRSYNVPMMVLGGGGYTIRNVARCWCYETAVAVGVEPDNKLPYNDYYEYFGPDYTLHIQPKSVENLNTTKDLENIKNMILENLSKIEHVPSTQFHDRPSDPEAPEEKEEDMDKRPPQRSRLWSGGAYDSDTEDPDSLKSEGKDVTANFQMKDEPKDDL

SEQ ID NO: 6597 - protein, 414 aa, Zea mays
  unsure (1)..(414): unsure at all Xaa locations
  Clone ID: TF_ZmC29703_5.pep
MDPSSAGSGGNSLPSVGPDGQKRRVCYFYDPDVGNYYYGQGHPMKPHRIRMTHSLLARYGLLNQMQVYRPNPARDRDLCRFHADDYINFLRSVTPETQQDQIRLLKRFNVGEDCPVFDGLYSFCQTYAGASVGGAVKLNHGHDIAINWSGGLHHAKKCEASGFCYVNDIVLAILELLKHHERVLYVDIDIHHGDGVEEAFYTTDRVMTVSFHKFGDYFPGQGIXHAELNIXIYANMNKNWMRSFILVRFIFQVFNYLHKVIGSYQKCNFTNDXLVSVEFALVFXLEMISQXPDCFLDMFGVQQDEDQDDPDERHDPDSDMEVDDHKAVEESSRRSILGIKIKREFGENATRVQDGGRVASEHRGLEPMAGDIGSSKQAPQADASAMAIDEPSNVKNEPESSTXLQGQAAAYHKP

SEQ ID NO: 6598 - protein, 411 aa, Zea mays
  unsure (1)..(411): unsure at all Xaa locations
  Clone ID: TF_ZmC2148_1.pep
MMIQHSSACQSHHLDAIMWRNRFMTSRREQKQIRSWDAQCSANQDQASIEKCNAPKNLPIPDNSLLDARILYCTSPALGHNKEAHPESNKRVPVIVDTLEKLELSPKHRGSQVLEIQNFNPASLDDVARVHSRSYITGLEKAMGRASDEGLILIEGTGPTYATETTFRESLLSAGAGITLVDSVXPPGHHAVPQGPMGFCVFGNIAVAARYAQHQHGLKRVMIIDFDVHHGNGTSDSFYDDPDIFFLSTHQLGSYPGTGKINEVGQGDGEGTTLNLPLPGGAGDYAMRCAFDEVIAPSAHRFKPDIILVSAGYDAHALDPLAGLQFTTGTFYMLASSIKQVAKELCGGRCVFFLEGGYNLQSLSSSVADTFRAFLDEPSGRVGFDDPAILFEEPTRKIKEAIEKAKSIHSL

SEQ ID NO: 6599 - protein, 218 aa, Zea mays
  Clone ID: TF_ZmC22838_1.pep
MASSSSSSPAPALAGEALRQKRILSSKLYLEVPSSKAPVVYSPAYDISFLGLEKLHPFESAKWGRICRYLTREGYLDKKRMVEPLEACKEDLLVVHTEAYLNSLKCSFRVSSIVEVPPVSLVPNWIVHRKLLHPFRKQVGGSILSAKLAFERGWAINVGGGFHHCSADEGGGFCAYADISLCIHFAFVRLNISSVLIIDLDAHQGNGHEKDFANDAFR

SEQ ID NO: 6600 - protein, 618 aa, Zea mays
  Clone ID: TF_22135464.pep
LPLSPLLALSTQATASALRSGSGRRRHRLLLPPLSSRLAPSPPVLRTPAGDPAHTDVEASKENRGACSLNNDRADALEEEANVSTARIGHVESADPGGSVGVEKEIFMAVNEESEGEQAGATLEDLFFFNGEEDDDSDWEPASRLVVNRWFCLNCTMPNVDKITYCMNCRELPGSVVDGYDVFKKQIAQTALLSADTGLLPVSTAIGFDERMLLHSELEVKPNPHPERPDRLRAIAASLAAAGIFPSKCALVPPREITKEELLMVHSPDHIESVEQTKNMLYSYFTSDTYANGHSACAAKLAAGLCADLASLIVSGRVRNGFALVRPPGHHAGVKQAMGFCLHNNAAVAALAAKRAGAKKVLIVDWDVHHGNGTQEIFDGDKTVLYISLHRHEDGNFYPGTGAAHEVGVLDGQGFSVNIPWSRGGVGDDDYIFAFQTVVLPIASEFAADITIISAGFDAARGDPLGCCDVTPTGYSWMTSLLAGSSNGRLLVILEGGYNLRSISSSATEVVKVLLGEGPNRASFVVSPSKEALSTVSQVLKIQQQFWPVLGPTYASLQAQQGSVSSNHSNELKKRKRPGGGPGPFWWKMGSKRLLYEALIEPRSRPRKLKGSTGSAAP

SEQ ID NO: 6601 - protein, 568 aa, Zea mays
  Clone ID: TF_22135466.pep
FRFLPYSRSARRRRRRRSGRALGDGVIGFSSRLSPVASRPRLRSSAHRPVTLQKEIFMAVNEESEGEQAGATLEDLFFFNGEEDDDSDWEPASRLVVNRWFCLNCTMPNVDKITYCMNCRELPGSVVDGYDVFKKQIAQTALLSADTGLLPVSTAIGFDERMLLHSELEVKPNPHPERPDRLRAIAASLAAAGIFPSKCALVPPREITKEELLMVHSPDHIESVEQTKNMLYSYFTSDTYANGHSACAAKLAAGLCADLASLIVSGRVRNGFALVRPPGHHAGVKQAMGFCLHNNAAVAALAAKRAGAKKVLIVDWDVHHGNGTQEIFDGDKTVLYISLHRHEDGNFYPGTGAAHEVGVLDGQGFSVNIPWSRGGVGDDDYIFAFQTVVLPIASEFAADITIISAGFDAARGDPLGCCDVTPTGYSWMTSLLAGSSNGRLLVILEGGYNLRSISSSATEVVKVLLGEGPNRASFVVSPSKEALSTVSQVLKIQQQFWPVLGPTYASLQAQQGSVSSNHSNELKKRKRPGGGPGPFWWKMGSKRLLYEALIEPRSRPRKLKGSTGSAAP

SEQ ID NO: 6602 - protein, 453 aa, Zea mays
  Clone ID: TF_22135468.pep
PCNCRELPGSVVDGYDVFKKQIAQTALLSADTGLLPVSTAIGFDERMLLHSELEVKPNPHPERPDRLRAIAASLAAAGIFPSKCALVPPREITKEELLMVHSPDHIESVEQTKNMLYSYFTSDTYANGHSACAAKLAAGLCADLASLIVSGRVRNGFALVRPPGHHAGVKQAMGFCLHNNAAVAALAAKRAGAKKVLIVDWDVHHGNGTQEIFDGDKTVLYISLHRHEDGNFYPGTGAAHEVGVLDGQGFSVNIPWSRGGVGDDDYIFAFQTVVLPIASEFAADITIISAGFDAARGDPLGCCDVTPTGYSWMTSLLAGSSNGRLLVILEGGYNLRSISSSATEVVKVLLGEGPNRASFVVSPSKEALSTVSQVLKIQQQFWPVLGPTYASLQAQQGSVSSNHSNELKKRKRPGGGPGPFWWKMGSKRLLYEALIEPRSRPRKLKGSTGSAAP

SEQ ID NO: 6603 - protein, 618 aa, Zea mays
  Clone ID: TF_ZmC6866_1.pep
MRPPSSGKKTEVSHSVGKCGVSDQACHGKCQSCGIDAKPFCAGVNEVSLLTGSHTDVEASKENRGACSLNNDRADALEEEANVSTARIGHVESADPGGSVGVEKEIFMAVNEESEGEQAGATLEDLFFFNGEEDDDSDWEPASRLVVNRWFCLNCTMPNVDKITYCMNCRELPGSVVDGYDVFKKQIAQTALLSADTGLLPVSTAIGFDERMLLHSELEVKPNPHPERPDRLRAIAASLAAAGIFPSKCALVPPREITKEELLMVHSPDHIESVEQTKNMLYSYFTSDTYANGHSACAAKLAAGLCADLASLIVSGRVRNGFALVRPPGHHAGVKQAMGFCLHNNAAVAALAAKRAGAKKVLIVDWDVHHGNGTQEIFDGDKTVLYISLHRHEDGNFYPGTGAAHEVGVLDGQGFSVNIPWSRGGVGDDDYIFAFQTVVLPIASEFAADITIISAGFDAARGDPLGCCDVTPTGYSWMTSLLAGSSNGRLLVILEGGYNLRSISSSATEVVKVLLGEGPNRASFVVSPSKEALSTVSQVLKIQQQFWPVLGPTYASLQAQQGSVSSNHSNELKKRKRPGGGPGPFWWKMGSKRLLYEALIEPRSRPRKLKGSTGSAAP

SEQ ID NO: 6604 - protein, 70 aa, Zea mays
  unsure (1)..(70): unsure at all Xaa locations
  Clone ID: TF_LIB4730-068-R1-K1-E12.pep
ILQRLVREMCVGLXTDLHLQSYYVATLTEADVAYLVVLYEDTNLCAIHAKRVTIMPKDMQLARRIRGERA

SEQ ID NO: 6605 - protein, 123 aa, Zea mays
  unsure (1)..(123): unsure at all Xaa locations
  Clone ID: TF_LIB4315-045-R1-K1-H10.pep
PGVRISLAGEPRATTSASLPTVPMARTKQTARKNTGGTAPRKQLATKAARKSAPATGRLKKAERYPPSLHATGEPQYPKSTELLIPSLPFQRLVRENAQDLQTDLXRFQSSARAELKEAFEAY

SEQ ID NO: 6606 - protein, 144 aa, Zea mays
  unsure (1)..(144): unsure at all Xaa locations
  Clone ID: TF_LIB4730-025-R1-K1-G11.pep
LILTRSVARPNTTPTKSSGVSAPRNQLGTKEPLYSAPVTGGVKKAHRFRPGTVVFRYIRTYHTTQELLINNMSFSAWCSRSQRTPGPDLRLRXSSAVSLLTDAYGGLPRSRTSSRVPSDAIHYTRNTVMSKDLQLAPLIRGQKA

SEQ ID NO: 6607 - protein, 234 aa, Zea mays
  Clone ID: TF_ZmC11101_1.pep
MSSSASSVEGDAAGEFTEVVIVRHGETSWNASRIIQGHLDAELNDIGRQQAVAVAHRLSKEVKPVAIYSSDLKRAAETAQTIARICNVPNVVFDPALRERHIGDLQGMTLQDAATERPEAYKAFMSHKRNQQVPGGGESLDQLSERCVSFLYDIVGKHKGERVILVSHGGTIRELYRHASPTKPLHGKIHNTSVSVILVSDATGRCIVKMCGDVSHLQETGVLENAFGGDKTSA

SEQ ID NO: 6608 - protein, 111 aa, Zea mays
  unsure (1)..(111): unsure at all Xaa locations
  Clone ID: TF_LIB3180-021-P2-M1-B6.pep
MARTKQTARKSTGGKAPRKQLATKAVRKSAPTTGGVKKPHRYRPGTVALREIRKYQKSTELLIRKLSFQRLGREIAQDFKTDXLRFQSHSVLALQEASEAYLVVLFEDTNL

SEQ ID NO: 6609 - protein, 125 aa, Zea mays
  unsure (1)..(125): unsure at all Xaa locations
  Clone ID: TF_LIB5027-070-A1-XP1-H5.pep
RGGDRKAIDSRADEKATDSSSKSDLRVPRXRIASLLKGRKYXTQRVQAGAPVYLPAVLQYLAAEGLELCGNGTLDNKKTRXIVPTSYFLYLRTKXHNKISHLMSTVSIAIVDAMPNIHNLFCPEE

SEQ ID NO: 6610 - protein, 82 aa, Zea mays
  Clone ID: TF_LIB3595-050-Q1-N6-G7.pep
VLKQVHPVIGISSKTSFHHELPCIIAIFKKLAGKPANMAWYNNKPAIMSLEIQPPVLIVLAGELAKHAVQEETKTVAKFTSN

SEQ ID NO: 6611 - protein, 113 aa, Zea mays
  unsure (1)..(113): unsure at all Xaa locations
  Clone ID: TF_LIB4730-034-R2-K1-E1.pep
ARRRGTWEAGRGKKKKNTGGEGGTPAKQKPARRARTKQTARKTGGKAPRKQXATKGARKXAXATGGEKKPHRXRPGTXAXRENRKDQKSTEXPNRKQPXQRRGRENAQEXKTD

SEQ ID NO: 6612 - protein, 75 aa, Zea mays
  unsure (1)..(75): unsure at all Xaa locations
  Clone ID: TF_700086025H1.pep
MAPKAEKKPAEKKPASRRXAEKTTAGKKPKSEKRLPGSKFSGKEGGEKKGKKNANKNVETYKIXIFKVLKQVQPD

SEQ ID NO: 6613 - protein, 104 aa, Zea mays
  unsure (1)..(104): unsure at all Xaa locations
  Clone ID: TF_LIB4827-018-A1-N1-G11.pep
EEKRLPSFKYDPGEVHNGKNKDKTSVXTYEIYIFTGMKQAHPDIRISTEGMSIMNSFISNVLLTFTAXSAKLTXYHRTPTITSREIQTSVRMHPNGELSKYAVS

SEQ ID NO: 6614 - protein, 124 aa, Zea mays
  unsure (1)..(124): unsure at all Xaa locations
  Clone ID: TF_LIB4764-069-R1-K1-F8.pep
QGSVAGRKANNEGRRDKAARPTNKYLLRPAKAGLHLPAGRIGRYLKNVRHSKRVVTVAPVYLAGVLEYSLSXEELDLGANAAKDNKKTRIVPRHLLLSIRNDVEIGXLMTGVTIAHGDCPPQHQ

SEQ ID NO: 6615 - protein, 58 aa, Zea mays
  unsure (1)..(58): unsure at all Xaa locations
  Clone ID: TF_LIB3245-260-P1-N1-C6.pep
STGCLKKPHLFLPVTVLLLXIRMYQKSTDLLIRKLPFQLLVREIFHDFKTDLLFQSSV

SEQ ID NO: 6616 - protein, 103 aa, Zea mays
  unsure (1)..(103): unsure at all Xaa locations
  Clone ID: TF_LIB4740-076-R1-K1-A9.pep
WKGRVLRKQVGTREARKWEPMSVGGKRGGGDRAXIVALREIRKYQKSTELLIRKLPFQAPXVHEIAQDLKTDLRLQSXAVLGLKEGRRGLSLYGLFEDTNLWS

SEQ ID NO: 6617 - protein, 69 aa, Zea mays
  Clone ID: TF_LIB3637-204-Q1-N6-D3.pep
LAANSARDTKKTPFVPGHIQFPVRNDKKLSPFLGPVPLPTGGVMPPTHTLFLPKKAGGGSPKVSAGSQD

SEQ ID NO: 6618 - protein, 35 aa, Zea mays
  unsure (1)..(35): unsure at all Xaa locations
  Clone ID: TF_LIB4148-023-Q1-N1-H1.pep
GSVASYNKKPSFTSRXFQTSVRLVLSGDLPKHTVS

SEQ ID NO: 6619 - protein, 98 aa, Zea mays
  unsure (1)..(98): unsure at all Xaa locations
  Clone ID: TF_uC-zmroteosinte016h05a1.pep
PHRFRPGTVALREIRKYQKSTELLIRKLPFQRLVREIAQDFKTDLRFQSSAVAALQEAAEAXLVGLFEDTNLCAIHAKRVTIMPKDIQLARRIRGERA

SEQ ID NO: 6620 - protein, 53 aa, Zea mays
  unsure (1)..(53): unsure at all Xaa locations
  Clone ID: TF_LIB4300-003-R1-M1-B5.pep
PRHIQLAVRNDQXLSRLLGTVTIASGGXLPNIHNLLLPKTRRAAGSVSRVRDW

SEQ ID NO: 6621 - protein, 112 aa, Zea mays
  unsure (1)..(112): unsure at all Xaa locations
  Clone ID: TF_LIB3227-021-P1-K1-E2.pep
MSFCFFLLQRNRKKAKKGAGGARESDPVRTKXTPSVKNGLQFPAGRKKRGLKKARHSQRVGTGTPVYRDNALKNLALGELEXARNAAKENKKTRGGPRHKLLAIRNDEELGK

SEQ ID NO: 6622 - protein, 101 aa, Zea mays
  unsure (1)..(101): unsure at all Xaa locations
  Clone ID: TF_LIB4758-140-A1-K1-E2.pep
MTLLPSYPDSTIPLILHVTKAARKXAPTIGGSNNSHRYSXATEALREIRKNHKRTEMLISKLPFQRLGGXIVQHSTTDMRCQSHAVIALXEAAEVYLATTV

SEQ ID NO: 6623 - protein, 89 aa, Zea mays
  unsure (1)..(89): unsure at all Xaa locations
  Clone ID: TF_LIB5026-053-Q1-XP1-C6.pep
SGPGARSGRYGRRGTGDRPSRTSTPTSSLARRPCARPLPSSPYPXLRCRWSPWSYLGFDWLVWDEEKVLRSGTNGNASDRNRPLERRTG

SEQ ID NO: 6624 - protein, 66 aa, Zea mays
  Clone ID: TF_LIB3150-077-P2-N2-B2.pep
PKVPFFSRSGSARSSSHGRERSMREGEEGRGRAQGRRSDEEVGVAVLQGRSAVSRQPSWAVPHKGP

SEQ ID NO: 6625 - protein, 113 aa, Zea mays
  unsure (1)..(113): unsure at all Xaa locations
  Clone ID: TF_LIB3357-024-P1-K1-D4.pep
SHFPCNRLPIPLPTKDRWRPWARCMPAAKKPVEEEPAADMTTVGKKPMAEKRVPAVXSVGLDGGVGKRGMKXGMISVETYMIYIFKVLMLVHPDIGFFCKAMFIMNSFINDIF

SEQ ID NO: 6626 - protein, 42 aa, Zea mays
  Clone ID: TF_uC-zmroteosinte032e10a1.pep
PVRLDLPGELAKPAVSEGAKAVTKFTSSKPNNVTCTSLLFLQ

SEQ ID NO: 6627 - protein, 69 aa, Zea mays
  unsure (1)..(69): unsure at all Xaa locations
  Clone ID: TF_LIB3150-071-P1-N1-E2.pep
MDASGAGSMAINGAAGRKAGGPXKKSASRSXKAGLEFPVSRIGRYLMKGRGAQRVGTVARVYLGDVLEY

SEQ ID NO: 6628 - protein, 63 aa, Zea mays
  Clone ID: TF_LIB4185-034-R1-K1-G10.pep
RGGLKPFSGFFSEETPGVLKFFLENVIRDAVPYPEHAPRKTVTAMDVVYALKRQGRPLYGFGG

SEQ ID NO: 6629 - protein, 105 aa, Zea mays
  Clone ID: TF_LIB4975-015-R1-K1-D7.pep
PCRQRGKAIGSGADNNATFSSSKAGLEFPVGRIARLLKAGKYAERVGAGAPVYLGAEFEYPAAEAVELIVLAEWERKKILNVPCLIPTAPGRGRLPARAAYARHQ

SEQ ID NO: 6630 - protein, 238 aa, Zea mays
  Clone ID: TF_ZmC2089_41.pep
MREILHIQGGQCGNQIGAKFWEVVCDEHGIDPTGRYTGTSDLQLERVNVYYNEASCGRFVPRAVLMDLEPGTMDSVRTGPYGQIFRPDNFVFGQSGAGNNWAKGHYTEGAELIDSVLDVVRKEAENCDCLQGFQVCHSLGGGTGSGMGTLLISKIREEYPDRMMLTFSVFPSPKVSDTVVEPYNATLSVHQLVENADECMVLDNEALYDICFRTLKLTTPSFGDLNHLISATMSGVTC

SEQ ID NO: 6631 - protein, 98 aa, Zea mays
  unsure (1)..(98): unsure at all Xaa locations
  Clone ID: TF_LIB4730-062-R1-K1-C2.pep
YLDKNYIFNVMNQVHPDIGIXSRLMSIMNSFINDIFXEAQRGESTKLSRYNKKPTVTSREIQSSVRLLLPGXLAKHAVLRGHQEPSPRSHCEYVHSTR

SEQ ID NO: 6632 - protein, 137 aa, Zea mays
  unsure (1)..(137): unsure at all Xaa locations
  Clone ID: TF_LIB4732-087-A1-K1-B7.pep
MARTNHTARLSAGGNAPRLLLVTKAARKSASTTGGVXKAHRYRPXTVALLEIRMYHNSTELLIRKLPFHGLVREIAQDFXQTSRFHEPSSVMVLQEAVEAYLVGLFEDINLCVIHAKRVSSHAXDIEFVRRIRVERA

SEQ ID NO: 6633 - protein, 146 aa, Zea mays
  unsure (1)..(146): unsure at all Xaa locations
  Clone ID: TF_LIB3632-044-Q6-K6-D7.pep
TEPSSAIDLLSESSIAASMDCTMQTAGKSTGEKAPSKQMATNAARKTARATGGVKKPNRWRPETVGLXREMRKDQKRTXLLIRNLPFQRLVXRDIAQDCKTDLRSQSSARKTLQEADEAYLGWLLXDTNLRALHTKRVTIMPNVIH

SEQ ID NO: 6634 - protein, 111 aa, Zea mays
  Clone ID: TF_uC-zmflteosinte39a06b1.pep
SRLPRKPTCLPQTRAEEAMSGRARGGKGLVKGGTKRHRKVLRNSIQGITKPAIRRLARRGGVKRIYGLIYEETRGVLTISLQNVIRDAATYNEHSRLMNGTAMDVDYALKH

SEQ ID NO: 6635 - protein, 107 aa, Zea mays
  Clone ID: TF_LIB3227-021-P1-K1-A10.pep
FTKYTAGSVCPSSRQARNVRWLVSKHTALKSTGGKAPPKQLSTKALRMSVPATGGIKNPNRFRPDTVSLRKILMFHMSTELLMSMLTFQRLFRVIAQDFKTFLLFQS

SEQ ID NO: 6636 - protein, 90 aa, Zea mays
  unsure (1)..(90): unsure at all Xaa locations
  Clone ID: TF_LIB3279-011-P1-K1-F2.pep
MDASVAGRTANKGAPARKVVAPRKKSVSRIIKAALQCLIRRIGRYLKKGEXTHSSVGTQAYVYLGNVLEYLATHVLELAGNAVKDNKKTR

SEQ ID NO: 6637 - protein, 136 aa, Zea mays
  unsure (1)..(136): unsure at all Xaa locations
  Clone ID: TF_LIB4730-068-R1-K1-G9.pep
MAPKAEKKPAAKKPAEEEPATEKVEKAPAGKKPKAEKRLPAGGGXEGGEGKKGKKKAKKSVETYKIYIFKVLKQVHPDXGISAKAMSIMNSFINDXWEKLAGEPXKLARYNKKPTIISREIQTLVRLVRRGELEKN

SEQ ID NO: 6638 - protein, 138 aa, Zea mays
  unsure (1)..(138): unsure at all Xaa locations
  Clone ID: TF_LIB3279-194-Q1-K6-F7.pep
XGVPRFPFXSLXAFPAGSXPSAVGSSGGXAGXXAAVAXXRXFACVLCXXXRWXRPXGXWGPARXXRXXGPFSPLSFXAXLAAVVFAAXXPFPPFXAXASAPGXLXXLGFRLFVPVXLXXPXXRXAAARXLXPXAGSXR

SEQ ID NO: 6639 - protein, 80 aa, Zea mays
  Clone ID: TF_jC-zmshLIB3587P023b04a1.pep
KLLAGVTIAHGGVLPNINPVLLPKKTAVAAAKEGKEKKSPKKAASAKSPKKFLYAGLKFRQTMWCMFCKMPELGCSLLLN

SEQ ID NO: 6640 - protein, 105 aa, Zea mays
  Clone ID: TF_LIB3079-024-Q1-K1-D7.pep
HSWRPAVHGSKGKMGADDLTARCSRKKFVTRSFKACLQFPVNLIGLYLTKGQYVQRVNTVAYVYLVAVLEYLVGEVLELARNAANDSINTRIIPLHVLLAIRIDE

SEQ ID NO: 6641 - protein, 125 aa, Zea mays
  unsure (1)..(125): unsure at all Xaa locations
  Clone ID: TF_LIB4744-058-R1-K1-C4.pep
SYTGREGSCAVRTGKRLDNHVSNLCAPVQLDDQEPKLCLRRPYGLLWIRLPQRITAWKIGPLGIDGLPRENTQDLETDLSYQSXAGSPLQGALQGYLVGLFEDNKLCAIHAKRVTIMPKVMQLAR

SEQ ID NO: 6642 - protein, 120 aa, Zea mays
  Clone ID: TF_jC-zmX700043548a1.pep
MAPKADNNPAAKKPAEEEPAAPAEKAPAGKKPKAEKRLPAGKSAGKEGGVDKKGRKKAKKSVETYNIYIFKVLKHVHPDIGISSKAMFIMNLFINNIFLEARREGAKLARYNKKPTLPPG

SEQ ID NO: 6643 - protein, 142 aa, Zea mays
  Clone ID: TF_LIB4975-035-A1-K1-G6.pep
GMLPLAPVIVAGGSKNANPRCSLGCFADSRAEDRSAPQGRQVLPSAWDPAPLCTSPLDSSTSTLKSCSLLGTHRGYTQKDPRRAATHPHHRELRQGVSTYLLCRCTPSLQKFLLMPTHLCSTSSPRMLARLEASTVDDDDNS

SEQ ID NO: 6644 - protein, 104 aa, Zea mays
  unsure (1)..(104): unsure at all Xaa locations
  Clone ID: TF_LIB3079-035-Q1-K1-D5.pep
HEERDHTKHSANKTTGSXAARKHLGTKVARKSAPTTARTNKPDKYRHRTMALTEILKYNKSSQLIIQLLILQRLFHEIVHDINTDLQMQMHAQMDVQEAVEEYL

SEQ ID NO: 6645 - protein, 108 aa, Zea mays
  Clone ID: TF_LIB3070-005-Q1-N1-G9.pep
PPLPILYPPSMKPSYDTPQAKTVFLYNKSNAEILLPHHKSTSIDGGEKKAKKKAKKSVETYNIYIFKVLNQVLPDIGISSKAMSIMNSFINDIFEKLAADAINLSLYN

SEQ ID NO: 6646 - protein, 160 aa, Zea mays
  unsure (1)..(160): unsure at all Xaa locations
  Clone ID: TF_cC-zmle18900030g11d1.pep
GTPGRPTRTKPDSQSSKPYQPLANSERDPKAPKAEKKPAAKKPAEEEPAAPAEKAPAGKKPKGESRXPAGKCGGLEGGVDKKGRKKAKKSVETHKIXILKALKQVHPDIGIPXKAMSRMNSFINDQLEKLAGEAAKLARNNKKPTXTSRESQNLDRLDLP

SEQ ID NO: 6647 - protein, 116 aa, Zea mays
  unsure (1)..(116): unsure at all Xaa locations
  Clone ID: TF_LIB4730-002-R1-K1-C8.pep
MARTKQTPGSAPTERDPRKSASSKAERKRGPTTGGVKKPDRLHPDTARLHEILSYQKSTELVIRQLQXHGLFREIAQDYQTDLTLQDSAXLCLKRXSEEDLEKLFQDTNLCVMHSK

SEQ ID NO: 6648 - protein, 156 aa, Zea mays
  unsure (1)..(156): unsure at all Xaa locations
  Clone ID: TF_LIB4744-070-R1-K1-D6.pep
AAISREAGETEEAGEKAXTKQTARKXTGGKAPRKQLATKAARKSAPTTGGVKKPHRYRPGTVALRFXFKEQKSXEXPXRKGAXRGAEGXXQDXKTXXXXQSXAEXNXQEXXEAXXXGXXEDTNXXAXXXKXXTXXPKDXQXARRXRGERAPQTQKE

SEQ ID NO: 6649 - protein, 94 aa, Zea mays
  Clone ID: TF_LIB3227-024-P1-K1-B11.pep
SFRNAIKHLEQTEYIANHIARLQRTHDNIGSASKPYAFLGDLTAFLGDLASLLPPLDAFSAVFLGSRTGLILGNTNTRAMVTPVSSFPSSWSLR

SEQ ID NO: 6650 - protein, 103 aa, Zea mays
  Clone ID: TF_LIB3067-018-Q1-K1-F2.pep
GLEGDVNVRVHVVQHLEYVGLVGLNALQALLLALIALAALLGSGLARRDPLLRLRLLPGGRLNDRGLLLRRLLRRGLLLGLGRHRCGASWGLGCEGGWEEMRG

SEQ ID NO: 6651 - protein, 104 aa, Zea mays
  Clone ID: TF_ZmC4285_2.pep
MALACASHACRFLLAGQARSFHAQPYHAKVGVVEFLNGVGKGVEAHAAKLEEAVGGDLQRLLEARTLRLKKLGIPCKHRKLILSFAHKYRLGLWKPQAEPRKVE

SEQ ID NO: 6652 - protein, 100 aa, Zea mays
  Clone ID: TF_uC-zmroteosinte001d08a1.pep
KGKKKFKKSVGPFKFSIFKVLNQGPPNMGIWSKAMSTMNPFIKDIFEKPPAESPKLARYNKKPPVPPRGVQTPGGLGPPGGLAKHPVSGGPKAGPRFPPF

SEQ ID NO: 6653 - protein, 93 aa, Zea mays
  unsure (1)..(93): unsure at all Xaa locations
  Clone ID: TF_LIB4764-031-R1-K1-C2.pep
MARTKQTARKSTGGKAPRKQLATKAARKSAPTTGGVKKPHRYRPGTVVLREIRKYQKSTELLIRKLPSHSLVREIPHDFXTDLRFHSHVRPAP

SEQ ID NO: 6654 - protein, 94 aa, Zea mays
  Clone ID: TF_ZmC1048210_1.pep
GGAHTMARTKQTARKSTGGKAPRKQLATKAARKSAPSTGGVKKPHRYRPGTVALREIRRYQKSTVLLIRKLPFQRLVREIAQDFKTDLRFQSAV

SEQ ID NO: 6655 - protein, 77 aa, Zea mays
  unsure (1)..(77): unsure at all Xaa locations
  Clone ID: TF_LIB3150-075-P1-N1-G7.pep
MSRTKHTARKSTGDKAPMKHLSTKAVRKSAPATVGVNKPHRFRPVTVALRXSASSMNSTELLIHMLPFQRLVLEICP

SEQ ID NO: 6656 - protein, 84 aa, Zea mays
  Clone ID: TF_LIB4735-001-R1-M1-F3.pep
LSSGNNAEYFFSFFFFFFFALFFCFFLSSRSSGSLLAGVTIAHGGVLPNIHSVLLPKKAAEKAASAGCPEPKSPKKGASPPTKA

SEQ ID NO: 6657 - protein, 76 aa, Zea mays
  unsure (1)..(76): unsure at all Xaa locations
  Clone ID: TF_LIB3245-236-P1-N1-H10.pep
MSSGGGRGKPKGCKAVSRATKGRLXFPVWRIWRYLKGGKYAQRVCGGAPVYLFAVLEYISAEVLELAGNTARDNKK

SEQ ID NO: 6658 - protein, 131 aa, Zea mays
  Clone ID: TF_LIB3606-056-Q1-N6-B3.pep
SPKKGPYAKGVGKGAPVYLGAVLEDLPPGVLELPGNPPKEKKKTGFVPPPVLWGIPNKKELGKFFPGVPLPPGGGLPKINRVLLPKKTGEKGPPGGNKGAHSPKKAPQPPQKAKGLGGDPMLPWVGCNRPM

SEQ ID NO: 6659 - protein, 122 aa, Zea mays
  Clone ID: TF_LIB4975-032-A1-K1-C10.pep
QVIVSLLQQAVTFVVVVGIVFGGGIFSCGTAADVFYAYPLCSRWWQPLPYQSASPRCRTTIWMWRGSIRVFLYCLAAFRPSSTPSHARCSSTTTRCPAAPEESRSGSFAHRGVATIAGNQLG

SEQ ID NO: 6660 - protein, 78 aa, Zea mays
  unsure (1)..(78): unsure at all Xaa locations
  Clone ID: TF_LIB3279-216-Q6-N6-G10.pep
QKSLLLLIRELPFQSLVRKIAQYFKLILXFKNHSVLALQEIPEVYLVGLLQGNNLCAIQAKRVSIMPKGIHLARRTPG

SEQ ID NO: 6661 - protein, 78 aa, Zea mays
  Clone ID: TF_LIB4742-078-R1-K1-H5.pep
MAGKGKAIGSGAPKKATARSSKGGLQFPGGRIPRFLKGGKHAQRVGPGAPVYLAGGLENLAAEGLELAGNAARDNKKT

SEQ ID NO: 6662 - protein, 30 aa, Zea mays
  Clone ID: TF_LIB4730-056-R1-K1-C4.pep
VYPDMARSSRAMSIMKYFISDISEKLGWHA

SEQ ID NO: 6663 - protein, 96 aa, Zea mays
  Clone ID: TF_LIB4742-096-Q1-K1-A6.pep
MDSTGTGAGGKGKKGAAGRKVGGPRKTRIIPRHVLLAIRNDEELGKLLGGVTIAHGGVLPNINPVLLPKKTAEKASSGGSKEAKSPKKAAKSPKKA

SEQ ID NO: 6664 - protein, 98 aa, Zea mays
  Clone ID: TF_LIB3088-004-Q1-K1-E10.6C0.pep
NIFTAHHRFPSLLLLSSRKCERYSWRPSRRRSRRRRSCRSRSPRRSRLRRTRPPRGRSPRRRSGYLRASPPARRAATRRVGRRRRRAWRPTRSTSSRS

SEQ ID NO: 6665 - protein, 96 aa, Zea mays
  unsure (1)..(96): unsure at all Xaa locations
  Clone ID: TF_LIB3159-018-Q1-K1-C12.pep
MDVSGASGLAYNGAAGRLACWPTNKSVSRSSKAGLYFPVSRVWRYLKKGRFAQRVCTGAPVYLAAVLEYLAAEVLDLVCYAARXDNMKTRIIPRHV

SEQ ID NO: 6666 - protein, 130 aa, Zea mays
  unsure (1)..(130): unsure at all Xaa locations
  Clone ID: TF_LIB4740-040-R1-K1-C7.pep
GILAYDDGYNYTETYMMYIFYVLHDVHGAIGCWSTGMLIMSFLINDIFENVAADAMKLARYNXRPHITLREIQTSXRLGLTGEFAKHAVYEGTKAVTKFTSFYDPCDGHVRAGGRRGSADVILIAMDDDD

SEQ ID NO: 6667 - protein, 154 aa, Zea mays
  Clone ID: TF_ZmC697_49.pep
AYETKPMGKNTLESLHFVTATQDFCHDQQQLADTPDPSAAKSVEGAALPLERVDDVHGGDGLTAGEKGRREAHLGAHLRGDPRRAQDLPRERHPRRRHLHGARPPQDRHRHGRRLRPQAPGSHPLRIRRLRGATAAGGRGKSLGSRSRNREYSG

SEQ ID NO: 6668 - protein, 128 aa, Zea mays
  unsure (1)..(128): unsure at all Xaa locations
  Clone ID: TF_LIB4742-047-R1-K1-H7.pep
MAPKAEKKTAANKPAQDESAADKGPWVKKTYGQKRLPVXSQCGKEGVDENGETKADIPVDTYKIYLFEGLKQDHPDICLSSKGMSILNSFLDDVFHKFAWDGAKLARYXKNPTIPSLQIHTSVRLVLP

SEQ ID NO: 6669 - protein, 131 aa, Zea mays
  Clone ID: TF_LIB4975-026-R1-K1-H6.pep
NHSDHLLAFLPIRSPLRNQNPNSPRIDGAQGREETRGEEAGGGGARGREGARREEAEGGEAGPRWQVRCQGRRRGQEGQEEGQEERGDLRDRHLQGAVSGAPGLWHLLFFFFSPALPHYCYVFSASLLIAF

SEQ ID NO: 6670 - protein, 128 aa, Zea mays
  unsure (1)..(128): unsure at all Xaa locations
  Clone ID: TF_LIB4669-008-R1-K1-F3.pep
SIGGKATTLQLATKAARKSAXATGVXRKPHRFRPGGGALREIRKYQKSTELLIRKLPFQRLVREIAQDFKTDLRFQSXSAVARLKEASEAYLVGLFEDTNLCAIHAKRVTIMPKEQPACPSAIRGEEA

SEQ ID NO: 6671 - protein, 53 aa, Zea mays
  Clone ID: TF_jC-zmXLIB3526060bc11b1.pep
GDIKAPRGRKARGPTKNSVSRSSMARAHLPVSRLGRYLKKGRYAQRVSTGAPV

SEQ ID NO: 6672 - protein, 84 aa, Zea mays
  Clone ID: TF_jC-zmXLIB3527P074Bh05d1.pep
RVLRQVHPGLGVSGHAIQVLDMMMADMFERLADEAARLSKATGKATLTCREVQSAVRLVLPRELVRHAISEGTKAISKYMSYAA

SEQ ID NO: 6673 - protein, 63 aa, Zea mays
  unsure (1)..(63): unsure at all Xaa locations
  Clone ID: TF_LIB5025-070-A1-XP1-F2.pep
MDASGAGSKAKKGAAGRKAGGPRKKSVSRSVKAGLQXPAGRIGRYLXKXRDXQRVATLPPPFI

SEQ ID NO: 6674 - protein, 138 aa, Zea mays
  unsure (1)..(138): unsure at all Xaa locations
  Clone ID: TF_LIB4764-066-R1-K1-A7.pep
MVVKGGKGLFAANTTECKSAEKDEGKKXPISHSSRDGLQFPVGRIHRQLKKRTQENGPDVATVPVYSAAILEYLTAEVLEXDGNASKDLKVNRITPXRHLQLGIPADNDMNTLIKSTIEXGGAIPNIHKLLIDKTSKE

SEQ ID NO: 6675 - protein, 89 aa, Zea mays
  unsure (1)..(89): unsure at all Xaa locations
  Clone ID: TF_LIB3070-010-Q1-N1-H2.pep
RSLDSGYKCEPKARDDRNACGPRKKSLTRSVEAELQISEWRICRYLLNVWYTQRVCNGASVYLADVLXYLADEVLVLICDSDIDDMMTR

SEQ ID NO: 6676 - protein, 167 aa, Zea mays
  Clone ID: TF_ZmC25865_2.pep
CRAYAPEALKSSGGSRQTSGIKCFFWKSSGKVCRKANSTSLERFLGSLTDAPNFLSFWARKSFQPPSQPLSPLLCVNLTTSTSTSLSAPASRLAIGRLRGDGAGAETVGLLHSAGRRGRLARRLRGQLLPWRLAASGLPRRLLRAGHRDSTKGLALCFARGSAARDC

SEQ ID NO: 6677 - protein, 97 aa, Zea mays
  unsure (1)..(97): unsure at all Xaa locations
  Clone ID: TF_LIB3150-029-Q1-N1-H11.pep
MSGRGKGGKGLGKGGAKRHRKVLRDNIQGITKPAIRRLAKKGGVKRISGLIYQETRGVLKNFFENLNRDPLTXNEQPPRKTVTAMDVVYTLKRQGRT

SEQ ID NO: 6678 - protein, 114 aa, Zea mays
  unsure (1)..(114): unsure at all Xaa locations
  Clone ID: TF_LIB3606-014-Q6-N6-G11.pep
PKGGRKWAPPPGGVKNPQRFPPGPVPFREIPKPQKSRELLLRKLPSHRLVGEFAQAFKPPLGFQSPPVPPLKEPPKGYLVGLFXDPPLCPPPPKRVPLMPKDIQLAPRIRGERP

SEQ ID NO: 6679 - protein, 93 aa, Zea mays
  unsure (1)..(93): unsure at all Xaa locations
  Clone ID: TF_LIB3088-050-Q1-K1-G10.pep
MSGRVKVGMGLIQGGAKRQLKVLRDNIHSITKPMIRRLVRMGGVKLIXGAYIXETRSVLKIFLENVIRDTVTYTEHARRMTDTVMYVVYALKR

SEQ ID NO: 6680 - protein, 136 aa, Zea mays
  unsure (1)..(136): unsure at all Xaa locations
  Clone ID: TF_LIB4975-003-R1-K1-H11.pep
VDRTCDRGKGKPATKSERCSSKAGLQLPVWAHLQETSRPPXYTEREGDVSAEYLSCDLDQLPDEGLYMSANXAPYNDNNRIVPHHIHLRLLNDEEVSKVLGTETIAIGVEKSNIHQNLLPIKADLQEHIESDSQEL

SEQ ID NO: 6681 - protein, 95 aa, Zea mays
  unsure (1)..(95): unsure at all Xaa locations
  Clone ID: TF_LIB4740-003-R1-K1-H7.pep
MGLRPQGLQNPRSTSASHHPRLRTDRSAPKPKRHAIRLRRPTSIYLFKVLXLLHTHLDIYHNDLPIMNSFMNDIYDKLELEYAKLSRYHTKHTIT

SEQ ID NO: 6682 - protein, 127 aa, Zea mays
  unsure (1)..(127): unsure at all Xaa locations
  Clone ID: TF_LIB4729-116-A1-K1-H12.pep
PGGRDHNNTRTRPDSPPPPAYLSASALPGRGKGGKGHGTRRARHSRHTQGACADNIQGITKPAISKLDRRGGVKRISGIIXEETTRALNIFLENAIRDAATYTEHARRKTVPATDAVYALQCQRRTL

SEQ ID NO: 6683 - protein, 87 aa, Zea mays
  Clone ID: TF_LIB3150-002-Q1-N1-C10.pep
WIEGTYQSQLIDSTPPKTAELKHNHAERVGAGARAYLYAVLEHIAAEVLELAGNADRDNRKNRIVPCHIQLAVRNDEELSRLLCTVT

SEQ ID NO: 6684 - protein, 85 aa, Zea mays
  Clone ID: TF_jC-zmXLIB3526089bg07a1.pep
IPPARKNGFVSFPRPFRPVLKGCSRNNEVWKFLKNSKLCLKNLFQPLRRPFFNLGLFHPTNFWPQNFVSYFSGFNPLNQVIFSGG

SEQ ID NO: 6685 - protein, 38 aa, Zea mays
  Clone ID: TF_LIB3205-052-P1-N1-G12.pep
AYLDGLFKDTNLCAIHVKRVSIMPKNIQLASSTCGKVT

SEQ ID NO: 6686 - protein, 96 aa, Zea mays
  Clone ID: TF_LIB3116-028-P1-K1-C8.pep
MVGTKQTVGKSTEGKVPRKQFATKVARRFAPTTGGGKKLNRYRPETVAFRGIRRFKKSTELLIRKLPFQRLVREIAQDLKTDLRFQSHAGLALQEA

SEQ ID NO: 6687 - protein, 127 aa, Zea mays
  unsure (1)..(127): unsure at all Xaa locations
  Clone ID: TF_LIB4730-068-R1-K1-B4.pep
LPKESPYLCCLLRKRERLVTVIRLCHVRATGGKGLDKXGAKRQRRGLRDNIQSITNPSIRTLSRRLEVKRIWALIYXETRSVLKIFLYNVIRYADTYTEHARRMTVTDMDVAYALKRYGRTLYSFCS

SEQ ID NO: 6688 - protein, 100 aa, Zea mays
  unsure (1)..(100): unsure at all Xaa locations
  Clone ID: TF_LIB3608-053-Q6-N6-A2.pep
KNRPASCPGTVALPEIRKSPKSTELLFLKLPLQXFVQEIAQDFKRDLGFQSSAVAGLQKPPKAFLVGLFKNTNLWAIHAKRVPLMPKDIQLAPRIRGQRA

SEQ ID NO: 6689 - protein, 72 aa, Zea mays
  Clone ID: TF_ZmC653_38.pep
MARTKQTARKSTGGVKKPHRFRPGTVAALQEAAEAYLVGLFEDTNLCAIHAKRVTIMPKDIQLARRIRGERA

SEQ ID NO: 6690 - protein, 137 aa, Zea mays
  Clone ID: TF_ZmC697_108.pep
MVKFLKPGKAVILLQGRFAGRKAVIVRVFEEGTRDRPYGHCLVAGLAKYPKKVIRKDSAKKTAKKSRVKCFIKLVNFTHLMPTRYTLDVDFKDVATGGPDALSTHDKKVAACKTAKARLEERFKTGKNRWFFTKLRF

SEQ ID NO: 6691 - protein, 89 aa, Zea mays
  unsure (1)..(89): unsure at all Xaa locations
  Clone ID: TF_LIB3078-019-Q1-K1-H11.pep
HSFGHTRAIARLLKAAKYSELMISCVPGYIAAFLEYLIAEVLELAGNSTRDNNNTRIVPRHIQLSVRNDYELTKLLXGATITRRCIMPN

SEQ ID NO: 6692 - protein, 129 aa, Zea mays
  unsure (1)..(129): unsure at all Xaa locations
  Clone ID: TF_LIB3088-044-Q1-K1-D2.pep
RGAWYSQCVITGTCVYLXSILKYLAAYVMELAGNAARDNMKTLIIPRHVLVTIRIDYELGXLLASVTIFHRGVLGNIQCVLMSKNAAEKAVSAVSKEPKCPKKGAISNKKAYKVGTVFALCAVACSRLD

SEQ ID NO: 6693 - protein, 101 aa, Zea mays
  unsure (1)..(101): unsure at all Xaa locations
  Clone ID: TF_LIB3279-054-P1-K1-D6.pep
APKAEKNPAXEKKPSEEKAEKKPRAEKRVPSKEGCVTKGTKTAMKSVXSYKIYIFKELKQVHPVIGIXAKAMFIMNSLINDIFEKLAFEAAKLARYNKEPT

SEQ ID NO: 6694 - protein, 131 aa, Zea mays
  unsure (1)..(131): unsure at all Xaa locations
  Clone ID: TF_LIB4741-128-A1-K1-C2.pep
MAPKAEKKPREKKPAAEVQGGKDDRRLNAQAREPPVRLELLREGGRXQNTGKKNAPKSVETYQIYIFKVLKQVHPDIGISSKGMSIVNSFINDIXFDNLVVEADKLARYNKKPTITSREIQTSVRLVLPVE

SEQ ID NO: 6695 - protein, 83 aa, Zea mays
  unsure (1)..(83): unsure at all Xaa locations
  Clone ID: TF_LIB5027-045-B1-XP1-B5.pep
MSGRGKGGKGLGKGGAKRHRKVLRDNIXGLIYEETRGVLKIFLENVIRDAVTYTEHARRKTVTAMDVVYALKRQGRTLYGFGG

SEQ ID NO: 6696 - protein, 96 aa, Zea mays
  unsure (1)..(96): unsure at all Xaa locations
  Clone ID: TF_LIB3150-050-Q1-N1-E6.pep
MAANEAKGLLAAKTTAAKSDHKDKVNKVPISRSYGARLQLPVRRIHRQLKQQTHANARVRATXNRLLSSHSXYLTADVLELAANASKDLKVKRITP

SEQ ID NO: 6697 - protein, 83 aa, Zea mays
  Clone ID: TF_LIB3158-017-Q1-K1-G9.pep
MARTKQTARKSTGGKAPRKQLATKAARKSAPTTGGVKKPHRYRPGTVALREIRKYQKSTELLIRKLPFQRLVREIAQDFKTDL

SEQ ID NO: 6698 - protein, 133 aa, Zea mays
  Clone ID: TF_LIB3600-027-Q6-K6-A5.pep
MRGSNRHATLVESVACQHSYFTVQSNPIHPPVRSGGDRQPAAVMSGRGKGGKGGGGGGAKRHRKVLRDNIQGITKPGIRRLARRGGVKRISGLIYEETRGVLKIFLKNGMRDSVTYMEDDRCKNVSDMDEVWG

SEQ ID NO: 6699 - protein, 106 aa, Zea mays
  unsure (1)..(106): unsure at all Xaa locations
  Clone ID: TF_LIB4740-069-R1-K1-C9.pep
MSRSSKAGLQVPVGRIARILKVGRDAXRLTAVAPVYLTGALKYIAAEVLPLAGNTAXRHQEDADEGTRHIQVDVTDDEEVSRLLRTGTISSGGVLPNMTQPGGEPD

SEQ ID NO: 6700 - protein, 92 aa, Zea mays
  unsure (1)..(92): unsure at all Xaa locations
  Clone ID: TF_LIB4976-052-A1-K1-H6.pep
MTVAQTSPIRCCRDNIQGITKPAIRRLARRGDEKRISRLIYEETRGALPSFLXNDIRDDVTYTEHARRMTVTAMYAFYVLKGLGRTLYGFYG

SEQ ID NO: 6701 - protein, 110 aa, Zea mays
  unsure (1)..(110): unsure at all Xaa locations
  Clone ID: TF_LIB3088-044-Q1-K1-B10.pep
DDPIANTAPSAKNSNAAKPITACKSAFTDYGKGXRGAGRRSRRAVQTYNIYIFKALXQVHANINIFYNVMCIMNYLINDIFQKLAVEAVKLTRYNKKLTITSREIQIFLR

SEQ ID NO: 6702 - protein, 109 aa, Zea mays
  Clone ID: TF_700613664H1.pep
AETKPAEQNPTDETVEKKRKAANRVPRMDCRKNYVDAHCKYSVTTYEIYIINSVMHVHADIGISSNDMSIMNSFINDIYEKLAVEADILARYNKMLTITSREIQTSVRL

SEQ ID NO: 6703 - protein, 104 aa, Zea mays
  unsure (1)..(104): unsure at all Xaa locations
  Clone ID: TF_LIB3600-058-Q1-N6-B8.pep
MSGCGKGGKGLGKXGSKRXHSEGVHDNMQGIAKPVIXSLVRRGGVKRILGLMYEETLGVLNIFLENVIRDAVTYTEHALRKPVTAMDVVYALERQGGTLYGLGG

SEQ ID NO: 6704 - protein, 110 aa, Zea mays
  unsure (1)..(110): unsure at all Xaa locations
  Clone ID: TF_LIB4740-021-Q1-K1-A12.pep
PICQDPGLGRGAKTKAATFDVTYSIYFLTALKELHSKIWISAKCMTIMNSLINDFFEKLMAVYNMLSRINXMLIMTYLQIHTXKHLVFPGKLAEHAVCDGTNGATNLIYC

SEQ ID NO: 6705 - protein, 101 aa, Zea mays
  Clone ID: TF_LIB4965-006-R1-XP1-E12.pep
MAPKAEKKPAEKKPAAEEKAEKTTAGKKPKAEKRLPASKSSGKEGGEKKGKKKAKKSVETYKKPTITSREIQTSVRLVLPGELAKHAVSEGTKAVTKFTSN

SEQ ID NO: 6706 - protein, 156 aa, Zea mays
  unsure (1)..(156): unsure at all Xaa locations
  Clone ID: TF_LIB5045-035-B2-K1-C4.pep
GTSRPAGPGFRPPTAAGFLSSRPSRAAGAVLCKGLAARERAALPLSGLGKASSCLDRHGQDDDHTTAGLNKAHRYRPGTVALREIRKYQKSTELLIRKLPFQRLVREIAQDFKTDLRFQSSXAALALQEAAEAYLVGLPEDPHLRAIHDQRVTIMP

SEQ ID NO: 6707 - protein, 118 aa, Zea mays
  unsure (1)..(118): unsure at all Xaa locations
  Clone ID: TF_LIB3070-014-Q1-N1-C4.pep
LRWPQGGKKPSANKPAEEEPATDNAENASAXKKPNAEKRLPAGKFVAKEGGEGMTGTKKANNSVVTYKIYIFKVLKQVHLDIGILTNAMSIMNSFINDIFKKLAVESGKLARYNKKPT

SEQ ID NO: 6708 - protein, 136 aa, Zea mays
  unsure (1)..(136): unsure at all Xaa locations
  Clone ID: TF_LIB4766-069-R1-K1-H2.pep
DPPAAKPAAKKPAEEEPAAPAEKAPAGKKPKAEKRPPAGKPAGKEGGGDKKGRKKAKKSGETXKTXXXKGXKQGHPDXGTXXKARAXXNXHSNDXXEKPAGEAAKXARDNKKPTXTXRENQTXXRPXQPGEXAKHA

SEQ ID NO: 6709 - protein, 110 aa, Zea mays
  Clone ID: TF_LIB148-064-Q1-E1-B9.pep
MPRAGKVVSRSVVGGDRNRREPTLIRIGQPQASTTAKSSTSAKPHRYRPGTRALMEIRKFQKSTDLLIRKLPFARLVKEITQHYHHELRWQVEAVLALQTSAEDYLVGLL

SEQ ID NO: 6710 - protein, 77 aa, Zea mays
  Clone ID: TF_LIB4979-027-A1-K1-C12.pep
MKGKKSAQSYDIYLFIAVNSAHTKVGSYCKAMFFLNSFMSDIIERLAVEDINIARYRKRTTITSREITTSVRHFLTG

SEQ ID NO: 6711 - protein, 100 aa, Zea mays
  Clone ID: TF_LIB3357-029-P1-K1-B9.pep
PAAYKPAEEEPAADNAPAGKKPEAGNRVPACKAPAKESGEGNKGKKKGKKSAETYKIYIFKVLKQVHPDIWISSKAMCIMNSFINDIFEKLAAEADKLAR

SEQ ID NO: 6712 - protein, 132 aa, Zea mays
  unsure (1)..(132): unsure at all Xaa locations
  Clone ID: TF_LIB4185-031-R1-K1-A10.pep
PRKQLSTKPARKSAPTTVGVXKPHRNRPVPVALREIRKYHKSTEVLIRKLPFQQVVREIAXQDFKTDLRFQSHTVLALQEAAEAYLVGLFEDASLCAIPPKRVTIMPKDIQFVQQHPSRARVPFISEDLMNV

SEQ ID NO: 6713 - protein, 63 aa, Zea mays
  Clone ID: TF_cC-zmle1890011f01a1.pep
MNSFINDIFKKLRAESSSSARYSKKPTITSREIQTSVRMVLPGELRKHAVSEGTKAVTKFTSN

SEQ ID NO: 6714 - protein, 155 aa, Zea mays
  unsure (1)..(155): unsure at all Xaa locations
  Clone ID: TF_LIB4827-050-A1-N1-B2.pep
MQVAPPRTGRIEQRRMVRTNETARKSTGGKAPRKQLATKAERKSASTTGSVKKPHSXWPETAALNEIPXYKKSTELLIRKLPFQRLWRKISQDFEKDLGLYTHGVLHVQKALEAYLDYLFEDCKLCDIDANIVAIMRWDLQLLRRVGGHRLYPSF

SEQ ID NO: 6715 - protein, 107 aa, Zea mays
  Clone ID: TF_LIB4764-069-R1-K1-H1.pep
LEAGRDPPISTQPSPTPEKSPVLWSASERRRRCLGAARAARVWARGGVKRISGLIYEETRGVLKIFLENVIRDAVTYTEHARRKTVTAMDVVYALKRQGRTLYGFGG

SEQ ID NO: 6716 - protein, 144 aa, Zea mays
  Clone ID: TF_LIB4185-041-R1-K1-F4.pep
MSFNGPAGKAKKGPAGAKAGGPTKKSGLGSSRGGGQFPVNRGGGGLKKGRFPQGVGTGAPFFLPPVLGDPPAEGVEFPGNPARGNKKRGFFPGPGVFPIPKKKELGKLLGGVPLAPGGVLPKIPPGVLPKKGAQKGAKEPKKAL

SEQ ID NO: 6717 - protein, 149 aa, Zea mays
  unsure (1)..(149): unsure at all Xaa locations
  Clone ID: TF_LIB4171-011-R1-K1-G10.pep
LRKSGPAPRGVKKPPRFRPGPVAFREIPQFPKSPELLLRKLPLPRLGGEIAQNFKTDPWVPSSPVPPLQEAPQGDLVGFFXGPNLWALPPQRVPLMAQGIQVAPRLKGERARMLLCFPGFVKFEIGEGLYRFLSRHRGPMFLAKPFGCF

SEQ ID NO: 6718 - protein, 104 aa, Zea mays
  unsure (1)..(104): unsure at all Xaa locations
  Clone ID: TF_LIB4729-112-A1-K1-B10.pep
MTGRVKRAKGMGKAGAKRHRXVLRDNIHGITKAKIRRMDQAGAAVKRISGLIYXETRGGLKIFLENDIRERATYTEHARRKTVTAKDVVYALKRQGRTLYGIDG

SEQ ID NO: 6719 - protein, 73 aa, Zea mays
  unsure (1)..(73): unsure at all Xaa locations
  Clone ID: TF_LIB3279-014-P1-K1-D8.pep
RKLPFQRLGREIAPDWKKXXXFQSSAVAALQEAAEAYLVGLFEDTNLCAIHAKRVTIMPKDIQLARRIRGERA

SEQ ID NO: 6720 - protein, 116 aa, Zea mays
  unsure (1)..(116): unsure at all Xaa locations
  Clone ID: TF_LIB3279-192-Q1-N6-E9.pep
KGPYAKGVGTGAPVYLAAVLENLPPXVLELPGKSSRDNKKTRIIPPHVLLAIRKNKKLWKLFGGVTIAPGGVLPKKNPFFFPKKTAEKGSNGGNKKAKLPKKAPKSPKKAKTSCPE

SEQ ID NO: 6721 - protein, 71 aa, Zea mays
  unsure (1)..(71): unsure at all Xaa locations
  Clone ID: TF_LIB4730-090-Q1-K1-H2.pep
MARTKQTARKSTGGKAPRKQLATKXGALQEAAEAYLVGLFEDTNLCAIHAKRVTIMPKDIQLARXIRGERA

SEQ ID NO: 6722 - protein, 174 aa, Zea mays
  unsure (1)..(174): unsure at all Xaa locations
  Clone ID: TF_LIB4730-113-A1-K1-G1.pep
MPLYLDSPNPDAMAPKADNNSRHEKPAAEEKGEKTTAGKMPKSEKRLTASKSSGKEGAENNVKKKAQKSVXETYEIYLFXVLKQVHPVASSSPLMVMSIMNSFMNDIFQKVAGXDAKLGRHLWKPSINSRWIQTSVVPSSCPGLALPKTSFARYTHVVANVFSHGSLCTVHVIS

SEQ ID NO: 6723 - protein, 127 aa, Zea mays
  unsure (1)..(127): unsure at all Xaa locations
  Clone ID: TF_jC-zmX700240924b1.pep
MVVSEAGGKANNCADERTFGAPTKIFVSRPYMDRLQFPIRRVGRLLXKGRCPPMLITSAPFYISDSLDYLLNVVLALTGNPERDNKKTRIIPRHSALLHHQRHXLCKLISAVSISHSGFLPNIHTVL

SEQ ID NO: 6724 - protein, 155 aa, Zea mays
  unsure (1)..(155): unsure at all Xaa locations
  Clone ID: TF_LIB4729-048-R1-K1-H3.pep
MKNVAKCDTWCELQNPANHRVFERKLRPKPSGGGHVCLGVTPPRIKPTLSQIHRRLGSPIFAPSTESPMARTKQTARKSTGGKAPRKQLATKAARKSAPATGGVKNPHRFRPGTVALREIRKYQMSTELLIRKLPFQRLVREIAHDFKXTDXRFQ

SEQ ID NO: 6725 - protein, 95 aa, Zea mays
  unsure (1)..(95): unsure at all Xaa locations
  Clone ID: TF_cC-zmle189068a05d1.pep
PTRGRTRGRTPGLELSLFAARDNKKARVIPCHVLLAIRNDEELGKLLGGVTIAHGGVLPNINPVLLPKKTVEKAYSVGSKEAKSXKKAAKSPKKA

SEQ ID NO: 6726 - protein, 59 aa, Zea mays
  Clone ID: TF_LIB4762-010-R1-M1-E1.pep
EAGHKQGKNTPKESVEALKLWVYKVLKQLHPDIGIWPKGMSIMRSFMGLIFKNIQSKQT

SEQ ID NO: 6727 - protein, 148 aa, Zea mays
  Clone ID: TF_ZmC10394_1.pep
ICGRVGLARAGHLEEAWDFIEEMPGKVDAVMLGALLAACRKCKNTEVGERVINRIMKLEPSNSWNYVVSSKIYATSDKMDESARMIGLMRERGVNKTPGCSWVEVNGKVLEFYASTEPQHGAEDMYQLMGVLVNEMRLKGYVPNLDLV

SEQ ID NO: 6728 - protein, 106 aa, Zea mays
  unsure (1)..(106): unsure at all Xaa locations
  Clone ID: TF_LIB4762-024-R1-K1-G4.pep
MSARGKGGKGLGKGGANRHRKVLRDNIQGITNPSDPYVCARQGPAMKRMCGVLSTXETRGVLKIFLENVMRDAVTYTEHARRKTVTAMDVFYALKRQGRTLYGFGG

SEQ ID NO: 6729 - protein, 104 aa, Zea mays
  unsure (1)..(104): unsure at all Xaa locations
  Clone ID: TF_LIB4975-064-Q1-K1-A6.pep
ALPKTRTRLRPGTIALGEIRKYHNTTKLLXIQRLTFKRLRRXIAQDFKTELRDHCSDEAAMQEAVDVYLKRLLEDTNLCNIHVKMDTIMSKDIQIDSRIRDERA

SEQ ID NO: 6730 - protein, 123 aa, Zea mays
  unsure (1)..(123): unsure at all Xaa locations
  Clone ID: TF_LIB3357-030-P1-K1-H5.pep
MAPKGEYNPGANKPAEDEPAVDNTTVGKKSKAEKRVPVGKSVGKEGGXGNRCMNKGMKSVETYNIYIFKVLKQVHPDICISSKVISIMNSFINDIFXSWPARPSSFALYNKKXTITFREIHTF

SEQ ID NO: 6731 - protein, 73 aa, Zea mays
  Clone ID: TF_LIB4730-014-R1-K1-A9.pep
MARTKQTARKSTGGKAPRKQLATKAARKSAPATGGVKKPHRFRPGTVALRGRRKYHKSTELLIRKLPFQRLVR

SEQ ID NO: 6732 - protein, 175 aa, Zea mays
  unsure (1)..(175): unsure at all Xaa locations
  Clone ID: TF_LIB4762-019-Q1-K1-H6.pep
AAADRNAPHLPRPRTSPYPLAPKAYKKPAAKKPSAEEKAEKTTTGKKPKAEKRLPASNTSAKEGGKKKGKKKAKKSEETYKIYIFKALKQVHPDIRISSKAMSXIMNSFINHIFSQAWPARPPSLAPXNKKPTITSRRDPKPPYLLLPSPVEARQNTPHSRHNQGPANPSPTHQT

SEQ ID NO: 6733 - protein, 114 aa, Zea mays
  unsure (1)..(114): unsure at all Xaa locations
  Clone ID: TF_LIB3076-019-Q1-K1-A2.pep
HFHRRTTQAQCEGEIRRTDSTGTXAWAKAKNEAGQHKVRLPRKKPGSRSLKADLQFCVRRIGRYLKKGQYSQYVGTGAHDYLDAALEYLTAQDLELDGNADTDNMKTRIIPRHV

SEQ ID NO: 6734 - protein, 97 aa, Zea mays
  Clone ID: TF_LIB3357-024-P1-K1-E7.pep
MDSTGTGAGGKGKKGAAWRKVGGPRKKSVSRSVKANLQLHVGLIGRYLKKGRYAHRVNTNAPMYLDAVLEYLAAEVLVLYINAGSVNKMTSIITLHV

SEQ ID NO: 6735 - protein, 123 aa, Zea mays
  unsure (1)..(123): unsure at all Xaa locations
  Clone ID: TF_LIB4742-074-R1-K1-C10.pep
MVRSKQTALKFTGGKAPRXRSPPRWTWKSAPTTGGXKKPHMYWPETVVLRXIRMYHNSTVVLIGKVSFQCLIRDIAQDFKTHLVFQSHDALVLHEAGDGYLGGLFEDNNLCAVHADRVNIMPK

SEQ ID NO: 6736 - protein, 100 aa, Zea mays
  unsure (1)..(100): unsure at all Xaa locations
  Clone ID: TF_LIB4730-101-Q1-K1-H3.pep
MYVSVVGIKAKKGAAGRKAVVPXNNRCHASVKAGLQFPGGRXGRYLKKGRYAQRVGTGAHDYLVAVFEYLVCEVLELDDNAAKDNNERPSHRLRAHLCSV

SEQ ID NO: 6737 - protein, 122 aa, Zea mays
  unsure (1)..(122): unsure at all Xaa locations
  Clone ID: TF_LIB3357-059-P1-K1-H11.pep
PHQQQAKISRYPLVFVEKMSARAKGGKGLGKGGSXRHRKVLRDNIHGITKPAIRALAHRGGMKRICGLIYXETRSVLKIYLXENVIRDTXTYTEHARRKTVTAMDVVYALKRQGRTLYCFSR

SEQ ID NO: 6738 - protein, 107 aa, Zea mays
  Clone ID: TF_LIB3600-040-Q6-N6-C10.pep
APSPGGVKKPPPFPPGPVAGGEIPKSQKSRELFIPKLPFQPLVPKIAQDFKTDPRFQSSPVPPFQKAPKASLVGLFEDPNLWPIPPKGVPFMPKEIQFAPRIPGEGP

SEQ ID NO: 6739 - protein, 69 aa, Zea mays
  Clone ID: TF_jC-zmXLIB3526P037af07a1.pep
FKAMSIMNSFINDIFKKLAPKAAKLARYNKKPPFPSREIQTSVRLVLPGKFPKHPVSKGTKAVSKFPSS

SEQ ID NO: 6740 - protein, 127 aa, Zea mays
  unsure (1)..(127): unsure at all Xaa locations
  Clone ID: TF_LIB3355-039-P1-K1-D9.pep
MAPKAYKKPAANKPAEEDPAAEKTTAGKKPKAEKRVPAVKSAGKEGGXGKRGKKKGMKSVETYKIYIFKVLKQVHLDIGFLSKAMSIMNSFINDMFYMLLALSVKLXARYNKKSTHFVLVDPYLLAP

SEQ ID NO: 6741 - protein, 176 aa, Zea mays
  unsure (1)..(176): unsure at all Xaa locations
  Clone ID: TF_LIB4975-031-A1-K1-C6.pep
SRRRAGNRPVNAHCSSTSGSPVRNPPLPIPRWPLHLIKFARAPTGDEERRAIRTDGGERETRLGGTTRAGSEGAENKGKKNATKTVXTYXIYIFLVLXSRSWTLCISSKAMSIMNSFIIDIFDRLSAEVVXLVRYXKKPTITSRDIHTSERLVVPGELAEHAVSEGTHDDAKFASS

SEQ ID NO: 6742 - protein, 114 aa, Zea mays
  unsure (1)..(114): unsure at all Xaa locations
  Clone ID: TF_LIB3059-049-Q1-K1-G1.pep
MDANGASSKAKNGAAGRKAGGPRKKSVSRTVKDGMQFPVGRIGRYLKKGRYAQRVGTSAXCYLAVVLEYLADEVLELDVNASKDNKKTRIVPCHVLLAIANYVELGALLSGVTI

SEQ ID NO: 6743 - protein, 119 aa, Zea mays
  Clone ID: TF_LIB3637-242-Q6-K7-A5.pep
LCWGFPWGVSGHLLQGGQYPEHGDALAPGYLDVEQAYAPGEVLQLAENSERDNMKTPIRPLHIQVGVRNDEEQTKLVGGATSASGGGMPTMHYELPTKNAGSTKATTCKGRLLAALPTA

SEQ ID NO: 6744 - protein, 101 aa, Zea mays
  Clone ID: TF_LIB4758-112-R1-K1-B11.pep
QEQRRGGSARTASQTARTVHCRGKSPRKQLATKATRKSAPTTVGVKKPHRYRSVTVWLREIRKYQKSTELLIRKLPFQRLVREIAQDFEIYFFFQSPAGVA

SEQ ID NO: 6745 - protein, 102 aa, Zea mays
  unsure (1)..(102): unsure at all Xaa locations
  Clone ID: TF_uC-zmflteosinte93b03b1.pep
MTGRGKGGKGPGKGGAKRHRKVRRDNIQGITKPAIRRLARRGGEKRKTGHNYEETRGAPKNFLEKXIRDADTYTEHARRKTDTAKDSDYAPKRQGRTPNGIG

SEQ ID NO: 6746 - protein, 104 aa, Zea mays
  unsure (1)..(104): unsure at all Xaa locations
  Clone ID: TF_LIB3150-033-Q1-N1-C6.pep
AKQSASLPTVPMARTKQTARKFTGGKAPMKHLATKAARKFATATGXVKKPHRFRPDTVELLEIRMYQKSTDLLIHKLPFQHHVREIAQDFKTDLRLQSCVVAAL

SEQ ID NO: 6747 - protein, 127 aa, Zea mays
  unsure (1)..(127): unsure at all Xaa locations
  Clone ID: TF_LIB4730-060-R1-K1-F3.pep
PHPTLHSQPGGALAHEARTKQTARKXTGGKAPRKQXAXKAARKXAPATGGXKKPHRXRPGTGGRREXRKDQKSXEXXNRKXPXQRXXRENAQDXKXXXRXQTPAXAAXQEAAEAXXXGXXEDTNXSA

SEQ ID NO: 6748 - protein, 165 aa, Zea mays
  Clone ID: TF_LIB4729-057-R1-K1-C7.pep
TGRHQRAVGLYRTGHCRAPHGIQSSGRSAHGCHTDQRLASLSQTSRHAPTLRLSRGARPRRRVGTGCGTYLAVALKHLVAEGVTHRANQGKDNNMSRIMPQPCAPEDPNDEELGKLMNVLTIAHGGVLPNIHCVLLPKKARDKVDSGGSKEPKFPKKGAKYPKKA

SEQ ID NO: 6749 - protein, 113 aa, Zea mays
  Clone ID: TF_LIB3070-004-Q1-N1-G12.pep
MDSTGTGARGKGKKGAAVRKVSGPRQKSESRSVKAGLLLPVSRIDRNWRKGLNHKGLGAVPTIYLTVDLNSLALMFLKLAVKATGATRKPGFIPRHVLLATRTNRKLEKLLGG

SEQ ID NO: 6750 - protein, 69 aa, Zea mays
  Clone ID: TF_jC-zmshLIB3569P023a05a1.pep
FQRLVREIAQDFKTDLGFQSHAVLVLQEAAKAYLVGFFEETNLWGIHAKGVTIMPKDIQLAKRIRGKRG

SEQ ID NO: 6751 - protein, 79 aa, Zea mays
  unsure (1)..(79): unsure at all Xaa locations
  Clone ID: TF_LIB4730-112-A1-K1-A4.pep
AELLIRKLPFQRLVREIAQDFKTDLRFQSSAVAALQEAAEAYLVGLFEDTNLCAIXHARRVNIMPKDIQLARRIRGERA

SEQ ID NO: 6752 - protein, 70 aa, Zea mays
  unsure (1)..(70): unsure at all Xaa locations
  Clone ID: TF_700051888H1.pep
MDASAAIAGGKAKNGAAGRKAGGPRKKSVTRSVKAGLQFNVGRIVRYLKNGRYAQXXGTGAPVYMAAVLE

SEQ ID NO: 6753 - protein, 43 aa, Zea mays
  Clone ID: TF_LIB3180-060-P2-M1-H6.pep
MSSGGGRGKPKGSKAVSRSTKAGLQFPVGRIARYLKAGKYSER

SEQ ID NO: 6754 - protein, 96 aa, Zea mays
  unsure (1)..(96): unsure at all Xaa locations
  Clone ID: TF_LIB3279-051-P1-K1-C7.pep
GEEGHGRAQGRLADKNSVSRSCRAGLQFPVRRVGRYFIMGRFAYRVGTGAYVYLAGVLXYLEGDVLDLDGYAVIDNENTRMIPRHVLFSIRNDEEI

SEQ ID NO: 6755 - protein, 148 aa, Zea mays
  unsure (1)..(148): unsure at all Xaa locations
  Clone ID: TF_LIB3279-180-Q1-K6-D12.pep
GGAKKEASGRRSRRPRRRRRRRPQRSPPRSAPRPPARRAARREGGRGAFLFLETXKXXXXRGGRQXHPDTGXXXKAXXXXNPXXNDTXEKXAGEAAKXARGNKRPTXTXRENQTAXRRXXPGERAKHAXXEGTKAXTKXTSGAAPSGH

SEQ ID NO: 6756 - protein, 119 aa, Zea mays
  unsure (1)..(119): unsure at all Xaa locations
  Clone ID: TF_LIB4071-010-Q1-N1-D9.pep
SAQKETASDKAPTGKKLKSEYRVSAGKSLCQXGGEGKRGNKKGKKSVXETFKIFIFXVLKQVHPDVGISSKPMSIMNSFINDIFEKLAAQAAXLARYTNKPTISSREIQXSVRLVLNKE

SEQ ID NO: 6757 - protein, 88 aa, Zea mays
  unsure (1)..(88): unsure at all Xaa locations
  Clone ID: TF_LIB3607-024-Q6-K6-H11.pep
WAEPPAVRGDTKIMIRKLPFQRLVREIAQDFKTDLRFQSSAVAALFLASEAYLVGXGGDTYLCAIHAXRVTIMPKDMSFARRIRVVRA

SEQ ID NO: 6758 - protein, 54 aa, Zea mays
  Clone ID: TF_LIB3236-043-P1-N1-A7.pep
PRFHSSPVTALQKAAEAYLAGLFEETNLCAIHARRVSIMPKEIQLARRILGEGA

SEQ ID NO: 6759 - protein, 113 aa, Zea mays
  unsure (1)..(113): unsure at all Xaa locations
  Clone ID: TF_jC-zmXLIB3526P099bg02a1.pep
NVKKGAVGFYVFFSTKKTEKQPSRASLLIPVNRERGDLKKGRYPHCLCKEAPGYLDDGLEYLGDKVLELADNAARDNKKTRIILRXVLLGIRNDEEVGKLLAGITIAHGGVLP

SEQ ID NO: 6760 - protein, 96 aa, Zea mays
  unsure (1)..(96): unsure at all Xaa locations
  Clone ID: TF_700572124H1.pep
MALYDDKKPAAHNPADYDPAAVNTTAGNKPKADKRIPGVKSAGKDRGDGNRGETKCXKIVETCKIYIFKVLKQVQPDIGISSKDMSIMDSFINDIF

SEQ ID NO: 6761 - protein, 81 aa, Zea mays
  Clone ID: TF_LIB3078-007-Q1-K1-F11.pep
MMARTKHTARKSTVGKAPSMQLATKAARKSAPTTGGVNKPHRFKPGTVSLREILMYQKSTVLLIRKLPLQRLVREIAHDFK

SEQ ID NO: 6762 - protein, 74 aa, Zea mays
  Clone ID: TF_LIB3088-006-Q1-K1-F10.pep
VLDRERSPFFFFFFFFFFLFCFFFGGAGKLARYNKKPTITFREIQTSVRLVLPGELVKHAVFEGTKAVTKFTFF

SEQ ID NO: 6763 - protein, 147 aa, Zea mays
  Clone ID: TF_LIB4730-038-R1-K1-A2.pep
ASSYSPISATQRGPPSPILLSFLTTGADTPFRQHHEGVHLDPHRAGRDAGGKPLLRAVLTEAWEGGRCKNTGRKSEGTYKIYIFKVLKQVHPDIGISSKAMCMMNYFINDIFKKLAGEGDKLERYNKKPTITYREIQTYERLVLPAE

SEQ ID NO: 6764 - protein, 123 aa, Zea mays
  unsure (1)..(123): unsure at all Xaa locations
  Clone ID: TF_LIB4746-033-R2-K1-C10.pep
MRPTKPTAGEFSGGWAPRPKLVTEAPRKEAPTTDAEEKPHLHRPGTVAVLEIHKYHSKTELVIRXVPFQELGQRIAHDFKTDVRFQSHAVLALQESTEAYLDCLFNDTNLCAIHGERVTILPK

SEQ ID NO: 6765 - protein, 53 aa, Zea mays
  Clone ID: TF_LIB3600-054-Q2-K6-B9.pep
PRVRSAVAALQEAAEAYLVGLFEDTNLCAIHAKRVTIMPKDIQLARRIRGERA

SEQ ID NO: 6766 - protein, 146 aa, Zea mays
  unsure (1)..(146): unsure at all Xaa locations
  Clone ID: TF_LIB4729-090-Q1-K1-H12.pep
GRHAPALPRTSAPTPPPRTNHTARKSTXGKAPRNQLATKAARKSPPATXGXKKPHRFRPGTVALREIRKDQKSTELLIRKLPFQRLVREIAQDFKTDLRFQNSAGAELQEDAEAYLARLFQDTXNLCAIHDKRDTHTLPTDIQLAR

SEQ ID NO: 6767 - protein, 152 aa, Zea mays
  unsure (1)..(152): unsure at all Xaa locations
  Clone ID: TF_LIB3596-044-Q6-K6-B10.pep
MAPKAYMKPAANKPAXERSPRQTKRFNAPAGXQPMAEKCLPAGKSNEGVQGKTGKKQAKKSAETYKIYMFNVLKQVHPVIGISSKXMSIMNSFIYYIFEKLAAESAKLARYNKKPTITSHEIHTSVRLILPEELAMHARLRGTNAVTNFTSL

SEQ ID NO: 6768 - protein, 136 aa, Zea mays
  unsure (1)..(136): unsure at all Xaa locations
  Clone ID: TF_LIB3600-020-Q6-K6-G8.pep
MAVRGKAIGAGAAEEGNVKELQAGLQFPVRQRSPRILKGGGDAKRVGTGAPVYLADGLEYLADEVLELAGNPMRDNKKTRIVPRDMQLAVRNDEELTXLLGGATIWSGGVMPNIHHHLLPKKAGSIKAYTGTNDDN

SEQ ID NO: 6769 - protein, 108 aa, Zea mays
  Clone ID: TF_LIB3355-036-P1-K1-E9.pep
MARTKQTARKSTGGKAPRKQLATKAARKSAPTTGGVKKPHRFRPGTVALREIRTYQKSTELLIRKLPFQRLVREIAQDFKTDLRFQSHAVLALHEGREAYLVGLFEDT

SEQ ID NO: 6770 - protein, 99 aa, Zea mays
  Clone ID: TF_LIB3067-035-Q1-K1-C2.pep
HAFVHAFGHASVHASGKYQKSTELLIRKLPFQRLVREIAQDFKTDLRFQSSAVAALQEAGEAYLVGLFEDTNLCAIHAKRVTIMPKDIQLARRIRGQRA

SEQ ID NO: 6771 - protein, 193 aa, Zea mays
  unsure (1)..(193): unsure at all Xaa locations
  Clone ID: TF_LIB4975-058-Q1-K1-C4.pep
MARTKQTARKSTGGKAPRKQLATKAARKSAPATGGVKKPHRFRPGTVALREIRKYQKSTELLIRKLPSQRLVREIAQDFKTDLRFQSSAVSALQEAAEXYLVGLFEDTNLCAIHAKRVTIMPKDIQLARRIXWGEGLSIVYSVISARSEDVEVLGSGSFGLLSNHRGKLGCSLAVTYYHDAYEMAMNLCYQFS

SEQ ID NO: 6772 - protein, 136 aa, Zea mays
  Clone ID: TF_ZmC114_19.pep
MARTKQTARKSTGGKAPRKQLATKAARKSAPTTGGVKKPHRYRPGTVALREIRKYQKSTDLLIRKLPFQRLVREIAQDFKTDLRFQSHAVLALQEAAEAYLVGLFEDTNLCAIHAKRVTIMPKDIQLARRIRGERA

SEQ ID NO: 6773 - protein, 109 aa, Zea mays
  Clone ID: TF_LIB3597-054-Q1-K6-A2.pep
QKPHRFRPGTGALREIRTYQKSTELLIRKLPFQRLVREIAQDFKTDLRFQSSPVAALQEAFEAYLVGLFEDTNLCAIHAKRVTIMPKDIQLARRIRVERAYASRRRTSK

SEQ ID NO: 6774 - protein, 144 aa, Zea mays
  Clone ID: TF_uC-zmroteosinte048a10b1.pep
MAPKAEKKPVAKKPAEEEPATEKAEKAPAGKKPKVEKRLPAGKSAGKDGGEGKKGKKKAKKSVETYKIYIFKVLKQVHPDIGISSKAMSIMNSFINDIFEKLAAESAKLARYNKKPTVTFREIQTSVRLVLPGELAKHAVSEGT

SEQ ID NO: 6775 - protein, 165 aa, Zea mays
  Clone ID: TF_jC-zmXLIB3526088dc05b1.pep
SLQPTASSPPLSPSTPTTPIPDPLAPKAEKNPPEKKPAAEEKAEKTTAGKKPKSEKRLPASKSSGKEGGEKKGKKKAKKSVETYKIYIFKVLKQVHPDIGISSKAMSIMNSFINDIFEKLAGEAAKLARYNKKPTITSREIQTSVRLVLPGELAKHAVSEGTKAV

SEQ ID NO: 6776 - protein, 126 aa, Zea mays
  Clone ID: TF_ZmC653_30.pep
SGSTLASDFQFQILRSRKSAPATGGVKKPHRFRPGTVALREIRKYQKSTELLIRKLPFQRLVREIAQDFKTDLRFQSSAVAALQEAAEAYLVGLFEDTNLCAIHAKRVTIMPKDIQLARRIRGERA

SEQ ID NO: 6777 - protein, 93 aa, Zea mays
  Clone ID: TF_LIB3150-013-Q1-N1-B10.pep
MAPNAENKPADKKPAAEEKAEKTTARKKPKAEKRLPECKSFGKEGGQKNGKKNANKSVQTYKIYIFKELNHVHPDIGICYKAMYIMNSFINDI

SEQ ID NO: 6778 - protein, 160 aa, Zea mays
  unsure (1)..(160): unsure at all Xaa locations
  Clone ID: TF_LIB3150-013-Q1-N1-B10.F2.pep
SHLDPDIPEPDGAPRRRKKPAEKKPAAEEKAEKTTAXXKKPRAEKRLPESKSSGKEGGEKKGKKKANKSVETYKIYIFKVLKQVHPDIGICSKAMSIMNSFINDIFEKLAGEAGKLARYNKKPTITCREIQTSVRLVLPGELAKNAVSEGIQGVTKFTTN

SEQ ID NO: 6779 - protein, 156 aa, Zea mays
  Clone ID: TF_LIB4979-052-R1-K1-E6.pep
RNLQSPQKSLAESFHPHSLDGPHEAYGRRKSTGGKEPRKQLATKGARKSAPATGGVKKPHRFRPGTVELREIRMYQKSTELLIRKLPFQRLVREIAQDFKIDLRFQSSAVSALQEADEDYLVGLFEDTNLCAIHAKRVTVMPKDIQVARRIRGERA

SEQ ID NO: 6780 - protein, 174 aa, Zea mays
  unsure (1)..(174): unsure at all Xaa locations
  Clone ID: TF_LIB5045-063-Q1-K1-C9.pep
MARTKQTARKSTGGKAPRKQLATKAARKSAPATGGVKKPHRFRPGTVALREIRKYQKSTELLIRKLPFQRLVREIAQDFKTDLRFQSSAVSALQEAAEAYLVGLFEDTNLCAIHAKRVTIMPKDIQLARRIXRGEGLSVIFSVISARSEDVEMCWCSLGYCRIIEGTGLFTAVT

SEQ ID NO: 6781 - protein, 138 aa, Zea mays
  Clone ID: TF_LIB5116-040-A1-PF1-C2.pep
MAPKAEKKPVAEKAEKTTAAKKTKAEKRPPASKEGGEKKGKKKSKKSVETYKIYIFKVLKQVHPDIGISSKAMSIMNSFINDIFEKLAGESAKLARYNKKPTITSREIQTSDRLVLPGELAKHAVSEGTKAVTKFTSS

SEQ ID NO: 6782 - protein, 159 aa, Zea mays
  Clone ID: TF_LIB5116-002-A1-PF1-D2.pep
TQIAAAPDLQEHTTTRAADPQSPMARTKQTARKSTGGKAPRKQLATEAARKSAPATGGVKKPHRFRPGTVALREIRKYQKSTELLIRKLPFQRLVREIAQDFKTDLRFQSSAVSALQEAAEAYLVGLFEDTNLCAIHAKRVTIMPKDIQLARRIRGERA

SEQ ID NO: 6783 - protein, 135 aa, Zea mays
  Clone ID: TF_LIB5116-019-A1-PF1-F5.pep
MAPKAAEKKPVEKTPAGKKPKAEKKVPASKEGGDKKGKKKAKKSVETYKIYIFKVLKQVHPDIGISSKAMSIMNSFINDIFEKLAGESAKLARYNKKPTITSREIQTSVRLVLPGELAKHAVSEGTKAVTKFTSA

SEQ ID NO: 6784 - protein, 138 aa, Zea mays
  Clone ID: TF_LIB5116-045-A1-PF1-H7.pep
MAPKAEKKPVAEKAEKTTAGKKTKAEKRPPASKEGGEKKGKKKNKKSVETYKIYIFKVLKQVHPDIGISSKAMSIMNSFINDIFEKLAGESAKLARYNKKPTITSREIQTSVRLVLPGELAKHAVSEGTKAVTKFTSS

SEQ ID NO: 6785 - protein, 147 aa, Zea mays
  Clone ID: TF_LIB5116-047-A1-PF1-H1.pep
MAGRKGGDRKKAVTRSVKAGLQFPVGRIGRYLKKGRYAQRVGSGAPVYLAAVLEYLAAEVLELAGNAAKDNKKTRIIPRHLLLAVRNDQELGKLLAGVTIAHGGVIPNINAVLLPKKSPAAAEKEAKSPKKKTSTKSPKKKTAATKE

SEQ ID NO: 6786 - protein, 148 aa, Zea mays
  Clone ID: TF_ZmC644467_1.pep
MAGRKGGDRKKAVTRSVKAGLQFPVGRIGRYLKKGRYAQRVGSGAPVYLAAVLEYLAAEVLELAGNAAKDNKKTRIIPRHLLLAVRNDQELGRLLAGVTIAHGGVIPNINSVLLPKKSPAAAEKEATKSPKKKTAAKSPKKKTAATKE

SEQ ID NO: 6787 - protein, 229 aa, Zea mays
  Clone ID: TF_ZmC369_149.pep
MYVVYLSVATVLSDRTVMVLIQPSYMFLCEKKKKKKKKKKKKKKKKKKKKKKTTGDHISSHFFPSDPPFATKTPTRPASMAPKAEKKPAAKKPAEEEPAAEKAPAGKKPKAEKRVPAGKSAAKEGGEGKRGKKKGKKSVETYKIYIFKVLKQVHPDIGISSKAMSIMNSFINDIFEKLAAEAAKLARYNKKPTITSREIQTSVRLVLPGELAKHAVSEGTKAVTKFTSA

SEQ ID NO: 6788 - protein, 98 aa, Zea mays
  unsure (1)..(98): unsure at all Xaa locations
  Clone ID: TF_LIB3356-022-P1-K1-H9.pep
MAPRADNKPAAKKPAEEEPAAPAEKAPAGKNPKAEKRFPAGKSAGMEGGVDMKGRXKAKKSVETYNIYIFNVLKQVHPDIVISFKAMSIINFINNDIF

SEQ ID NO: 6789 - protein, 141 aa, Zea mays
  unsure (1)..(141): unsure at all Xaa locations
  Clone ID: TF_LIB3227-024-P1-K1-G6.pep
ITSYFFPSDPAFATKTTTGGLSIAFKAQNKPLLTKPAEDEPAVXKAPARKKPIAENRVPAGKSAAKEGPEGKRRKKNGKKSAETYKIYIFNVLKQVHPDIAXSSQAMSIMNSFINDIFEKLASDAGKLARYNKKPTITFRR

SEQ ID NO: 6790 - protein, 237 aa, Zea mays
  Clone ID: TF_ZmC2879_6.pep
RTRRVWWLSPVDLVFFLSAFLLNEDVMNSAEDVVCMLSWFIFLFYLSIYNIYRRRFDMKRKKKKKKKKKKKKKKKKKKKKKKKKKKTPEILNPPRNPKKKPSILTRSRARTKKTGRKPTGGKAPRKKLATKGARKFAPATGGVKKPHRFRPGTVALRKIRKNQKSTELLIRKLPSQPLGRKIAQDFKTDLRFQSSVVSPLKKGVEANLPGLFCVRRLQIWAPSTQRGGGVSFGNEYA

SEQ ID NO: 6791 - protein, 84 aa, Zea mays
  unsure (1)..(84): unsure at all Xaa locations
  Clone ID: TF_LIB3227-014-P1-K1-B9.pep
IFKVLKQVHPVIGISSKGMFIMNSFINDIYDKLAVXAAKLARYNMKPTITSRXFQTSVRLVLPGELAKHAVSXGTKAVTKITSS

SEQ ID NO: 6792 - protein, 144 aa, Zea mays
  unsure (1)..(144): unsure at all Xaa locations
  Clone ID: TF_LIB4073-010-Q6-K1-H10.pep
PFPLLPGKRARSTGREPWHSTSRSERVGEGRRRGAARTQGSGGPREEVSXRGSVIGPGLQFPVRGGAXALPEEGPRYAQXASAPRRXXVYLXPPSLEYPSPLRXLELAGNAARDNKKTRIIPRRVLLAIRNDEELGKLLSGVAI

SEQ ID NO: 6793 - protein, 174 aa, Zea mays
  unsure (1)..(174): unsure at all Xaa locations
  Clone ID: TF_LIB4740-141-A1-K1-E12.pep
RLPPWRRTCCRLLALSLPCLPAVTAPAGSGYGAAPGVAALAEAAVAYATSETVPQQSVDEISLSLAVLRRRAPLRLLVFVLETHYEDEERDDLIRKLAFHGLVREIAQDFKIYLLFPTHAVXALQEAAEAYLVGINKDTNLCAIHAKRVTIMPKDIQLARRIRGERANPSSPGI

SEQ ID NO: 6794 - protein, 103 aa, Zea mays
  unsure (1)..(103): unsure at all Xaa locations
  Clone ID: TF_700380613H1.pep
PSDPPFATKTPTRPASIAFYFEFLSSVKIVAEDVPAADKAPAGKKPKXTKRVPAGKSAAKECGDGKRGKKKGKKSVETYKIYIFKVLKQVHPDIGISSKAMSI

SEQ ID NO: 6795 - protein, 87 aa, Zea mays
  Clone ID: TF_ZmC119_816.pep
ARGSPSAASGATSRRAATRIVPRHVLLAIRNDEELGKLLTGVTIAHGGVLPNINPVLLPKKTAEKAASGGSKEAKSPKKAAKSPKKA

SEQ ID NO: 6796 - protein, 110 aa, Zea mays
  unsure (1)..(110): unsure at all Xaa locations
  Clone ID: TF_LIB4732-042-R1-K1-D11.pep
MARTKDTSSXSTVGKAPRXQLATXAAGKSAPDTGGVNKPHRFRPGTVALREIRKYQKSTELLIRKLPFQRLVREIAQDFKTDLRFQSSAVAALQEAAEAYLEGIFKDTNL

SEQ ID NO: 6797 - protein, 181 aa, Zea mays
  unsure (1)..(181): unsure at all Xaa locations
  Clone ID: TF_LIB4172-005-Q1-L1-A5.pep
IRHEAASSPSNSFRPGKEEIEQPRRGEDGFVRQQTARKSTGGKAPAQSSFATQWRRRIVLRPTXTGGVKKPHRYXRPGKVALRREPQVPRRARSLLIXKLPFQRLVREIAQDFKTDLRFQSHAVLPSKETRRAYLVGLFEDTNLCAIHAKRVTIMPKDIQLARRIRGERARRISRPAPVAA

SEQ ID NO: 6798 - protein, 105 aa, Zea mays
  Clone ID: TF_LIB5026-032-Q1-XP1-D12.pep
MDSTGTGAGGKGKKGAAGRKVGGPRKKSVSRSVKAGLQFPARRIGRYLKKGRYTQRVDTGAPVYLAADLEYLTAEVLELAGNAARDNKKTLVIPCHELLEIRNDK

SEQ ID NO: 6799 - protein, 128 aa, Zea mays
  unsure (1)..(128): unsure at all Xaa locations
  Clone ID: TF_LIB3245-532-P1-K1-A1.pep
MARTKQTARKSTGGKAPRKQLATKAARKSAPATGGVKKPHRFRPGTVALREIRKYQKSTELLIRKLPFQRLVREIAQDFKTDLRFQSSAVFALHEGADAYLGWLLQDTKPLALPAKRVTIXMPKDIQL

SEQ ID NO: 6800 - protein, 135 aa, Zea mays
  Clone ID: TF_LIB4185-042-R1-K1-H6.pep
EPAAPAEKAPPGKKPKAEKRLPAGKSPGKEGGVSKKGRKKAKKSVETSKIYIFKVLKQVHPDIGISSKAMSIMNSFINDIFEKLAGEGAKFARYNKKPPLPSREIQTSVRLVLPGELAKHPVSEGPKAVPKFPSS

SEQ ID NO: 6801 - protein, 150 aa, Zea mays
  unsure (1)..(150): unsure at all Xaa locations
  Clone ID: TF_ZmC838_10.pep
LIHSWKADSCLESFFAVPRARTKQTAGKSTGGKAPRKQLATKVARRSAPATGGVKKPHRFRPGTVALREIRKYQKSTELLIRKLPFQGLVREIAQDLKTDLRFQSSAVAGLKEAAEAYLGGLFEDTNLCAIHAKRVTIMPKDIQFARXIR

SEQ ID NO: 6802 - protein, 136 aa, Zea mays
  Clone ID: TF_LIB4570-006-R1-K1-G2.pep
MARTKQTARKSTGGKAPRKQLATKAARKSAPTTGGVKKPHRYRPGTVALREIRKYQKSTELLIRKLPFQRLVREIAQDFKTDLRFQSHAVLALQEAAEAYLVGLFEDTNLCAIHAKRVTIMPKDIQLARRIRGERA

SEQ ID NO: 6803 - protein, 150 aa, Zea mays
  Clone ID: TF_ZmC369_101.pep
MAPKAEKKPAAKKPAEEEPATEKAEKAPAGKKPKAEKRLPAGKSGAGEGKKGKKKAKKSVETYKIYIFKVLKQVHPDIGISSKAMSIMNSFINDIFEKLAAEAAKLARYNKKPTITSREIQTSVRLVLPGELAKHAVSEGTKAVTKFTSS

SEQ ID NO: 6804 - protein, 150 aa, Zea mays; identical to SEQ ID NO: 6803
  Clone ID: TF_ZmC369_148.pep

SEQ ID NO: 6805 - protein, 149 aa, Zea mays
  Clone ID: TF_ZmC369_50.pep
MAPKAEKKPAAKKPAEEEPAAAKAPAGKKPKAEKRLPAAKSSGKEGGDKKGKKKAKKSVETYKIYIFKVLKQVHPDIGISSKAMSIMNSFINDIFEKLAGEAAKLARYNKKPTITSREIQTSVRLVLPGELAKHAVSEGTKAVTKFTSN

SEQ ID NO: 6806 - protein, 150 aa, Zea mays; identical to SEQ ID NO: 6803
  Clone ID: TF_ZmC369_62.pep

SEQ ID NO: 6807 - protein, 150 aa, Zea mays; identical to SEQ ID NO: 6803
  Clone ID: TF_ZmC369_68.pep

SEQ ID NO: 6808 - protein, 150 aa, Zea mays
  Clone ID: TF_ZmC369_77.pep
MAPKAEKKPAAKKPVEEEPATEKAEKAPAGKKPKAEKRLPAGKSGAGEGKKGKKKAKKSVETYKIYIFKVLKQVHPDIGISSKAMSIMNSFINDIFEKLAAEAAKLARYNKKPTITSREIQTSVRLVLPGELAKHAVSEGTKAVTKFTSS

SEQ ID NO: 6809 - protein, 137 aa, Zea mays
  Clone ID: TF_ZmC369_89.pep
MAPKAEKKPAAKKPAEEEPAAAKAPAAKSSGKEGGDKKGKKKAKKSVETYKIYIFKVLKQVHPDIGISSKAMSIMNSFINDIFEKLAGEAAKLARYNKKPTITSREIQTSVRLVLPGELAKHAVSEGTKAVTKFTSS

SEQ ID NO: 6810 - protein, 95 aa, Zea mays
  unsure (1)..(95): unsure at all Xaa locations
  Clone ID: TF_LIB3078-055-Q1-K1-F9.pep
TRTRAVDLREIRRCQSSTELRTRNLPIRXLETEIALNCQTDLRFQYSTDCVLYEAVXAYLVGLFDDTNLCAIHSKRVTIMPTDIQLARRINGDKA

SEQ ID NO: 6811 - protein, 82 aa, Zea mays
  unsure (1)..(82): unsure at all Xaa locations
  Clone ID: TF_LIB3070-010-Q1-N1-G7.pep
MVYPTGLQFAVLRIHRQLMQKTXANGRVGTSAAVYSAVILQYLTAKDLELAVNASLDLNVKRITRRHLQFAILGDNELDTLI

SEQ ID NO: 6812 - protein, 78 aa, Zea mays
  Clone ID: TF_LIB3088-036-Q1-K1-H8.pep
MAPKAEKKPAAKKPEEEEPATEKAEKAPAGKKPKAEKRLPAGKSGAGEGKTGMKKAMKSVETYKIYIFKVLKQVHPDI

SEQ ID NO: 6813 - protein, 68 aa, Zea mays
  unsure (1)..(68): unsure at all Xaa locations
  Clone ID: TF_LIB3354-075-Q6-N6-E3.pep
KAMSIMNSFINDFFXKLGAESPKLGGYNKKPPIPSREIQTWGGLVLPGELPKHPVSEGPKAVTKFPPF

SEQ ID NO: 6814 - protein, 170 aa, Zea mays
  unsure (1)..(170): unsure at all Xaa locations
  Clone ID: TF_LIB4729-041-R1-K1-E9.pep
MQPSTESRWKESKEASGRKDGRPSKKXVTKTVKDGLHFPARRMDRYLQXRTATYTQCVGRPASTYAGVLDDLPGQGLDLAGNAGXDSQKTHMHPRHLLLAIHTDQRLAKLVAGWTIHHARRFANINPPLLAKKTEEKECIHRSKQGKQANKDGKHLNKDRYWRQIQPMHA

SEQ ID NO: 6815 - protein, 89 aa, Zea mays
  unsure (1)..(89): unsure at all Xaa locations
  Clone ID: TF_LIB4730-068-R1-K1-F4.pep
PHCTTATCRRPSRQAPKTTMDRTKQTARMSTGGKAPRKQLVTKAARKSAPTAGVVKKPHRLGGGTVTLRXIRKYQKRTELPIRKLPLQR

SEQ ID NO: 6816 - protein, 150 aa, Zea mays
  Clone ID: TF_LIB4974-021-Q1-K1-A5.pep
HVAYCSVSRGSAIILEVSSAVVNSIVLVSRCSLGRYVVDIYWDQKFMHLGHYGIHSDGPRAHQPRDILVFAGAEQNVAPSDSGLLCCHVRHSAQSQSLSSNILEHGSEVGSGHGIVSLGILIGHADSGDPSHGDLEASLGTPVRGFLGGT

SEQ ID NO: 6817 - protein, 113 aa, Zea mays
  Clone ID: TF_LIB3069-003-Q1-K1-G4.pep
AVSYNSQSIKLYQPFANSEEVIVPKAEKKPVFKIPSEDEPVAPADKAPAVNKPNADKLLPAGKSDGKECRVDKNVRKNAKKSVETYKIYIFKVLKHVHPDIGISSKAMSIMNS

SEQ ID NO: 6818 - protein, 158 aa, Zea mays
  unsure (1)..(158): unsure at all Xaa locations
  Clone ID: TF_LIB3279-200-Q1-K6-G11.pep
MDASGANNEANKGAAGRKASSPRKKSVTRSLKARLQLLVRRIRNYLNKDRFAHGVGTYLPVYLDYLLDYLVDXVLDLARDTAKDNMMTRIMLLHMLLDIHIDKELGKLMIGLTIVHGNILSNIHSMLLPKKAANNAGNARNNEPKCAKNGTKSSKKAY

SEQ ID NO: 6819 - protein, 147 aa, Zea mays
  unsure (1)..(147): unsure at all Xaa locations
  Clone ID: TF_LIB4762-006-R1-K1-G10.pep
MPLLASLRTLSPIPCLVVPTPTKPLTANAVHKRRPETAEANKPHHARPGLAXLSVIRFTTKSTELPLLKVPDQPLMRQIGQDVKTDLHFHSSAVSRLEEPAEAYLVVLLEDTNLCAIHAKRATILPKDIQLARRIRGDEGLSVTLHC

SEQ ID NO: 6820 - protein, 129 aa, Zea mays
  Clone ID: TF_LIB4300-007-R1-M1-G1.pep
RARSHKSSCSSSPQPNSSHSGETLGDVWRVARAYKGLGKGGAKRHRKVLRDNIQGITNPAIRRLARRGGDKRISGLIYEETRGVLKIFLENVMRDAVTYTEHARRKTVTVMDAVYAPKRQGRTLYGFGG

SEQ ID NO: 6821 - protein, 89 aa, Zea mays
  Clone ID: TF_jC-zmXLIB3527P083cd11d1.pep
VLKYLTAKVLELAASSSKGHKKTRLISSQVLLSIRTDQELSNLLSGVTIAHAGVLPTIILVLLPKKSADKAAPSETKSPKKAVKSPNKA

SEQ ID NO: 6822 - protein, 148 aa, Zea mays
  Clone ID: TF_LIB4762-143-Q1-K1-C1.pep
GESGLPLASRPGKGRGARGKVFGVGPAKKETSRISRAGFHFPVGRLARFLRGEKNREGVGPGPPGNLAAVLKNLGVGVLKFAGNPGGNKKKTRFGPRHFHFVGRNNEELPKLWGGAPFAGGGVLPNFLQIWLPKKVASSKARVNNNNN

SEQ ID NO: 6823 - protein, 118 aa, Zea mays
  Clone ID: TF_jC-zmX700345539a1.pep
MDATGTGAGGKAKKGAAGRKASGPRKKTVTRSEKAGLQFPAGRIGRYLKKGRYAQRVGSSAPVYLADDLEHIAAEDLELAGDSNNDTKKTRIVPSPGPLAIPNHKGAREAADRREPSP

SEQ ID NO: 6824 - protein, 55 aa, Zea mays
  Clone ID: TF_LIB3137-005-Q1-K1-A2.pep
DLRFQSHAVLALQEAAEAYLVGLFEDTNLCAIHAKRVTIMPKDIQLARRIRGERA

SEQ ID NO: 6825 - protein, 97 aa, Zea mays
  unsure (1)..(97): unsure at all Xaa locations
  Clone ID: TF_LIB3279-015-P1-K1-G10.pep
GKKGAAGRKVGRPKKKSVSRYEKACLQFPEGRIGRYLKKGRYAQRVCTGALVYLAGVLXYLSAXVLELAHNASRDNKKTRIISRHVLLAIRNDEELG

SEQ ID NO: 6826 - protein, 108 aa, Zea mays
  unsure (1)..(108): unsure at all Xaa locations
  Clone ID: TF_jC-zmXLIB3527P004bf03a1.pep
MQFATKAARKSAPTXSCVKKPHMYRLGTVALREIRMYQKSTELLILKLPFQRLVREIAQDFKTDLRFQSHAVLALQEAFEAYLVGLVEDTNLCAMHAKRVTMMPIDIQ

SEQ ID NO: 6827 - protein, 138 aa, Zea mays
  unsure (1)..(138): unsure at all Xaa locations
  Clone ID: TF_LIB3957-024-Q1-K6-B2.pep
PFQFQILRRAAPPALSQLSPMARTKQTARXKSTGGKAPRKQLATKAARKSAPATGGVKKPHRFRPGTVALREIRKYQKSTELLIRKLPFQRLVREIAQDFKTDLRFQSSDVTALEEAYXAYLVGLFEDTNLCRIHPNR

SEQ ID NO: 6828 - protein, 136 aa, Zea mays
  unsure (1)..(136): unsure at all Xaa locations
  Clone ID: TF_LIB3594-060-Q1-N6-D6.pep
MARTKQTARKSTGGKAPRKKLAPKGGRKWAPATGGVKKPHRFRPGTVAFREIPKYQKSPELLIRKLPFQRLVGEIAQNFKTALGFQSSPVPPLQKAPKGYLVGLFXDPNLWAIHAKRVPIMPKEIQLGPRIRGKRA

SEQ ID NO: 6829 - protein, 132 aa, Zea mays
  Clone ID: TF_LIB4071-005-Q1-N6-H8.pep
RKQLAPKAARKSAPAPGGVKKPPRFRPGPVALREIRKFPKSPGLFIRKLPFQRLVREIAQGFKTGLRFQSSAVAALQEAPEGFLVGLFEDPNLWAIPAKRVPFMPQDIQLAPRIRGERAFAVALLLFVVVMF

SEQ ID NO: 6830 - protein, 116 aa, Zea mays
  Clone ID: TF_LIB4766-057-R1-K1-E7.pep
LAKDGLHIPEGRIARFLKDGKYAERDGAGAPVYLAAVLEYLAAEVLELAGNAARDNKKTRIVPRHIQLAVRNDEELSRLLGTVTIASGGVMPNIHNLLLPKKDGGGSAKAADGDED

SEQ ID NO: 6831 - protein, 149 aa, Zea mays
  Clone ID: TF_ZmC369_116.pep
MAPKAEKKPAEKKPAAEEKAEKTTAGKKPKAEKRLPASKSSGKEGGEKKGKKKAKKSVETYKIYIFKVLKQVHPDIGISSKAMSIMNSFINDIFEKLAGEAAKLARYNKKPTITSREIQTSVRLVLPGELAKHAVSEGTKHAVTKFTSN

SEQ ID NO: 6832 - protein, 136 aa, Zea mays
  unsure (1)..(136): unsure at all Xaa locations
  Clone ID: TF_3341041.pep
KKPRAEKRVPSKEGGEKKGKKKAKKSVETYKIYIFKVFKQVHPDIGISSKAMSIMNSFINDILEKFAAEAAKFAXYNKKPTITSREIQTSVRFVFPGELAKHAVSEGTKAVTKFIFRPVLGCFCNNVEFVIYLGLC

SEQ ID NO: 6833 - protein, 150 aa, Zea mays
  Clone ID: TF_ZmC369_51.pep
MAPKAEKKPAAKKPAEEEPAAEKAPAGKKPKAEKRVPAGKSAAKEGGAGKRGKKKGKKSVETYKIYIFKVLKQVHPDIGISSKAMSIMNSFINDIFEKLAAEAAKLARYNKKPTITSREIQTSVRLVLPGELAKHAVSEGTKAVTKFTSA

SEQ ID NO: 6834 - protein, 153 aa, Zea mays
  Clone ID: TF_ZmC369_84.pep
MAPKADKKPAAKKSAEEEPATEKAEKAPAGKKPKAEKRLPAGKSAGKEGGGGKKGKKKAKKSVETYKIYIFKVLKQVHPDIGISSKAMSIMNSFINDIFEKLAAESAKLARYNKKPTITSREIQTSVRLVLPGELAKHAVSEGTKAVTKFTSS

SEQ ID NO: 6835 - protein, 146 aa, Zea mays
  Clone ID: TF_LIB5116-007-A1-PF1-C8.pep
MAGRKGGDRKKAVTRSVKAGLQFPVGRIGRYLKKGRYAQRVGSGAPVYLAAVLEYLAAEVLELAGNAAKDNKKTRIIPRHLLLAVRNDQELGRLLAGVTIAHGGVIPNINSVLLPKKSPAAAEKEARSPKKKTSTKSPKKKVAAKE

SEQ ID NO: 6836 - protein, 138 aa, Zea mays
  unsure (1)..(138): unsure at all Xaa locations
  Clone ID: TF_ZmC369_99.pep
MAPKAEKKPAEKKPAEEKAEKKPRAEKRVPSKEGGEKKGKKKAKKSVETYKIYIFKVLKQVHPDIGISSKAMSIMNSFINDIXEKLAAEAAKLXARYNKKPTITSREIQTSVRLVLPGELAKHAVSEGTKAVTKFTSS

SEQ ID NO: 6837 - protein, 123 aa, Zea mays
  unsure (1)..(123): unsure at all Xaa locations
  Clone ID: TF_LIB3279-011-P1-K1-H6.F2.pep
PDGRIGRSPKRAVTPSRVGPGAPVYLAPVLENLPPKGQERTGNPPKANKKTRIVPRHLLXATPNDQELGRLLSGVTIAHGGVIPNTNPVLLPKKAPEKAEKAEKTAPKSPKKATKSPKKATKA

SEQ ID NO: 6838 - protein, 93 aa, Zea mays
  Clone ID: TF_LIB3088-011-Q1-K1-D5.pep
ADAWAGGKAPWKHLATKAARESAPATGGVKKPHRFRPGTRALREIRKYQKSTELLIRKLALQRLVREIAHDFKTDLRLQSYAVDALHEAYQAY

SEQ ID NO: 6839 - protein, 96 aa, Zea mays
  unsure (1)..(96): unsure at all Xaa locations
  Clone ID: TF_LIB143-046-Q1-E1-C10.pep
LLAPKAEKSPAQKSAXENPRKSGSAEKAPAGKKPKXEKRLPAGKSAGKEAATKXEEAKKSVETYKIYIFKVLKXVHPDIGISSKAMSIMNSFINDI

SEQ ID NO: 6840 - protein, 109 aa, Zea mays
  unsure (1)..(109): unsure at all Xaa locations
  Clone ID: TF_uC-zmflteosinte78g07b1.pep
MDATGAGAGGKAKKGAAGRKAAGRXEAMTRCLKAGLQLRVGRIRRYLRKGRYAQRVGSGAPVYLAAVLEYLDAEVLELARNGGKDNKKTRISPRHVLLAIRNDEELGKL

SEQ ID NO: 6841 - protein, 136 aa, Zea mays
  Clone ID: TF_jC-zmshLIB3569P054h03b1.pep
MVRTKQAARKSTGGKALSKQLATKAERNSAPTTRGVKKPHRYRPGTVALRENRKYQKSTELLIRKKPFQHLVREIAQDLKTDLRFQSHAVLALKEATEAYLVGLCEDTNLCAIHPKRVTMMPKDIQVARRIRWERA

SEQ ID NO: 6842 - protein, 136 aa, Zea mays
  Clone ID: TF_LIB5116-021-A1-PF1-H10.pep
MAPKAAEKKPVEKTPAGKRPKAEKKVPASKEGGGDKKGKKKAKKSVETYKIYIFKVLKQVHPDIGISSKAMSIMNSFINDIFEKLAGESAKLARYNKKPTITSREIQTSVRLVLPGELAKHAVSEGTKAVTKFTSA

SEQ ID NO: 6843 - protein, 528 aa, Zea mays
  Clone ID: TF_ZmC19847_1.pep
RGRPGRDCRAHSFGLFSREFAHRLHLIGPREVRATSLVRAPEQSSLPDLHPSVIVRMKQMARKSMGGKAPRKQLATKGARKSETRTRGVKKAHQLRPGTAALCEIRQYKKSTGLLIRKLLFQRLVGHDATWFLLDIAFYSHNRFQEDSTSISGIPMSNTRSAEEKEVLATSPNRCLTNCFKLIQSCFSWDAVPYQQPWPPPHMQVEFGCGSADLCPIPWPFFTTIGTNEEIIDITSDDDKVDNVVDQLIDEQIAAVVFVPACMEATPNNVINTSKTVETFAAHQSPEYDSGLKDKDQRISFEDEISEGGQAEQSTPQQELWAMPPDTSDRETVERTTRSIEVEHFSQVESKHKMNSMSVEASEHVTITQIEKKPVQQVEITQELDSLPICSREHSNEALEGERTVQAGLEQECEVLGILSTITSDIFAIGLSPNQYTVYFYRNLMACMMLIRRRFLLSFGRSWDAVTYKQPWPPPVHVVILGDGFSVRLTPWQPLDTDIYSFPVNKPESSAGVFCIATESTQCAYDSQ

SEQ ID NO: 6844 - protein, 115 aa, Zea mays
  Clone ID: TF_LIB3076-004-Q1-K1-A11.pep
DATACRSPHVVTILLERLSTSCPDKSISRARDTDQWTCTWHLEQRGNGEEVELAWRKVLRAIGRSQESRSVKAVLQFPVGRIVRYLKNGRYSQCVCSGSRIYLDAVLEYLGDDDF

SEQ ID NO: 6845 - protein, 81 aa, Zea mays
  unsure (1)..(81): unsure at all Xaa locations
  Clone ID: TF_LIB3600-051-Q1-N6-A5.pep
SIARFIKAGKYDKKCHHGAPVYLNNVLEYLALQVRQLLGNAARHHHKSGIVTRHMQLAVRKAKNLCLVLGXVAITIAGVMP

SEQ ID NO: 6846 - protein, 108 aa, Zea mays
  Clone ID: TF_LIB3595-063-Q1-K6-B6.pep
TAHVSLARQIGASRRARSAWKTYKIYIFKVVKQVHPYILIYSNVLCIMNSFMNHIFNKLAADANKLERYNKKPTITYREIQTSVLLILPGELDEHTDCHGTKVRTMIS

SEQ ID NO: 6847 - protein, 100 aa, Zea mays
  Clone ID: TF_LIB4762-009-R1-K1-H2.pep
MARTKQTARKSTGGKAPRKQLATKAARKSAPATGGVKKPHRFRPGTVALREIRKYQKSTELLIRKLPFQRLVREIAQDFKTDLRFQSSAVAALQEAAEAY

SEQ ID NO: 6848 - protein, 104 aa, Zea mays
  unsure (1)..(104): unsure at all Xaa locations
  Clone ID: TF_LIB3597-038-Q1-K6-G10.pep
MLAYQGRQEKYAPTTHGVKKPHRFRPGTVVLRQIHTYTXDTGLLMPKFTFQRLICEITQDLKTDLRFQRHALLALHKAGQAYLVXLLQDTILXAIHSKRVTIMP

SEQ ID NO: 6849 - protein, 126 aa, Zea mays
  unsure (1)..(126): unsure at all Xaa locations
  Clone ID: TF_LIB3245-004-P1-N1-E8.pep
LIHSSPYAWGESCLGGXXXXKQTARKSTGGKAPRKQLATKAARKSAPATGGVKKPHRFRPGTVSLLEIRKYQKSTELLIRKLPLQRLVREIAQDFKTDLRFQSSAVTALQEAAEAYLVGLFETPTF

SEQ ID NO: 6850 - protein, 116 aa, Zea mays
  unsure (1)..(116): unsure at all Xaa locations
  Clone ID: TF_LIB4979-046-R1-K1-F12.pep
MARTKQTARKSTGGKAPRKQLATKAARKSAPATGGVKKPHRFRPGTVALREIRKYHKSTELLIRQLPFQRLVREIAQDFQTDLLFFFSPRAALQEVFQAYLVGLFXETNLCPILRP

SEQ ID NO: 6851 - protein, 153 aa, Zea mays
  Clone ID: TF_LIB4185-029-R1-K1-C8.pep
IPRRLGLPIFAPSTEFPMARPKQTARKLTGGKAPPKQLAPKAARKLAPATGGVKKPPRFRPGTVALREICKYQKSPELFIPKMPFQRLVREIAQDFKTDLRFQSSPVPALQEAPQASLVGLFEDTNLWAIPAKGVPIMPKDIQLARRIRGERA

SEQ ID NO: 6852 - protein, 131 aa, Zea mays
  unsure (1)..(131): unsure at all Xaa locations
  Clone ID: TF_LIB5025-020-A1-XP1-E2.pep
MARTKQTARKSTGGKAPRKQLATKAAHKSAPATGGVKKPHRFRPGTVALREIRKYQKSTELLIRKLPFQRLVREIAQDFKTDLRFQSSAVSALQDAAEVHLARLFEDTNLCAIHSKRVXLMPTDIHLARRI

SEQ ID NO: 6853 - protein, 160 aa, Zea mays
  unsure (1)..(160): unsure at all Xaa locations
  Clone ID: TF_LIB3279-174-P1-K6-D12.pep
KAEKKPAAKKPVEEEPAAEKTTAGKKPKAEKRVPAGKSVGKEGGEGKRGKKKGKKSVETYKIYIFKVLKQVHPDIGIFSKAMSIMNSFINDIFEKLAGEAAKLARYNKKPTITSREIQTSVRLMLLGELAKHAVXEGTMAVTKFTFFYACTLALCRLLLY

SEQ ID NO: 6854 - protein, 126 aa, Zea mays
  Clone ID: TF_LIB4975-062-Q1-K1-F6.pep
LCVGKGAGKHVTTKAERKSAPATGGVKKPHRFRPGTVALREIRKYHKSTELLIRKLPFQRLVREIAQDFKTDLRFQSSAVDALQEASEAYLVGLFEDTNLCAIHAKRVTIMPKDIQLARRIRGERA

SEQ ID NO: 6855 - protein, 136 aa, Zea mays
  Clone ID: TF_ZmC653_26.pep
MARTKQTARKSTGGKAPRKQLATKAARKSAPATGGVKRPHRFRPGTVALREIRKYQKSTELLIRKLPFQRLVREIAQDFKTDLRFQSSAVAALQEASEAYLVGLFEDTNLCAIHAKRVTIMPKDIQLARRIRGERA

SEQ ID NO: 6856 - protein, 129 aa, Zea mays
  Clone ID: TF_LIB3088-044-Q1-K1-A3.pep
MKCSSKSNTSRDAGMDGTAARANKDANKGTAGRTANKPRTKSVTRSLKARLQRIVRRMKKDLNKDRDAQGVRTYVAVYLDDVLEYVVDQVLDLADDNDKDNMMTRIMLLDMLMDKQLDEELGKLMIGDS

SEQ ID NO: 6857 - protein, 82 aa, Zea mays
  unsure (1)..(82): unsure at all Xaa locations
  Clone ID: TF_700021006H1.pep
SARATPKVPFFLSVWKRRSSSHGRERTGGKAKTGAAGRKAGGPTKKSVSRSSRAGLQFPVSRVGRYVKKGRYAQXLGTGAPV

SEQ ID NO: 6858 - protein, 148 aa, Zea mays
  unsure (1)..(148): unsure at all Xaa locations
  Clone ID: TF_LIB4730-058-R1-K1-H4.pep
MLHRHLCYHTTPMARTKKTARKSTGGKAPRKQLTTKAARKSAPTTGGVKKPHRFRPSTVVLQEIRKYQKSTELIIRKLFFQRLVHEIEQDFKTDLCFQSSAVAVLQEAXEDYLVGLFEDTNLCVIHAKRVIMMPNDIQLARRIXEERA

SEQ ID NO: 6859 - protein, 92 aa, Zea mays
  unsure (1)..(92): unsure at all Xaa locations
  Clone ID: TF_LIB3357-004-P1-K1-B2.pep
MAPKAEKKPAAKKPXAEEEPATEKVEKAPAGKKPKAEKRLPAGKSKEGGEGKKGKKKAKKSVETYKIYIFKVLKQVHPDIGISSRPCHHELL

SEQ ID NO: 6860 - protein, 81 aa, Zea mays
  Clone ID: TF_LIB4829-035-R1-N1-G5.pep
MARTKQTARKSTGGKAPRKQLATKAARKSAPTTGGVEKPHRYRPGTVVLREIRKKHKSPRLLIRKVPFHRVDREIRLECLM

SEQ ID NO: 6861 - protein, 104 aa, Zea mays
  Clone ID: TF_LIB4665-002-R1-N1-D12.pep
APAPGGVKEPQRFRPGTVALREIPQCQKSPQVLIRQLPFQRLVRELAQEFKPGLRFQSSPVPPLQEASQAYLVGLFQDTNLCAPHAKGVTLMPKGIQGRPPYPC

SEQ ID NO: 6862 - protein, 165 aa, Zea mays
  Clone ID: TF_LIB4766-036-R1-K1-A9.pep
MAAAALRSSARRLLRLTPAPSSALFAASRPTARVAPLSRPIAALSGGNNPISWKLRRFFSSNEKHLPAISDPEIEAAFKDLLAASWNELPDSLVAEAKKAVSKATDDNAGQEAFFPASHSSRGDHPIRSVRRDRRSGRDGSYQADCSQVHGREGSQEAACHQGCP

SEQ ID NO: 6863 - protein, 253 aa, Zea mays
  Clone ID: TF_ZmC460_2.pep
MKIQCDACEGAAATVVCCADEAALCARCDVEIHAANKLASKHQRLPLEALSASLPRCDVCQEKAAFIFCVEDRALFCRDCDEPIHVPGTLSGNHQRYLATGIRVGFASASSACSDACDAHDDSDHHAPPKAAVSSAAQQVPSPPQFLPQGWAVDELLQFSDCESSDKLHKESPLGFKELEWFTDIDLFHEQTPKAGRRLAEVPELSGTQAANDAAYYRPAKATATAVAGVRQSKKGRTEVTDDEDHLIVPDLV

SEQ ID NO: 6864 - protein, 119 aa, Zea mays
  unsure (1)..(119): unsure at all Xaa locations
  Clone ID: TF_LIB4729-095-Q1-K1-F11.pep
MEXRGKVDGAGAXKKATXRSSKAXLQIPVXRIARFLKAXKYAERVGAGAPXYLPPVLXYLPAEXLKLAXNAARNNKKTRIVPRHIPLPVRTHEELTQLLXAAPLPSAAPMPPIHQPLLP

SEQ ID NO: 6865 - protein, 129 aa, Zea mays
  Clone ID: TF_ZmC369_37.pep
MAPKAEKKPAAKKPAEEEPAAAKAPAGKKPKAEKRLPAAKSSGKEGGDKKGKKKAKKSVETYKIYIFKVLKQVHPDIGISSKAMSIMNSFINDIFEKLAGEAAKLARYNKKPKHAVSEGTKAVTKFTSS

SEQ ID NO: 6866 - protein, 119 aa, Zea mays
  unsure (1)..(119): unsure at all Xaa locations
  Clone ID: TF_jC-zmXLIB3526P100dc07a1.pep
MDSTGTGARGKGKKGAAGRKGGGPLKKAVXRSVKDGLQFPVGRIGRYLKKGRYAQRVGTGAPVYLADVLEYLPAEVLELAGNAARDNKKTRIISRHALVAIRNDKEPCEAVGRGAIAHR

SEQ ID NO: 6867 - protein, 146 aa, Zea mays
  Clone ID: TF_LIB4665-006-R1-M1-F6.pep
MAPKAEKKPAENNPAEDNAEKKPRADNRVPSKEGGENKGKKKAKKSVETYKIYIFKGLKQVHPDIGISSKAMCIMNSFINDIFEKLAAEAAKLARYNKKPTITSREIQTSGRLVLPGELAKHAVSEGTKAGTKVTSSYGAAAAARC

SEQ ID NO: 6868 - protein, 136 aa, Zea mays
  Clone ID: TF_LIB4764-037-R1-K1-D4.pep
MARTKQTGRKSTGGKAPRKQLATKAVRKSAPATGGVKKPHRFRPGTVALREIRKYQKSTEVLTRKLPFQRLGREIAQDFKTDLRFQSSAVSALQEAAEAYLVGLFEDTNLCAIHAKRVTIMPKDIQLGRRIRGERA

SEQ ID NO: 6869 - protein, 169 aa, Zea mays
  Clone ID: TF_LIB5026-055-A1-XP1-F7.pep
RQRQLSSSQLHPSSFPSSLRFLGGFLLPRPSPSPFSTLAGKQIGTKGDRKSAPTTGGVKKTHRYRPGTVALREIRKYQKSTELLIRKLPFQRLVREIAQDFKTDLRFQSHAELALQEAAEAYLVGLFEDTNLCAIHAKRVTIMPKDIQLARRIPRREGLIATSNIVTKT

SEQ ID NO: 6870 - protein, 136 aa, Zea mays
  Clone ID: TF_LIB3354-104-Q6-K2-B1.pep
MARTKHTVRKSTGGKAPRKQLATKAERKSAPTTGGVKKPHRYRPGTVALREIRKYQKSTELLIRKLPFQRLVREIAQDFKTDLRFQSHAVLALQEAAEAYLVGLLEDTNLWAIHAKRVTIMPKDIQLDRRIRGERS

SEQ ID NO: 6871 - protein, 136 aa, Zea mays
  unsure (1)..(136): unsure at all Xaa locations
  Clone ID: TF_LIB4666-020-R1-K1-G6.pep
MARTKQTARKSTGGKAPRKQLATKAARKSAPTTGGVKKPHRYRPGTVALREIRKYQKSTELLIRKLPFQRLVREIAQDFKTDLRFQSHAVLALQEAAEAYLVGLFEDTNLCAIHAKRVTIMPXDIQLAXRIPRERA

SEQ ID NO: 6872 - protein, 125 aa, Zea mays
  unsure (1)..(125): unsure at all Xaa locations
  Clone ID: TF_LIB4742-057-R1-K1-E4.pep
MAPKADKKPAAKKSAEEEPATEXGKKGKKKAKKSVETYKIYIFKVLKQVHPDIGISSKAMSIMNSFINDIFEKLAAESAKLARYNKKPTITSREIQTSVRLVLPGELAKHAVSEGTKAVTKFTSS

SEQ ID NO: 6873 - protein, 135 aa, Zea mays
  Clone ID: TF_ZmC519748_1.pep
MAPKAAEKKPVEKTPAGKKPKAEKKVPASKEGGDKKGKKKAKKSVETYKIYIFKVLKQVHPDIGISSKAMSIMNSFIYDIFEKLAGESAKLARYNKKPTITSREIQTSVRLVLPGELAKHAVSEGTKAVTKFTSS

SEQ ID NO: 6874 - protein, 136 aa, Zea mays
  Clone ID: TF_LIB4730-027-R1-K1-A5.pep
MARTKQTARKSTGGKAPRKQLATKAARKSAPATGGVKKPHRFRPGTVALREIRKYQKSTELLIRKLPFQRLVREIAQDFKTDLRFQSSTVAALQEASEAYLVGLFEDTNLCAIHAKRVTIMPKDIQLARRIRGERA

SEQ ID NO: 6875 - protein, 148 aa, Zea mays
  Clone ID: TF_ZmC369_106.pep
MAPKAEKKPAEKKPAAEEKAEKTTAGKKPKAEKRLPASKSSGKEGGEKKGKKKAKKSVETYKIYIFKVLKQVHPDIGISSKAMSIMNSFINDIFEKLAGEAAKLARYNKKPTITSREIQTSVRLVLPGELAKHAVSEGTKAVTKFTSN

SEQ ID NO: 6876 - protein, 148 aa, Zea mays; identical to SEQ ID NO: 6875
  Clone ID: TF_ZmC369_152.pep

SEQ ID NO: 6877 - protein, 148 aa, Zea mays; identical to SEQ ID NO: 6875
  Clone ID: TF_ZmC369_78.pep

SEQ ID NO: 6878 - protein, 129 aa, Zea mays
  unsure (1)..(129): unsure at all Xaa locations
  Clone ID: TF_LIB4975-071-A1-K1-F1.pep
RSPRRRSPRTEKAEKAPAGKKPKAEKRLPAGKSGAEEGKNGXSKKAKKSVESYKIYIFEVLKQVHPDIXGISSKVMYIMNSFINDIFEKLDVXAVKLDRYNKKPTIISLEIQISVRLVLPGELGKHAVS

SEQ ID NO: 6879 - protein, 69 aa, Zea mays
  Clone ID: TF_LIB3076-018-Q1-K1-E6.pep
MDATGTGTLLKANNVSAGRKAGRPMKKSVTRSVKAGLQFPVCRIGRYLKNGRYSQRVCSFAPVYLAVVL

SEQ ID NO: 6880 - protein, 82 aa, Zea mays
  Clone ID: TF_LIB3279-230-Q6-N6-E12.pep
ELPGNAARDNKKTCIISRHVLLGIRKKKELGKLLGGVTIAPGGVLPKINPVFLPKKTAEKGSSGGSKEAKLPKKAPKSPKKA

SEQ ID NO: 6881 - protein, 87 aa, Zea mays
  Clone ID: TF_LIB3608-007-Q1-N6-H1.pep
SFSFFKVLKQVPPAFGILSKAMSLMNSFINDIFEKLASKAPKFARFNKKPPIPSREIQILVGLVLPGELPKHPVSEGPKAVSKFSSS

SEQ ID NO: 6882 - protein, 125 aa, Zea mays
  unsure (1)..(125): unsure at all Xaa locations
  Clone ID: TF_uC-zmroteosinte022h10b1.pep
MARTKQTARXSTGGKAHRKQLATKAALKYAPTTGGVKKPHRYRPGTVALREIRTYHKSTELLIMKLPFQRLVREIAQDFQTXDLRFQSHAVLALHEAAEAYLVGLFXDTNLCAIHAKRVTIMPKD

SEQ ID NO: 6883 - protein, 150 aa, Zea mays
  unsure (1)..(150): unsure at all Xaa locations
  Clone ID: TF_ZmC2834_3.pep
GRRKTAEKPKKKLQFERSGGASTSATPERAXXXXXXXXXGGDSVKKTKPRHRWRPGTVALREIRKYQKSTEPLIPFAPFVRVVRELTNFVTNGKVERYTAEALLALQEAAEFHLIELFEMANLCAIHAKRVTIMQKDIQLARRIGGRRWA

SEQ ID NO: 6884 - protein, 135 aa, Zea mays
  Clone ID: TF_LIB4975-051-A1-K1-E8.pep
MMDIGKAIGSGAAKKATSRSSKAGLQCPVVRIARFLKGAKYAERVRAGAPVYLAAVLEYLAAEDLELAANAARDNKNTRIVPRHIQLAVRNDEELSRLLGTATIGSAGVPPNIHNLLLPKNAVGTSAKAADGDED

SEQ ID NO: 6885 - protein, 150 aa, Zea mays
  Clone ID: TF_ZmC369_39.pep
MAPKAEKKPAAKKPAEEEPAAEKTTAGKKPKAEKRVPAGKSAGKEGGEGKRGRKKGKKSVETYKIYIFKVLKQVHPDIGISSKAMSIMNSFINDIFEKLAGEAAKLARYNKKPTITSREIQTSVRLVLPGELAKHAVSEGTKAVTKFTSS

SEQ ID NO: 6886 - protein, 136 aa, Zea mays
  unsure (1)..(136): unsure at all Xaa locations
  Clone ID: TF_LIB4669-005-R1-K1-D3.pep
MARTKQTARKSTGGKAPRKQLATKAARKSAPATGGVKKPHRFRPGTVALREIRKYQKSTELLIRKLPFQRLVREIAQDFKTDLRFQSSAVSALQEAAEAYLVGLFEDTNLCAIHAKRVTIMPKDIQLARRIRXERA

SEQ ID NO: 6887 - protein, 136 aa, Zea mays; identical to SEQ ID NO: 6886
  unsure (1)..(136): unsure at all Xaa locations
  Clone ID: TF_LIB4669-006-R1-K1-G9.pep

SEQ ID NO: 6888 - protein, 136 aa, Zea mays
  Clone ID: TF_LIB4729-002-R1-K1-C10.pep
MARTKQTARKSTGGKAPRKQLATKAARKSAPATGGVKKPHRFRPGTVALREIRKYQKSTELLIRKLPFQRLVREIAQDFKTDLRFQSSAVSALQEAAEAYLVGLFEDTNLCAIHAKRVTIMPKDIQLARRIRGERA

SEQ ID NO: 6889 - protein, 136 aa, Zea mays; identical to SEQ ID NO: 6888
  Clone ID: TF_LIB4729-002-R1-K1-H10.pep

SEQ ID NO: 6890 - protein, 136 aa, Zea mays; identical to SEQ ID NO: 6888
  Clone ID: TF_LIB4729-040-R1-K1-C10.pep

SEQ ID NO: 6891 - protein, 136 aa, Zea mays; identical to SEQ ID NO: 6886
  unsure (1)..(136): unsure at all Xaa locations
  Clone ID: TF_LIB4729-041-R1-K1-D8.pep

SEQ ID NO: 6892 - protein, 136 aa, Zea mays; identical to SEQ ID NO: 6888
  Clone ID: TF_LIB4729-049-R1-K1-E2.pep

SEQ ID NO: 6893 - protein, 136 aa, Zea mays; identical to SEQ ID NO: 6888
  Clone ID: TF_LIB4762-025-R1-K1-B11.pep

SEQ ID NO: 6894 - protein, 136 aa, Zea mays
  Clone ID: TF_LIB5027-040-B1-XP1-A5.pep
MARTKQTSRKSTGGKAPRKQLATKAARKSAPATGGVKKPHRFRPGTVALREIRKYQKSTELLIRKLPFQRLVREIAQDFKTDLRFQSSAVSALQEAAEAYLVGLFEDTNLCAIHAKRVTIMPKDIQLARRIRGERA

SEQ ID NO: 6895 - protein, 136 aa, Zea mays; identical to SEQ ID NO: 6888
  Clone ID: TF_LIB5116-032-A1-PF1-F7.pep

SEQ ID NO: 6896 - protein, 136 aa, Zea mays; identical to SEQ ID NO: 6888
  Clone ID: TF_ZmC653_106.pep

SEQ ID NO: 6897 - protein, 136 aa, Zea mays; identical to SEQ ID NO: 6888
  Clone ID: TF_ZmC653_48.pep

SEQ ID NO: 6898 - protein, 136 aa, Zea mays; identical to SEQ ID NO: 6888
  Clone ID: TF_ZmC653_70.pep

SEQ ID NO: 6899 - protein, 136 aa, Zea mays; identical to SEQ ID NO: 6888
  Clone ID: TF_ZmC653_79.pep

SEQ ID NO: 6900 - protein, 136 aa, Zea mays; identical to SEQ ID NO: 6888
  Clone ID: TF_ZmC653_85.pep

SEQ ID NO: 6901 - protein, 136 aa, Zea mays; identical to SEQ ID NO: 6888
  Clone ID: TF_ZmC653_92.pep

SEQ ID NO: 6902 - protein, 136 aa, Zea mays; identical to SEQ ID NO: 6888
  Clone ID: TF_ZmC825079_1.pep

SEQ ID NO: 6903 - protein, 159 aa, Zea mays
  Clone ID: TF_LIB5116-061-A1-PF1-F4.pep
MDASATGAGAKAKKGAAGRKAGGPRKKSVTRSVKAGLQFPVGRIGRYLKNGRYAKRVGTGAPVYLAAVLEYLAAELLELAGNAAKDNKKSRIVPRHLLLAVRNDQELGRLLAGVTIAHGGVLPNINPVLLPKRTAEKEPKEGKSPKKVAKSPKKADKKA

SEQ ID NO: 6904 - protein, 164 aa, Zea mays
  unsure (1)..(164): unsure at all Xaa locations
  Clone ID: TF_LIB4730-094-Q1-K1-D12.pep
LSLAADARSKPSARLPTVPMDRTMHMERKSTGGKAPMKQLVTKAARKSASATCVVNKPHRFRPGTVALRXIRKNQKSTELLIHKLPFQCLERXIAQYFKTDLLFQSSAVAALQEASEDYLVGLXEDTNLCSIHTKRITIMPKDIQLVRRIRGERAYAVLSVHVE

SEQ ID NO: 6905 - protein, 96 aa, Zea mays
  unsure (1)..(96): unsure at all Xaa locations
  Clone ID: TF_LIB3356-007-P1-K1-D11.pep
MAPKAXKKPVAKKPAEEEPAVEKAPAGKKPKAEKRVPAGKSVARXGGEGKKGREKGKNSVETYKIYILKVLKQVHPDHGISFKXMVIMNSLINDIF

SEQ ID NO: 6906 - protein, 80 aa, Zea mays
  unsure (1)..(80): unsure at all Xaa locations
  Clone ID: TF_LIB5025-057-A1-XP1-H11.pep
GSQEKRTVPPQXGAANSCPRGRAQSKKPHRFRPGTELLREIRKYKNSSQLVIRKLPLQRLAREIAQNFKSDLRFQSSSGS

SEQ ID NO: 6907 - protein, 125 aa, Zea mays
  unsure (1)..(125): unsure at all Xaa locations
  Clone ID: TF_LIB4185-038-R1-K1-A7.pep
PGGKAPRKQLATKAGPKFAPSTGGVKKPPRFRPGTVALREIPQFPKSPELFIPKLPFQRLVREIAQDFKTDLRFQNFSVSPLQEAAXASPVGLFEDPNLWALPAKGVPLMAKDIQLAPRLPGERA

SEQ ID NO: 6908 - protein, 118 aa, Zea mays
  Clone ID: TF_ZmC653_24.pep
MARTKQTARKSTGGKAPRKQLATKAARKSAPATGGVKKPHRFRPGTVALREIRKYQKSTELLIRKLPFQRLVREIAQDFKTDLRFQSSAVAALQEAAKRVTIMPKDIQLARRIRGERA

SEQ ID NO: 6909 - protein, 136 aa, Zea mays
  Clone ID: TF_LIB5026-023-B1-XP1-G7.pep
MARTKQTARKSTGGKAPRKQLATKAARKSAPTTGGVKKPHRYRPGTVALREIRKYQKSTELLIRKLPFQRLVREIAQDFKTDLRFFFLAALPLQEAAEAYLVGLFEDTNLCAIHVKCVTIMPKDIQFARRIRAECA

SEQ ID NO: 6910 - protein, 135 aa, Zea mays
  unsure (1)..(135): unsure at all Xaa locations
  Clone ID: TF_9794541.pep
ARTKQTARKXTGGKAPRKQLATKAARKSAPATGGVKKPHRFRPGTVALREIRKYQKSTELLIRKLPFQRLVREIAQDFKTDLRFQSSAVAALQEASEAYLVGLFEDTNLCAIHAKRVTIMPKDIQLARRIRGERA

SEQ ID NO: 6911 - protein, 144 aa, Zea mays
  Clone ID: TF_LIB4730-042-R1-K1-G12.pep
MARTKQTARKSAGGKAPRKQLATKAARKSAPATGGVKKPHRFRPGTVALREIRKYQKSTELLIRKLPFQRLVREIAQDFKTDLRFQSSAVAALQEASEAYLVGLFEDTNLCAIHAKRVTIMPKDIQLARRIRGERSLASSRWRW

SEQ ID NO: 6912 - protein, 136 aa, Zea mays
  Clone ID: TF_LIB4975-022-R1-K1-H9.pep
MARTKQTARNSTDDKAPRKQLATKAARKSAPATGGVKKPHRFRPGTVALREIRKYQKSTELLIRKLPFQRLVREIAQDFKTDLRFQSSAVAALQEASEAYLVGLFEDTNLCAIHAKRVTIMPKDIQLARRIRGERA

SEQ ID NO: 6913 - protein, 136 aa, Zea mays
  Clone ID: TF_ZmC653_110.pep
MARTKQTARKSTGGKAPRKQLATKAARKSAPATGGVKKPHRFRPGTVALREIRKYQKSTELLIRKLPFQRLVREIAQDFKTDLRFQSSAVAALQEASEAYLVGLFEDTNLCAIHAKRVTIMPKDIQLARRIRGERA

SEQ ID NO: 6914 - protein, 136 aa, Zea mays; identical to SEQ ID NO: 6913
  Clone ID: TF_ZmC653_111.pep

SEQ ID NO: 6915 - protein, 155 aa, Zea mays
  Clone ID: TF_ZmC653_39.pep
QSLAADPRATQSASLPTVPMARTKQTARKSTGGKAPRKQLATKAARKSAPATGGVKKPHRFRPGTVALREIRKYQKSTELLIRKLPFQRLVREIAQDFKTDLRFQSSAVAALQEASEAYLVGLFEDTNLCAIHAKRVTIMPKDIQLARRIRGERA

SEQ ID NO: 6916 - protein, 136 aa, Zea mays; identical to SEQ ID NO: 6913
  Clone ID: TF_ZmC653_58.pep

SEQ ID NO: 6917 - protein, 136 aa, Zea mays; identical to SEQ ID NO: 6913
  Clone ID: TF_ZmC653_63.pep

SEQ ID NO: 6918 - protein, 155 aa, Zea mays
  Clone ID: TF_ZmC653_67.pep
QSLAADPRAKQSASLPTVPMARTKQTARKSTGGKAPRKQLATKAARKSAPATGGVKKPHRFRPGTVALREIRKYQKSTELLIRKLPFQRLVREIAQDFKTDLRFQSSAVAALQEASEAYLVGLFEDTNLCAIHAKRVTIMPKDIQLARRIRGERA

SEQ ID NO: 6919 - protein, 136 aa, Zea mays; identical to SEQ ID NO: 6913
  Clone ID: TF_ZmC653_72.pep

SEQ ID NO: 6920 - protein, 136 aa, Zea mays; identical to SEQ ID NO: 6913
  Clone ID: TF_ZmC653_73.pep

SEQ ID NO: 6921 - protein, 136 aa, Zea mays; identical to SEQ ID NO: 6913
  Clone ID: TF_ZmC653_89.pep

SEQ ID NO: 6922 - protein, 136 aa, Zea mays; identical to SEQ ID NO: 6913
  Clone ID: TF_ZmC653_96.pep

SEQ ID NO: 6923 - protein, 94 aa, Zea mays
  Clone ID: TF_LIB3357-025-P1-K1-A5.pep
MDASGARSKGKKGAVARKALGRSKKSMTLSGMAGLQFHGRRIRRYLKKGRYSQRVGTARPVYICCFLNYLSSDGLELSRNTSRDNMNTRVMPRH

SEQ ID NO: 6924 - protein, 101 aa, Zea mays
  Clone ID: TF_LIB3357-054-P1-K1-G3.pep
NPVEEEPADEKTTVWKKPKAENRIPVGKSACKEGGEGKRGKMIGKKSVVTYKIYIFKVLKQVHPYIGISSKAMCIMISFINDIFDKLAGEDANLARYNKKP

SEQ ID NO: 6925 - protein, 98 aa, Zea mays
  unsure (1)..(98): unsure at all Xaa locations
  Clone ID: TF_LIB4730-016-R1-K1-F7.pep
MAPTAEKKPAEKKPADEKAEKQPGADMRAPSKEGGEKMGQKKAMKSVETYKIYICXVLSHVHPDIGISTRAMSIMNSLMNEIFEKLGAAAVNLVRSSR

SEQ ID NO: 6926 - protein, 168 aa, Zea mays
  unsure (1)..(168): unsure at all Xaa locations
  Clone ID: TF_LIB4730-031-R1-K1-A2.pep
VPSGVPAGQTNYISHIHRRRWLILALSTECTMARTKHTKRTSTDGTAPRKQLTNKATSKSGTSTAGAKKPNRFHPFTAGLGEIRKYXQKSTEMIMLMMPLQRFQREIGQNFKNDLSFQCFDVSALDEVDEAYLVXLLEDTNLCNIHAKHVNIMPMDIQVMHLMRRKRA

SEQ ID NO: 6927 - protein, 58 aa, Zea mays
  Clone ID: TF_LIB3597-024-Q1-K6-E2.pep
LSSSSRARARQSAPAPKKAPRSGDQGAEEDGNKRKRSRKESYSVYVYKVLKQVHPDTG

SEQ ID NO: 6928 - protein, 98 aa, Zea mays
  Clone ID: TF_LIB3079-041-Q1-K1-C3.pep
MFAHRKGVKGLGKGGPNRHRKALRYNIERITKPAIQLLARRGCVNRISGLIYDETRGVLKIFLENVIRDAGTYTEHARRKTVTDMDVDYALKRPGRTL

SEQ ID NO: 6929 - protein, 86 aa, Zea mays
  unsure (1)..(86): unsure at all Xaa locations
  Clone ID: TF_LIB3279-004-P1-K1-H7.pep
MVNTTVNEELADKIALVNKKPKAEKRVYAGKYATNECGXGQEGLXKGKKSVETYXIYIFKVLKQVYPDIGISFKVMFIMNSFINDI

SEQ ID NO: 6930 - protein, 183 aa, Zea mays
  unsure (1)..(183): unsure at all Xaa locations
  Clone ID: TF_LIB3067-005-Q1-K1-G10.F2.pep
KAPTGKKPKPKKPPPAGKPAGKEAGEGKKGKKKAKKPGKTNKTNTXKXQKQAHPDXGXPPKARPNKNPXTNDXXEKXAAEPAKRARKNKKPTATPRENQTAGRXAPPGEXAKHAVPEGTKPATKXTPXKXXKNKAARRRKTGPXXKEKRKXGXKRPAPXXAVKTEEXWPTPXWXXATLPQXTX

SEQ ID NO: 6931 - protein, 172 aa, Zea mays
  unsure (1)..(172): unsure at all Xaa locations
  Clone ID: TF_LIB4742-143-Q1-K1-C6.pep
MQASAPVPRVHAMKGAAARKGGGARNKLVTTSVQAGLQFPXGRIGRHLNKARYAQSVGTVVPVYLASVLEYLAAEVLGAGSLFVPRYIKKTRIIPRHVLLVIRNDXELGNLLSGVTIAHGGVLPNINPVLLPKKTAXNAAPQEAKSSMNAATSPKKAYRAAFTVVMLNARVQ

SEQ ID NO: 6932 - protein, 111 aa, Zea mays
  unsure (1)..(111): unsure at all Xaa locations
  Clone ID: TF_LIB4976-005-R1-M1-E12.pep
SATKEADEGNRRKKKGKKSVEASKFYIFKLLKQVHPGIGTSSKPMSIMNSFLSDILEKLVSESHKLARYSKKPAITSREIQTSVRLVLPGELAKHXAVSEGAKSVTKFTSA

SEQ ID NO: 6933 - protein, 149 aa, Zea mays
  unsure (1)..(149): unsure at all Xaa locations
  Clone ID: TF_ZmC653_29.pep
QSLAADPRAKQSASPLRTVPMARTKQTARKSTGGKAPRKQLATKAARKSAPATGGVKKPHRXREIRKYQKSTELLIRKLPFQRLVREIAQDFKTDLRFQSSAVAALQEASEAYLVGLFEDTNLCAIHAKRVTIMPKDIQLARRIRGERA

SEQ ID NO: 6934 - protein, 146 aa, Zea mays
  unsure (1)..(146): unsure at all Xaa locations
  Clone ID: TF_LIB4979-098-A1-K1-E4.pep
MDRTKHTVXKSTGDKAPRKQLDTKAMRKSAPATGGVNKAHRFRPGTVXLREIRKYQKSTELLIRKLPVQRLVREIAQDFKTDLRFQSSAVAALQEASEAYLVGLFEDTNLCTIHAKRVTIMTKDIQLARRIREERAYAYSRCRRKL

SEQ ID NO: 6935 - protein, 136 aa, Zea mays
  unsure (1)..(136): unsure at all Xaa locations
  Clone ID: TF_LIB4185-043-R1-K1-A9.pep
MARTKQTARKSTGGKAPRKQLATKAARKSAPATGGVKKPHRFRPGTVALREIRKYQKSTELLIRKLPFQRLVREIAQDFKTDLRFQSSPVSALQEAAXAYLVGLFEDTNLCAIHAKRVPIMPKDIQLAPRIPGERA

SEQ ID NO: 6936 - protein, 144 aa, Zea mays
  Clone ID: TF_LIB4762-059-R1-K1-C11.pep
MARTKQTARKSTGGKAPRKQLATKAARKSAPATGGVKKPHRFRPGTVALREIRKYQKSTELLIRKLPFQRLVREIAQDFKTDLRFQSFAVSALQEAAEAYLVGLFEDTNLCAIHAKRRTIMPKDIQLARRIRGEKALSEASFSH

SEQ ID NO: 6937 - protein, 136 aa, Zea mays
  Clone ID: TF_JC-ZMSHLIB3569P021H08_FLI.pep
MARTKQTARKSTGGKAPRKQLATKAARKSAPATGGVKKPHRFRPGTVALREIRKYQKSTELLIRKLPFQRLVREIAQDFKTDLRFQSSAVAALQEAAEAYLVGLFEDTNLCAIHAKRVTIMPKDIQLARRIRGERA

SEQ ID NO: 6938 - protein, 136 aa, Zea mays; identical to SEQ ID NO: 6937
  Clone ID: TF_LIB4729-084-Q2-K1-F4.pep

SEQ ID NO: 6939 - protein, 167 aa, Zea mays
  Clone ID: TF_LIB4729-135-A1-K1-E10.pep
WDLEPAGPSSIRFPFQSFDRTAPPALTQLSPMARTKQTARKSTGGKAPRKQLATKAARKSAPATGGVKKPHRFRPGTVALREIRKYQKSTELLIRKLPFQRLVREIAQDFKTDLRFQSSAVAALQEAAEAYLVGLFEDTNLCAIHAKRVTIMPKDIQLARRIRGERA

SEQ ID NO: 6940 - protein, 136 aa, Zea mays; identical to SEQ ID NO: 6937
  Clone ID: TF_LIB4979-026-A1-K1-F2.pep

SEQ ID NO: 6941 - protein, 136 aa, Zea mays; identical to SEQ ID NO: 6937
  Clone ID: TF_LIB4979-075-A1-K1-H8.pep

SEQ ID NO: 6942 - protein, 169 aa, Zea mays
  Clone ID: TF_ZmC653_100.pep
LEAGRAGIHSSHPISNFKSFDRAAPPALSQLSPMARTKQTARKSTGGKAPRKQLATKAARKSAPATGGVKKPHRFRPGTVALREIRKYQKSTELLIRKLPFQRLVREIAQDFKTDLRFQSSAVAALQEAAEAYLVGLFEDTNLCAIHAKRVTIMPKDIQLARRIRGERA

SEQ ID NO: 6943 - protein, 188 aa, Zea mays
  Clone ID: TF_ZmC653_102.pep
GVRAPRARAIGSARPADSPRRAASKLPYSSHPISHFKSFDRTAPPALTQLSPMARTKQTARKSTGGKAPRKQLATKAARKSAPATGGVKKPHRFRPGTVALREIRKYQKSTELLIRKLPFQRLVREIAQDFKTDLRFQSSAVAALQEAAEAYLVGLFEDTNLCAIHAKRVTIMPKDIQLARRIRGERA

SEQ ID NO: 6944 - protein, 136 aa, Zea mays; identical to SEQ ID NO: 6937
  Clone ID: TF_ZmC653_103.pep

SEQ ID NO: 6945 - protein, 136 aa, Zea mays; identical to SEQ ID NO: 6937
  Clone ID: TF_ZmC653_104.pep

SEQ ID NO: 6946 - protein, 136 aa, Zea mays; identical to SEQ ID NO: 6937
  Clone ID: TF_ZmC653_109.pep

SEQ ID NO: 6947 - protein, 167 aa, Zea mays
  Clone ID: TF_ZmC653_27.pep
PPRLAGIPAHIRFLFQSFDRTAPPALSPLSPMARTKQTARKSTGGKAPRKQLATKAARKSAPATGGVKKPHRFRPGTVALREIRKYQKSTELLIRKLPFQRLVREIAQDFKTDLRFQSSAVAALQEAAEAYLVGLFEDTNLCAIHAKRVTIMPKDIQLARRIRGERA

SEQ ID NO: 6948 - protein, 165 aa, Zea mays
  Clone ID: TF_ZmC653_32.pep
PAGIHSSHPISYFKSFDRAAPPALSQLSPMARTKQTARKSTGGKAPRKQLATKAARKSAPATGGVKKPHRFRPGTVALREIRKYQKSTELLIRKLPFQRLVREIAQDFKTDLRFQSSAVAALQEAAEAYLVGLFEDTNLCAIHAKRVTIMPKDIQLARRIRGERA

SEQ ID NO: 6949 - protein, 136 aa, Zea mays; identical to SEQ ID NO: 6937
  Clone ID: TF_ZmC653_34.pep

SEQ ID NO: 6950 - protein, 169 aa, Zea mays
  Clone ID: TF_ZmC653_37.pep
HWVPRGRPGHTRILNLPLPPDPGLQTAHSSPLRMARTKQTARKSTGGKAPRKQLATKAARKSAPATGGVKKPHRFRPGTVALREIRKYQKSTELLIRKLPFQRLVREIAQDFKTDLRFQSSAVAALQEAAEAYLVGLFEDTNLCAIHAKRVTIMPKDIQLARRIRGERA

SEQ ID NO: 6951 - protein, 136 aa, Zea mays; identical to SEQ ID NO: 6937
  Clone ID: TF_ZmC653_41.pep

SEQ ID NO: 6952 - protein, 169 aa, Zea mays
  Clone ID: TF_ZmC653_43.pep
GKKKQKKKSNPHPTSLIHSSQPCSCLESSLAAPTARTKQTARKSTGGKAPRKQLATKAARKSAPATGGVKKPHRFRPGTVALREIRKYQKSTELLIRKLPFQRLVREIAQDFKTDLRFQSSAVAALQEAAEAYLVGLFEDTNLCAIHAKRVTIMPKDIQLARRIRGERA

SEQ ID NO: 6953 - protein, 136 aa, Zea mays; identical to SEQ ID NO: 6937
  Clone ID: TF_ZmC653_47.pep

SEQ ID NO: 6954 - protein, 157 aa, Zea mays
  Clone ID: TF_ZmC653_50.pep
ARAHFESFDRAAPPALSQFSPMARTKQTARKSTGGKAPRKQLATKAARKSAPATGGVKKPHRFRPGTVALREIRKYQKSTELLIRKLPFQRLVREIAQDFKTDLRFQSSAVAALQEAAEAYLVGLFEDTNLCAIHAKRVTIMPKDIQLARRIRGERA

SEQ ID NO: 6955 - protein, 161 aa, Zea mays
  Clone ID: TF_ZmC653_51.pep
NLPRTSSPNTVKHAPASTRTSAPTPMARTKQTARKSTGGKAPRKQLATKAARKSAPATGGVKKPHRFRPGTVALREIRKYQKSTELLIRKLPFQRLVREIAQDFKTDLRFQSSAVAALQEAAEAYLVGLFEDTNLCAIHAKRVTIMPKDIQLARRIRGERA

SEQ ID NO: 6956 - protein, 136 aa, Zea mays; identical to SEQ ID NO: 6937
  Clone ID: TF_ZmC653_53.pep

SEQ ID NO: 6957 - protein, 136 aa, Zea mays; identical to SEQ ID NO: 6937
  Clone ID: TF_ZmC653_55.pep

SEQ ID NO: 6958 - protein, 136 aa, Zea mays; identical to SEQ ID NO: 6937
  Clone ID: TF_ZmC653_56.pep

SEQ ID NO: 6959 - protein, 136 aa, Zea mays; identical to SEQ ID NO: 6937
  Clone ID: TF_ZmC653_57.pep

SEQ ID NO: 6960 - protein, 136 aa, Zea mays; identical to SEQ ID NO: 6937
  Clone ID: TF_ZmC653_60.pep

SEQ ID NO: 6961 - protein, 136 aa, Zea mays; identical to SEQ ID NO: 6937
  Clone ID: TF_ZmC653_61.pep

SEQ ID NO: 6962 - protein, 136 aa, Zea mays; identical to SEQ ID NO: 6937
  Clone ID: TF_ZmC653_62.pep

SEQ ID NO: 6963 - protein, 136 aa, Zea mays; identical to SEQ ID NO: 6937
  Clone ID: TF_ZmC653_64.pep

SEQ ID NO: 6964 - protein, 166 aa, Zea mays
  Clone ID: TF_ZmC653_65.pep
RTRGSPRKSTPPQFHAATNSPSSAPSIKAPMARTKQTARKSTGGKAPRKQLATKAARKSAPATGGVKKPHRFRPGTVALREIRKYQKSTELLIRKLPFQRLVREIAQDFKTDLRFQSSAVAALQEAAEAYLVGLFEDTNLCAIHAKRVTIMPKDIQLARRIRGERA

SEQ ID NO: 6965 - protein, 136 aa, Zea mays; identical to SEQ ID NO: 6937
  Clone ID: TF_ZmC653_68.pep

SEQ ID NO: 6966 - protein, 136 aa, Zea mays; identical to SEQ ID NO: 6937
  Clone ID: TF_ZmC653_69.pep

SEQ ID NO: 6967 - protein, 136 aa, Zea mays; identical to SEQ ID NO: 6937
  Clone ID: TF_ZmC653_71.pep

SEQ ID NO: 6968 - protein, 136 aa, Zea mays; identical to SEQ ID NO: 6937
  Clone ID: TF_ZmC653_75.pep

SEQ ID NO: 6969 - protein, 174 aa, Zea mays
  Clone ID: TF_ZmC653_76.pep
HWVPRGRPGDTRILQSALAAAADGSRSVDCSLLYAPLRMARTKQTARKSTGGKAPRKQLATKAARKSAPATGGVKKPHRFRPGTVALREIRKYQKSTELLIRKLPFQRLVREIAQDFKTDLRFQSSAVAALQEAAEAYLVGLFEDTNLCAIHAKRVTIMPKDIQLARRIRGERA

SEQ ID NO: 6970 - protein, 136 aa, Zea mays; identical to SEQ ID NO: 6937
  Clone ID: TF_ZmC653_78.pep

SEQ ID NO: 6971 - protein, 136 aa, Zea mays; identical to SEQ ID NO: 6937
  Clone ID: TF_ZmC653_80.pep

SEQ ID NO: 6972 - protein, 136 aa, Zea mays; identical to SEQ ID NO: 6937
  Clone ID: TF_ZmC653_81.pep

SEQ ID NO: 6973 - protein, 136 aa, Zea mays; identical to SEQ ID NO: 6937
  Clone ID: TF_ZmC653_83.pep

SEQ ID NO: 6974 - protein, 171 aa, Zea mays
  Clone ID: TF_ZmC653_84.pep
RPGESRYPTRILQSALAAAARSRSVDCSLLSAPVRMARTKQTARKSTGGKAPRKQLATKAARKSAPATGGVKKPHRFRPGTVALREIRKYQKSTELLIRKLPFQRLVREIAQDFKTDLRFQSSAVAALQEAAEAYLVGLFEDTNLCAIHAKRVTIMPKDIQLARRIRGERA

SEQ ID NO: 6975 - protein, 164 aa, Zea mays
  Clone ID: TF_ZmC653_86.pep
GRIHSSHPISNFKSFDRAAPPALSQLSPMARTKQTARKSTGGKAPRKQLATKAARKSAPATGGVKKPHRFRPGTVALREIRKYQKSTELLIRKLPFQRLVREIAQDFKTDLRFQSSAVAALQEAAEAYLVGLFEDTNLCAIHAKRVTIMPKDIQLARRIRGERA

SEQ ID NO: 6976 - protein, 136 aa, Zea mays; identical to SEQ ID NO: 6937
  Clone ID: TF_ZmC653_87.pep

SEQ ID NO: 6977 - protein, 136 aa, Zea mays; identical to SEQ ID NO: 6937
  Clone ID: TF_ZmC653_88.pep

SEQ ID NO: 6978 - protein, 136 aa, Zea mays; identical to SEQ ID NO: 6937
  Clone ID: TF_ZmC653_90.pep

SEQ ID NO: 6979 - protein, 136 aa, Zea mays; identical to SEQ ID NO: 6937
  Clone ID: TF_ZmC653_91.pep

SEQ ID NO: 6980 - protein, 136 aa, Zea mays; identical to SEQ ID NO: 6937
  Clone ID: TF_ZmC653_93.pep

SEQ ID NO: 6981 - protein, 160 aa, Zea mays
  Clone ID: TF_ZmC653_94.pep
GVPDPHTHPSSQPYSCLESSLAAPMARTKQTARKSTGGKAPRKQLATKAARKSAPATGGVKKPHRFRPGTVALREIRKYQKSTELLIRKLPFQRLVREIAQDFKTDLRFQSSAVAALQEAAEAYLVGLFEDTNLCAIHAKRVTIMPKDIQLARRIRGERA

SEQ ID NO: 6982 - protein, 136 aa, Zea mays; identical to SEQ ID NO: 6937
  Clone ID: TF_ZmC653_95.pep

SEQ ID NO: 6983 - protein, 136 aa, Zea mays; identical to SEQ ID NO: 6937
  Clone ID: TF_ZmC653_97.pep

SEQ ID NO: 6984 - protein, 136 aa, Zea mays; identical to SEQ ID NO: 6937
  Clone ID: TF_ZmC653_98.pep

SEQ ID NO: 6985 - protein, 165 aa, Zea mays
  Clone ID: TF_ZmC653_99.pep
ERAIHSSHPISNFKSFDRAAPPALSQLSPMARTKQTARKSTGGKAPRKQLATKAARKSAPATGGVKKPHRFRPGTVALREIRKYQKSTELLIRKLPFQRLVREIAQDFKTDLRFQSSAVAALQEAAEAYLVGLFEDTNLCAIHAKRVTIMPKDIQLARRIRGERA

SEQ ID NO: 6986 - protein, 134 aa, Zea mays
  Clone ID: TF_ZmC593337_2.pep
MTGGGKSGGKASGSKNAQSRSSKAGLAFPVGRVHRLLRKGNYAQRVGAGAPVYLAAVLEYLAAEILELAGNAARDNKKTRIIPRHLQLAIRNDEELNKLLGHVTIAQGGVLPNIHQNLLPKKTGKTGKTSSMEL

SEQ ID NO: 6987 - protein, 328 aa, Zea mays
  Clone ID: TF_ZmC20163_2.pep
STELLIRKLPFQRLVREIGQEFKTDLRFQSSASPAARGEIDTIFVGESGSQMRDSALSLTKCLAQTAQKTFSDFEEAVEKDATKNIHTDGTVHPLTSYVINYVKFLFDYQSTLKQLFQEFKEDGTGSELAAVTMKIMQALQNNLEAKAKQYKDPALMHIFLMNNIHYIVKSVRRSEAKDLLGDDWIQRHRRIVQQNANQYRRIAWAKVLQCLSGQGLTSSGGSGHVGSDGGNSSGASRTAVKERFRSFNVLFEEIYHKQCGWSVPDTELRESLRLAVAEILLPAYRSFIKRFGPLIENSKAPGKYVKHTPEQLELLLGNLFEGKQERA

SEQ ID NO: 6988 - protein, 125 aa, Zea mays
  unsure (1)..(125): unsure at all Xaa locations
  Clone ID: TF_LIB3357-001-P1-K1-H12.pep
ATLRSNKNSRPTQSIQEGALFGYRRRVLKAPKGLKKPXRPKPAGEEHRGEKALAEKNPTAEKRVPATKSRCKEAGKNKGXKKAKMSVETYKTYIFQVLGHAHPDIGIWLKAMIMMNSFINDIFEN

SEQ ID NO: 6989 - protein, 180 aa, Zea mays
  Clone ID: TF_LIB4762-134-Q1-K1-D11.pep
KVKYIYFKKKKKKKKKKKKKKKKKKKKKKNTPNPKSFIQSSKPNSGLKSSLAVPRARTKKTERKSTGGKAPRKKLATKVGRKSAPATGGGKKPHRFRPGIVGLREIRKNQKSTELLIRKFPFQGLVRKIAKNFKTDREVPVPPAVAGLKKAAKANLGGFFKDTNLCAIHAKGVIIMPKDI

SEQ ID NO: 6990 - protein, 146 aa, Zea mays
  unsure (1)..(146): unsure at all Xaa locations
  Clone ID: TF_LIB3689-232-Q1-N6-A8.pep
EGGEKKGKKKAKKRVEAFKISFFKVFKKGPPHMGIFSKAMSLMNSFIKGIFXKLAGEAPKLGGFNKKPPLPFRGIQTSGGLVLPGGLAKHPVFEGTKAVPKFPSNWGGWGVPGFFKRVFFWVLFPVPPPTRLGGRLPALLIRGAGL

SEQ ID NO: 6991 - protein, 78 aa, Zea mays
  unsure (1)..(78): unsure at all Xaa locations
  Clone ID: TF_700346422H1.pep
MDDTGTGAGGKAKKGAAGRKVGGPRKKSVTRSVKAELPFPVGRIGRYLKKGRYAQAYGSGAHVXLADVLEILAAEVLE

SEQ ID NO: 6992 - protein, 82 aa, Zea mays
  Clone ID: TF_LIB3689-237-Q1-N6-G2.pep
KVLKQVHPDMGISSRAMSIMNSFINDIFEKVAGEAPKFARYNKKPPFPSREIQTSVGLVLPGELAKHPVFGGPKAVPKFPSS

SEQ ID NO: 6993 - protein, 159 aa, Zea mays
  unsure (1)..(159): unsure at all Xaa locations
  Clone ID: TF_LIB4569-012-Q1-K1-G3.pep
MARTKQTARKSTGGKAPRKQLATKAARKSAPTTGGVKKPHRYXRPGTVALREIRKYQKSTELLIRKLPFQRLVREIAQDFKTDLRFQXSHAVLPXKEAXAEAYLVGLXFEDTNLCAIHAKRVTIIPKDIQLARRIRGERALVSRARPQWRRRDWKKANL

SEQ ID NO: 6994 - protein, 129 aa, Zea mays
  unsure (1)..(129): unsure at all Xaa locations
  Clone ID: TF_511379.pep
RKSTGGKAPRKQLXTKAARKFAPTTGGVKKPHRYRPGTFALRKIRKYQKSTELLIRKLPFQRLVREIAQDFKTNLXFQSHAVLALQEAAEAYLVGLFKDTNLCXIHAKRXXIMPKDHSAWQXRFRGERA

SEQ ID NO: 6995 - protein, 112 aa, Zea mays
  unsure (1)..(112): unsure at all Xaa locations
  Clone ID: TF_LIB3067-008-Q1-K1-H9.R2.pep
SCPPRHGARGERGARKKGKKSVEYLXIYIFNVLKQVHPDIGICFKAMSIMNSFINDIFEKLGAEAAKLVRYNKKPTITCREIHTSVRLVLQGELAKHALFQGTKGRTKFTSF

SEQ ID NO: 6996 - protein, 137 aa, Zea mays
  unsure (1)..(137): unsure at all Xaa locations
  Clone ID: TF_LIB4665-006-R1-N1-F6.pep
MAPKAEKKPPEKKPAEEKAEKKPRAEKRVPSKEGGEKKGKKKAKKSVETYKIYIFKVLKQGPPDIGILSKAMSIMNSFINDIFXKLPPEAAKFARYNKKPPIPSREIQTSVGLVLPGELAKHPVSEGAKAVSKFTSF

SEQ ID NO: 6997 - protein, 136 aa, Zea mays
  Clone ID: TF_LIB4742-061-R1-K1-F2.pep
MARTKQTARKSTGGKAPRKQLATKAARKSAPTTGGVKKPHRYRPGTVALREIRKYHKSTELLIRKLPFQRLVREIAQDFKTDLRFQRHAVLTLQEVAEAYLVGLFKDTNLCAIHAKCVTIMTKDIQLARLIRGESA

SEQ ID NO: 6998 - protein, 157 aa, Zea mays
  Clone ID: TF_LIB4764-133-Q1-K1-E5.pep
MARTKQTARKSTGGKAPRKQLATKAARKSAPATGGVKKPHCFRPGTVALREIRKYQKSTELLIRKLPFQRLVREIAQDFKTDLRFRSSAVAALQEASEAYLVGLFEDTNLCAIHAKRVTIMPKDIQLARRIRWGEGLGVVPGEVGSSSRPFLSSLSG

SEQ ID NO: 6999 - protein, 135 aa, Zea mays
  Clone ID: TF_ZmC653_36.pep
MARTKQTARKSTGGKAPRKQLAKAARKSAPATGGVKKPHRFRPGTVALREIRKYQKSTELLIRKLPFQRLVREIAQDFKTDLRFQSSAVAALQEAAEAYLVGLFEDTNLCAIHAKRVTIMPKDIQLARRIRGERA

SEQ ID NO: 7000 - protein, 146 aa, Zea mays
  Clone ID: TF_ZmC263912_1.pep
MAGRKGGDRKKAVTRSVKAGLQFPVGRIGRYLKKGRYAQRVGSGAPVYLAAVLEYLAAEMLELAGNAAKDNKKTRIIPRHLLLAVRNDQELGRLLAGVTIAHGGVIPNINSVLLPKKSPAAAEKEAKSPKKKTSTKSPKKKVAAKE

SEQ ID NO: 7001 - protein, 134 aa, Zea mays
  Clone ID: TF_LIB5075-003-R1-XP1-C9.pep
MTGGKSGGKASGSKSSAQSRSSKAGLAFPVGRVHRLLRKGNYAQRVGAGAPVYLAAVLEYLAAEILELAGNAARDNKKTRIIPRHLQLAIRNDEELNKLLGHVTIAQGGVLPNIHQNLLPKKTAKPGKGPSQEL

SEQ ID NO: 7002 - protein, 167 aa, Zea mays
  unsure (1)..(167): unsure at all Xaa locations
  Clone ID: TF_LIB4766-061-R1-K1-C1.pep
MAARDEAIADAVPNKDISRTFQAGLQLPXGGISAQILKIMKKRERMGXAAPPVYLSADLEYLDAXGLQLGANSARHNKNTRIVPRIIQITTTNNKKLTKLLGAATITSGRSMPQHRTRSSSPTTLARPTPPPSMTITTEADHCRRGIHYRLVSYDTTQIVSMSLRAR

SEQ ID NO: 7003 - protein, 111 aa, Zea mays
  unsure (1)..(111): unsure at all Xaa locations
  Clone ID: TF_LIB3076-002-Q1-K1-A4.pep
MAPKADKKPAAKKPAEEEPATEKAEKAPAGKKPKAEKRLPASKSAGKEGGEGKKGKKKAKKSVETYKIYNLKGLKXVHPDIGISCKGMSIMNFFINDIFEKLAGESGKLAR

SEQ ID NO: 7004 - protein, 109 aa, Zea mays
  unsure (1)..(109): unsure at all Xaa locations
  Clone ID: TF_LIB4979-087-A1-K1-C7.pep
MNSSGTETRDKENKGACXHNGGVTMNNSASRSVSAALQFHGGRIGSYLKKGRYAQRGGTGAPYYLAAAIKYLIAEVLQLAENAGRYNRNTGMIARHVXLAIRNDEELGK

SEQ ID NO: 7005 - protein, 100 aa, Zea mays
  unsure (1)..(100): unsure at all Xaa locations
  Clone ID: TF_LIB3067-019-Q1-K1-C12.pep
KAPYWKKPKADKLVLSGKSSXKEYVKVKRGKKKGKNSVXTYKIYIFKVLNHVHPDIGIYSKVISIMNSLINDIFEKLDAEAVKLARYNKKPTITLLEIHT

SEQ ID NO: 7006 - protein, 95 aa, Zea mays
  unsure (1)..(95): unsure at all Xaa locations
  Clone ID: TF_LIB3067-056-Q1-K1-F12.pep
QSLPPNPVPIQTPCPFVPVRLARPNQPARNSIAGKPPRNHLPTKRGPNVARDTGRLKNXHRFRPGTVSLREIRKYQKSTELLIRKLPFQRLVREI

SEQ ID NO: 7007 - protein, 136 aa, Zea mays
  unsure (1)..(136): unsure at all Xaa locations
  Clone ID: TF_LIB4732-093-Q1-K1-H8.pep
ARIKETARKSDGXGRLPGKHVAAEGARKSAPTTGGGKKPHRYRPGSVALREIRKDHRETEVLIRKLPXRSLPREFAEDFRTDWRFQRHARMPLQGVVRHTVVCCEENNEMXAWPASGVIMMAKDIYLXRRIRGQNT

SEQ ID NO: 7008 - protein, 138 aa, Zea mays
  unsure (1)..(138): unsure at all Xaa locations
  Clone ID: TF_LIB4729-031-R1-K1-A12.pep
MARTKQTARKSTGXGKAPRKQLATKAERKWGPDTGXGVKMPHRFRPGTVALREIRTYQKSTELLMRKLPFQRLMREIAQDFKTDLRFQSSAVXALQEAAEAYLVGLFEDTNLCAIHAMRVTIMPKDIQLARRVRGERA

SEQ ID NO: 7009 - protein, 158 aa, Zea mays
  Clone ID: TF_LIB4758-088-R1-K1-D11.pep
MARTKQTARKSTGGKAPRKQLATKAARKSAPTTGGVKKPHRYRPGTVALREIRKYQKSTELLIRKLPFQRLVREIAQDFKTDLRFQSHAVLALQEAAEAYLVGLFEDTNLCAIHAKRVTIMPKDIQLGKKDPWRGRKSVDGRKTLRSFCVSLSHPVVL

SEQ ID NO: 7010 - protein, 153 aa, Zea mays
  unsure (1)..(153): unsure at all Xaa locations
  Clone ID: TF_LIB4829-021-R1-N1-G8.pep
MRPKEENKPSHKKPAARRSTVTENVDKAPAXYKPICEKCLPLAMLIVGAEGKKAKNKXAKKALETYMIIHLQCAXQVHPDIGISSEVMSIMNSFINDIFEKLACESAKLWRYNQKTTISSREIQTSVRLVLLXELGKHVVSDCTKAVTKFTSS

SEQ ID NO: 7011 - protein, 160 aa, Zea mays
  unsure (1)..(160): unsure at all Xaa locations
  Clone ID: TF_LIB4730-131-A1-K1-E1.pep
MDSTGTRAAGKXKKRAARRXVGRPRKEVVSRSRGAGLQFPVGRIGRYLKEGRYAQRVXTGAPVYLAAVLEYLAAXVLXLAGNAARDNKKXRIIPRHVLLAIRNDXELXKLLGSVTIAHGGVLPNINPXFCFPXXTXEKASSXEMKGGXSPKRAPNSPKKA

SEQ ID NO: 7012 - protein, 95 aa, Zea mays
  unsure (1)..(95): unsure at all Xaa locations
  Clone ID: TF_700349182H1.pep
MALKAEKKPAEKKPAAEEKAEKTTARKKPXSEKRLPASKSSGKDGGENEGKKKAKKSVETXQIYIFKVLKXVHPDIGISSKAMSIMNSFIDDIFE

SEQ ID NO: 7013 - protein, 136 aa, Zea mays
  unsure (1)..(136): unsure at all Xaa locations
  Clone ID: TF_LIB3969-012-Q1-K1-H12.pep
AGGGGARAVKRPAGEPRRGSGSSLSSPSAGGGGGQPWQDSMGKKSVVTFRIYIFEVLDHVLPVIGVSSKALSIMNSFINDIFEKLAGEAAXLARFLLKPTITSREIQTFVRLVLPGELAQHAVSGWPKGVTNFTCF

SEQ ID NO: 7014 - protein, 129 aa, Zea mays
  unsure (1)..(129): unsure at all Xaa locations
  Clone ID: TF_LIB3088-042-Q1-K1-B9.pep
RTRGARTKQTSRMSTGGKATAQXELATKAARKSAPTTGGVKKPHRYRSGTVALPEIRTYHKSTELVIRKLTLQRLVLEIAQDFKTDLRVQSHAALALQEDAEAYIVGVFXDTNLCTIHTXRVTIMPNDI

SEQ ID NO: 7015 - protein, 123 aa, Zea mays
  Clone ID: TF_ZmC369_40.pep
PRQVWACWPSTRASPSTTPGATRAPSRSCSPRTPSSCCSSSASVSWSCRGGGTSSGAMSIMNSFINDIFEKLAGEAAKLARYNKKPTITSREIQTSVRLVLPGELAKHAVSEGTKAVTKFTSN

SEQ ID NO: 7016 - protein, 136 aa, Zea mays; identical to SEQ ID NO: 6802
  Clone ID: TF_ZmC653_45.pep

SEQ ID NO: 7017 - protein, 136 aa, Zea mays
  unsure (1)..(136): unsure at all Xaa locations
  Clone ID: TF_LIB4729-138-A1-K1-A10.pep
MARTKQTARKSTGGKAPRKQLATKAARKSAPATGGVKKPHRFRPGTVALREIRKYQKSTELLIRKLPFQRLVREIAQDFKTDLRFQSSAVAALHEAAEAYLVGLFQDTNLCAIHAKRVTIMPXDIQLARRIRGERA

SEQ ID NO: 7018 - protein, 136 aa, Zea mays
  Clone ID: TF_LIB5116-026-A1-PF1-C11.pep
MAPKAAEKKPAEKTPAGKKPKAEKKVPASKEGGGEKKGKKKSKKSVETYKIYIFKVLKQVHPDIGISSKAMSIMNSFINDIFEKLAGESAKLARYNKRPTITSREIQTSVRLVLPGELAKHAVSEGTKAVTKFTSA

SEQ ID NO: 7019 - protein, 148 aa, Zea mays
  unsure (1)..(148): unsure at all Xaa locations
  Clone ID: TF_LIB5116-006-A1-PF1-A2.pep
MAGRKGGDRKKAVTRSVKAGLQFPVGRIGRYLKKGRYAQRVGSGAPVYLAAVLEHLAAEVLELAGNAAKDNKKTRIIPRHLLLAVRNDQELGRLLAGVTIAHGGVIPNINSVLLPKKSPAAADKEAKSPNKKTSTKSXPKKKTAATKE

SEQ ID NO: 7020 - protein, 104 aa, Zea mays
  Clone ID: TF_ZmC369_31.pep
GGDKKGKKKAKKSVETYKIYIFKVLKQVHPDIGISSKAMSIMNSFINDIFEKLAGEAAKLARYNKKPTITSREIQTSVRLVLPGELAKHAVSEGTKAVTKFTSS

SEQ ID NO: 7021 - protein, 136 aa, Zea mays
  Clone ID: TF_LIB5116-028-A1-PF1-G10.pep
MDASAAGAVAKAKKYVVGRKLGGGPRKKAVARSVKAGLQFPVGRIGRFLKKGRYAQRVGMGAPVYLASVLEYLAAELLELAGNAAKDNKKSRIIPRHLLLAIRNDQELGKLLAGVTIAHGGVLPNINPVLLPKKTA

SEQ ID NO: 7022 - protein, 101 aa, Zea mays
  Clone ID: TF_LIB3608-036-Q1-N6-C6.pep
TGAPVYLAAFLESLPPEVLELAGNPAKNNKKRGIIPPQVFLAIRKKKELGKFLAGVPIGEGGVLPKIHSVFLPKKAAKKGAKGGKKKPKSPKKGAKSPKKA

SEQ ID NO: 7023 - protein, 113 aa, Zea mays
  unsure (1)..(113): unsure at all Xaa locations
  Clone ID: TF_LIB3245-084-P1-N1-B7.pep
KINTSQFHGRYSRCVARSTKXAPTKXTARKSTGGKAPRKQLSTKAARKSAPATGGVKKPHRFRPGTVALREIRKYQKSTELLIRKLPFQRLVREIAQDFKTDLRFQSSAVAAL

SEQ ID NO: 7024 - protein, 123 aa, Zea mays
  unsure (1)..(123): unsure at all Xaa locations
  Clone ID: TF_LIB4732-057-Q1-K1-D7.pep
MAPKAEKKPAAKKPAEEEPAAEKATAGKKPKAEKRLPAGKSAGKEGGEKKGKKKAKKSVETYKIYIFKVLKQVHPDIGISSKAMSIMNSFINDIFEKXLVLPGELAKHAVSEGTKAVTKFTSS

SEQ ID NO: 7025 - protein, 79 aa, Zea mays
  unsure (1)..(79): unsure at all Xaa locations
  Clone ID: TF_3341056.pep
KQVHPEIGISFKAMSIMKSFIKEIFEKLAGEAAKMAXXNKKPTIKSREIQTSVGLVLPGELAKQAVFEGTKAVTKFTSK

SEQ ID NO: 7026 - protein, 137 aa, Zea mays
  unsure (1)..(137): unsure at all Xaa locations
  Clone ID: TF_LIB4744-035-R1-K1-H5.pep
MARTKQTARKSTGGKAPRKHLATKAARKSAPATGGVNKPHRFRPGTVALREIRKHQKSTELLIRKLPIQRLVREIAQDFKTDLRFQSSAVSAXLQEAAEAYLVGLFEDTNLCAIHAKRVTIMPKDIQLARRIRGERA

SEQ ID NO: 7027 - protein, 104 aa, Zea mays
  unsure (1)..(104): unsure at all Xaa locations
  Clone ID: TF_LIB4758-023-R1-K1-H11.pep
TVGMAPRKQLATKAVRKSAPATGGMNNPXSVGPGTVALLEIRKYQKITELLIRKLPFQRLVREIAQDFKTVLRFQSSAVAALQEADEAYLEGLFEDTNLCAIHA

SEQ ID NO: 7028 - protein, 187 aa, Zea mays
  unsure (1)..(187): unsure at all Xaa locations
  Clone ID: TF_LIB4979-019-A1-K1-A12.pep
SLPEAFHPRSLDGPHEGDEERSPPRGKAPREAXATKADRESAPATDGGKKAHRFRPGTVSLREIRKYQNSTELLIRQLAFQRLVREIRAGLAKTDXLRFQSSAGLCSAGLRPRRATLTVSAXDTIPTCAIHAWRVTIMPKDIQLSHVRIRGREGLSISYSDIRGRSEDEEMCLESVILSDCGIHANR

SEQ ID NO: 7029 - protein, 122 aa, Zea mays
  unsure (1)..(122): unsure at all Xaa locations
  Clone ID: TF_LIB4979-061-R1-K1-G4.pep
TVRKSTXGKAPRKQMNTXAARKSSPGTGGVKKSHRFRPGSVALREIRKYHKSTELLIRKMPFQRLVRDISQDFKNDLWIQFYFVAALQEDDDAYLVGLFXRTNLCGIHAKRVTIMAKDIQLA

SEQ ID NO: 7030 - protein, 153 aa, Zea mays
  Clone ID: TF_LIB4729-135-A1-K1-H9.pep
TRILNLPLPPPPPDPGLQTAPSSSPLRMARTKQTARKSTGGKAPRKQLATGGVKKPHRFRPGTVALREIRKYQKSTELLIRKLPFQRLVREIAQDFKTDLRFQSSAVAALQEAAEAYLVGLFEDTNLCAIHAKRVTIMPKDIQLARRIRGERA

SEQ ID NO: 7031 - protein, 137 aa, Zea mays
  unsure (1)..(137): unsure at all Xaa locations
  Clone ID: TF_LIB4742-005-R1-K1-G10.pep
MARTKQXTARKSTGGMAPRKQLATKAARKSAPATGGVKKPHRFRPGTVTLREIRKHQNSTELLIRKLPFQRLVREIAHDFKTDLRLQSSAVSALQEAAEAYLVGLFEDTNLCAIHAKRVTIMPKDIQLARRIRGERA

SEQ ID NO: 7032 - protein, 148 aa, Zea mays
  unsure (1)..(148): unsure at all Xaa locations
  Clone ID: TF_LIB4665-006-R1-M1-E8.pep
MSGRGKGGKGLGKGGAKRHRKGLRDNIHGITKPGIRRLARMGGVNRISGLIYEETRGVLKIFXWENVIRDAVTYTEHARRKTVTAVERVYALKRQGRTLYGFGGARRGARRCRRCGSIVFAIRKVWLGGENAGYCATSSMVCVSEKMP

SEQ ID NO: 7033 - protein, 97 aa, Zea mays
  unsure (1)..(97): unsure at all Xaa locations
  Clone ID: TF_LIB3279-005-P1-K1-B7.pep
MDSTITCTGTKAKNEANKRTVGRTGKKSRXKSVKAGVQVPVQRIGRYMKNDLYTQRYANGVRTYVAVYLEYVVDYVVDLVVDAARDNKKDSMITRLM

SEQ ID NO: 7034 - protein, 148 aa, Zea mays
  Clone ID: TF_LIB5026-002-Q1-XP1-E7.pep
MSGRGKGGKGLGKGGAKRHRKVLRDNIQGITKPAIRRLARRGGVKRISGLIYEETRGVLKIFLENVIRDAATYTDHARRKTVTVLVSLYPVGGLPVLLEACDRTPGPVPHAPLSARLVSRSGPRTTSRSESLEILCIIPGASLRASCA

SEQ ID NO: 7035 - protein, 82 aa, Zea mays
  unsure (1)..(82): unsure at all Xaa locations
  Clone ID: TF_ZmC369_105.pep
KVLKQVHPDIGISFKAMSIMNSFINDXFEKLAAEAAKLARYNKKPTITSREIQTSVRLVLPGELAKHAVSEGTKAVTKFTSS

SEQ ID NO: 7036 - protein, 110 aa, Zea mays
  unsure (1)..(110): unsure at all Xaa locations
  Clone ID: TF_LIB3070-004-Q1-N1-E3.pep
AFDGRPKGPRRNPRGEEARRREEPPRPRKAPAGKKXKGGEKRVPAGKSRCQRKGGEGQEGHRRRASKSCXRTYKIYIFKVLKQVHPDIGIXXKAMSIMNSFINDIFEKLA

SEQ ID NO: 7037 - protein, 83 aa, Zea mays
  unsure (1)..(83): unsure at all Xaa locations
  Clone ID: TF_LIB3357-028-P1-K1-E9.pep
AGGPMMKSVTWSVXAGLHFPVGRIGRYLKXGRFAHRVGCGAPVYLAAVLEYLSADVLVLAGNAAKDNKKSRIVPRHVLLAIRN

SEQ ID NO: 7038 - protein, 127 aa, Zea mays
  unsure (1)..(127): unsure at all Xaa locations
  Clone ID: TF_LIB84-008-Q1-E1-G3.pep
MAPKAEKKPAAKKPAEEEPAAAKAPVGNKPMAXKRLSAVKSSGKESGDKKGKKNVNKSVETYKIYIFDVLKHVHPDIGISSKAMSIMNSFIIDIFEKLAGDAAKLARYNKKPSITSREIXTSVRLVL

SEQ ID NO: 7039 - protein, 130 aa, Zea mays
  Clone ID: TF_LIB3150-052-Q1-N1-B2.pep
KKRAILIRSRARTKQTRRSSSGGMVPRKHLPTKAARMSAPATGGVKKPHRFSLDTVALREILRYQKSPELLIRMLPIQRLLREIAHDFKTDLRFQSSAVSALHEAAEAYTGGLYEDTNLCVIHAKRVTIM

SEQ ID NO: 7040 - protein, 141 aa, Zea mays
  unsure (1)..(141): unsure at all Xaa locations
  Clone ID: TF_LIB4745-005-R1-K1-H3.pep
SNCRWRPRSEKKPAEKKPTEEKAEKKPRAEKRVPVKEGGEKKGKKKAKKSVETYKIYMLKVLKQVHPDIGISPKAMYIMNSFINDMLQKLAGEAGKLVRYNKKPSIASREIQTWVRLDLPGEXGKHAVSEGTKAVSKGTCC

SEQ ID NO: 7041 - protein, 112 aa, Zea mays
  Clone ID: TF_LIB3227-030-P1-K1-B8.pep
MDSTGTGAGGKGKKGAAGRKVGGPREKLVSRSVKAGLQVPVGRIERYLKKGRYAQRVGTGARVYLADVLEYLATEVLELAGNASRDNKKTRIISRHVLLGIRNDEELEKLLG

SEQ ID NO: 7042 - protein, 136 aa, Zea mays
  unsure (1)..(136): unsure at all Xaa locations
  Clone ID: TF_ZmC114_13.pep
MARTKQTARKSTGGKAPRKQLATKAARKSAPTTGGVKKPHRYRPGTVALREIRKYQKSTELLIRKLPFQRLVREIAQDFKTDLRFQSHAVLALQEAAEAYLVGLFEDXNLCAIHAKRVTIMPKDIQLARRIRGERA

SEQ ID NO: 7043 - protein, 153 aa, Zea mays
  Clone ID: TF_LIB5116-008-A1-PF1-D5.pep
MAPKADKKPAAENKVEKAAEKTPAGKKPKAEKRLPAGKTASKEAGGEGKTRGRKKGSKAKKGVETYKIYIFKVLKQVHPDIGISSKAMSIMNSFINDIFEKLAGESAKLARYNKKPTITSREIQTSVRLVLPGELAKHAVSEGTKAVTKFTSS

SEQ ID NO: 7044 - protein, 153 aa, Zea mays; identical to SEQ ID NO: 7043
  Clone ID: TF_LIB5116-037-A1-PF1-C8.pep

SEQ ID NO: 7045 - protein, 162 aa, Zea mays
  Clone ID: TF_LIB5025-058-A1-XP1-A9.pep
MARTKQTARKSTGGKAPRKQLATKAARKSAPATGGVKKPHRFRPGTVALREIRKYQKSTELLIRKLPFQRLVREIAQDFKTDLRFQSSAVAALQEAAEAYLVGLFEDTNLCAIHAKRVTIMPKDIQLARRIRREGLSARRAARRCSVTRSRWWHSFRGFLIL

SEQ ID NO: 7046 - protein, 155 aa, Zea mays
  Clone ID: TF_ZmC519824_1.pep
MDASATVATGKGKKGVAGRKAGGPRKKSVSRSVKAGLQFPVSRIGRFLKKGRYAQRVGSGAPVYLAAVLEYLAAELLELAGNAAKDNKKSRIIPRHLLLAIRNDEELGKLLAGITIAHGGVIPNINPVLLPKKTAEKSPKEPKSPKKTAKSPKKA

SEQ ID NO: 7047 - protein, 171 aa, Zea mays
  Clone ID: TF_ZmC119_1144.pep
MVKYSTEPTNPTKSTKAMGRDLRVHFKNTRETAFALRKLSLTKAKRYLEDVIAHKQAIPFRRYCGGVGRTAQAKSRHSNGQGRWPVKSARFILDLLKNAESNAEVKGLDVDTLYVSHIQVNQAQKQRRRTYRAHGRINPYMSSPCHIELILSEKEEPVKKEAESQIATRNA

SEQ ID NO: 7048 - protein, 102 aa, Zea mays
  unsure (1)..(102): unsure at all Xaa locations
  Clone ID: TF_LIB4730-068-R1-K1-D9.pep
MARTKQXTARKSTGGKAPRKQLATKAARKSAPATGGVKKPHRFRPSTGALREIRTYHKSTXLLIRKLPSQPPGRGDPQALHTRPRIKALNESERDRKKVKQH

SEQ ID NO: 7049 - protein, 148 aa, Zea mays
  unsure (1)..(148): unsure at all Xaa locations
  Clone ID: TF_LIB5025-045-A1-XP1-A10.pep
MSAPATGXLKRPTRFLHATTTLLKIRKYQKSTELLIRKLPLQRLFPDIVQDFLSELRFQSCCVDALQEESXLPQHHSSRDTNLCCIHYKSVTIMPPDIQLARRILRAEGLRDYGMHLEVVIPDSVITDWLQRVEMSPTLCQPILSAKS

SEQ ID NO: 7050 - protein, 133 aa, Zea mays
  unsure (1)..(133): unsure at all Xaa locations
  Clone ID: TF_681794.pep
MXRTKQTARKSTGGKAPRKQLATKAARKSXPATGGVKKPHRFRPGTVXLREIRKYQKSTELLIRKLSFQXLVREIAQXFKTXLRFQSSAXSALQEEVDXYLSXSSXXHPXCHPRQXVTYAKXIQLPAVSXXEG

SEQ ID NO: 7051 - protein, 71 aa, Zea mays
  unsure (1)..(71): unsure at all Xaa locations
  Clone ID: TF_LIB4730-067-R1-K1-C4.pep
GTKAARKSYPXTLGIKKPHRCGPDSASLREIRIYKNSRKLLIRKSAIERLELQIGEDFKTDLSFQASAVAA

SEQ ID NO: 7052 - protein, 91 aa, Zea mays
  unsure (1)..(91): unsure at all Xaa locations
  Clone ID: TF_LIB3076-046-Q1-K1-H11.pep
MAPRAGWISAARKPXXEDPAAEKTTAGKKPKAEKRVPAGKSAGKEGGXGKRCKKKGKKSVETYKIYIFKVLKQVHPDICISSKAMFIMNSF

SEQ ID NO: 7053 - protein, 136 aa, Zea mays
  Clone ID: TF_ZmC22376_3.pep
MSSGGGRGKPKGSKAVSRSTKAGLQFPVGRIARYLKAGKYAERVGGGAPVYLSAVLEYLAAEVLELAGNAARDNKKNRIVPRHIQLAVRNDEELSKLLGAVTIAAGGVLPNIHQTLLPKKAGGKGKADIGSASQEF

SEQ ID NO: 7054 - protein, 155 aa, Zea mays
  unsure (1)..(155): unsure at all Xaa locations
  Clone ID: TF_LIB3608-036-Q1-K6-A11.pep
LSITHLGGGGGGPRSSAAAAVRRPWTPAQHEPAGRRIRARPGARPVVSIKKSVTRFLRGGLQFPVXRIGRYLKKGQYPQRVCTGTPFYLAVVLXYLAPXVLDLAGNAAIDNKKTHIILIHLLLAILNYKNLGKLLVRVTINHGGVLPNINPVFLP

SEQ ID NO: 7055 - protein, 125 aa, Zea mays
  unsure (1)..(125): unsure at all Xaa locations
  Clone ID: TF_jC-zmXLIB3527P006bd04a1.pep
MARTKQTARKSXTGGKAPRKQLATKAARKSAPATGGVKKPHRFRPGTVALREIRKYQKSTELLIRKLPFQRLVREIAQDFKTDLRVQASGVAALEEAAEAYLVGLFEDTKLCAIHAKRVTIMPKD

SEQ ID NO: 7056 - protein, 150 aa, Zea mays
  Clone ID: TF_ZmC369_118.pep
MAPKAEKKPAAKKPAEEEPAAEKAPAGKKPKAEKRVPAGKSAAKEGGEGKRGKKKGKKSVETYKIYIFKVLKQVHPDIGISSKAMSIMNSFINDIFEKLAAEAAKLARYNKKPTITSREIQTSVRLVLPGELAKHAVSEGTKAVTKFTSA

SEQ ID NO: 7057 - protein, 150 aa, Zea mays; identical to SEQ ID NO: 7056
  Clone ID: TF_ZmC369_145.pep

SEQ ID NO: 7058 - protein, 137 aa, Zea mays
  Clone ID: TF_ZmC369_41.pep
MAPKAEKKPAEKKPTEEKAEKKPRAEKRVPGKEGGEKKGKKKAKKSVETYKIYIFKVLKQVHPDIGISSKAMSIMNSFINDIFEKLAAEAAKLARYNKKPTITSREIQTSVRLVLPGELAKHAVSEGTKAVTKFTSA

SEQ ID NO: 7059 - protein, 129 aa, Zea mays
  Clone ID: TF_LIB4073-021-Q6-N1-F8.pep
AEKAPPEKKPKAEKRLPASKSSGKEGGEKKGKKKAKKSVETYKIYIFKVLKQVHPDIGISSKAMSIMNSFINDIFEKLAGEAAKLARYNKKPTITSREIQTSVRLVLPGELAKHAVSEGTKAVTKFTSN

SEQ ID NO: 7060 - protein, 135 aa, Zea mays
  Clone ID: TF_ZmC519532_1.pep
MAPKAAEKKPVEKTPAGKKPKAEKKVPASKEGGEKKGKKKSKKSVETYKIYIFKVLKQVHPDIGISSKAMSIMNSFINDIFEKLAGESAKLARYNKKPTITSREIQTSVRLVLPGELAKHAVSEGTKAVTKFTSA

SEQ ID NO: 7061 - protein, 146 aa, Zea mays
  Clone ID: TF_LIB5116-031-A1-PF1-E3.pep
MAGRKGGDRKKAVTRSVKAGLQFPVGRIGRYLKKGRYAQRVGSGAPVYLAAVLEYLAAEVLELAGNAAKDNKKTRIIPRHLLLAVRNDQELGRLLAGVTIAHGGVIPNINSVLLPKKSPAAAEKEAKSPKKKKAAKSPKKKVAAKE

SEQ ID NO: 7062 - protein, 146 aa, Zea mays
  Clone ID: TF_LIB5116-048-A2-PF1-D4.pep
MAGRKGGDRKKAVTRSVKAGLQFPVGRIGRYLKKGRYAQRVGSGAPVYLAAVLEYLAAEVLELAGNAAKDNKKTRIIPRHLLLAVRNDQELGRLLAGVTIAHGGVIPNINSVLLPKKSPAAAEKEAKSPKKKTSTKSPKKKVAAKE

SEQ ID NO: 7063 - protein, 53 aa, Zea mays
  Clone ID: TF_LIB3205-078-P1-N1-H9.pep
GFKTNAVLAFQKAVMAYFVGVLEETYFWAIHAKRVTFMAKDIQLALRIRGERV

SEQ ID NO: 7064 - protein, 98 aa, Zea mays
  Clone ID: TF_ZmC1045423_1.pep
KNMARTKQTARKSTGGKAPRKQLATKAARKSAPSTGGVKKPHRYRPGTVALREIRRYQMSTELLIRKLPFQRLVREIAQDFITDLRFQSAAIGALQEA

SEQ ID NO: 7065 - protein, 118 aa, Zea mays
  Clone ID: TF_LIB4729-119-A1-K1-A4.pep
MAPKAEKKPAAKKPAEEEPAAEKAPAGKKPKAEKRVPAGKSAAKEGGEGKRGKKKGKKSVETYKIYIFKVLKQVHPDIGISSKAMSIMNSFINDIFEKLAAEAAACRILSCVHVSCCS

SEQ ID NO: 7066 - protein, 136 aa, Zea mays
  unsure (1)..(136): unsure at all Xaa locations
  Clone ID: TF_LIB4729-002-R1-K1-A4.pep
MARTKQTXRKXTGGKAPRKQXATKAXRKSAPATXGXKKPHRFRPGTVALREIRKYQKSTELLIRKLPXQRLEREIAQDFKTDLRXQSSAVSDLQEAXEAYLXGLLKDTNLXAIHXKRATIMPKDMQLARRIRGERA

SEQ ID NO: 7067 - protein, 126 aa, Zea mays
  unsure (1)..(126): unsure at all Xaa locations
  Clone ID: TF_LIB3245-603-P1-K1-D6.pep
MAPKADKKPAAKKPAEEPATEKAEKAPAVKKPKAEKRLPAGKSAGKEGGEGKKGKKKAKKSVETYKIYIFKVLKQVHPDIGISXKAMSIMNSFINDIFEKLAAESAKLARYNKXPTVTCREIQTSV

SEQ ID NO: 7068 - protein, 136 aa, Zea mays
  unsure (1)..(136): unsure at all Xaa locations
  Clone ID: TF_LIB4729-064-R1-K1-E10.pep
MARTKQTARKSTGGKAPRKQLATKAARKSAPATGGVKKPHRFRPGTVALREIRKYQKSTELLIRKLPFQRLVREIAQDFKTDLRFQSSAVSALQEAAXAYLVGLFEDTNLCAIHAKRRTIMPKDIQLARRIRGERA

SEQ ID NO: 7069 - protein, 83 aa, Zea mays
  Clone ID: TF_LIB4979-058-R1-K1-G4.pep
MDSTGTGAGGKGKKGAAGRKVGGPRKKSVSRSVKAGLQFPVCRIGRYLKNGRYVQRVCICSRVYLTAVLVSLVCGIVKPHVFF

SEQ ID NO: 7070 - protein, 143 aa, Zea mays
  unsure (1)..(143): unsure at all Xaa locations
  Clone ID: TF_LIB4719-018-Q1-K1-H12.pep
GASRIRTTQPYSRARNHSRRSEARTKHTARKSTGGKAPRKQLGTKAARKSPPATGGAKKPQRFRPATVALREIRKYQKSTELIIPKLPFQRLARQIAQDFKTDPSLQSSADAAQEEAAQAYHGGACXEDTNLCAIHAKRVTIR

SEQ ID NO: 7071 - protein, 100 aa, Zea mays
  Clone ID: TF_LIB3180-038-P2-M2-C6.pep
MAPKAEKKPPAKNPAEEEPAAPAEKAPAGKKPKAEKRLPAGKSSGKEGGVDKKGRKMATKSVETYKIYIFKVLNLVYPDMGISSKAMSIMNSFINDIFEK

SEQ ID NO: 7072 - protein, 50 aa, Zea mays
  Clone ID: TF_ZmC369_57.pep
AEAAKLARYNKKPTITSREIQTSVRLVLPFELAKHAVSEGTKAVTKFTSS

SEQ ID NO: 7073 - protein, 157 aa, Zea mays
  unsure (1)..(157): unsure at all Xaa locations
  Clone ID: TF_LIB3608-022-Q1-K6-D10.pep
VLLSLHRCVPLPPRPWRPRPXKKPAAKNRRRRSPRREKTTCRVSKPKAEKRIPAGKSAGKEGGEGKRGKKKGKKSVETYKIYIFKXLKQVHPDIGIFSKAMSIMNSFINDIFEKLAGEAVKLARYNKKSTITYREIQTYVRLVLPGELAKHAVFEGT

SEQ ID NO: 7074 - protein, 202 aa, Zea mays
  Clone ID: TF_ZmC275904_1.pep
MRHISSHFFPSDPPFATKTPTRPASMAPKAEKKPAAKKPAEEEPAAEKAPAGKKPKAEKRVPAGKSAAKEGGEGKRGKKKGKKSVETYKIYIFKVLKQVHPDIGISSKAMSIMNSFINDIFEKLAAEAAKLARYNKKPTITCREIQTSVRLVLTGELGKHAVFEGTKVGAKCTLGLSWADGGWGIVCWGAGCGWGLALVGGG

SEQ ID NO: 7075 - protein, 157 aa, Zea mays
  unsure (1)..(157): unsure at all Xaa locations
  Clone ID: TF_LIB4667-010-Q1-K1-D4.pep
MARTKQTARKSTGGKAPRKQLATKAARKSAPATGGVKKPHRFRPGTVALREIRKYQKSTELLIRKLPFQRLVREIAQDFKTDLRFQSSAVSALQEAAEAYLVGLFEDTNLCAIHAKRVTIMPKDIQLARRIRXGEGLSVIFSVISARSEDVEMCWVL

SEQ ID NO: 7076 - protein, 183 aa, Zea mays
  unsure (1)..(183): unsure at all Xaa locations
  Clone ID: TF_LIB4979-095-A1-K1-A11.pep
MARTKQTARKSTGGKAPRKQLATKAARKSAPATGGVKKPHRFRPGTVALREIRKYQKSTELLIRKLPFQRLVREIAQDFKTDLRFQSSAVSALQEAAEAYLVGLFEDTNLCAIHAKRVTIMPKDIQLARRIRXGEGLSIVYSVISARPEDVEMCCSWVTVESSGWVFTAVTYYHDAYMAMNYV

SEQ ID NO: 7077 - protein, 266 aa, Zea mays
  Clone ID: TF_LIB4762-141-Q1-K1-F10.pep
WVPRGRPGRMSQSPPALPTSTPSSLACHAPFSRHRRRVPASSGPLGVGRNQTETEAEYDACLPSSAERPLRHSCPSSSSSSANRLPLTPAIGDCPSRIPPPRDARSPKDLCLRQREEIRTLKYVVLFLHVEPEPEFDRRLRGDISMLTDQIQCLTQELAAQVKAEKHSARSCFDEDGYCSSPRTSGFNEDTAFSLVCSITPPSHSHSKTIGMSIRCFQNDWPPCTSPPFSSIAPPRCWSWPGTLLVTTRTVSCCATSSWWCGTTRS

SEQ ID NO: 7078 - protein, 63 aa, Zea mays
  Clone ID: TF_LIB3150-112-P2-K1-C2.pep
PVTALQKAPKAYLVGLFEDPNLCAIHAKGVTIMPKEIQLGGGIRGEGPKGVRFRGLLPTAGGV

SEQ ID NO: 7079 - protein, 141 aa, Zea mays
  unsure (1)..(141): unsure at all Xaa locations
  Clone ID: TF_LIB4742-062-R1-K1-G12.pep
MASHARKKSSDVDAAEEQPDAPWYKAPARTKPNADXISLPENPSRSQGDSSPTTVDNKAHKSVTENNIYIFKXHKLVHPDITITSTAMTIMNSSVNDITEKLAGEGRKFSRXSKKTTITNRQIHTSGRLVPPGYIHKHTVS

SEQ ID NO: 7080 - protein, 144 aa, Zea mays
  unsure (1)..(144): unsure at all Xaa locations
  Clone ID: TF_LIB4762-004-R1-K1-A11.pep
MAPKADKKPAANKPAEEEPAAEKAPAGKKPKAEKRVPAGKSAGKEGGEGKRGRKKGKKSVETYKIYIFKVLKQVHPDIGICSKAMSIMNSFINDIFEKLAVDAVELARYNKKPTITSREIQTSVRLLLPGXLVKHAVLRGTQAV

SEQ ID NO: 7081 - protein, 119 aa, Zea mays
  unsure (1)..(119): unsure at all Xaa locations
  Clone ID: TF_ZmC653_44.pep
MARTKQTARKSTGGKAPRKQLATKAARKSAXLREIRKYQKSTELLIRKLPFQRLVREIAQDFKTDLRFQSSAVAALQEAAEAYLVGLFEDTNLCAIHAKRVTIMPKDIQLARRIRGERA

SEQ ID NO: 7082 - protein, 150 aa, Zea mays
  unsure (1)..(150): unsure at all Xaa locations
  Clone ID: TF_LIB4730-129-A1-K1-H11.pep
MAPIAEKKPAPNKTKEEXPRCDNAPAGNNPNADNRFPAVKSAAKEGGADERMKIKVKKIVETXHIYIFWVLKQEHPYIGISSKAMSIMNSFINDIFEKLAAEAAKLARYNKKPTITSREIQTSVRLVLPGELAKHAVSEGTKAVTKFTSA

SEQ ID NO: 7083 - protein, 127 aa, Zea mays
  unsure (1)..(127): unsure at all Xaa locations
  Clone ID: TF_LIB4762-046-R1-K1-H9.pep
GSPIWQRASEELITQQXRKAPPATGGVKKPHRFRPGTVALRGGGEYQKSTELLIRKLPFQRLVREIAQDFKTDLRFQSSAVSALQEAAEAYLVGLFEDTNLCAIHAKRVTIMPKDIQLARRIRGERA

SEQ ID NO: 7084 - protein, 94 aa, Zea mays
  Clone ID: TF_LIB4730-069-R1-K1-H10.pep
LIHRSQPYFCLVSSGGGGGARTKQTARRSTGGKAPRKQLATKAARKSDPATGGVKKPHRFRPGTVVLGEGRKYHKSTELIIRKIMLQRLVREIA

SEQ ID NO: 7085 - protein, 107 aa, Zea mays
  Clone ID: TF_LIB4729-123-A1-K1-D9.pep
MARTKQTARKSTGGKAPRKQLATKAARKSAPATGGVKKPHRFRPGTVALREIRKYQKSTELLIRKLPFQRLVREIAQDTNLCAIHAKRVTIMPKDIQLARRIRGERA

SEQ ID NO: 7086 - protein, 137 aa, Zea mays
  Clone ID: TF_700379678_FLI.pep
MDSTGTGAAGKGKKGAAGRKVGGPRKKSVSRSVKAGLQFPVYLAAVLEYLAAEVLELAGNAARDNKKTRIIPRHVLLAIRNDEELGKLLGGVTIAHGGVLPNINPVLLPKKTAEKASSGGSKEAKSPKKAAKSPKKA

SEQ ID NO: 7087 - protein, 388 aa, Zea mays
  Clone ID: TF_ZmC38430_1.pep
QPRLHRSIPTPNPNPSSVPRRRGPSRADSSPQIGGRGRFRFGSVVRSASLAGVPPRRSGSMVGGGRRGGAAAEEVKLNTGNVFAALESLKKKKKGDKGRAAGPSSRKKHGAGAAQQQQEPPQKDVFWAPAPLTTKSWADVEDDDDDDYFATTAPPRPVWAAAAAAEPAKEEEEDVEDAVRAALQEDVESDDEDLDDEDLDDGAEHEVEDAPAELAVKTVEALAAPPKDTERQLSKKELKKRELAELDAVLAELGLSGNSTSAAQDAEKEGANQAGDAEKKEDATVPSESKTSKKKKKKDKSSKEGRKETQEAAEGSEETASAGPDEEDTTAVDVKERLKKMASMKKKRSSKETDTGAKIAAAEATARSARLAAAKKKEKSHYNQQPVR

SEQ ID NO: 7088 - protein, 127 aa, Zea mays
  Clone ID: TF_LIB4980-056-A1-K1-D5.pep
MALKAEKKPTGGKAPAKSIEKKAKSGDAKKRKASRKETYSSYIYKVLKQVHPDTGISNKAMSILNSFVNDIFERIAGEASKLAAYNKRSTISSREIQTAVRLILPGELAKHAVSEGTKAVTKYTSSK

SEQ ID NO: 7089 - protein, 137 aa, Zea mays
  Clone ID: TF_LIB5116-035-A1-PF1-G12.pep
MSSAGSGRGKGKAVSKTVSRSSKAGLQFPVGRIARYLKIGKYAQRVGAGAPVYLSAVLEYLAAEVLELAGNAARDNKKTRIVPRHIQLAVRNDEELSRLLGAVTIAAGGVLPNIHTTLLPKKVGKGKGDIGSASQEF

SEQ ID NO: 7090 - protein, 95 aa, Zea mays
  unsure (1)..(95): unsure at all Xaa locations
  Clone ID: TF_LIB3076-042-Q1-K1-H11.pep
MGAGGTGTGGKANKGAAGRKACGPMKKSVTRSVKAGLQFPVGRIGRYLKKGRYAQRFXSGAPRYLAACLEYLATDVLELAGNAAKDNKKTRIVPR

SEQ ID NO: 7091 - protein, 160 aa, Zea mays
  unsure (1)..(160): unsure at all Xaa locations
  Clone ID: TF_LIB4766-069-R1-K1-B4.pep
MDSTGTVSGGKAKKAAPARXVGGPRKKSLXRCEKDGLQIPAGRXIGRYLNNGLYPHRGGTGAPEYLAAALQYLGPEVLELPGHAARDNQNTPIIPPHGLLAIRNHDXLGKLLGSVTIAHGVVLPNINPDLLSNNTGFTRPECGXKERQSPQKVAQSPKNA

SEQ ID NO: 7092 - protein, 126 aa, Zea mays
  Clone ID: TF_ZmC119_1386.pep
MDASGAGSKGKKGAAGRKAGGPRKKSVTRSVKAGLQFPVGRIGRYLKKGRYAQRVGTGAPVYLAAVLEYLAAEVLELAGNAAKDNKKTRIIPRHVLLPKKAAEKAASGGSKEPKSPKKGAKSPKKA

SEQ ID NO: 7093 - protein, 157 aa, Zea mays
  Clone ID: TF_LIB4764-084-R1-K1-F2.pep
MAPKAEKKPAEKKPAAEEKAEKTTAGKKPKSEKRLPASKSSGKEGGEKKGKKKAKKSVETYKIYIFKVLKQVHPDIDCCLSLKKIGISSKAMSIMNSFINDIFEKLAGEAAKLARYNKKPTITSREIQTSVRLVLPGELAKHAVSEGTKAVTKFTSN

SEQ ID NO: 7094 - protein, 149 aa, Zea mays
  unsure (1)..(149): unsure at all Xaa locations
  Clone ID: TF_LIB4730-012-R1-K1-D8.pep
MAPKAEMMPAEMKPAAEEKAEKTTAGKKPKAEKRLPASKSSGKEGGEKKGKKKAKKSVETYKIYIFKVLKQVHPDIGISSKAMSIMNSFINDIFEKLAGEAAKLARYNKKPTITSREIQTSVRLVLPGELAKHAVSEGXTKAVTKFTSN

SEQ ID NO: 7095 - protein, 136 aa, Zea mays
  Clone ID: TF_LIB5116-009-A1-PF1-B11.pep
MARTKQTARKSTGGKAPRKQLATKAARKSAPATGGVKKPHRFRPGTVALREIRKYQKSTELLIRKLPFQRLVREIAQDFKTDLRFQSSVVSALQEAAESYLVGLFEDTNLCAIHAKRVTIMPKDIQLARRIRGERA

SEQ ID NO: 7096 - protein, 146 aa, Zea mays
  Clone ID: TF_LIB5116-022-A1-PF1-A12.pep
MAGRKGGDRKKAVTRSVKAGLQFPVGRIGRYLKKGRYAQRVGSGAPVYLAAVLEYLAAEVLELAGNAAKDNKKTRIIPRHLLLAVRNDQELGRLLAGVTIAHGGVIPNINSVLLPKKSPAAAEKEAKSPKKKTTTKSPKKKVAAKE

SEQ ID NO: 7097 - protein, 136 aa, Zea mays; identical to SEQ ID NO: 7053
  Clone ID: TF_ZmC22376_1.pep

SEQ ID NO: 7098 - protein, 121 aa, Zea mays
  Clone ID: TF_LIB5025-017-B1-XP1-E3.pep
RPGSEETAHPTSLIHCSQPHSCLVSSLADPMVCTKQTARKTTGGKAPRKQMPTKAARKTAPDTGGAKKPHRFRPGTVALREIRKHHKSTVPLIRTLPLQRLQEITHDSQTDLMFFFFLTSP

SEQ ID NO: 7099 - protein, 120 aa, Zea mays
  Clone ID: TF_LIB4732-132-Q1-K1-G10.pep
MARTKQTARKSTGGKAPRKQLATKAARKSAPATGGVKKPHRFRPGTVALREIRKYQKSTELLIRKLPFQRLVREIAYDFKTDLRPQHPKNAIISCVILKEQRSPPSDNLYCIASYLLPAA

SEQ ID NO: 7100 - protein, 169 aa, Zea mays
  unsure (1)..(169): unsure at all Xaa locations
  Clone ID: TF_ZmC5819_4.pep
MVRGSLGKLAXXXXXXXXRWQHQQLRRLNIHEYQGAELMGKYGINVPXXXXXXXXHEVKDALKNMFPSEKEIVVKSQILAGGRGLGTFKSGLQGGVHIVKAEEAELIASKMLGQILITKQTGPEGKIVSKVYLCEKLSLTNEMYFAITLDRKTAGPLIIACSKGGKHYS

SEQ ID NO: 7101 - protein, 99 aa, Zea mays
  Clone ID: TF_LIB3227-021-P1-K1-F11.pep
ALAAATARSRCADCSFLVSVPNARTKQTARKSTGGRAPGKQLPTRAARKWARPTGGVKNPHRFRPGTVALREIRKSQKSTELLIRKFPSKRFVREIAQD

SEQ ID NO: 7102 - protein, 122 aa, Zea mays
  Clone ID: TF_LIB4730-068-R1-K1-A11.pep
MAPKAEKKPAAKKPAEEEPAAEKAPAGKKPKAEKRVPAGKSAAKEGGAGKRGKKKGKKSVETYKIYIFKVLKQVHPDIGISSKAMSIMNSFINDIFERLGAEAAKLARYNKKPTISFREIQT

SEQ ID NO: 7103 - protein, 137 aa, Zea mays
  unsure (1)..(137): unsure at all Xaa locations
  Clone ID: TF_LIB4730-066-R1-K1-H6.pep
MARTKHTXRKSTGGQAPRKQLATTGGPHVXHRATDGVNKPHRFRPGTVPLREIRKYHKSTELLIRKLPLQRLVREIAQDFKADLRFQSSAVSALQEAAEAYLVGLFEDTNLCAIHAXRVTIMPKDIQLARRIRGERA

SEQ ID NO: 7104 - protein, 151 aa, Zea mays
  unsure (1)..(151): unsure at all Xaa locations
  Clone ID: TF_ZmC369_36.pep
MAPKAEMKPVAKNPVEEEPAAEKTTAGKKPXADKLIPIIKSAGMDGYEGNRGKKKGKKSVETYKIYIVEGRYKQVHPDICISSNAMSIINSLINDIFEKLSGEAGKLARYNKKPTITSREIQTYVRLVLPGELAKHAVSEGTKADTKFTSC

SEQ ID NO: 7105 - protein, 122 aa, Zea mays
  Clone ID: TF_LIB4730-084-R1-K1-A8.pep
MDSTGTGAGGNGKKAAAGRKVSGPRKKSVSRSVTGRLQFPVGRIGRYLNKGLYAQRVDTFAPFYLVAVLEYLAAEVLEFAGNAARDNKNTRIIPRHVLLAIRNDDELVNLLGWVTIAHGGVL

SEQ ID NO: 7106 - protein, 136 aa, Zea mays
  unsure (1)..(136): unsure at all Xaa locations
  Clone ID: TF_LIB4742-028-R1-K1-F6.pep
MDASASGAGGKAKKGAAGRKGGVPRKKSVTRSVKAGLQFPVGRIGRYLKKGRYAQRVGTGAPVYLDAGLEYLVADVLELGVNAAMDNKKTRIIPRHVLLVIRNCEELVKLLFGVAIAHGXGVLPNINPVLLCKKTA

SEQ ID NO: 7107 - protein, 137 aa, Zea mays
  unsure (1)..(137): unsure at all Xaa locations
  Clone ID: TF_LIB4974-072-Q1-K1-H4.pep
MSCTKHTARKSTSRLRRLRKHMXLRRPAESVPATGGVKKPHRFRPGTVALREIRKYQKSTELLIRKLPFQRLVRXIAQDFKTDLRFQSSAVSALQEAAEAYLVGLFEDTNLCAIHAKSVTIMPKDIQLVRRIRVERA

SEQ ID NO: 7108 - protein, 150 aa, Zea mays
  Clone ID: TF_LIB5027-055-Q1-XP1-F12.pep
MAPKAEKKPAAKNPGEEEPAAEKAPAGKKPKGEKGAPVGKSAAKEGGGGKRGKKKGKKRGETYKIYFFKGLKQGHPDFGISSKAMSIMNSFINDIFKKFVAEAAKFARYNKKPTITSREIQTSGRLVLPGELAKHAVSEGTKAVTKFTSA

SEQ ID NO: 7109 - protein, 191 aa, Zea mays
  Clone ID: TF_ZmC119_1450.pep
MDSTGTGAAGKGKKGAAGRKVGGPRKKSVSRSVKAGLQFPVGRIGRYLKKGRYAQRVGTGAPVYLAAVLEYLAAEVLQFEPSSLFVLIWRRSINSCVPIRFASLFDQVLELAGNAARDNKKTRIIPRHVLLAIRNDEELGKLLGGVTIAHGGVLPNINPVLLPKKTAEKASSGGSKEAKSPKKAAKSPKKA

SEQ ID NO: 7110 - protein, 125 aa, Zea mays
  Clone ID: TF_LIB4826-069-R1-N2-F1.pep
SYGRLGPSRPARKAARKSAPTTSGVKKPHRYRPGTVALREIRKYQKSTELLIRKLPFQRLVREIAQDFKTDLRFQSHAVLALQEAAEAYLVGLFEDTNLCAIHAKRVTIMPKDIQLARRIRGERA

SEQ ID NO: 7111 - protein, 136 aa, Zea mays
  Clone ID: TF_LIB4829-002-R1-N1-C2.pep
MARTKQTARKSTGGKAPRKQLASKAARKSAPSTGGVKKPHRYKPGTVALREIRRYQKSTELLIRKLPFQRLVREIAQDFKSDLRFQSSAIGALQESVESYLVSLFEDTNLCAIHAKRVTIQSKDIQLARRLRGERN

SEQ ID NO: 7112 - protein, 151 aa, Zea mays
  Clone ID: TF_ZmC369_138.pep
MAPKAEKKPAAKKPAEEEPATEKVEKAPAGKKPKAEKRLPAGKSKEGGEGKKGKKKAKKSVETYKIYIFKVLKQVHPDIGISSKAMSIMNSFINDIFEKLAAESAKLARYNKKPTITSREIQTSVRLVLPGELAKHAVSEGTKAVTKFTSS

SEQ ID NO: 7113 - protein, 151 aa, Zea mays; identical to SEQ ID NO: 7112
  Clone ID: TF_ZmC369_153.pep

SEQ ID NO: 7114 - protein, 78 aa, Zea mays
  Clone ID: TF_LIB3180-008-P2-M1-A11.pep
MARTKQTARKSTGGKAPRKQLATKAARKSAPATGGVKKPYRFRPGTVALREIRKYQKSTELLIRKLSFQRLVREIAQD

SEQ ID NO: 7115 - protein, 95 aa, Zea mays
  Clone ID: TF_LIB3587-200-Q1-N6-H6.pep
PAKPPKLARYNKKPPIPSREIKTSVRLVLPGELAKHPVWEGTKAVPKFPWFYPPCCRGRCCLLFKQALSWAASHARSGGWLVCVSGPGAFACVMN

SEQ ID NO: 7116 - protein, 172 aa, Zea mays
  Clone ID: TF_LIB3606-025-Q6-K6-A3.pep
HCQLRNHNSYNELVAQKLVDMKNSQVTITVNGDEIHMFQEIGHLRLKLTANRSNQPVEDHLSRRQLYPLHSQWMQQDATELNHQGQESLGGRGKPWNYQGIVQQTVQANAPFSYSFFGRVGPRRAQDLSRERHPRRRHLHGARPAQDRHSHGRRLRAQAPGPHPLRLRRLGR

SEQ ID NO: 7117 - protein, 90 aa, Zea mays
  Clone ID: TF_LIB5116-067-A1-PF1-C4.pep
MARTKQTARKSTGGKAPRKQLATKAARKSAPATGGVKKPHRFRPGTVALREIRKYQKSTELLIRKLPFQRLVREIAQDFKTDLRFQSSAV

SEQ ID NO: 7118 - protein, 159 aa, Zea mays
  Clone ID: TF_ZmC653_101.pep
PASAISLAADPRATQSASLPTVPMARTKQTARKSTGGKAPRKQLATKAARKSAPATGGVKKPHRFRPGTVALREIRKYQKSTELLIRKLPFQRLVREIAQDFKTDLRFQSSAVAALQEASEAYLVGLFEDTNLCAIHAKRVTIMPKDIQLARRIRVERA

SEQ ID NO: 7119 - protein, 143 aa, Zea mays
  unsure (1)..(143): unsure at all Xaa locations
  Clone ID: TF_LIB4979-020-A1-K1-G12.pep
VEEEEASQKXAPEVNGPVVKIPQEDKRLPVAISGGDEGDDKKGTKKVKNSVXTYKIYVFXVLKHAHPXDIDISSKVMYIMNSFINDVCERIAGEDVKLARDKIKTTITXSREIMTSVRLYLPGELDKHAVSEGTKDVTKLTSA

SEQ ID NO: 7120 - protein, 85 aa, Zea mays
  unsure (1)..(85): unsure at all Xaa locations
  Clone ID: TF_LIB3156-011-Q1-K1-C2.pep
TGRPTRTAERVRAGAPVYLAAVLEXIADGVLELDNNAVRDNKKTRIDPRLIQIADRIDKQMFRLLGTVTITSGGVMPNIHNLSLP

SEQ ID NO: 7121 - protein, 125 aa, Zea mays
  unsure (1)..(125): unsure at all Xaa locations
  Clone ID: TF_LIB4766-065-R1-K1-G3.pep
KPKEGKRLPAAXSGAGEGKKGKKKSEKSVETYKIYVFYVLXLVHPDIRISSNAMSIMNFCINEHLSRYLSAEGAKFARYNXKPIITYREMQTSGRLVLPGKLAKLAXSEGTKAVTKFTSSHIGCL

SEQ ID NO: 7122 - protein, 137 aa, Zea mays
  Clone ID: TF_ZmC683013_1.pep
MAPKAADKKPASKAPATASKAPEKKDAGKKTAASGDKKKRSKTRKETYSFYIYKVLKQVHPDTGISNRAMSILNSFVNDIFERVAFEASKLAAYNKKSPIFSREIQTSVRFILPGELAKHPVFEGTKAVTKYFSSTK

SEQ ID NO: 7123 - protein, 148 aa, Zea mays
  Clone ID: TF_LIB4729-038-R1-K1-D2.pep
MAPKAEKKPAEKKPAAEEKAEKTTAGKKPKAEKRLPASKSSGKEGGEKKGKKKAKKSVETYKIYIFKVLKQVHPDIDISSKAMSIMNSFINDIFEKLAGEAAKLARYNKKPTITSREIQTSVRLVLPGELAKHAVSEGTKAVTKFTSN

SEQ ID NO: 7124 - protein, 124 aa, Zea mays
  unsure (1)..(124): unsure at all Xaa locations
  Clone ID: TF_LIB4827-059-R1-N1-E1.pep
MAPKAEKKPAEKKPAAEEKXEKTTAVKASREXAASKSSGKEGGEKKGKKKAKKSVETYKIYIXXVLKQVHPDIGISSKAMSIMNSFINDIFXKLAXGEAAKLARYNKKPTITSREIQTSVRLVL

SEQ ID NO: 7125 - protein, 121 aa, Zea mays
  unsure (1)..(121): unsure at all Xaa locations
  Clone ID: TF_LIB4979-020-A1-K1-E4.pep
MAGRGKAIGAGAAXKKATSRSSKGGLQFPGGRIARFLQDGXHAQRVDAGXPLSSLSCALEHLAAESSLELAANATRHNKKTRIVLRHIQIAARNDEDLXTKLLGGATIASGGVMPNIHQHL

SEQ ID NO: 7126 - protein, 117 aa, Zea mays
  unsure (1)..(117): unsure at all Xaa locations
  Clone ID: TF_LIB143-037-Q1-E1-H1.pep
SPPAPIARTKQTARTSTGGNAPQTHLATNAARKMDPATRGLKNPHRFLPGNVALREIPTYXTSTDLLIRKLPFQLLVQEITXDFNTDIRFQSSAVATLQDATQAXLVSLFEDTDLCS

SEQ ID NO: 7127 - protein, 144 aa, Zea mays
  unsure (1)..(144): unsure at all Xaa locations
  Clone ID: TF_LIB3150-035-Q1-N1-E2.pep
NLPKPFVPNHLLPQIRGPKQTAGLLTAPMARTNQTARKSTAGKAPRKQLATNAARKSAPATGGVKKPHRFRPGTVALREIRXYQKSTELLIRKLPFQRLVREIAQDFKTDLRFQSSAVAALQEASEAYLVGLFEDTNLCAIHAK

SEQ ID NO: 7128 - protein, 136 aa, Zea mays; identical to SEQ ID NO: 6802
  Clone ID: TF_ZmC653_52.pep

SEQ ID NO: 7129 - protein, 122 aa, Zea mays
  Clone ID: TF_ZmC653_74.pep
DAPAVVLWLQAARKSAPTTGGVKKPHRYRPGTVALREIRKYQKSTELLIRKLPFQRLVREIAQDFKTDLRFQSHAVLALQEAAEAYLVGLFEDTNLCAIHAKRVTIMPKDIQLARRIRGERA

SEQ ID NO: 7130 - protein, 147 aa, Zea mays
  unsure (1)..(147): unsure at all Xaa locations
  Clone ID: TF_LIB4974-072-Q1-K1-C5.pep
MDSTGTGAGGKGKKGASWCXVGGSRKKSVSRSVKAGLQFPVGRIGRYLKKGRYAQRVGIGGPVYLVAVLEYLVAEVLEVAGNVARDNKNTRIIPRHVLLAIRNDEELVKLLCGVTISHGGVLPNINPVLLAKNTAVRRRAVCVARRL

SEQ ID NO: 7131 - protein, 136 aa, Zea mays
  Clone ID: TF_LIB5116-014-A1-PF1-C11.pep
MARTKQTARKSTGGKAPRKQLATKAARKSAPATGGVKKPHRFRPGTVALREIRKYQKSTELLIRKLPFQRLVREIAQDFKTDLRFQSSAVSALQEAAEAYLVGMFEDTNLCAIHAKRVTIMPKDIQLARRIRRERA

SEQ ID NO: 7132 - protein, 148 aa, Zea mays
  Clone ID: TF_LIB4760-007-R1-M1-F1.pep
MAPKAEKKPAEKKPAAEEKAEKTTAGKKPKSEKRLPASKSSGKEGGEKKGRKKAKKSVETYKIYIFKVLKQVHPDIGISSKAMSIMNSFINDIFEKLAGEAAKLARYNKKPTITSREIQTSVRLVLPGELAKHAVSEGTKAVTKFTSN

SEQ ID NO: 7133 - protein, 154 aa, Zea mays
  Clone ID: TF_473604.pep
MAPKAEKKPAAKKVAEEEPSEKAAPAEKAPAGKKPKAEKRLPAGKSAGKEGGDKKGRKKAKKSVETYKIYIFKVLKQVHPDIGISSKAMSIMNSFINDIFEKLAAEAAKLARYNKKPTITSREIQTSVRLVLPGELAKHAVSEGTKAVTKFTSS

SEQ ID NO: 7134 - protein, 154 aa, Zea mays; identical to SEQ ID NO: 7133
  Clone ID: TF_ZmC369_130.pep

SEQ ID NO: 7135 - protein, 154 aa, Zea mays; identical to SEQ ID NO: 7133
  Clone ID: TF_ZmC369_143.pep

SEQ ID NO: 7136 - protein, 154 aa, Zea mays
  Clone ID: TF_ZmC369_52.pep
MAPKAEKKPAAKKVAEEEPSEKAAPAEKAPAGKKAKAEKRLPAGKSAGKEGGDKKGRKKAKKSVETYKIYIFKVLKQVHPDIGISSKAMSIMNSFINDIFEKLAAEAAKLARYNKKPTITSREIQTSVRLVLPGELAKHAVSEGTKAVTKFTSS

SEQ ID NO: 7137 - protein, 89 aa, Zea mays
  unsure (1)..(89): unsure at all Xaa locations
  Clone ID: TF_LIB4729-002-R1-K1-F1.pep
MARTKQTARKSTGGKAPRKQLATKAARKSAPATGGVKKPHRFRPGTVALREIRKYQKSTELLIRKLPFPXALRPGDRRRDFPRTRTFPL

SEQ ID NO: 7138 - protein, 105 aa, Zea mays
  unsure (1)..(105): unsure at all Xaa locations
  Clone ID: TF_LIB3595-030-Q1-N6-E12.pep
QRVGAGAPVCLPPVVEYLRGEVVELAGXLPRSHQKTRIITSQVLLRDRXDKELAYLLDGVSIAPAGVLPNTDHVVVPNKPGEQGFSVGTKEAKSPNKTAKSPNKA

SEQ ID NO: 7139 - protein, 108 aa, Zea mays
  unsure (1)..(108): unsure at all Xaa locations
  Clone ID: TF_LIB4668-005-R1-K1-C12.pep
APSSPQHPYSEPSILSRSVARTKQTVRKSTGGKAPRKQLATKAARMSAPATGGVKKPHRFRPGTVALRGRRSPXTSSGLLIRSLPFPRLVRGVALGFLTALRFPRAAG

SEQ ID NO: 7140 - protein, 151 aa, Zea mays
  unsure (1)..(151): unsure at all Xaa locations
  Clone ID: TF_LIB4979-055-R1-K1-B6.pep
MSLFRIPSALYLKKGTMRAKGKGIESEAADKVTARSSQAALQFPVAIIDKFLIPAKYAERVPPVPPVYLPDVLEYLAADGLELCGNAARDSNNTRIVPCHIQLGVRNYEDVSRLVXRSTIGSAEDMPCIHXLLLPKKGVHCSDQGANVDQD

SEQ ID NO: 7141 - protein, 127 aa, Zea mays
  Clone ID: TF_LIB3357-037-P1-K1-D9.pep
MAPEAEKKPAANKPAEDEPAVDKTTAGKKPKAAKRVPAGKSAGKEGGEGKRGMKNGKMSVETYKIYIFKVLKQVHPDIGISSKAMSIMNSFINDIFKKLAGEAVKLARYNKKPTITFREIQTFVRLV

SEQ ID NO: 7142 - protein, 159 aa, Zea mays
  Clone ID: TF_ZmC653_25.pep
PASHTLIHSSQPYSCLVSSLAAPMARTKQTARKSTGGKAPRKQLATKAARKSAPATGGVKKPHRFRPGTVALREIRKYQKSTELLIRKLPFQRLVREIAQDFKTDLRFQSSAVAALQEAAEAYLVGLFEDTNLCARRAARCCSVTRSRWWHSFRGFLIL

SEQ ID NO: 7143 - protein, 131 aa, Zea mays
  unsure (1)..(131): unsure at all Xaa locations
  Clone ID: TF_LIB3608-043-Q1-K6-H7.pep
SSIGAQSRGGGRGEQLATKAARKSAPATGGVKKPXRFRPGTVALREIRMFQKSTELLGGGGPFQRLVREIAQDFKTDLRXQSSAVAALQEAAEAYLVGLFEDTNXWAIHAXRVTLLPKDMQFGRRIRGERA

SEQ ID NO: 7144 - protein, 51 aa, Zea mays
  Clone ID: TF_LIB3227-027-P1-K1-C8.pep
QRHAVLALEEGVDAYLVGLHEDTNLCAMHANRVTIMPNDIHLERRIRRERA

SEQ ID NO: 7145 - protein, 132 aa, Zea mays
  unsure (1)..(132): unsure at all Xaa locations
  Clone ID: TF_LIB3960-003-Q1-K6-F5.pep
LYWERRSSILAVSGAGGKANKALWRARPTGPTNNXVSRSCRAGLQFPVSRVRAVPQKGRYAHGVRTAAPVYLCFELEYLQVEAFXLPATRXRNIKKTRIIPRHVLISIRNEQELKKLLTGVTMLHSGLLSNI

SEQ ID NO: 7146 - protein, 122 aa, Zea mays
  unsure (1)..(122): unsure at all Xaa locations
  Clone ID: TF_LIB4746-094-R1-K1-H9.pep
LRTWRPPSNSGPKSAPTTAGVNKLHRYRPGTVALREIRKYHKSTELLIRKLPFQRLVKXELHRYFKTDLXFQSHAVLDLQEAAEAYLVGLFEDTNLCAIHAKRVTIMPKDIQLARRIRGERA

SEQ ID NO: 7147 - protein, 154 aa, Zea mays
  unsure (1)..(154): unsure at all Xaa locations
  Clone ID: TF_LIB4766-118-A1-K1-D8.pep
MKTNRREAPRNHLGTNAARKPDPRPVGAKKPHRFRPFTVALREIRKDHNRSDMIIFKLPFKRLDGEIXKELSRYDLRAQPLSFVXKLQEAVEEDLEGLFYXTSLSLIHATIVTIMTKDIHIARRIWIERHRAPVVQLCLVVVLQVYGGYRYLTP

SEQ ID NO: 7148 - protein, 92 aa, Zea mays
  Clone ID: TF_LIB3279-005-P1-K1-D5.pep
MFRTKQTDRKSTGGKAPRTQLATKAARKSAPTTGGVKKPHRYRPGTVALREIRKYQKSTELLIRKLPFQRLVREIAQDFKTDLRFQSHAVLA

SEQ ID NO: 7149 - protein, 87 aa, Zea mays
  Clone ID: TF_ZmC119_1366.pep
MILIYIILIKKKKKKKLETSSPRAEFGTRLELAGNAAKDNKKTRIIPRHVLLAIRNDEELGKLLAGVTITHGGVLPNIHSVLLPKKA

SEQ ID NO: 7150 - protein, 141 aa, Zea mays
  unsure (1)..(141): unsure at all Xaa locations
  Clone ID: TF_LIB3357-026-P1-K1-B7.pep
VSPSTALTGDSTYHKLSGCTGRTRQGRNTTGCKVSRKQVVTKAARKSXPATGGVNNSHPFRPGTVALREIRKYQKSTELLIRKLPFQRLVREIAQDFKTDLRFQSSAVAALXEAAEAYLVGLFEDTNLCAIHAKRVTIMPK

SEQ ID NO: 7151 - protein, 145 aa, Zea mays
  unsure (1)..(145): unsure at all Xaa locations
  Clone ID: TF_LIB4071-010-Q6-K1-F11.pep
MAPKAEKKPAAKKPAEEEPAAEKAPAGKKPKAEKRVPAGKSAGMEGXRERGARKKGKKSVETYKIYIFKVLKHVHPDIGISSKAMSIMNSFINDIFEKLAVEAVKLARYNMKPTITSREIHTSVRLVLPGELAKHAVSXGTKAVT

SEQ ID NO: 7152 - protein, 103 aa, Zea mays
  unsure (1)..(103): unsure at all Xaa locations
  Clone ID: TF_LIB4729-048-R1-K1-C1.pep
YFPFVGVESRLSTRNSAFVPTPEHFLLVPDKPIEAEIRPWTPPAPEQGVRGKKGAAGRKVGGPRKKSVSRSVKAGXQFPVGRIGRYLKKGRYAQRVGTGAPVY

SEQ ID NO: 7153 - protein, 192 aa, Zea mays
  unsure (1)..(192): unsure at all Xaa locations
  Clone ID: TF_LIB4976-005-R1-K1-E12.pep
MECMAEKKAAANKPPEDEPADEKGPVVKIPKVENGDPAGKAAVQECVEGMSCKKNVRXSVEIYKIYIFEVXLKQVHPDIGTSSKAMSIMNSFINDIFEKLAAEAVKLARYNKKSTITSREIQTSVRLVLPGELGKHAVSEGTKGVTKFTSAYAARPPLAGFSPEFTSLAVDMCCCLLGFYGCYLSGCSNCSI

SEQ ID NO: 7154 - protein, 103 aa, Zea mays
  unsure (1)..(103): unsure at all Xaa locations
  Clone ID: TF_3341036.pep
GEKKGKKKAKKSVETYKIYIFKVLKQVHPDIGISSKAMSIMNSFINDIFEKFAAEAAKFAXYNKKPTITSREIQTSVRFVFPGELAKHAVSEGTKAVTKFTSS

SEQ ID NO: 7155 - protein, 196 aa, Zea mays
  unsure (1)..(196): unsure at all Xaa locations
  Clone ID: TF_LIB4979-103-B1-K1-A5.pep
IPFSVSSSVPYQISIILGSSLAPPHTCRHGLQRRHYQGDRRVWPRRKACAPRNNSVTXSVKDGLQFPDSRIGRYLKKDRYAQRVGTGAPVYLAAVLEYLAAEVLELAGNAAKDNKKTRIIPRHVLLAIRNDEELGKLLAGVTIAHGGVLPNIHSVLLPKKAAENAASAGSKEPKSPKKGAKSPKKAYKVGTSFALC

SEQ ID NO: 7156 - protein, 140 aa, Zea mays
  unsure (1)..(140): unsure at all Xaa locations
  Clone ID: TF_LIB4669-003-Q2-K1-C9.pep
VPLVVTAGPHTISFSLAAYPRATQSASLPTVPMARTKQTARKSTGGKAPRKQLATKAARKSAPATGGVKKPHRFRPGTVALRXEIRKYQKSTELLIRKLPFQRLCGDRQTSDDFASELPVAALQEASEAYLGRVSFEGHP

SEQ ID NO: 7157 - protein, 89 aa, Zea mays
  Clone ID: TF_ZmC653_31.pep
MARTKQTARKSTGGKAPRKQLATKAARKSAPATGGVKKPHRFRPGTVALREIRKYQKSTELLIRKLPFQRVTIMPKDIQLARRIRGERA

SEQ ID NO: 7158 - protein, 123 aa, Zea mays
  unsure (1)..(123): unsure at all Xaa locations
  Clone ID: TF_LIB3637-196-Q1-K6-G12.pep
RPVSISPSAARALLEQGRYAQRVGTGAPVXYLAAVLEXLAAEVLELAGNAARAQQXKTRIIPRHVLLAIRNDEELGKLLGGVTIAHGGVLPNINPVLLPKKRRRMRPVAGARRQSRPISRQVP

SEQ ID NO: 7159 - protein, 133 aa, Zea mays
  unsure (1)..(133): unsure at all Xaa locations
  Clone ID: TF_uC-zmflB73006d03b1.pep
MARGFFKKPAVFSPAEEEPAGXCPAGKKPKAEKRXPAGKSASTEGGEKNGMKKAKKSVETYKIYMFKELKQVHPDIGIWSKAMCIMNSSMNDIFEKLAADADKLARYIKKPTITFREIHTFIGLVLPGELAKH

SEQ ID NO: 7160 - protein, 109 aa, Zea mays
  Clone ID: TF_ZmC653_42.pep
MARTKQTARKSTGGKAPRKQLATKAARKSAPATGGVKKPHRFRPGTVALREIRKYQKSTELLIRKLPFQRLVREIAQDFKTNLCAIHAKRVTIMPKDIQLARRIRGERA

SEQ ID NO: 7161 - protein, 135 aa, Zea mays
  Clone ID: TF_LIB4732-125-Q1-K1-D7.pep
MGGKGKAIGSGAAKKATSRSSKVGLQFPGERIARFLKAGKYAKRVGAGAPVYLVAGLENLAAEVLELAGNAARDNKKTRIEPRHIQFAVRNDKKLSRLLGTGTIARGGERPNIHNLLLPKKAGGGSAKVAVGDKN

SEQ ID NO: 7162 - protein, 131 aa, Zea mays
  Clone ID: TF_LIB5024-002-A1-K1-D11.pep
KKPAEKKPAEEKAEKKPRAEKRVPSKEGGEKKGKKKAKKSVETYKIYIFKVLKQVHPDIGISSKAMSIMNSFINDIFEKLAAEAAKLARYNKKPTITSREIQTSVRLVLPGELAKHAVSEGTKAVTKFTSS

SEQ ID NO: 7163 - protein, 137 aa, Zea mays
  Clone ID: TF_ZmC369_129.pep
MAPKAEKKPAEKKPAEEKAEKKPRAEKRVPSKEGGEKKGKKKAKKSVETYKIYIFKVLKQVHPDIGISSKAMSIMNSFINDIFEKLAAEAAKLARYNKKPTITSREIQTSVRLVLPGELAKHAVSEGTKAVTKFTSS

SEQ ID NO: 7164 - protein, 137 aa, Zea mays; identical to SEQ ID NO: 7163
  Clone ID: TF_ZmC369_46.pep

SEQ ID NO: 7165 - protein, 137 aa, Zea mays; identical to SEQ ID NO: 7163
  Clone ID: TF_ZmC369_75.pep

SEQ ID NO: 7166 - protein, 136 aa, Zea mays
  Clone ID: TF_ZmC653_54.pep
MARTKQTARKSTGGKAPRKQLATKAARKSAPTTGGVKKPHRYRPGTVALREIRKYQKSTELLIRKLPFQRLVREIAQDFKTDLRFQSHAVLALQEAAEAYLVGLFEDTTLCAIHAKRVTIMPKDIQLARRIRGERA

SEQ ID NO: 7167 - protein, 167 aa, Zea mays
  Clone ID: TF_LIB4756-019-Q1-K1-F11.pep
LHALQLFAFTWAARLVLSGVATCLLLTRLLSQLTRLFSHLFNITSFANSNSSRSSKAGLAFPVGRVHRLLRKGNYAQRVGAGAPVYLAAVLEYLAAEILELAGNAARDNKKTRIIPRHLQLAIRNDEELNKLLGHVTIAQGGVLPNIHQNLLPKKTAKPGKGPSQEL

SEQ ID NO: 7168 - protein, 79 aa, Zea mays
  unsure (1)..(79): unsure at all Xaa locations
  Clone ID: TF_700071688H1.pep
MVRTKQTARKSTGGKASRKQLATKAARKSASASGGAKNPHRFRRVHVVLLEICKXXKTMELLMRNLDFQLLARDIAQDF

SEQ ID NO: 7169 - protein, 55 aa, Zea mays
  Clone ID: TF_jC-zmX700553022b1.pep
FEKLAAKATKLARYNKKPTIPYGEIQTSVGLVLPGELVKHAVSEGAKAVPKFPSS

SEQ ID NO: 7170 - protein, 77 aa, Zea mays
  unsure (1)..(77): unsure at all Xaa locations
  Clone ID: TF_LIB3062-034-Q1-K1-D11.pep
MARTKHTARKSTGGKAPMKQLSTKAARKSAPATVVLKNPDRFRPRTVALLXIRKYHNSTELLIRKLSFQRLVREIAQ

SEQ ID NO: 7171 - protein, 77 aa, Zea mays
  Clone ID: TF_LIB3067-001-Q1-K1-A4.pep
YEADSSASPLGGKAPRKQLATKAARKSAPTTGGVKKPHRYRPVTVALREIRMYQYSSDLLIRMFYFMLFVRKISLDL

SEQ ID NO: 7172 - protein, 115 aa, Zea mays
  unsure (1)..(115): unsure at all Xaa locations
  Clone ID: TF_LIB3587-230-Q1-K6-H6.pep
MARTKQTARKSTGGKAPRKQLATKAARXSAPTTGGVKKPDRYRPETVALREIRKYYKSTVLLIRKLSFQRLAREIGQDFKADVSIQSHAELALQEADEAYLVRLYNDTNLGSVAC

SEQ ID NO: 7173 - protein, 135 aa, Zea mays
  Clone ID: TF_LIB4766-040-R1-K1-F3.pep
SRPAGPSPRPSQKIPHFLRGEESVKDRAPAATTSGRGKGGKGLGKGGAKRHRKVLRDNIQGITKPAIRRLARRGGVKRISGLIYEETRGVLKIFLENVIRDAVTYTEHARRKTVTAMDVVYALKRQGRTLYGFGG

SEQ ID NO: 7174 - protein, 487 aa, Zea mays
  unsure (1)..(487): unsure at all Xaa locations
  Clone ID: TF_ZmC697_106.pep
MAHPSSAAAVSSTAPAANPSYGAREEGGARSPPSPSPSPSQRGRAKVVIVMGATGAGKSRLAVDLAAHFAGVEVVSADSMQLYRGLDVLTNKAPLHEQNGVPHHLLSVIDPSVEFTCRDFRDRALPIIQEIVDRGGLPVVVGGTNFYIQALVSPFLLDDMAEEMQGCTLRDHIDDGIGLTDEDEGNGFERLKEIDPVAAQRIHPNDHRKIKRYLELYATTGALPSDLFQGEAAKYKLAGNSWXIMSEQKWGRPSNSRLYCCFLWVDADLQVLDSYVNKRVDCMMDGGLLDEVCSIYDADAVYTQGLRQAIGVREFDEFFRAYLARKESGEGSCASLLGMHDDQLKSLLDEFFSQLKANTRRLVRRQRRRLHRLSKDFGWNLHRVDATEAFFCATDDSWQKKVVEPCVDVVRRFLSDDSTVLPSTSASDPSSRELWTQYVCEACDNRVLRGAHEWEQHRQGRGHRKRVQRLKRKSLRPWPSLLPQDRS

SEQ ID NO: 7175 - protein, 465 aa, Zea mays
  unsure (1)..(465): unsure at all Xaa locations
  Clone ID: TF_ZmC697_131.pep
MIPGQHFAGKKKKKKRLRANQTKQTLLGCFPFSIPMAQDDIPESSASGSPTSSAPAARLNAAAPEFTPRSAAQHHGNNAHRRGPHHHHQPHHHPHYHPHQHYQPRHQHHQAQAEDEGSAAATAEDREGPAGAVQAQHRLPEPEARKLVKQVEFYFSDINLATTEHLMKFIAKDPDGFVPISVVASFRKIREIVYDRSLLVAALRTSSELVVSEDGKHVKRLQPFNAEEVQSRIVVAENLPEDQKHQTLMKIFSAVGNVKSIRTCYPQDISPAAANRTSRIEMIFANKLHSFVEYSAVEDAEKAVAEFGGGGNWREGIRVRSLLGCLKHGLGQGRKXGDEEYAADEDGPDTTDHPRDFGTDVTAQISETHFDHQAEDGTHDKGGMRQQGRGRGRGGRGRGRGQHYGHNSRDGHHPIGTPPSEHPAVPKPPPGPRMPDGTKGFTMGRGKPLSITIDAAANPTTTDAA

SEQ ID NO: 7176 - protein, 217 aa, Zea mays
  Clone ID: TF_ZmC697_152.pep
MSPEMRLTPPLRASLRIAGLVMPWMLSRSTLRWRLAPPLPSPLPPLPRPDIAETESYAPTRPPTRPPTRPPTRPLGCLKHGLGQGRKGGDEEYAADEDGPDTTDHPRDFGTDVTAQISETHFDHQAEDGTHDKGGMRQQGRGRGRGGRGRGRGQHYGHNSRDGHHPIGTPPSEHPAVPKPPPGPRMPDGTKGFTMGRGKPLSITIDAAANPTTTDAA

SEQ ID NO: 7177 - protein, 134 aa, Zea mays
  unsure (1)..(134): unsure at all Xaa locations
  Clone ID: TF_ZmC697_154.pep
MSSFQAPKKKKKKKKSTRPPTQKTLAAATEAASQVSRSVHPAAVMKRNPRVTSSRRKCRKAHFTAPSSVRRVLMSAGLSTELRHKYNVRSIPIRKDHXVQVVRGTYKGREGKGGQVYRRRWVIHLERXTPXKVN

SEQ ID NO: 7178 - protein, 208 aa, Zea mays
  Clone ID: TF_ZmC697_155.pep
ISPEMRFTPPLRASLRIAGLVMPWMLSRSTLRWRFAPPLPRPLPPLPRPDIVAAGALSFTLSSPRRKWGIFLTSSRSRAAARDLELVQISQSSCSTPLSSSNSAAMSGRGKGGKGLGKGGAKRHRKVLRDNIQGITKPAIRRLARRGGVKRISGLIYEETRGVLKIFLENVIRDAVTYTEHARRKTVTAMDVVYALKRQGRTLYGFGG

SEQ ID NO: 7179 - protein, 137 aa, Zea mays
  Clone ID: TF_ZmC697_159.pep
MVKFLKPGKAVILLQGRFAGRKAVIVRVFEEGTRDRPYGHCLVAGLAKYPKKVIRKDSAKKTAKKSRVKCFIKLVNFTHLMPTRYTLDVDFKDVASGGPDALSTRDKKVEACKAAKARLEERFKTGKNRWFFTKLRF

SEQ ID NO: 7180 - protein, 143 aa, Zea mays
  Clone ID: TF_ZmC697_92.pep
MGDLLGSPRVAFPKSKHLPKKIPHFLRGEESVKDRAPAATMSGRGKGGKGLGKGGAKRHRKVLRDNIQGITKPAIRRLARRGGVKRISGLIYEETRGVLKIFLENVIRDAVTYTEHARRKTVTAMDVVYALKRQGRTLYGFGG

SEQ ID NO: 7181 - protein, 158 aa, Zea mays
  unsure (1)..(158): unsure at all Xaa locations
  Clone ID: TF_LIB4826-120-R1-N1-A9.pep
MSQTILTPPQRSLQIQSSMGNVDRTKEIARQSTGGKAPRTQLATKAARKAHPATRGXKKPHRVTPAPPGTLXQIRKYQKSTELLIRKLPVQRLVRQIEHDFKTDLRFQSSAEAALHEAAEDYLVGLFEDTKLCDIHANEXTIMPNDIRLARRIRGERN

SEQ ID NO: 7182 - protein, 79 aa, Zea mays
  unsure (1)..(79): unsure at all Xaa locations
  Clone ID: TF_LIB3067-019-Q1-K1-C10.pep
DNAENRIPNGMSADKDVAKGNMGKKNVKKSVXPXKIYIFRVLNQVLPDIVMSSKAMWIMNSYINDFYEKFAPEAAKFSR

SEQ ID NO: 7183 - protein, 119 aa, Zea mays
  Clone ID: TF_ZmC369_45.pep
MAPKAEKKPAAKKPAEEEPAAPAEKAPAGKKPKAEKRLPAGKSAGKEGGVDKKGRKKAKKSVETYKIYIFKVLKQVHPDIGISSKAMSIMNSFINDIFEKLAKHAVSEGTKAVTKFTSS

SEQ ID NO: 7184 - protein, 117 aa, Zea mays
  Clone ID: TF_ZmC697_138.pep
GDLSTSLLFARAQHHPPTSSKRRRPATCGAKRHRKVLRDNIQGITKPAIRRLARRGGVKRISGLIYEETRGVLKIFLENVIRDAVTYTEHARRKTVTAMDVVYALKRQGRTLYGFGG

SEQ ID NO: 7185 - protein, 159 aa, Zea mays
  unsure (1)..(159): unsure at all Xaa locations
  Clone ID: TF_LIB4730-067-R1-K1-E10.pep
MLPGNPLTTKPSHPHCRSIGPHEMQTAEERSTRRASAHKVSELPTKAASKSAPXATGGVKKRHRFRPGXLALREIRKYHKSTELLIRKLPFQRLVREIAQDFKTDLRFQSSAVSALQEAAEAYLDGLFEDTNLCAIHAKRVTIMPKDIQLARRIRGERA

SEQ ID NO: 7186 - protein, 146 aa, Zea mays
  Clone ID: TF_LIB5117-054-A1-PF1-C10.pep
MAGRKGGDRKKAVTRSVKAGLQFPVGRIGRYLKKGRYAQRVGSGAPVYLAAVLEYLAAEVLELAGNAAKDNKKTRIIPRHLLLAVRNDQELGRLLAGVTIAHGGVIPNINSVLLPKKSAAAEKEAKSPKKKAATKSPKKKAAATKE

SEQ ID NO: 7187 - protein, 212 aa, Zea mays
  Clone ID: TF_LIB5117-054-A1-PF1-C1.pep
MSSSTGSLDHAGFTFTPPPFITSFTELLSGSGAGDAERSPRGFNRGGRAGAPKFKSAQPPSLPISSPFSCFSVPAGLSPAELLDSPVLLNYSHILASPTTGAIPAQRCDWQASADLNTFQQDELGLSGFSFHAVKSNATVNAQANCLPLFKEQQEQQQEEVVQVSNKSSSSSGNNKQVEDGYNWRKYGQKQVKGSENPRSYYKCTYNNCSMK

SEQ ID NO: 7188 - protein, 136 aa, Zea mays
  Clone ID: TF_ZmC22376_4.pep
MSSGGGRGKPKGSKAVSRSTKAGLQFPVGRIARYLKAGKYAERVGGGAPVYLSAVLEYLAAEVLELAGNAARDNKKSRIVPRHIQLAVRNDEELSKLLGAVTIAAGGVLPNIHQTLLPKKAGGKGKADIGSASQEF

SEQ ID NO: 7189 - protein, 92 aa, Zea mays
  unsure (1)..(92): unsure at all Xaa locations
  Clone ID: TF_LIB3354-002-P1-K1-E3.pep
MARTKQTFRKSTGGKAPRKQLATKAARKLAPXTGGVNXPHRYRPRTVALXEIRRYQNSMEFVIRKLLFQRLVXXIAQDFKTDLRFQSHARLA

SEQ ID NO: 7190 - protein, 145 aa, Zea mays
  unsure (1)..(145): unsure at all Xaa locations
  Clone ID: TF_LIB4979-083-A1-K1-F1.pep
MVRTKHTRRKSTXGNAPMKQLATKVERKSAPAWXGEKKPHRFRPVTVALREIRKYHKSTELLIRKLPFQRLXREIAQXDFETDLRFQSSDDDALHEASEVYLVAFFEDTNLCAIHAKRVTIMPKDIQLARRIRGERVYASSRGRC

SEQ ID NO: 7191 - protein, 160 aa, Zea mays
  unsure (1)..(160): unsure at all Xaa locations
  Clone ID: TF_LIB3279-193-Q1-K6-C9.pep
PPSRPQTRTPRRPGTEGPKAEKKPAAKKPAEEEPAAEKAPAGKKPKAEKRGPGGGGAGKEGGEGKRGRKKGKKSAETHKSXTXKGXKQGHPDXGSXXKARAXXNXXXNDXXEKHAAEAAKHARXNKKPTXTXXESQTXXRXXXPGERAKHAXXEGTKAXT

SEQ ID NO: 7192 - protein, 156 aa, Zea mays
  unsure (1)..(156): unsure at all Xaa locations
  Clone ID: TF_LIB3279-194-Q1-K6-E12.pep
ARQARSRGTTXDXTGTGAGGKGKKGAAGRKGGGPRKKXXXRAXKAXRGGGXGRXGRHXKKGRXAQXXGTGAPXXXAXXXRNXAXEGXEXAXKXARDNKKXRXXPRHXXXAXRNDEEXGKXXGGXTXXHGXGXPXXNXXXXPKKTAEKAXXGGSKEA

SEQ ID NO: 7193 - protein, 95 aa, Zea mays
  unsure (1)..(95): unsure at all Xaa locations
  Clone ID: TF_LIB4732-100-Q1-K1-G11.pep
MAPKADKKPAAKKPAEEEPATEKAEKAPAGKKPKAEKRLPAGKSAGKEGGEGKKGKKKAKKXXETYKTYIFKALKQAHPDIVISSMAMSLLNSFI

SEQ ID NO: 7194 - protein, 137 aa, Zea mays
  unsure (1)..(137): unsure at all Xaa locations
  Clone ID: TF_LIB4762-008-R1-K1-B11.pep
MAPKAEKKPAEKKPAAEEKAEKTTAGKKPKAEKRLPASKSSGKEGGEKKGKKKAKKSVETYKIYIFKVLKQVHPDIGISSKAMSIMNSLINDIFEKLAGEAAKLAXRYNKKPTITSRXEIQTSVRLVLPGELASTPS

SEQ ID NO: 7195 - protein, 131 aa, Zea mays
  unsure (1)..(131): unsure at all Xaa locations
  Clone ID: TF_jC-zmX700085305d1.pep
MAREAFKKPAANNPAEEEPAVEKAPAGKKPKAEKRVPPGKSVGKEGGEGKRGRKKGKKSVETYKIYIFKVLKQVHPDIGISSKAMSIMNSFINDIFEKLAAXAAKLSRYNKKPTITFREIQTSGRFVLPGE

SEQ ID NO: 7196 - protein, 201 aa, Zea mays
  Clone ID: TF_ZmC1773_3.pep
MGDWVHWVPRGRPGSTLDSPLSHPQPLELYSIPSISKRSSSSQAAMDASAAGAGGKAKKGAAGRKAGGPRKKSVTRSVKAGLQFPVGRIGRYLKKGRYAQRVGTGAPVYLAAVLEYLAAEVLELAGNAAKDNKKTRIIPRHVLLAIRNDEELGKLLSGVTIAHGGVLPNINPVLLPKKTAEKAAAKEAKSPKKAAKSPKKA

SEQ ID NO: 7197 - protein, 77 aa, Zea mays
  unsure (1)..(77): unsure at all Xaa locations
  Clone ID: TF_700432838H1.pep
VILEYFTDEVLELAGNARTVLKVXRITPRHLPMAIRGDEELDTHITGTIAGGGVIPHIQTSLINTSSKACCIGNAHC

SEQ ID NO: 7198 - protein, 96 aa, Zea mays
  Clone ID: TF_LIB4979-119-Q1-K1-H1.pep
SRSQSPLASLAADPRAKQSASPLRTVPMARTKQTARKSTGGKAPRKQLATKAARKSAPATGGVKKPHRFRPGTAALREHSSAEDTVDYVMITDADK

SEQ ID NO: 7199 - protein, 103 aa, Zea mays
  Clone ID: TF_LIB3150-038-Q1-N1-C5.pep
MSGRGKGAKGLGKGGANRHLKVLRDNIQRITNPPIRTLARRGGVKRISGLISQETHGVLTIFLENTILNSITYTEHARRKTATAMYVVYALNRQGPTLYRFRG

SEQ ID NO: 7200 - protein, 107 aa, Zea mays
  unsure (1)..(107): unsure at all Xaa locations
  Clone ID: TF_LIB4730-061-R1-K1-B3.pep
SPRIAPYEWRPKADKSSALNKPVEDELESXKAPNDKKPYADNCFPSGTYSRKEGGEGKRGQRKDWNSVDTYKIYILKALKQAHLCIGISYKAMSIMNSFMNDMFEKL

SEQ ID NO: 7201 - protein, 145 aa, Zea mays
  Clone ID: TF_LIB4730-079-R1-K1-D6.pep
QGLAFLLCRWPAASRRKRNSSGGWVPRNELATNEADKCAPGTDRMKNAHRFRPGTDAVGEIRKYQKNTDVLIRKLPFQHLVHVIDQYFKTERRFQSFAEVALQEGYEGYLVMLYQDNYLCAIHCKRVTIMHKDLQIARRIHGEKV

SEQ ID NO: 7202 - protein, 111 aa, Zea mays
  Clone ID: TF_LIB3357-020-P1-K1-H12.pep
MDCTGTGARGKGKKGADGRKGRGPKKKSVSRSVKAGLQFPVGRIGRYLKKGRYAQRVGTGAPVYLAAVLEYLAVEVLELAGNAARDNKKTRIIPAHVLLAIRNNQDLESCW

SEQ ID NO: 7203 - protein, 133 aa, Zea mays
  unsure (1)..(133): unsure at all Xaa locations
  Clone ID: TF_ZmC651026_1.pep
MARTKQTARKSTVGKAPRKQLATKDARKSAPTTGGVKKPHRYRPGTVALREIRKYQNSTELLIKKLPFQRLVRXIAQDFKTDLRFQSHAELALQEAAEAYLDGLFEDTNLCAIHAKRVTIMSKDIQLSRQIRG

SEQ ID NO: 7204 - protein, 136 aa, Zea mays
  Clone ID: TF_jC-zmX700206249a1.pep
MARTKQTARKSTGGKAPRKQLATKAARKSAPATGGVKKPHRFRPVTVALREIRKYQKSTELLIRKLPFQRLVREIAQDFKTDLRFQSSAVAALQEAAEAYLVGLLEDTNLCAIHAKRVTIMPKDIQLARGIKGERA

SEQ ID NO: 7205 - protein, 136 aa, Zea mays; identical to SEQ ID NO: 6772
  Clone ID: TF_ZmC114_23.pep

SEQ ID NO: 7206 - protein, 136 aa, Zea mays; identical to SEQ ID NO: 6772
  Clone ID: TF_ZmC114_31.pep

SEQ ID NO: 7207 - protein, 136 aa, Zea mays; identical to SEQ ID NO: 6772
  Clone ID: TF_ZmC114_33.pep

SEQ ID NO: 7208 - protein, 136 aa, Zea mays; identical to SEQ ID NO: 6772
  Clone ID: TF_ZmC114_36.pep

SEQ ID NO: 7209 - protein, 136 aa, Zea mays; identical to SEQ ID NO: 6772
  Clone ID: TF_ZmC114_39.pep

SEQ ID NO: 7210 - protein, 149 aa, Zea mays
  Clone ID: TF_ZmC369_103.pep
MAPKAEKKPAAKKPAEEEPAAEKATAGKKPKAEKRLPAGKSAGKEGGEKKGKKKAKKSVETYKIYIFKVLKQVHPDIGISSKAMSIMNSFINDIFEKLAAEAAKLARYNKKPTITSREIQTSVRLVLPGELAKHAVSEGTKAVTKFTSS

SEQ ID NO: 7211 - protein, 149 aa, Zea mays; identical to SEQ ID NO: 7210
  Clone ID: TF_ZmC369_104.pep

SEQ ID NO: 7212 - protein, 149 aa, Zea mays
  Clone ID: TF_ZmC369_111.pep
MAPKAEKKPAAKKPAEEEPAAEKAPAGKKPKAEKRLPAGKSAGKEGGEKKGKKKAKKSVETYKIYIFKVLKQVHPDIGISSKAMSIMNSFINDIFEKLAAEAAKLARYNKKPTITSREIQTSVRLVLPGELAKHAVSEGTKAVTKFTSS

SEQ ID NO: 7213 - protein, 149 aa, Zea mays; identical to SEQ ID NO: 7210
  Clone ID: TF_ZmC369_115.pep

SEQ ID NO: 7214 - protein, 149 aa, Zea mays; identical to SEQ ID NO: 7210
  Clone ID: TF_ZmC369_83.pep

SEQ ID NO: 7215 - protein, 238 aa, Zea mays
  Clone ID: TF_ZmC369_98.pep
MSGPPSTTSAIRIASVVRNGRTPSNSSTSAIRVAYPPTNGVQPPALYKVAPPAAFFRTQQQAISSPNKQPPPPRSRREEAQSRNRRPIPMAPKAEKKPAAKKPAEEEPAAEKATAGKKPKAEKRLPAGKSAGKEGGEKKGKKKAKKSVETYKIYIFKVLKQVHPDIGISSKAMSIMNSFINDIFEKLAAEAAKLARYNKKPTITSREIQTSVRLVLPGELAKHAVSEGTKAVTKFTSS

SEQ ID NO: 7216 - protein, 121 aa, Zea mays
  unsure (1)..(121): unsure at all Xaa locations
  Clone ID: TF_LIB3279-044-P1-K1-D9.pep
PHSSPFQTLLYFHSAFAARRYRWSEGDHEEHRAQVHVAGKVPRKQLATNAVRKSSPAXTGGVKKPHRFRPGTEALHEILKYQKSTELLIRKLPFQRLVREIAQDFKTDLRFQSFVVACAEG

SEQ ID NO: 7217 - protein, 94 aa, Zea mays
  unsure (1)..(94): unsure at all Xaa locations
  Clone ID: TF_LIB4729-111-A1-K1-C1.pep
TARKSTGXKAPRKXLXTKVARKSAPAPGGVKKPHRFRPGTVVLREIRKYXRARSCCIRKLPSQRPVREIAQDFQMNLRIQIXAVAALDEADEAH

SEQ ID NO: 7218 - protein, 149 aa, Zea mays
  Clone ID: TF_LIB4976-058-A1-K1-A12.pep
YPNPELYYTVVQSTRAQQVYIERRRASRRRRLLEVVVLVDDLGDVPGAAHALGEDDKVSRAEFPTSSRTSAARYSRTAARYTGAPAPTRSAYLPALRNLAILPTGNWSPALELLDVAFFAAPAPIALPRPAIPSHDRTTRKRQLALERL

SEQ ID NO: 7219 - protein, 113 aa, Zea mays
  Clone ID: TF_LIB3227-021-P1-K1-F10.pep
MDVSVACRKAKKGAVSRKAGWPTKKSVSRSYRAGLQFPVSRVWRYLKKGRYAQRVRTGAPVYLVDVLEYLADEVLVLDGYSARDNMKTRMIPRHVLLVIRNDEELSKLLAGVT

SEQ ID NO: 7220 - protein, 145 aa, Zea mays
  unsure (1)..(145): unsure at all Xaa locations
  Clone ID: TF_LIB3088-031-Q1-K1-E9.pep
QSLASDPRAKQSASVSSVPMARTKHTAMKSTGGKAPRKQLATKAARKSAPATDXVKKPHRFRPGTVSLREIRKYQKSTELLIRKLPFQHLVREIAHDSKTDLRFQSFGVASLHDACYAYLVHLFEDTNTCAIHAKPVTIMPKDIH

SEQ ID NO: 7221 - protein, 173 aa, Zea mays
  unsure (1)..(173): unsure at all Xaa locations
  Clone ID: TF_LIB3354-104-Q6-K6-B1.pep
PFRPSLASESWGPGQKAAPPRRGRREQRREXXXKQTARKXTGGKAPXQQLATXAARKSAPATGGVKKPHRYRPGTVALREIRXXQKSTELLIRXLPFQRLVREIAQDFKTDLRFQSHAVLALQEAAEAYLVGLFGDTFLCAIHAXRVTIMPKDIQLARRFRGERALLFSPGIC

SEQ ID NO: 7222 - protein, 150 aa, Zea mays
  Clone ID: TF_ZmC369_120.pep
MAPKAEKKPAAKKPAEEEPAAEKTTAGKKPKAEKRVPAGKSAGKEGGEGKRGKKKGKKSVETYKIYIFKVLKQVHPDIGISSKAMSIMNSFINDIFEKLAGEAAKLARYNKKPTITSREIQTSVRLVLPGELAKHAVSEGTKAVTKFTSS

SEQ ID NO: 7223 - protein, 150 aa, Zea mays
  Clone ID: TF_ZmC369_124.pep
MAPKAEKKPAAKKPVEEEPAAEKTTAGKKPKAEKRVPAGKSAGKEGGEGKRGKKKGKKSVETYKIYIFKVLKQVHPDIGISSKAMSIMNSFINDIFEKLAGEAAKLARYNKKPTITSREIQTSVRLVLPGELAKHAVSEGTKAVTKFTSS

SEQ ID NO: 7224 - protein, 150 aa, Zea mays; identical to SEQ ID NO: 7222
  Clone ID: TF_ZmC369_132.pep

SEQ ID NO: 7225 - protein, 150 aa, Zea mays; identical to SEQ ID NO: 7222
  Clone ID: TF_ZmC369_32.pep

SEQ ID NO: 7226 - protein, 150 aa, Zea mays; identical to SEQ ID NO: 7223
  Clone ID: TF_ZmC369_71.pep

SEQ ID NO: 7227 - protein, 153 aa, Zea mays
  Clone ID: TF_ZmC369_81.pep
MAPKADKKPAAKKSAEEEPATEKAEKAPAGKKPKAEKRLPAGKSAGKEGGEGKKGKKKAKKSVETYKIYIFKVLKQVHPDIGISSKAMSIMNSFINDIFEKLAAESAKLARYNKKPTVTSREIQTSVRLVLPGELAKHAVSEGTKAVTKFTSS

SEQ ID NO: 7228 - protein, 153 aa, Zea mays
  Clone ID: TF_ZmC369_85.pep
MAPKADKKPAAKKPAEEEPATEKAEKAPAGKKPKAEKRLPAGKSAGKEGGEGKKGKKKAKKSVETYKIYIFKVLKQVHPDIGISSKAMSIMNSFINDIFEKLAAESAKLARYNKKPTVTSREIQTSVRLVLPGELAKHAVSEGTKAVTKFTSS

SEQ ID NO: 7229 - protein, 151 aa, Zea mays
  Clone ID: TF_ZmC369_30.pep
MAPKAEKKPAAKKPAEEEPATEKVEKAPAGKKPKAEKRLPAGKSKEGGEGKKGKKKAKKSVETYKIYIFKVLKQVHPDIGISSKAMSIMNSFINDIFEKLAAEAAKLARYNKKPTITSREIQTSVRLVLPGELAKHAVSEGTKAVTKFTSA

SEQ ID NO: 7230 - protein, 106 aa, Zea mays
  unsure (1)..(106): unsure at all Xaa locations
  Clone ID: TF_700381601H1.pep
ELLIRKLPFQRLVREIAQDFKTDLRFQSAXIGALQEASEXAWWVCSKIPTCVPSTLRESPSCPKTSSWLAGYGERELKXRQXLWRFVVNSVKYFGLICDFFCKNCL

SEQ ID NO: 7231 - protein, 111 aa, Zea mays
  unsure (1)..(111): unsure at all Xaa locations
  Clone ID: TF_LIB3357-024-P1-K1-C11.pep
MAPMGGTNSANNTPLEDEPAVAXTTAGKKPKAQNAIPDGKSDAMDDGEGKRGLKKVTISVETYTIYILXALNLVLPYISISSKAMSIMNSFIINMFXKLVSEAIKLARYNK

SEQ ID NO: 7232 - protein, 113 aa, Zea mays
  Clone ID: TF_ZmC6067_4.pep
MARTKQTARKSTGGKAPRKQLATKAARKSAPTTGGVKKPHRYRPGTVALHEIRKYQKSTELLIRKLPFQRLVREIAQDFKTDLRFQSHAVLALQEAAEAYLVGLFELSDSATI

SEQ ID NO: 7233 - protein, 124 aa, Zea mays
  Clone ID: TF_LIB3153-005-Q1-K1-F11.pep
MHSTKQTSRKSTGINAPRKQLATKAARKSYPVTGGVNKPHRFRPVTVALREIRKYQKSTDLLIRMHPYQRLVREIAQDFKTDLRLQSSAAAALQDASDAYLVALFEDTNLCAIHAKRVTIMPKD

SEQ ID NO: 7234 - protein, 150 aa, Zea mays
  unsure (1)..(150): unsure at all Xaa locations
  Clone ID: TF_jC-zmX700431125a1.pep
FGSWPMDEKNSAEKKPAGVEKAVKTTAGQKPKCEKRLAASKSSCKEGGXRRGRXKAKKSVETYKMYIFKVLKQVHPDIGISCMAMFIRNFLINDIYQKLGGEVVKLARFIKKPTITSREIQTSVRLVLPGELAKHAVFEGTKGVTKSTSH

SEQ ID NO: 7235 - protein, 118 aa, Zea mays
  unsure (1)..(118): unsure at all Xaa locations
  Clone ID: TF_LIB3069-017-Q1-K1-H6.pep
EGGEKKGKKNAKKSVETCKMXIFKVLKQVHPDIGISSKAMSIMNSFINDIFEKLAAEAAKLARYNKKPTITSREIQTFVRLVLPGELAKHAVSEGTKAVTKFTSFYASDATCTRLFLQ

SEQ ID NO: 7236 - protein, 149 aa, Zea mays
  unsure (1)..(149): unsure at all Xaa locations
  Clone ID: TF_LIB3076-059-P1-K6-E11.pep
PRFSLHRWGSPSHQGAQGSPRNRWRRSPAVKDDRREEPKRRSGSPLASPPAREGGEGKRGKKKGKKSVETYKIYIFKVLKQVHPDIGISSKAMSIMNSFINDIFEKLAGEAAKLARYNKKPTITCREIQTXVRLVLPGELAKHAVSGGT

SEQ ID NO: 7237 - protein, 86 aa, Zea mays
  Clone ID: TF_LIB3088-027-Q1-K1-A6.pep
YASVLTTTKGYKNSPEKTPTNENSVNRATPNNFIPCKGDPHKNATKNANNSVATYKIYIFKELKHVHSYISISTKAMCIMNSFIND

SEQ ID NO: 7238 - protein, 41 aa, Zea mays
  Clone ID: TF_LIB3604-002-P1-N6-F12.pep
PTRAPLVGHFEDTNLCATQAKGVTTRPKDIHLARRIRGERA

SEQ ID NO: 7239 - protein, 117 aa, Zea mays
  Clone ID: TF_LIB3076-005-Q1-K1-D5.pep
FHIAPTAKTKPSPNKPTLENAHKKPTAEKLMPRKEVGEKNGNTNAMKSVTTYKIYIFNALNQVHPDIGISSNAMSIMNSFINYIFEKLAVDAGNLARYNKKPTITFLEIQTFVRLVL

SEQ ID NO: 7240 - protein, 114 aa, Zea mays
  unsure (1)..(114): unsure at all Xaa locations
  Clone ID: TF_LIB3067-001-Q1-K1-E7.pep
MAPKADKKPAAKKPAEEPATDKAEKAPAGKKPKAEKRLPAGKSDGKEGGEGKKGKKKAKKSGETYLIYSFKVLQYVHPYIGISSKAMCIMNSCSSTVSXKLASLSVKLARYIKK

SEQ ID NO: 7241 - protein, 122 aa, Zea mays
  unsure (1)..(122): unsure at all Xaa locations
  Clone ID: TF_LIB4742-054-R1-K1-C10.pep
MVRTKQTARKSTGGKAPRKLLATKAVRKSAPTTGGVNKPHRYWPGTVVAAXIRKYHKSTELLIRKLSFQSLVLEIAQDFKTDLRFHSHAVLVLQEAAEVYLFRLFQDTNLCAIHAKRVTILA

SEQ ID NO: 7242 - protein, 140 aa, Zea mays
  unsure (1)..(140): unsure at all Xaa locations
  Clone ID: TF_LIB3137-005-Q1-K1-G10.pep
MARTKQTARKGTGGKAPRKQLATKAARKSAPATGGVKKPHRFRPGTVALREIRKYQKSTELLIRKLPFQRLVREIAQDFKXDLRFQSSAXVSALQEXXEAYLVXLXEDTNLCAIHXKRVTIIXKDIQLARRSRARGLDMS

SEQ ID NO: 7243 - protein, 191 aa, Zea mays
  Clone ID: TF_ZmC119_1294.pep
MDSTGTGAGGKGKKGAAGRKVGGPRKKSVSRSVKAGLQFPVGRIGRYLKKGRYAQRVGTGAPVYLAAVLEYLAAEVLQFEPSSLFVLIWRRSINSCVPIRFASLFDQVLELAGNAARDNKKTRIIPRHVLLAIRNDEELGKLLGGVTIAHGGVLPNINPVLLPKKTAEKASSVGSKEAKSPKKAAKSPKKA

SEQ ID NO: 7244 - protein, 136 aa, Zea mays
  Clone ID: TF_LIB4757-029-Q1-K1-B8.pep
MARTKQTARKSTGGKAPRKQLATKAARKSAPAAGGVKKPHRYKPGTVALREIRRYQKSTELLIRKLPFQRLVREIAQDFKTDLRFQSSAIGALQEASEAYLVGLFEDTNLAAIHAKRVTIQPKDIALARRLRGERS

SEQ ID NO: 7245 - protein, 73 aa, Zea mays
  unsure (1)..(73): unsure at all Xaa locations
  Clone ID: TF_LIB3069-011-Q1-K1-F6.pep
PTITSRXEIQTSVRLVLTGELGKHAVSEGTKACTNFTSSYACTLDLASSSGADVHTELKLDVAGFSVRAALFL

SEQ ID NO: 7246 - protein, 145 aa, Zea mays
  unsure (1)..(145): unsure at all Xaa locations
  Clone ID: TF_LIB3607-002-P1-K6-A11.pep
PRPSRAGKGGKGGLAANPRRPXPPREDKGKKAPXXRXXRAGPQXXXGXXHXQXKQRTQAXXRGERTAXXXXXANQEXPTAEXXEPXGXASKXXKXKXXTXRXXQXAXRGDEEXDTXXKGTXAGGGXNPHKHKXXXNKXPKERRPG

SEQ ID NO: 7247 - protein, 137 aa, Zea mays
  unsure (1)..(137): unsure at all Xaa locations
  Clone ID: TF_LIB4730-068-R1-K1-G3.pep
MARTKQNGEEAHRRPSAPRKQLATKADRKSGPATGGXKKPHRFRPDTGALREIHKYHXSTELVIRKLPLQRLVREIAQDLKTVLHYQSSAAFALEQADEGYLAGLLEDTKLCAIHAKDRTIMPKGIHVVRRIRVRSA

SEQ ID NO: 7248 - protein, 109 aa, Zea mays
  Clone ID: TF_LIB4740-049-R1-K1-B11.pep
MIKMGELQNPRKGEIRRNCRVANNAPRQPRTAMASVQTTSELRRGREIAQDFKTDLRFQSSCVSALQEAGEAYLGGLCEDTNLCAIHAKRVTIMPKDIQLARRIREERA

SEQ ID NO: 7249 - protein, 145 aa, Zea mays
  Clone ID: TF_LIB4764-128-Q1-K1-C12.pep
FPYSCTERTSTACQAPPLNATANSWGRLAPPSSPATRAARNWCPATGIAKKPHRFRPGTVPLREIRKYQKSTELLIRKLPFQRLVREIAQDFKTDLRFQILSPSAPLQEAAKKHLTDAFEDTNICPIPRQRDTIMPTDPPPRAAH

SEQ ID NO: 7250 - protein, 184 aa, Zea mays
  unsure (1)..(184): unsure at all Xaa locations
  Clone ID: TF_LIB3635-001-P1-K6-F5.pep
ASGQSQLTANTAEPPPLPTRPASASPPPRINPQHRWRPXAEKKPAAKKPAEEEPATEKXEAPAGKKPKXEKRLPAGKSGAGEGKKGKKKAKKSVETYKIYIFKVLKQVHPDIGISSKAMSIMNSFINDIFEKLAAEAAKLARYNKKPTITFREIQTSVRLVLPGELAKHAVSXSTKGVTKFTFV

SEQ ID NO: 7251 - protein, 136 aa, Zea mays
  unsure (1)..(136): unsure at all Xaa locations
  Clone ID: TF_LIB4975-069-A1-K1-G5.pep
MARTKQTARKSTGGKAPRKQLATKAARKSAPTTGGVKKPHRYRPGTVALREIRKYQKSTELLIRKLPFQRLVREIAQDFKTDLRFQNHAVLGLQEGGEGXLGGLVEDTNLGGIHGKRVDIMAKDIPLARKNPGEKG

SEQ ID NO: 7252 - protein, 153 aa, Zea mays
  unsure (1)..(153): unsure at all Xaa locations
  Clone ID: TF_LIB4977-056-Q1-K1-D5.pep
EETARKSXGGKAPRKXLATKAAPQSGPGSGGVKXAPRLRPGTVAAREIRKYPKSAELLIRKLPFQRLVREIAQDFKTDLRFXSSAVSPLQEAAEAYLGGLFEDTNLCAIHAKRVTIMAKDIQLARRMPCGEGLSIVYSVISARSEDVEMCWVL

SEQ ID NO: 7253 - protein, 136 aa, Zea mays
  Clone ID: TF_LIB4756-072-R1-K1-D4.pep
MARTKNTAHRSTGVNARMKHLATKAARWSAPTTGVLKNAHRYRPVTAALREIRKYQKSTELLIRKLPFQRLVREIAQDFKTDLRFQSHAVLALQEAAEAYLVGLFEDTNLCAIHSKRVTIMPKDIQLARRIRGERA

SEQ ID NO: 7254 - protein, 136 aa, Zea mays
  Clone ID: TF_LIB4185-051-R1-L1-H7.pep
MARTKHTVRRSTGGKAPRKQLATNAARKSAPTTGGVKKPHRYRPGTVALREIRKYHKSTELLIRKLPFQRLVREISQDFKTDLRFQSHAVLALQEAADAYLVGLFDDTNLCAIHAKRVTIMPKDMQLARRLRGDRA

SEQ ID NO: 7255 - protein, 146 aa, Zea mays
  Clone ID: TF_ZmC519599_1.pep
MAGRKGGDRKKAVTRSVKAGLQFPVGRIGRYLKKGRYAQRVGSGAPVYLAAVLEYLAAEVLELAGNAAKDNKKTRIIPRHLLLAVRNDQELGRLLAGVTIAHGGVIPNINSVLLPKKSAAAEKEAKSPKKKAATKSPKKKAAAAKE

SEQ ID NO: 7256 - protein, 151 aa, Zea mays
  unsure (1)..(151): unsure at all Xaa locations
  Clone ID: TF_LIB4766-063-R1-K1-D1.pep
MDATATGAGGNANKGAVGRKAGXGRRNDLRGPMSRAMPNFQFPVGRIDRYLEMGRYPQHVSSAVPGYLACLLYHLAAEVLELPGNAAKDYEKTRIVSRHVLLAIHDHEDLGXLLTALTVAHGGXVLPNIRPVLLLKKTAVRASSSRDSGCQ

SEQ ID NO: 7257 - protein, 91 aa, Zea mays
  unsure (1)..(91): unsure at all Xaa locations
  Clone ID: TF_LIB143-070-P1-N6-A2.pep
PDKLYIYKVLHQVLPHIGISSKPMAIMNSFIEDIFEQLADESDKLAHYNHDPAVTSHEIQTWVSLVLMYKLAEHAVSXGTKAVTKFTSFLG

SEQ ID NO: 7258 - protein, 80 aa, Zea mays
  unsure (1)..(80): unsure at all Xaa locations
  Clone ID: TF_jC-zmX3059015Q1K1C08b1.pep
MARTKQTARKSTGGKAPRKQLATKAARKSAPATGGVNKPHRFRPGTVALREIRKYHKSTELLIRKLXPFQLLVRXIAQDF

SEQ ID NO: 7259 - protein, 56 aa, Zea mays
  Clone ID: TF_jC-zmX3059040Q1K1E07b2.pep
RLLRHQSHAVRALQEAAEAYQAGLHEDTNLSAIHAKRVTIMPKDMQLVRRIRGERA

SEQ ID NO: 7260 - protein, 121 aa, Zea mays
  unsure (1)..(121): unsure at all Xaa locations
  Clone ID: TF_LIB4668-003-R1-K1-B11.pep
MARTKQTARKSTGGKAPRKQLATKAARKSAPTTGGVKKPHRYRPGTGALREIRXCQKSTELLIRXLPFQRLVGEIAQDFETDLRFRSRAVLALREAGGACLGGLFVDAVLRAVRARRVPFL

SEQ ID NO: 7261 - protein, 130 aa, Zea mays
  Clone ID: TF_LIB4730-046-R1-K1-C4.pep
MAPKADKKPAAKKSAEEEPATEKAEKAPAGKKPKAEKRLPAGKSAGKEGGEGKKGKKKAKKSVETYKIYIFKVLKQVHPDIGISSKAMSIMNSFINDIFEKLAAESAKLARYNKKPTVTSPEIQTSVRLV

SEQ ID NO: 7262 - protein, 147 aa, Zea mays
  Clone ID: TF_LIB3059-015-Q1-K1-G3.pep
PLSHSEPFEPLIHPLELQTGPPPIRRPWPPPHQEPAGRRKKGAGGRKGRGPRKKVVTRSVKAGLQFPVGRIGRYLKKGRYAQRVRTGAPVYLARVLEYLAREVLEPGRNAAKDNKKTRIIPRHVLLAIRNDEELGKLLSGVTIAHGG

SEQ ID NO: 7263 - protein, 136 aa, Zea mays
  Clone ID: TF_LIB5072-097-A1-XP1-A11.pep
MARTKQTARKSTGGKAPRKQLAAKAARKSAPATGGVKKPHRYKPGTVALREIRRYQKSTELLIRKLPFQRLVREIAQDFKTDLRFQSSAIGALQESAEAYLVSLFEDTNLAAIHAKRVTIQPKDIQLARRLRGERS

SEQ ID NO: 7264 - protein, 156 aa, Zea mays
  Clone ID: TF_LIB3608-014-Q1-K6-F3.pep
RPASGSVQAREEIEQPRRGEEARTKQTARKSTGGKAPRKQLATKAARKSAPTTGGVKKPHRYRPGTVALREIRKYQKSTELLIRKLPFQRLVREIAQDFKTDLRFQSHAVLALQEAAEAYLVGLFEDTNLCAIHAKRVTIMPKDIQLARRIRCERT

SEQ ID NO: 7265 - protein, 136 aa, Zea mays
  unsure (1)..(136): unsure at all Xaa locations
  Clone ID: TF_LIB4732-063-Q1-K1-B4.pep
MARTKQTARKSTGGKAPRKQLATKAARKSAPATGGVKKPHRFRPGTVALREIRKYQKSTELLIRKLPFQRLVREIAQDFKTDLRFQSSAVSALHEAAEAYLVGLFXDTNLCAIHAKRVTIMPKDIQLARRIRGERA

SEQ ID NO: 7266 - protein, 149 aa, Zea mays
  Clone ID: TF_ZmC369_64.pep
MAPKAEKKPAAKKPAEEEPAAEKAPAGKKPKAEKRLPAGKSAGKEGGEKKGKKKAKKSVETYKIYIFKVLKQVHPDIGISSKAMSIMNSFINDIFEKLAAEAAKLARYNKKPTITSREIQTSVRLVLPGELAKHPVSKGTKAVPKFTSS

SEQ ID NO: 7267 - protein, 157 aa, Zea mays
  Clone ID: TF_ZmC76846_1.pep
MDGGGAKAKKAAAGRKLGGGGPKRKPVSRSVKAGLQFPVGRIGRYLKKGRYAQRVGTGAPVFLAAVLEYLAAEVLELAGNAARDNKKTRIIPRHLLLAIRNDEELGKLLGGVTIAHGGVLPNINPVLLPKKAAERAEKAAAAGPKSPKKAAAKSPKK

SEQ ID NO: 7268 - protein, 80 aa, Zea mays
  Clone ID: TF_LIB3116-025-P1-K1-F8.pep
APGRQLATKAVRKSAPTTGGGKKPNRSRPGPGALPRIRRSQKSTGFLIRRLPFKGLVRKIAQDLKTDFRFQSHAGLAFPE

SEQ ID NO: 7269 - protein, 153 aa, Zea mays
  unsure (1)..(153): unsure at all Xaa locations
  Clone ID: TF_LIB4766-128-A1-K1-G6.pep
MAPKVEKKPDAKKTAEEETAVAKGPVGKKAMADKRLPVDNSAGKEGVDKKGIKKXKKPVDTYKIYIFKGVKQDHPDICMSCKGMFIMHSFVNDIFXKLAGEAAKLARYSKKPAITSREIRTSVRLVLPGELIMHALSEGTKDVTKCHHRRFEA

SEQ ID NO: 7270 - protein, 137 aa, Zea mays
  unsure (1)..(137): unsure at all Xaa locations
  Clone ID: TF_jC-zmXLIB3527P004ah01a1.pep
MARTKHTARKLTGGKAXPRKQLATKAARKSAPTTGGVKKPHRFRPGTDALREIRKYQKSTELLMRKLPLQRLVREIAQDFKTDLRLQSSAVAELXEATEAYLVGLLEDTNLXAIHAKRVTIMPKDIQLARRIMGERA

SEQ ID NO: 7271 - protein, 150 aa, Zea mays; identical to SEQ ID NO: 7222
  Clone ID: TF_ZmC369_122.pep

SEQ ID NO: 7272 - protein, 156 aa, Zea mays
  Clone ID: TF_LIB5116-005-A1-PF1-A4.pep
MDASATGAGAKSKKGAAGRKAGGPRKKSVTRSVKAGLQFPVGRIGRYLKNGRYAKRVGTGAPVYLAVVLEYLAAELLELAGNAAKDNKESRIVPRHLLLAVRNDQELGRLLAGVTIAHGGVLPNINPVLLPKKTAEKEPKSPKKAAKSPKKAEKKA

SEQ ID NO: 7273 - protein, 44 aa, Zea mays
  Clone ID: TF_LIB3205-002-P1-N1-B12.pep
ARYNKKPTITSRKIQTSVGLVLPEKLAKHAVSEGTKAVTKFTSN

SEQ ID NO: 7274 - protein, 166 aa, Zea mays
  unsure (1)..(166): unsure at all Xaa locations
  Clone ID: TF_LIB4742-007-R1-K1-H9.pep
GTLGFGRVPAVLILPGGGALACPSLTRSRARTKQTARKTTGGKVRRKQVGSKASRKSAPATXGGGKKPHRFRPGTGTLRXEIRKNQKSTELLIRKLPCQXLVREIAQDFKTDLRFQSSAVSALQEAAEAYLVGLYEDTNLCAIHAKRVTIMPKDIQLARHIRGERA

SEQ ID NO: 7275 - protein, 170 aa, Zea mays
  unsure (1)..(170): unsure at all Xaa locations
  Clone ID: TF_LIB4979-048-R1-K1-A12.pep
MDSTGTGAGGKGKKGAAGRKGGGPRKKSVARSVKAGLQFPGGRIGRYLKKGRYAQRGGTGAPGYLAGGLEYLAAEVLELAGSGARDNKKTRIIPRHGLLAIRNDEELGKXLLGGVTIGHGGGVPNINPGLLAKKTAEKAPSVGTKEAKSPTKAAKSPTKDRLTAWRDLMV

SEQ ID NO: 7276 - protein, 135 aa, Zea mays
  unsure (1)..(135): unsure at all Xaa locations
  Clone ID: TF_LIB5024-012-R1-XP1-D8.pep
MSSGGGRGKPKGSKAVSRSTKAGLQFPVGRIARYLKAGKYAERVGGGAPVYLSAVLEYLAAEVLELAGNAARDNKKNRIVPRHIQLAVRNDEELSXLLGAVTIXXAGGVLPNIHQTLLPKKXGGKGKADIGSASQ

SEQ ID NO: 7277 - protein, 177 aa, Zea mays
  Clone ID: TF_ZmC653_59.pep
GRETPALKNAPEPATPKSPRTSSPNTVKHAPASTRTSAPTPMARTKQTARKSTGGKAPRKQLATKAARKSAPATGGVKKPHRFRPGTVALREIRKYQKSTELLIRKFPFQRLVREIAQDFKTDLRFQSSAVAALQEAAEAYLVGLFEDTNLCAIHAKRVTIMPKDIQLARRIRGERA

SEQ ID NO: 7278 - protein, 153 aa, Zea mays
  Clone ID: TF_ZmC369_53.pep
MAPKAEKKPAAKKPAEEEPATEKAEKAPAGKKPKAEKRLPAGKSAGKEGGEGKKGKKKAKKSVETYKIYIFKVLKQVHPDIGISSKAMSIMNSFINDIFEKLAAESAKLARYNKKPTITSREIQTSVRLVLPGELAKHAVSEGTKAVTKFTSS

SEQ ID NO: 7279 - protein, 159 aa, Zea mays
  unsure (1)..(159): unsure at all Xaa locations
  Clone ID: TF_LIB4828-008-R1-N1-F5.pep
GRGATASSPSNSFRPGIGRNRAAKERRRWPRTKQTAXRKSTGGKAPRMQLAXTKAARKSAPTTGGVKKPHRYRPGTVALREIRKYQMSTELLIRKLPFQRLVREIAHYFKTDLSFQSHAVLGLQEACEHSLQLLRWGIQIQGMQLLGMAIMAPSSSLAY

SEQ ID NO: 7280 - protein, 180 aa, Zea mays
  unsure (1)..(180): unsure at all Xaa locations
  Clone ID: TF_LIB5025-027-A1-XP1-C5.pep
MVTKVEKKSAVNITAKEEPAAEKAPAGKNSKADNRVPAGKSAVKEGVXVMRGKKKGMXSVETYKIYIFKVLKHVHPDIGISSQAMSIMNSFIIDIFEKLAADDGKLVRYNKKPTITSREIQTSVRLVLPGELAEHAVSDGTWADCEFTSDYAARSPLVGFSPVFTYLAAFRCCCLLASMH

SEQ ID NO: 7281 - protein, 134 aa, Zea mays
  Clone ID: TF_LIB4979-037-A1-K1-F8.pep
MARTKQTARKSTGGKAPRKQLATKAARKSAPATGGVKKPHRFRPGTVALREIRKYQKSTELLIRKLPFQRLVREIAQDFKTDLRFQSSAVAALQEASEAYLVGLFEDTIMPKDIQLARRIRGERAYASSRWRWK

SEQ ID NO: 7282 - protein, 138 aa, Zea mays
  unsure (1)..(138): unsure at all Xaa locations
  Clone ID: TF_LIB4729-095-Q1-K1-E3.pep
MARTKQTARKSTGGKAPRKQXLATNDALQVSPRATGXVKKPHRFRPGTVALREIRKYQKSTELLIRKLPFQRLVREIAQDFKTDLRFQSSDVAALQEVSEDYLVGLFEDTNLCAIHAKRVTIMPKDIQLARRIRGERA

SEQ ID NO: 7283 - protein, 199 aa, Zea mays
  Clone ID: TF_ZmC2139_5.pep
MYKLYSFKKKKKKKKKKKKKTDYKPVLCPSYHHRSPRFGFLPSSAPASRSGFRIPSALSLTKVAMAGRGKAIGSGAAKKATSRSSKAGLQFPVGRIARFLKAGKYAERVGAGAPVYLAAVLEYLAAEVLELAGNAARDNKKTRIVPRHIQLAVRNDEELSRLLGTVTIASGGVMPNIHNLLLPKKAGGGSAKAAAGDED

SEQ ID NO: 7284 - protein, 66 aa, Zea mays
  Clone ID: TF_LIB4762-070-Q1-K1-F9.pep
VAQGGPAHREGTAAPVYLAAVLEYLAAEVLELAGNAANDNKKTRIVPRHLLPAIRNDVGLWWLLSG

SEQ ID NO: 7285 - protein, 83 aa, Zea mays
  unsure (1)..(83): unsure at all Xaa locations
  Clone ID: TF_LIB3078-052-Q1-K1-H1.pep
MAPKGEKKPAEKKPAVEKGYKKPTAVKRVXELGGRREEGKXMAKKIVETYKIYMIKVLKHVHPVIGILINAMSIMNCFINDIF

SEQ ID NO: 7286 - protein, 97 aa, Zea mays
  Clone ID: TF_LIB3279-229-Q6-N6-F2.pep
MLQQVLELAGNPARDNKKTRIVPGHIQLPVGNDEELTQLLGGAPIASGGVMPNIPQPLLPKKGGLSKASPVDDDDNLSCPLEKRPSPPSCFLGLAPR

SEQ ID NO: 7287 - protein, 101 aa, Zea mays
  unsure (1)..(101): unsure at all Xaa locations
  Clone ID: TF_LIB3592-076-Q1-N6-E11.pep
KKGKKKAKKSVETSKIXIFRVLNQVPPDIGIWSKAMSIMNSFTNEIFKNRAAEGAKLAGYNKKPPIRSREIKTSVRLVLPGELPKHPVSEGPKPVPKFPSS

SEQ ID NO: 7288 - protein, 105 aa, Zea mays
  unsure (1)..(105): unsure at all Xaa locations
  Clone ID: TF_LIB5027-004-R1-XP1-C1.pep
MDVSGAGGKAKKGAAGRKAGGPTKKSVSRGSRAGLXLPVRRVGRYLKKGRYAQRVGTGAPVYFAAVLEYVAXEVLELAGNAGRDNKKTXIIARHVLLGIRNDEEL

SEQ ID NO: 7289 - protein, 89 aa, Zea mays
  Clone ID: TF_uC-zmroteosinte067a12a1.pep
RAREIRKYQKSTDLLIRKLPFQRLVREIAQDFKTDPRFQSSAVSALQKAAEAYLVGLFEDTNLCAIHAKRVTIMPKDIQLARRIRGERA

SEQ ID NO: 7290 - protein, 87 aa, Zea mays
  Clone ID: TF_ZmC103364_1.pep
REIRKYQKSTELLIRKLPFQRLVREIAQDFKTDVRFQSHAVLALQEAAEAYLVGLFEDTNLCAIHAKRVTIMPKDIQLARRIRGERA

SEQ ID NO: 7291 - protein, 110 aa, Zea mays
  unsure (1)..(110): unsure at all Xaa locations
  Clone ID: TF_uC-zmflteosinte076b05a1.pep
APPGNKPKSKKRVPLGXSSGKQGGQGXRGRNKGNNSVEPYKIYVFKVLKQVHPDIGISSKAMSIMNSFINDIFEKLASEPAKLARSIKKPSFSSREILTSVRLVLSGELS

SEQ ID NO: 7292 - protein, 150 aa, Zea mays
  Clone ID: TF_ZmC369_147.pep
MAPKAEKKPAAKKPAEEEPAAEKTTAGKKPKAEKRIPAGKSAGKEGGEGKRGKKKGKKSVETYKIYIFKVLKQVHPDIGISSKAMSIMNSFINDIFEKLAGEAAKLARYNKKPTITSREIQTSVRLVLPGELAKHAVSEGTKAVTKFTSS

SEQ ID NO: 7293 - protein, 147 aa, Zea mays
  Clone ID: TF_LIB5116-065-A1-PF1-F11.pep
MAGRKGGDRKKAVTRSVKAGLQFPVGRIGRYLKKGRYAQRVGSGAPVYLAAVLEYLAAGVLELAGNAAKDNKKTRIIPRHLLLAVRNDQELGRLLAGVTIAHGGVIPNINSVLLPKKSAAAAEKGAKSPKKKTSTKSPKKKTAATKE

SEQ ID NO: 7294 - protein, 120 aa, Zea mays
  unsure (1)..(120): unsure at all Xaa locations
  Clone ID: TF_LIB36-021-Q1-E1-G2.pep
FSILSRINASAIRESPANGIQSTPIPLEPDKPDPIAPNGDKKPAXKKPAAEDNAEKTTAGYKPKSEKRLPASKSSGKDGGEKNGKKKAKKSVXTYKIYIFKVLKHVHPDIRISSKGISIM

SEQ ID NO: 7295 - protein, 98 aa, Zea mays
  unsure (1)..(98): unsure at all Xaa locations
  Clone ID: TF_LIB3069-049-Q1-K1-E1.pep
MAPKADGKRAANKAAEDEPATEKADNAPAGKKPKAEKRLPAGKFSGKEGGXGKKGKKKAKKSVETYKIYIFKVLKHVHPDIGILFKGMFIMNSFINDI

SEQ ID NO: 7296 - protein, 201 aa, Zea mays
  unsure (1)..(201): unsure at all Xaa locations
  Clone ID: TF_LIB3606-017-Q6-K6-A3.pep
LVPAKPIASIRPWXSTGTGAGVREEGAAGRXVGGPRKKSVSRSVKAGLQFPVGRIGRYLKXGRYAQRVGTGAPVYLAAVLEYLAAEVLELAGNAARDNKKTRIIPLYVLLAIRNDEELGKLLGGVTIAHGGVLPNINPVLLPKKTAEKASSVGSKEAKSPKKAAKSPKKHRLTVWSDLMFSKTLIPVCGDALAVDGVDVLV

SEQ ID NO: 7297 - protein, 136 aa, Zea mays
  unsure (1)..(136): unsure at all Xaa locations
  Clone ID: TF_LIB4729-091-Q1-K1-D10.pep
MXXTXETARKATGGKAPRKQLATKAARKSAPATGGVKKPHRFRPXTXALREIRKYQKSTELLIRKXPFQRLVREIAQDFKTDLRXQXSAVAALQEAAEXYLVXLFGDTNLCAIHAKRVTIMXKDIQLARRIRGERA

SEQ ID NO: 7298 - protein, 177 aa, Zea mays
  unsure (1)..(177): unsure at all Xaa locations
  Clone ID: TF_LIB4975-019-R1-K1-C5.pep
MAAKSEKKPRRTSGARIDPRTTTQPAENNPNVEKRRPRVAMPAAKEGDXGESAEKKAKKSGETYXIYIFKVLKQAHPYIAISSSAMCIMNSFINDIFEKLAAEAAKLARYNKKXSITSREIQTSVRLVLPGQIDKHADLRRDRGRHRGRLDLLLRGRRLHDSLLSSRRLHVDTSCCL

SEQ ID NO: 7299 - protein, 115 aa, Zea mays
  unsure (1)..(115): unsure at all Xaa locations
  Clone ID: TF_LIB4729-014-R1-K1-D4.pep
MARTKQTARKSTGGKAPRKQLATKAARKSAPTTAGVKKPHRYRPGTGALREIRKNQKSTVLLIRKLILQRLVLKIAQDSKTDLLLQSHAVLALQEVXEAHLXELFVDTNLCAIHA

SEQ ID NO: 7300 - protein, 79 aa, Zea mays
  unsure (1)..(79): unsure at all Xaa locations
  Clone ID: TF_LIB3116-025-P1-K2-F8.pep
APRKQFATKVVRKSAPTTGVLNIPNRCGPGTVALREIRKYQKSTELLIRKLPFQRXVREIAQDFKTDFRFQSHSLLSLQ

SEQ ID NO: 7301 - protein, 94 aa, Zea mays
  Clone ID: TF_LIB4730-015-R1-K1-A10.pep
MARTKQTARMSTGGKAPRKQLATKAVRKSAPTTVGVKKPHRYRPVTVALREIRKYQKSTELLMRKLPFQRLVREIAHDLKTDLRLQSHACADTA

SEQ ID NO: 7302 - protein, 108 aa, Zea mays
  unsure (1)..(108): unsure at all Xaa locations
  Clone ID: TF_LIB4730-040-R1-K1-C12.pep
SAPTTGGVNKPHMYRPGMVVLXMIRKYQMITELVIRMLPFHRLVREIAQDLQTDLRVQRHPVLVLQEAGEVYLAGLFEDTNLCAIHAKRGIMMSKDIQLDRRIRSNWA

SEQ ID NO: 7303 - protein, 163 aa, Zea mays
  unsure (1)..(163): unsure at all Xaa locations
  Clone ID: TF_LIB4729-065-R1-K1-F10.pep
MDASAAGAGGKAKKGAAGRKAGGPRKKSVTRSVKAGLQFPVGRIGRYLKKGRYAQRVGTGAPVYLAAVLEYLAAEVLELGGNAAKDNKKTRIIPRHVLLAIRNDEELGKLLSRVTIAHXGVLPNINXVLLPKKTAEKGGGPRKAKSPREAGQSPQERHRRDRL

SEQ ID NO: 7304 - protein, 132 aa, Zea mays
  unsure (1)..(132): unsure at all Xaa locations
  Clone ID: TF_LIB4762-056-R1-K1-E5.pep
MQTARKSTGGKAPRKQLATKAARKSAPATGGVKKPHRFRPGTVALREIRKYQKSTELLIRKLPFQRLVREIAQDFKTDLRFQSSAVSALQEAAEAYLVGLFEDTNLCAIHAKRVTIMPKDIQLCPPIXGERA

SEQ ID NO: 7305 - protein, 150 aa, Zea mays
  Clone ID: TF_ZmC369_55.pep
MAPKAEKKPAAKKPAEEEPAAEKAPAGKKPKAEKRVPAGKSAGKEGGEGKRGRKKGKKSVETYKIYIFKVLKQVHPDIGISPKAMSIMNSFINDIFEKLAAEAAKLARYNKKPTITSREIQTSVRLVLPGELAKHAVSEGTKAVTKFTSS

SEQ ID NO: 7306 - protein, 79 aa, Zea mays
  unsure (1)..(79): unsure at all Xaa locations
  Clone ID: TF_LIB3279-059-P1-K1-H8.pep
KHRRTHTLPWGAAQSRGTMGRAKHTARKSTGGKVHRKHITTKEWRKTAPATGGEKKPHRFRPXTMALREIRMYQKSTEF

SEQ ID NO: 7307 - protein, 124 aa, Zea mays
  unsure (1)..(124): unsure at all Xaa locations
  Clone ID: TF_LIB3357-052-P1-K1-D5.pep
MVRTKQTGRKWTGGKAPQMHLATKAXARMSAPATDGIKKPHRFLPGTVQLRXILKHQKSTELLMRKLSCQRLVREIEQDLKTDLLFQFSAVAVLQEAADAHLVVLFEDTNLCAIQAMRVTIMPK

SEQ ID NO: 7308 - protein, 98 aa, Zea mays
  Clone ID: TF_LIB4185-050-R1-K1-D5.pep
KKKAKKKVQTPKISIFQGANQVPPAKGILSKAMSIMNPFINDIFEKRAVEAPKIARSNKKPPITSRGIQNSGALVLPGELPKPPVSKGPKAVSKFSSF

SEQ ID NO: 7309 - protein, 99 aa, Zea mays
  unsure (1)..(99): unsure at all Xaa locations
  Clone ID: TF_LIB4976-001-R1-K1-A4.pep
GVLKKVKYKAKNSGEMYKIYIFKVLKEVHPDIGISCMVMSIMNSFSNDIFEKLAAEAVKLARYNKKPSITSREIQTSVXLVLPGELAKHSVYEDTKVAT

SEQ ID NO: 7310 - protein, 127 aa, Zea mays
  Clone ID: TF_ZmC369_44.pep
APPGKKPKAEKRVPPGKSPPKKGGEGKRGKKKGKKSVETSKISIFKVFKQVPPDIGISSKAMSIMNSFINDIFEKLPVEAPKLARYNKKPPLPSREIQTSVGLVLPGELAKHPVSEGPKAVPKFPSA

SEQ ID NO: 7311 - protein, 178 aa, Zea mays
  unsure (1)..(178): unsure at all Xaa locations
  Clone ID: TF_LIB4731-015-R1-K1-F11.pep
PSPACFLSDRQPSQPSLPFVNSQRDRPAPTEGKKPAGKKHAQEEPARPPEKDRSGRKPTAGKQLPPGKNIRQEGGGDKQERTKDSQNERTDKLYIHKERTQAHPHIHMYFMDRHIQNXLINDIHQKQAGQAGKLARHNQKDTINYLEIHTYVRLALPTQLAKHARWEGTNDGSKHTYL

SEQ ID NO: 7312 - protein, 115 aa, Zea mays
  unsure (1)..(115): unsure at all Xaa locations
  Clone ID: TF_LIB3600-050-Q1-N6-E12.pep
VLKQVHPDIGISSKAMSIMNSFINDIFXKLAGEAPKLGRVHKKPPLPFREIQTSVGLVLPGELAKHPVSEGTKAVPQFPRNLARFGIPGFVKRVFFCVLFPVPPPTRLVASLPAL

SEQ ID NO: 7313 - protein, 175 aa, Zea mays
  unsure (1)..(175): unsure at all Xaa locations
  Clone ID: TF_LIB3595-026-Q1-K6-C2.pep
GPSRAPCFSLHWLLILLPSQYGGAQVRARSPRRKKPVAEEPAAREDDRRGRSPRAEKRVPAGXSAGKEGGEGKRGXKKKGMKSVETYKIYIFXVLKQVHPDIGILSKAMSIMNSFINDIFXEKLAGEAAKLARFNKKPTITFREILTSVRLVLPGELAKHALSEGTKAVTKFTSS

SEQ ID NO: 7314 - protein, 148 aa, Zea mays
  Clone ID: TF_LIB4758-062-R1-K1-D2.pep
MAPKAEKKPAEKKPAAEEKAEKTTAGKKPKAEKRLPASKSSGKEGGEKKGKKKAKKSVETYKIYIFKVLKQVHPDIGISSKAMSIMNSFINDIFEKLAGEAAKLARYNKKPTITSREIQTSVRLVLPGELAKHAVSEGTKVVTKFTSN

SEQ ID NO: 7315 - protein, 158 aa, Zea mays
  unsure (1)..(158): unsure at all Xaa locations
  Clone ID: TF_ZmC877532_1.pep
MDVSGTGAGAKGKKGAAGRKAGGPRKKSVTRSVKAGLQFPVGRIGRYLKKGRYAQRVGTGAPVYLAAVLEYLAAELLELAGNAAKDNKKSRIIPRHLLLAVRNDEELGKLLAGVTIAHGGVIPKINPVLLPKRTAEKEGXEPKSPKKATKSPKKTTKA

SEQ ID NO: 7316 - protein, 103 aa, Zea mays
  Clone ID: TF_LIB3227-021-P1-K1-F6.pep
MSGRGKGGKGLGKGGAKRHRRGLATTFKALTNPPFLSLPRRGGLNPFFGLFYKETRGVLKIFLENVFRDAVTYTEHARRRTVTAMVVVYALKRQGRTLYGFGG

SEQ ID NO: 7317 - protein, 101 aa, Zea mays
  Clone ID: TF_ZmC200443_1.pep
MNSMHFPVGRIHRHLKDSAQAGERVGATAAVYAAAVLEYLTAEIMELAGNACRDLKVKRITPRHLQLAVRGDEELDTLIKATIAGGGVIPHIHRELIDKAA

SEQ ID NO: 7318 - protein, 121 aa, Zea mays
  Clone ID: TF_LIB4979-081-A1-K1-B4.pep
APRKQMATKAARKSAPATGGVKKPHRFRPGTVALREIRKYQKSTELLIRKLPFQRLVREIAQDFKTDLRFQSSAVSALQEAAEAYLVGLFEDTNLCAIHAKRVTIMPKDIQLARRIRGERA

SEQ ID NO: 7319 - protein, 119 aa, Zea mays
  Clone ID: TF_LIB3150-078-P2-N2-D8.pep
ARKLEKAPAGRNAPHGGRPRHPRPDGAQGGEEASGEEAGGRGEGGEDDRREEAQGREAAARVQVLRQGGRREEGEEEGQEELGDLQDLHLQGAVGRCTPSSCIFSKVMSIIDFLYQLTF

SEQ ID NO: 7320 - protein, 100 aa, Zea mays
  Clone ID: TF_LIB4730-007-R1-K1-C6.pep
MARTKQTARKSTGGKAPRKQLATKAARKSAPATGGVKKPHRFRRGTVALREIRKYQKSTELLIRKLPFQRLVREIAQDLKTDLRFQSSDVGELEEVGEAY

SEQ ID NO: 7321 - protein, 118 aa, Zea mays
  Clone ID: TF_ZmC1215011_1.pep
KQLASKAARKSAPSTGGVKKPHRYKPGTVALREIRRYQKSTELLIRKLPFQRLVREIAQDFKSDLRFQSSAIGALQESVESYLVSLFEDTNLCAIHAKRVTIQSKDIQLARRLRGERN

SEQ ID NO: 7322 - protein, 155 aa, Zea mays
  Clone ID: TF_LIB3279-011-H6_FLI.pep
MDGSKAKKVAAKKFGGPRKKSVTKSIKAGLQFPVGRIGRYLKKGRYAQRVGSGAPVYLAAVLEYLAAEVLELAGNAAKDNKKSRIVPRHLLLAIRNDQELGRLLSGVTIAHGGVIPNINPVLLPKKAAEKAEKAEKTATKSPKKATKSPKKATKA

SEQ ID NO: 7323 - protein, 99 aa, Zea mays
  Clone ID: TF_LIB3632-007-Q1-N6-A9.pep
FRFQSSPVGALQEAPKASLVGLFEDTNLWAIPAKGVPFMPKDIQLGRRIRGERALTRRAPLPPGGVVVALAPLVGPGPLLVPLPGGKGLLGPLGLFLES

SEQ ID NO: 7324 - protein, 65 aa, Zea mays
  unsure (1)..(65): unsure at all Xaa locations
  Clone ID: TF_LIB5027-003-R1-XP1-H3.pep
MARRSKQMESTGGKAPRKXLATKVARKSPPATGGEKKPHRFRPGPAALREIRQHHNSTELIFRKA

SEQ ID NO: 7325 - protein, 71 aa, Zea mays
  Clone ID: TF_LIB4740-047-R1-K1-C8.pep
VTFQRLGREIGQYFKTDLSIQSHAVIALQEAAEAYLASLLEDTNLCAIHAKRVTIMPKDIQLARRIRGERA

SEQ ID NO: 7326 - protein, 175 aa, Zea mays
  Clone ID: TF_LIB3606-029-Q1-K6-F11.pep
SSPSQFVPCQAREIEQPRGEEARTKQTARKSTGGKAPRKQLATKAARKSAPTTGGVKKPHRYRPGTVALREIRKYQKSTELLIRKLPFQRLVREIAQDFKTDLRFQSHAVLALQEAAEAYLVGLFEDTNLCAIHAKRVTIMPKDIQLARRIRGERAYSYLAPGPHCGLRMEEGNL

SEQ ID NO: 7327 - protein, 136 aa, Zea mays; identical to SEQ ID NO: 6802
  Clone ID: TF_LIB4742-076-R1-K1-G12.pep

SEQ ID NO: 7328 - protein, 136 aa, Zea mays
  unsure (1)..(136): unsure at all Xaa locations
  Clone ID: TF_LIB4762-121-Q1-K1-C4.pep
MARTKQTARKSTGGKAPRKQLATKAARKSAPTTGGVKKPHRYRPGTVALREIRKYQKSTELLIRKLPFQRLVREIAQDFKTDLRFQSHAVLALQEAAEAYLVGLFEDTNLCAIHAKRVTIMPKDIQLARRIRXERA

SEQ ID NO: 7329 - protein, 136 aa, Zea mays; identical to SEQ ID NO: 6802
  Clone ID: TF_LIB4979-070-A2-K1-C5.pep

SEQ ID NO: 7330 - protein, 136 aa, Zea mays; identical to SEQ ID NO: 6802
  Clone ID: TF_LIB5116-015-A1-PF1-D3.pep

SEQ ID NO: 7331 - protein, 136 aa, Zea mays; identical to SEQ ID NO: 6802
  Clone ID: TF_LIB5116-023-A1-PF1-H6.pep

SEQ ID NO: 7332 - protein, 136 aa, Zea mays; identical to SEQ ID NO: 6802
  Clone ID: TF_ZmC114_10.pep

SEQ ID NO: 7333 - protein, 136 aa, Zea mays; identical to SEQ ID NO: 6802
  Clone ID: TF_ZmC114_15.pep

SEQ ID NO: 7334 - protein, 136 aa, Zea mays; identical to SEQ ID NO: 6802
  Clone ID: TF_ZmC114_20.pep

SEQ ID NO: 7335 - protein, 136 aa, Zea mays; identical to SEQ ID NO: 6802
  Clone ID: TF_ZmC114_22.pep

SEQ ID NO: 7336 - protein, 136 aa, Zea mays; identical to SEQ ID NO: 6802
  Clone ID: TF_ZmC114_24.pep

SEQ ID NO: 7337 - protein, 121 aa, Zea mays
  Clone ID: TF_ZmC114_26.pep
APRKQLATKAARKSAPTTGGVKKPHRYRPGTVALREIRKYQKSTELLIRKLPFQRLVREIAQDFKTDLRFQSHAVLALQEAAEAYLVGLFEDTNLCAIHAKRVTIMPKDIQLARRIRGERA

SEQ ID NO: 7338 - protein, 136 aa, Zea mays; identical to SEQ ID NO: 6802
  Clone ID: TF_ZmC114_28.pep

SEQ ID NO: 7339 - protein, 136 aa, Zea mays; identical to SEQ ID NO: 6802
  Clone ID: TF_ZmC114_30.pep

SEQ ID NO: 7340 - protein, 136 aa, Zea mays; identical to SEQ ID NO: 6802
  Clone ID: TF_ZmC114_34.pep

SEQ ID NO: 7341 - protein, 136 aa, Zea mays; identical to SEQ ID NO: 6802
  Clone ID: TF_ZmC114_35.pep

SEQ ID NO: 7342 - protein, 136 aa, Zea mays; identical to SEQ ID NO: 6802
  Clone ID: TF_ZmC114_38.pep

SEQ ID NO: 7343 - protein, 136 aa, Zea mays; identical to SEQ ID NO: 6802
  Clone ID: TF_ZmC114_40.pep

SEQ ID NO: 7344 - protein, 136 aa, Zea mays; identical to SEQ ID NO: 6802
  Clone ID: TF_ZmC114_41.pep

SEQ ID NO: 7345 - protein, 136 aa, Zea mays; identical to SEQ ID NO: 6802
  Clone ID: TF_ZmC263831_1.pep

SEQ ID NO: 7346 - protein, 136 aa, Zea mays; identical to SEQ ID NO: 6802
  Clone ID: TF_ZmC518114_1.pep

SEQ ID NO: 7347 - protein, 136 aa, Zea mays; identical to SEQ ID NO: 6802
  Clone ID: TF_ZmC518497_1.pep

SEQ ID NO: 7348 - protein, 136 aa, Zea mays; identical to SEQ ID NO: 6802
  Clone ID: TF_ZmC519633_1.pep

SEQ ID NO: 7349 - protein, 136 aa, Zea mays; identical to SEQ ID NO: 6802
  Clone ID: TF_ZmC653_105.pep

SEQ ID NO: 7350 - protein, 136 aa, Zea mays; identical to SEQ ID NO: 6802
  Clone ID: TF_ZmC653_107.pep

SEQ ID NO: 7351 - protein, 136 aa, Zea mays; identical to SEQ ID NO: 6802
  Clone ID: TF_ZmC653_108.pep

SEQ ID NO: 7352 - protein, 136 aa, Zea mays; identical to SEQ ID NO: 6802
  Clone ID: TF_ZmC653_28.pep

SEQ ID NO: 7353 - protein, 130 aa, Zea mays
  Clone ID: TF_ZmC653_33.pep
TARKSTGGKAPRKQLATKAARKSAPTTGGVKKPHRYRPGTVALREIRKYQKSTELLIRKLPFQRLVREIAQDFKTDLRFQSHAVLALQEAAEAYLVGLFEDTNLCAIHAKRVTIMPKDIQLARRIRGERA

SEQ ID NO: 7354 - protein, 136 aa, Zea mays; identical to SEQ ID NO: 6802
  Clone ID: TF_ZmC653_40.pep

SEQ ID NO: 7355 - protein, 136 aa, Zea mays; identical to SEQ ID NO: 6802
  Clone ID: TF_ZmC653_49.pep

SEQ ID NO: 7356 - protein, 136 aa, Zea mays; identical to SEQ ID NO: 6802
  Clone ID: TF_ZmC653_66.pep

SEQ ID NO: 7357 - protein, 136 aa, Zea mays; identical to SEQ ID NO: 6802
  Clone ID: TF_ZmC653_77.pep

SEQ ID NO: 7358 - protein, 136 aa, Zea mays; identical to SEQ ID NO: 6802
  Clone ID: TF_ZmC653_82.pep

SEQ ID NO: 7359 - protein, 42 aa, Zea mays
  Clone ID: TF_LIB3153-005-Q1-K1-H1.6U0.pep
HRFRFGSVALREIRKYLKSSELLIRKLPSQRLVRKIAQDSKT

SEQ ID NO: 7360 - protein, 145 aa, Zea mays
  Clone ID: TF_ZmC2139_2.pep
MAGRGKAIGSGAAKKATSRSSKAGLQFPVGRIARFLKAGKYAERVGAGAPVYLAAVLEYLAAEDSDSIIGALSVLELAGNAARDNKKTRIVPRHIQLAVRNDEELSRLLGTVTIASGGVMPNIHNLLLPKKAGGGSAKAAAGDED

SEQ ID NO: 7361 - protein, 125 aa, Zea mays
  Clone ID: TF_LIB4975-040-A1-K1-H3.pep
MAPKAEKKPAAKKPAEEEPAAEKAPAGKKPKAEKRVPAGKSAGKEGGEGKRGRKKGKKSVETYKIYIFKVLKQVHPDIGISSKAMSIMNSFINDIFEKLAAEAAKLARYNKKPTITSLVCSRVLL

SEQ ID NO: 7362 - protein, 178 aa, Zea mays
  unsure (1)..(178): unsure at all Xaa locations
  Clone ID: TF_LIB4764-068-R1-K1-D11.pep
HWVPRGRPGVLLLSPSSHHRCLRGSVSRRVRKTLLRSSLRIPSGHGRKRREAIGSRDAKNDMSSSSIRAGLQFPVGRIARFLKAGKYVERVGAGAPVYLAAVLEYLAAEVLXLAGNAARDNKKSRIVPRHIQLDDRNDEDLYRLLCTGTIDSGXDMPDIHNLVLSKKTACYQRQGCSW

SEQ ID NO: 7363 - protein, 312 aa, Zea mays
  unsure (1)..(312): unsure at all Xaa locations
  Clone ID: TF_ZmC119_1859.pep
MGGMPDAWADAWADAWADAWADAWEILVCTHIIESGIDIAHANTMIIQFAELYGLAQLYQLRGRVGRSGTEGFAYLFYTDKSLLSXLQRLGAIEEHSELGQGFHVAEKDMGIRGFGSLFGEQQSGDVANVGIDLFFDMLFDSLSKVDQFCLVPVPYKDVQLDINISPRLSSEYISYLENPVELLNEAAKAAEKDLWTLIQFTEDLRRRYGKEPRDMELLLKKLYVRRMAADLGISRIYPSGKMIFMKTNMNKKVFRLMTEAMTSETHRNSLSFAEKEIKAELLVNLPDTLLLNWLFHCLSDCYTVIPALVKY

SEQ ID NO: 7364 - protein, 156 aa, Zea mays
  unsure (1)..(156): unsure at all Xaa locations
  Clone ID: TF_LIB4979-060-R1-K1-E1.pep
MIPSAALTSRRTRGPREEEPATXNVDKDPTPKNPKARAWRLPAGKINGGRQRAKKDDKESQERRAYLPHLTSFKVXLRWWHPCIGLSCKAMSIMNSFINDIFENLAAESAKVLRYDEKATLTSREMHTSERLALPGELGQHAXSQGSKGGTKLTSS

SEQ ID NO: 7365 - protein, 68 aa, Zea mays
  Clone ID: TF_700426183H1.pep
MLVAMVGRGIAILFRLVYPATSMRSKAGLQFPVGRIARFLAAGKSAERVGAGAPVYLAAVLESLAAEV

SEQ ID NO: 7366 - protein, 183 aa, Zea mays
  Clone ID: TF_LIB4668-008-R1-K1-F1.pep
MLSGSRNNSEHISSHFFPSDPPFATKTPTRPASMAPKAEKKPAAKKPAEEEPAAEKAPAGKKPKAEKRVPAGKSAAKEGGEGKRGKKKGKKSVETYKIYIFKVLKQVHPDIGISFKAMSIMNFFINDIFEKLAGEGGQLARFYKKPTITFREIQTFVRLVLSGELGKHAVFEGTKGVTKVTSA

SEQ ID NO: 7367 - protein, 136 aa, Zea mays
  Clone ID: TF_LIB4744-093-A1-K1-H11.pep
MARTKQTARKSTGGKAPRKQLATKAARKSAPATGGVKKPHRFRPGTVALREIRKYQKSTELLIRKLPFQRLVREIAQDFKTDLRFQSSAVSVFHEAADAYLVGLFEDTNLCAIHAKRVTIMPKDIQLARRIRGERA

SEQ ID NO: 7368 - protein, 71 aa, Zea mays
  unsure (1)..(71): unsure at all Xaa locations
  Clone ID: TF_LIB3151-020-Q1-K1-G7.pep
AGEMARTKQTARKSTGGKAPRKQLATKAARKSAPTTGGMKKPHRYRPVTDALRXIRQYHKSTELLIRKLPF

SEQ ID NO: 7369 - protein, 135 aa, Zea mays
  unsure (1)..(135): unsure at all Xaa locations
  Clone ID: TF_LIB3151-020-Q1-K1-G7.R2.pep
MVRTKQTVRKSIFXKAPRKNLXGGGRKSAPTTGGVKKPHRYPPGTVALREIRKFQKSTELLIRKLPFQXLVGEIVQDFKTDLRFQSHAVLALQEAAVVYLGGLFEDTNLCAIHAKRVTIMPKDIHLAREIRGERA

SEQ ID NO: 7370 - protein, 69 aa, Zea mays
  unsure (1)..(69): unsure at all Xaa locations
  Clone ID: TF_LIB3245-607-P1-N1-A2.pep
MAFHNTAIHAVSEHKATSKSSKGGLLFLVGRIARVLKAGKYAERVCAGAPVYLAAVLXYLAAEVLELAP

SEQ ID NO: 7371 - protein, 136 aa, Zea mays
  Clone ID: TF_jC-zmXLIB3526P100ab02a1.pep
MARTKQTARKSTGGMAPRKQLATKAARKSEPTTVGVKKPHRYRPGTVALREIRKYHKSTELLIRKLTFQRLVREIAHDFKTDLRFQSHAVLALQEAAEAYLVSLFEDTNLCAIHAKRVTIMPKDIQLARRIRGERA

SEQ ID NO: 7372 - protein, 129 aa, Zea mays
  unsure (1)..(129): unsure at all Xaa locations
  Clone ID: TF_LIB3632-023-Q1-K6-G1.pep
EPGRDGRWRRTSPRRSCSRGEVPAGRTQAVNRLPAGXPAARTAATSKGTKKGTTSVRDLQEYLFTVLKHVHPYIMMYCNAMCIMNFFINDMLQKLDEMAVMLARYNMKATITSRVIQXTSVRLVLRGEL

SEQ ID NO: 7373 - protein, 129 aa, Zea mays
  Clone ID: TF_LIB4742-110-Q1-K1-E8.pep
MDASGAGMKGKKGAAARKVCGPTNKSSTRPVKAGLQFPVGRIGCYLMNGRNAQRVSTGSPVYLSAVLEYLAAEVLELAGNAWMDNKNTRIIPRHLLLAIRNDHDFAQLLACVTIAHGVPLPCMHSGLLP

SEQ ID NO: 7374 - protein, 136 aa, Zea mays
  unsure (1)..(136): unsure at all Xaa locations
  Clone ID: TF_LIB4828-124-R1-N1-B9.pep
MARTKQTARKSTGGKAPRKQLATKAARKSAPTTGGVKKPHRFRPGTVALREIRXYQKSTELLIRKLPFXRLVREIAQDFXTDLRYQSHAVLALXEAAEAYLVGLFEDTNLCAIHAXRVTIMXKDIXLARRIRGERA

SEQ ID NO: 7375 - protein, 231 aa, Zea mays
  Clone ID: TF_LIB4766-001-QB-K6-D11.pep
PEKKKKKKKKKKKKKKKKKKKKKKKKKKKGKGFFSGFSANRIQATPIPLDPEKPDPVGPKAGKKPGEKKPGAGEKGGKTTGGKKPKSEKGLAALKSFGKGGGGKKGKKKAKKRGGTYKIYIFKGLKQGPPDIGIFFKGMAIMNFFINDIFQKLAGGAPKFGGDKKEPTITFRGNQTFGGLGLPGGVGKNAGFGGTKGGPKFPNNWTAWRGHGFVRAPLFTRVFWRGLYPSP

SEQ ID NO: 7376 - protein, 128 aa, Zea mays
  unsure (1)..(128): unsure at all Xaa locations
  Clone ID: TF_LIB5026-022-B1-XP1-A5.pep
QSLAADPRAKQSASPLRTVPMARTKQTARKSTGGKAPRKQLATKAARKSAPATGGVKKPHRFRPGTVALREIRKYQKSTELLIRXQEASEAYLVGLFEDTNLCAIHAKRVTIMPKDIQLARRIRGERA

SEQ ID NO: 7377 - protein, 160 aa, Zea mays
  Clone ID: TF_jC-zmshLIB3587P009f02a1.pep
STGGKAPRKQFATKGARKLAPTTGGVKKPPRYRPGTVALREIPKFQKSQELVIPKLPFQRLVREIPQDFKTALRFQNHPVLAFQEAPKASLVGLLGGTNLWAIPDKRVPIMPKEIQLAPRIRGERVYPSFPGISASCMIQTNRKEQIGCAVLCYIELGYN

SEQ ID NO: 7378 - protein, 148 aa, Zea mays
  Clone ID: TF_ZmC369_151.pep
MAPKAEKKPAEKKPAAEEKAEKTTAGKKPKSEKRLPASKSSGKEGGEKKGKKKAKKSVETYKIYIFKVLKQVHPDIGISSKAMSIMNSFINDIFEKLAGEAAKLARYNKKPTITSREIQTSVRLVLPGELAKHAVSEGTKAVTKFTSN

SEQ ID NO: 7379 - protein, 149 aa, Zea mays
  Clone ID: TF_ZmC369_38.pep
MAPKAEKKPAAKKPAEEEPAAAKAPAGKKPKAEKRLPAAKSSGKEGGDKKGKKKAKKSVETYKIYIFKVLKQVHPDIGISSKAMSIMNSFINDIFEKLAGEAAKLARYNKKPTITSREIQTSVRLVLPGELAKHAVSEGTKAVTKFTSS

SEQ ID NO: 7380 - protein, 149 aa, Zea mays; identical to SEQ ID NO: 7379
  Clone ID: TF_ZmC369_134.pep

SEQ ID NO: 7381 - protein, 149 aa, Zea mays; identical to SEQ ID NO: 7379
  Clone ID: TF_ZmC369_150.pep

SEQ ID NO: 7382 - protein, 149 aa, Zea mays; identical to SEQ ID NO: 7379
  Clone ID: TF_ZmC369_72.pep

SEQ ID NO: 7383 - protein, 149 aa, Zea mays; identical to SEQ ID NO: 7379
  Clone ID: TF_ZmC369_74.pep

SEQ ID NO: 7384 - protein, 120 aa, Zea mays
  unsure (1)..(120): unsure at all Xaa locations
  Clone ID: TF_LIB3279-037-P1-K1-D4.pep
LEFSSTKFKVTAVKLSAISLPPKVCKGLGKGSSKLHRKVLRDNIYGITKPSIRRLARRGGVKRISGLIYXETRGVLNIFLENVIRYAVTYTEHSRLKTVTAMDVVYSFKRQGRTLYCFCG

SEQ ID NO: 7385 - protein, 157 aa, Zea mays
  unsure (1)..(157): unsure at all Xaa locations
  Clone ID: TF_LIB4729-103-Q1-K1-C10.pep
MDAIGAGTMGNKGAPGSKADVPRKKSETRSDKVGLQFHAGRIGCYLKKARYWQRGGTGAPVYLAADMEYLAAEVLXLLVNAVRDYKRTRIIPRHWLLMIRKDLVSSSYCCAKTTWGTVGVLCKILLRPPVQEGVEEGEHRGETGHPAMQEGRQCPLK

SEQ ID NO: 7386 - protein, 101 aa, Zea mays
  Clone ID: TF_LIB4975-015-R1-K1-D6.pep
MARTKQTARKSTGGKAPRKQLATKAARKSAPATGGVKKPHRFRPGTVALREIRKYQKSTELLIRKLPFQRLVREIAQDFKTDLRFQSSAAYSLKGLCVGYR

SEQ ID NO: 7387 - protein, 136 aa, Zea mays
  unsure (1)..(136): unsure at all Xaa locations
  Clone ID: TF_LIB4730-002-R1-K1-F8.pep
MGRTKQTVRKSTGGKAPRKQVATKAARKSAPATGGVKKPHRLRPGTXALREIRMDQKRTELLIRKLPIQRLVREIDQDIKTDLLFQSYIVDALHEAYDGYLVGLLEDTNLCAIYAERVAIMPKDIQLARRIPGERA

SEQ ID NO: 7388 - protein, 150 aa, Zea mays
  Clone ID: TF_LIB4766-002-R1-M1-B10.pep
MAPKAEKKPAAKKPAEEEPAAEKAPAGKKPKAEKRVPAGKSAGKEGGEGKRGRKKGKKSVETYKIYIFKVLKQVHPDIGISSKAMSIMNSFINDIFEKLAAEAAKLARYNKKPTITSREIQTSVRLVLPGELAKHAVSEGTKAVTKFTSS

SEQ ID NO: 7389 - protein, 150 aa, Zea mays; identical to SEQ ID NO: 7388
  Clone ID: TF_ZmC369_140.pep

SEQ ID NO: 7390 - protein, 150 aa, Zea mays; identical to SEQ ID NO: 7388
  Clone ID: TF_ZmC369_154.pep

SEQ ID NO: 7391 - protein, 150 aa, Zea mays; identical to SEQ ID NO: 7388
  Clone ID: TF_ZmC369_47.pep

SEQ ID NO: 7392 - protein, 49 aa, Zea mays
  unsure (1)..(49): unsure at all Xaa locations
  Clone ID: TF_LIB3114-059-P1-K1-G4.pep
QDFMTDLRFQSFXTAVLHEAXESYLVGLFEDTNLCAIHAERVTIMLKDI

SEQ ID NO: 7393 - protein, 94 aa, Zea mays
  unsure (1)..(94): unsure at all Xaa locations
  Clone ID: TF_LIB3357-025-P1-K1-G7.pep
MAPNAEKKPAANKPAEEEPAAEKAPAGKKPKAEKRVPAGKSAAKEGGEGKRGKKKGKKSVETYKIYIFKVLKQVHPDIGIXFKAMFIMNSFIYD

SEQ ID NO: 7394 - protein, 136 aa, Zea mays
  Clone ID: TF_ZmC697_67.pep
MARTKQTARKSTGGKAPRKQLATKAARKSAPATGGVKKPHRSRPGTVALREIRKYQKSTELLIRKLPFQRLVREIAQDFKTDLRFQSSAVSALQEAAEAYLVGLFEDTNLCAIHAKRVTIMPKDIQLARRIRGERA

SEQ ID NO: 7395 - protein, 90 aa, Zea mays
  unsure (1)..(90): unsure at all Xaa locations
  Clone ID: TF_LIB4835-001-R1-M1-H10.pep
VALRHIRKYHKSTQLLIRKLPSXRLVGEIAQDFKTDMRFQGHSVLAIQXAAEAYLVGLREVTNLCAIPAKRVPIMPKHIQLVRRIRGERA

SEQ ID NO: 7396 - protein, 110 aa, Zea mays
  unsure (1)..(110): unsure at all Xaa locations
  Clone ID: TF_LIB3069-057-Q1-K1-H9.pep
PNHRRLGSSSSRQHRVFEARTKQTAXKSTGGKAPRKQLATNAARKSAPATGGVKKPHRFRPGTVALREIRKYQKSTELLIRKLPFQRLVREIAQDFKTDLRFQSSAVAAL

SEQ ID NO: 7397 - protein, 98 aa, Zea mays
  Clone ID: TF_LIB3279-001-P1-K1-D10.pep
MAISISHRHDNMARANHTVRTSTQCNAPYKQVATNAQRKSAPTTCDDKKPHTYRPSTVALREIRKYQKSTELLILKLPFQRLDHEIAHDFKTDLQVQS

SEQ ID NO: 7398 - protein, 122 aa, Zea mays
  Clone ID: TF_LIB3357-027-P1-K1-F9.pep
MARTKQTARKSTGGKAPRKQLATKAARKSAPTTGGVKKPHRYRPGTVALREIRKYQKSTELLIRKLPFHRLAREIAQDFKTDLRFQSHAVLALQEAGEAYLVGLFEDTNLCAIHAKRVTIMP

SEQ ID NO: 7399 - protein, 101 aa, Zea mays
  Clone ID: TF_LIB3357-035-P1-K1-E10.pep
VVTYRVAGELKHLDREVLQYDAEVDRGNRANTMRVTALFEVPPNKADKKLQNGPGGPRHRLLSRTDGLEFVRNILSLKACSAQVHGCYCGASRSRKKRDLG

SEQ ID NO: 7400 - protein, 159 aa, Zea mays
  unsure (1)..(159): unsure at all Xaa locations
  Clone ID: TF_LIB3279-177-Q1-K6-A8.pep
PGEPPGATKTPTRPEAPKAEKKPAAKKPAEEEPAAEKAPAGKKPKAEKRGPGGKXXAKEGGEGKRGKKKGKKSXETXKXXXXKGXKQGHPDXGXXXKARAXXNXXXNXXXEKXXXEAAKXARXNKKXTXTXRENQTXGRXXXPGEXAKHAXXEGTKAGT

SEQ ID NO: 7401 - protein, 88 aa, Zea mays
  unsure (1)..(88): unsure at all Xaa locations
  Clone ID: TF_700206634H1.pep
MARKVEKKPAAKNPAEEEPAAEKTTAGKKLNAEKLVPAGKSAGIEGGEGKRGXMKGKKIVETYKIYIFKVLKQVHPVIGISSKAMSIM

SEQ ID NO: 7402 - protein, 122 aa, Zea mays
  unsure (1)..(122): unsure at all Xaa locations
  Clone ID: TF_LIB3969-002-Q1-M6-D12.pep
KGPRKQLTTKRARKXARATDGVKKSLRFRHGTVASREIRKYQKSTXMLIRKLPFQSFVLEIPQEFKTGLRFQSSPVTTMQESAKAYMVGLFKNTNLCAIHAKRVSIMPKDIQIVHRIRGERA

SEQ ID NO: 7403 - protein, 163 aa, Zea mays
  unsure (1)..(163): unsure at all Xaa locations
  Clone ID: TF_LIB4863-005-R1-K1-D7.pep
MDSTGTGAGGKGKKGAAGRKVGGPRKKSVSRSVKAGLQFPVDRIGRYLKKGRYAQRVGTGAPVYLAAVLEYLAAEVLELAGNAARDNKKTRIIPRHVLLAIRNDEELGKLLGGVTIAHGXVLLPNINPCSACQEERGEKASSVXEARRAKSPKKAGQVPPRRA

SEQ ID NO: 7404 - protein, 137 aa, Zea mays
  Clone ID: TF_ZmC369_114.pep
MAPKAEKKPAEKKPTEEKAEKKPRAEKRVPGKEGGEKKGKKKAKKSVETYKIYIFKVLKQVHPDIGISSKAMSIMNSFINDIFEKLAAEAAKLARYNKKPTITSREIQTSVRLVLPGELAKHAVSEGTKAVTKFTSS

SEQ ID NO: 7405 - protein, 137 aa, Zea mays; identical to SEQ ID NO: 7404
  Clone ID: TF_ZmC369_141.pep

SEQ ID NO: 7406 - protein, 137 aa, Zea mays; identical to SEQ ID NO: 7404
  Clone ID: TF_ZmC369_146.pep

SEQ ID NO: 7407 - protein, 67 aa, Zea mays
  Clone ID: TF_LIB5025-016-B1-XP1-F1.pep
MDVSGAGGKAKKGAAGRKAGGPTKKSVSRSSRAGLQFPVSRVGRYLKKGRYAHRVCTGAPVYLAAVL

SEQ ID NO: 7408 - protein, 136 aa, Zea mays
  unsure (1)..(136): unsure at all Xaa locations
  Clone ID: TF_LIB4827-072-R1-N1-D12.pep
ARTNHTARKSTVGNDPRKQLATKDARKSAPXAPGGEKKAHRYRPATVGLREIRKYHNSTELLIKKLPFQRLVRXIAHDFKTDFCFQSHAELALQEAAEAYLVGLFEDTNLCDIHAKRVTIMPKDIQLXRRIRGERA

SEQ ID NO: 7409 - protein, 117 aa, Zea mays
  Clone ID: TF_ZmC369_102.pep
KRVPAGKSAGKEGGEGKRGRKKGKKSVETYKIYIFKVLKQVHPDIGISSKAMSIMNSFINDIFEKLAAEAAKLARYNKKPTITSREIQTSVRLVLPGELAKHAVSEGTKAVTKFTSS

SEQ ID NO: 7410 - protein, 118 aa, Zea mays
  unsure (1)..(118): unsure at all Xaa locations
  Clone ID: TF_ZmC653_46.pep
MDGAEVGVLEETHQVRLTQLSPMARTKQTARKSTGGKAPRKQLATKAARKSAPATGGVKKPHRFRPGTVALREIRKYQKSTELLIRKLPFXQRLVREIAQDFKTDLRFQSSCSAATAE

SEQ ID NO: 7411 - protein, 110 aa, Zea mays
  Clone ID: TF_LIB4979-019-A1-K1-E4.pep
MAPARRTARKSTGAKAAEKQLATKGARKSAPATGVVKKLHRFRPGTVALREIGKSLKSTELLIREVAFQRLVREIAQALQSDLRFQSSAVSRLGEAAERYLVARCEDASL

SEQ ID NO: 7412 - protein, 127 aa, Zea mays
  unsure (1)..(127): unsure at all Xaa locations
  Clone ID: TF_LIB3279-174-P1-K6-E10.pep
MARTKQTARKSTGGKAPRKQLATKAARKSAPATGGVFKPHRFRPGTVALLXEIRKYQKSTELLIRKLPFQRLVLEIAQDFKTDLRXSPPPTRLLQEADRANLVGVLEDINFCSIQAKCVTFMPKDIS

SEQ ID NO: 7413 - protein, 137 aa, Zea mays; identical to SEQ ID NO: 7163
  Clone ID: TF_LIB4742-082-R1-K1-H5.pep

SEQ ID NO: 7414 - protein, 137 aa, Zea mays; identical to SEQ ID NO: 7163
  Clone ID: TF_ZmC369_125.pep

SEQ ID NO: 7415 - protein, 137 aa, Zea mays; identical to SEQ ID NO: 7163
  Clone ID: TF_ZmC369_126.pep

SEQ ID NO: 7416 - protein, 137 aa, Zea mays; identical to SEQ ID NO: 7163
  Clone ID: TF_ZmC369_67.pep

SEQ ID NO: 7417 - protein, 137 aa, Zea mays; identical to SEQ ID NO: 7163
  Clone ID: TF_ZmC369_91.pep

SEQ ID NO: 7418 - protein, 137 aa, Zea mays; identical to SEQ ID NO: 7163
  Clone ID: TF_ZmC369_92.pep

SEQ ID NO: 7419 - protein, 110 aa, Zea mays
  Clone ID: TF_LIB3076-044-Q1-K1-G3.pep
LRPVLVLQGDLLQLKGGKGLCKGGANRHRKVLRDNIHGITKPAILMLALMGGVKRISVLIYEETRYVLKIFLENVILDTFTYTEHARRKTDTAMDVDYTLKLQCRTLYGF

SEQ ID NO: 7420 - protein, 54 aa, Zea mays
  Clone ID: TF_LIB3279-224-Q6-N6-B8.pep
EKFAAGAAKFARYNKKPPFPSGEIQTWVGLVLPGGLAKHAVSEGAKGVPKFTPS

SEQ ID NO: 7421 - protein, 191 aa, Zea mays
  unsure (1)..(191): unsure at all Xaa locations
  Clone ID: TF_LIB4730-144-A1-K1-G1.pep
MARTKQTARKSTGGKAPRKQLATKAARKSAPATGGVKKPHRFRPGTVALREIRKYQKSTELLIRKLPFQRLVREIAQDFKTDLRFQSSAGAALQEAVEGYLGGFFEDSYLCAIRAEPRXVMTSALQLARRXRGERALSVHGGGGRSSRRSFWHPPVEVTTEKDEPFDKAFLVLARIWTGDPNLHFEVCCCS

SEQ ID NO: 7422 - protein, 60 aa, Zea mays
  Clone ID: TF_LIB4979-120-Q1-K1-A8.pep
TRISGLIYEETRHVLKIFLENVIRDAITYTQHARRNTDTAMHVEYAHKRQHRTLLRSRRS

SEQ ID NO: 7423 - protein, 126 aa, Zea mays
  Clone ID: TF_LIB3279-211-Q6-N6-C3.pep
PLGKNPKGEKRLPAGKSPAKEGGVSKKGGKKPKKRVERSKFSFFKVFNRGPPDMGFSSRALSFLNSFFKDFFKKFPGEGAKFPRFNKKPPFPSRGIQTSVPLFLPGGLPKPPVLGGPKAVPKFPSS

SEQ ID NO: 7424 - protein, 120 aa, Zea mays
  unsure (1)..(120): unsure at all Xaa locations
  Clone ID: TF_LIB4756-093-R1-K1-E3.pep
MARTKQTARKSTGGKAPRKQLATKAARTSAPTTGGAKKPHRYRPGTVALREIRKYQNSTELLIRKMPFQRLDREIAQDYNTDSRLXSHAVLALQEXCLRNTLLPLPEETNLXAIHAKTCD

SEQ ID NO: 7425 - protein, 109 aa, Zea mays
  Clone ID: TF_LIB3150-095-P1-N1-D1.pep
MARTKHTARKSTGGKAPRKQLATKAARKSAPATGGVKKPHRFRPGTVALREIRKYQKSTELLIRKLPSQRLVREIAQDFKTDLRFQSSAVAALHEAAEAYLVGLFEDTN

SEQ ID NO: 7426 - protein, 170 aa, Zea mays
  unsure (1)..(170): unsure at all Xaa locations
  Clone ID: TF_LIB4829-034-R1-N1-E6.pep
RPGFVSWHPQRACSVQATNYDVPPRAQEEDIEEDRLHEPTARESTEGNGPGKQVATNAESKSEPTNARSRRTPLIHRAGNVALRVIRKHCNSTLLLSRRVPCLRLWREIAHDFKTELRXRCSSPLELQQDGEGYLGVVLXDIILCCIDFKCDFIMPDDIQLCRRSRVLRK

SEQ ID NO: 7427 - protein, 121 aa, Zea mays
  unsure (1)..(121): unsure at all Xaa locations
  Clone ID: TF_LIB3059-047-Q1-K1-H1.pep
MAPKAEKKPAVEKPAEEEPAAEKATAGKKPKAEKRLPAGKYAGKEGGXKKGKKKANKSVETYKIYILQVLNQVHPDIGISSKAMSIMNSFINDIFEKLAAEAANLARYNKKPTITSSEIQT

SEQ ID NO: 7428 - protein, 101 aa, Zea mays
  unsure (1)..(101): unsure at all Xaa locations
  Clone ID: TF_LIB3279-014-P1-K1-D8.F2.pep
RRGAGGRQGPPRGPVRGHQPRRHPRQAGHHQAQGQPARPPQPRGARQGGRPERPGPGAQALHGSPPPAGGTWXRRGEXXSNVPNQANPXGGTNGNRHQGGP

SEQ ID NO: 7429 - protein, 92 aa, Zea mays
  Clone ID: TF_LIB3245-158-P1-N1-A4.pep
AAPKAKKGTGGHKDGGPTKKSVTWSLKAKMQFPIGRIGLYLKKGLYAQRVSTGALVYLVGDLEYLARRSCWICGGNPSQGPHERPASSLATC

SEQ ID NO: 7430 - protein, 121 aa, Zea mays
  Clone ID: TF_jC-zmX700352241a1.pep
MAPFAEKKPAAKKPAEEEPAAPAEKAPAGKKPKAEKRLPAGKSAGKEGGVDKKGRKKAKKSVETYKIYIFKVLKQVHPDIGIYSKAMSIMNSFINDIFEKLAGEAAKLRPYNMKPTITFRE

SEQ ID NO: 7431 - protein, 120 aa, Zea mays
  Clone ID: TF_LIB3332-011-P1-K1-A11.pep
PTRTKQTARKSSCGKAPRKQVSTKGGRVSAPATGGVKKPHRFRPGTAALREIRKYQKSTELLIQKLSFQLLVREIAQDFKTDLRFQSFAVTSLKEASLGAFLPIRMTSSFCLLITKPKKI

SEQ ID NO: 7432 - protein, 76 aa, Zea mays
  unsure (1)..(76): unsure at all Xaa locations
  Clone ID: TF_700448372H1.pep
AAEVLELAGNAAKDNKKTRIVXPRHIQLDVRNDEELTKLLGGVNIASCGFMPNIHQQLVPKKAGSSKASTVDDDEN

SEQ ID NO: 7433 - protein, 120 aa, Zea mays
  unsure (1)..(120): unsure at all Xaa locations
  Clone ID: TF_LIB3592-095-Q1-K6-C3.pep
SSLTPRSVRKCAPTTGGEKKXHRYRPGNCCTPSRSXTYQKSTELLIMKLPFQRLIREIAQXFKTDLAFXSSHAVLALQEAAEAYLAGLFEDTNLCAIHAKRVTIMPNDIQLARRIRGERA

SEQ ID NO: 7434 - protein, 164 aa, Zea mays
  Clone ID: TF_LIB4979-107-B1-K1-C9.pep
STISSFYTLLLEITSSRACFYSHFILSRGCAQQKTSTKSLVLLAPRNELATKAARKSAPATGGVKKPHRFRPGTVALREIRKYQKSTELLIRKLPFQRLVREIAQDFKTDLRFQSSAVAALQEASEAYLVGLFEDTNLCAIHAKRVTIMPKDIQLARRIRVDRA

SEQ ID NO: 7435 - protein, 148 aa, Zea mays; identical to SEQ ID NO: 7378
  Clone ID: TF_ZmC369_131.pep

SEQ ID NO: 7436 - protein, 148 aa, Zea mays; identical to SEQ ID NO: 7378
  Clone ID: TF_ZmC369_136.pep

SEQ ID NO: 7437 - protein, 148 aa, Zea mays; identical to SEQ ID NO: 7378
  Clone ID: TF_ZmC369_139.pep

SEQ ID NO: 7438 - protein, 148 aa, Zea mays; identical to SEQ ID NO: 7378
  Clone ID: TF_ZmC369_56.pep

SEQ ID NO: 7439 - protein, 148 aa, Zea mays; identical to SEQ ID NO: 7378
  Clone ID: TF_ZmC369_82.pep

SEQ ID NO: 7440 - protein, 148 aa, Zea mays; identical to SEQ ID NO: 7378
  Clone ID: TF_ZmC369_96.pep

SEQ ID NO: 7441 - protein, 85 aa, Zea mays
  Clone ID: TF_LIB4740-076-R1-K1-E7.pep
MSLNKPADKKSAAEEKVLMTTVVMKPKCEKRLPASKSFGTEGGEKKVKKMAKKIVETYKIYIFKALKLVHPDIGIFFNAMSMMNC

SEQ ID NO: 7442 - protein, 142 aa, Zea mays
  unsure (1)..(142): unsure at all Xaa locations
  Clone ID: TF_LIB4730-070-R1-K1-A3.pep
EPQNDQAATAAPRETWRRHPRQDKKPGAKKTGEEEPATEKAEKARAGKKPKREKRVPAGKSGGKEGGGGKKGKKKAKKSVETYKIYIFKVLKQVHPDIVIXVKAMSIMNCFISDIFEKLAGDCAELARYNKKPTVTCRDIHT

SEQ ID NO: 7443 - protein, 124 aa, Zea mays
  Clone ID: TF_LIB4730-063-R1-K1-H5.pep
MARTKQTARKSTGGKAPRKQLATKAARKSGPATGGVKKPHRYRPDTVALREIRKYHKSTELLIRKLPFQRLVRKIAQDFKPDLRFQSSGVAALEEAVEAYLVGFFEDTNLCDIHAKRVTKIPKV

SEQ ID NO: 7444 - protein, 112 aa, Zea mays
  Clone ID: TF_LIB4762-133-Q1-K1-G9.pep
RGSKSAPATGGVKKPHRFRPGTVALREIRKYQKSTELLIRKLPFQRLVREIAQDFKTDLRFQSSAVSALQEAAEAYLVGLFEDTNLCAIHAKRVTIMPKDIQLARRIRGERA

SEQ ID NO: 7445 - protein, 154 aa, Zea mays
  Clone ID: TF_LIB4974-066-Q1-K1-C8.pep
LEAGRAGQRTHLLAFLPIRSPLRNQNPNSPAGKKPKAEKRVPAGKSAAKEGGEGKRGKKKGKKSVETYKIYIFKVLKQVHPDIGISSKAMSIMNSFINDIFEKLAAEAKLARYNKKPTITSREIQTSVRLVLPGELAKHAVSEGTKAVTKFTSA

SEQ ID NO: 7446 - protein, 59 aa, Zea mays
  Clone ID: TF_LIB3088-050-Q1-K1-C2.pep
GSKAPAERTVGGPWKKSMSRCLKADLQFRVGRIWRYLKKGRYAQRVGTGALVYLDDVLE

SEQ ID NO: 7447 - protein, 41 aa, Zea mays
  Clone ID: TF_LIB3957-024-Q1-K6-E7.pep
MRDEEEDIDEIQTSVRLVLPGELAKHAVSEGTKAVTKFTSA

SEQ ID NO: 7448 - protein, 81 aa, Zea mays
  Clone ID: TF_LIB5116-016-A1-PF1-A4.pep
MAGRGKAIGAGAAKKATSRSSKAGLQFPVGRIARFLKAGKYAERVGAGAPVYLAAVLEYLAAEVRFSQISSLPLFSRYSIP

SEQ ID NO: 7449 - protein, 121 aa, Zea mays
  unsure (1)..(121): unsure at all Xaa locations
  Clone ID: TF_16917799.pep
ASDFQFQILRLRKSAPAPGGVKKPHRFRPGTVAFREIRKYQKSPELFIRKLPFQRVVGEIAQKFKTDLWFQSSPVPPLQEAPQGYLVGFFXDTNLWAIPAKRVPLMPKDIQLARRIRGERA

SEQ ID NO: 7450 - protein, 163 aa, Zea mays
  unsure (1)..(163): unsure at all Xaa locations
  Clone ID: TF_LIB4974-021-Q1-K1-B4.pep
MATMAEKNPALKKEASDDPSDEAAPIQXAPAMHKPQEEIRLPADKFADKEAVDNNGMKKENXSRRPYKTYICKVLKQEHHDLGISSKDMPIMNSFILHVVEIFGAQADKLGRXNKKATITSREIQTSVRLLLPGELVLHAVSDGTWVRHQGHLCLTALHYASM

SEQ ID NO: 7451 - protein, 123 aa, Zea mays
  unsure (1)..(123): unsure at all Xaa locations
  Clone ID: TF_LIB4762-046-R1-K1-G4.pep
ALSARSRHAIRSRDTAHGLSPDTGAGGKGEEWRAAXRMVGGPRKKSASRSEMAPLQFPDGRIGRYLKKGRYAQRVGTGAPVYLAAVLEYLAAEVLELAGNAARDNKKTRIIPRHVLLAIRNDE

SEQ ID NO: 7452 - protein, 147 aa, Zea mays
  unsure (1)..(147): unsure at all Xaa locations
  Clone ID: TF_LIB4758-085-R1-K1-H3.pep
MDASGAGSKGKKGAAGCKAGGPRKKSVTRSVKAGLQFPVCRIGRYLKKGRYSQRVGTGVPVYLAAVLEYLAAEVLELVGNAPKDFFXTRTLPRHVLLAIRNDEELPKLLASVTIXHGGVLLNIHSVLLPQKACEKAVSPGFNDLPFP

SEQ ID NO: 7453 - protein, 120 aa, Zea mays
  Clone ID: TF_LIB4730-018-R1-K1-A5.pep
MARTKQTARKSTGGKAPRKQLATKAARKSAPATGGVKKPHRFRPGIVALREIRKYQKSTELLIRKLPFQRLVREIAQDFKTDLRFQSSAVAALQEAAEAYLLGLFLDTILWAIHAKRVTI

SEQ ID NO: 7454 - protein, 152 aa, Zea mays
  Clone ID: TF_LIB4766-042-R1-K1-E3.pep
MAPKAEKKPAAKKPAEEEPAAPAEKAPAGKKPKAEKRLPAGKSAGKEGGVDKKGRKKAKKSVETYKIYIFKVLKQVHPDIGISSKAMSIMNSFINDIFEKLAGEAAKLARYNKKPTITSREIQTSVRLVLPGELAKHAVSEGTKAVTKFTSS

SEQ ID NO: 7455 - protein, 152 aa, Zea mays; identical to SEQ ID NO: 7454
  Clone ID: TF_ZmC369_107.pep

SEQ ID NO: 7456 - protein, 152 aa, Zea mays; identical to SEQ ID NO: 7454
  Clone ID: TF_ZmC369_109.pep

SEQ ID NO: 7457 - protein, 152 aa, Zea mays; identical to SEQ ID NO: 7454
  Clone ID: TF_ZmC369_110.pep

SEQ ID NO: 7458 - protein, 152 aa, Zea mays; identical to SEQ ID NO: 7454
  Clone ID: TF_ZmC369_119.pep

SEQ ID NO: 7459 - protein, 152 aa, Zea mays; identical to SEQ ID NO: 7454
  Clone ID: TF_ZmC369_133.pep

SEQ ID NO: 7460 - protein, 152 aa, Zea mays; identical to SEQ ID NO: 7454
  Clone ID: TF_ZmC369_33.pep

SEQ ID NO: 7461 - protein, 152 aa, Zea mays; identical to SEQ ID NO: 7454
  Clone ID: TF_ZmC369_43.pep

SEQ ID NO: 7462 - protein, 123 aa, Zea mays
  Clone ID: TF_ZmC369_59.pep
MAPKAEKRLPAGKSAGKEGGVDKKGRKKAKKSVETYKIYIFKVLKQVHPDIGISSKAMSIMNSFINDIFEKLAGEAAKLARYNKKPTITSREIQTSVRLVLPGELAKHAVSEGTKAVTKFTSS

SEQ ID NO: 7463 - protein, 152 aa, Zea mays; identical to SEQ ID NO: 7454
  Clone ID: TF_ZmC369_93.pep

SEQ ID NO: 7464 - protein, 152 aa, Zea mays; identical to SEQ ID NO: 7454
  Clone ID: TF_ZmC369_94.pep

SEQ ID NO: 7465 - protein, 117 aa, Zea mays
  unsure (1)..(117): unsure at all Xaa locations
  Clone ID: TF_LIB4730-036-R1-K1-H3.pep
FINQFIMPITYTTSPCPGAPALAPSTCTFCRSXRSSWPSSSPSSXRPPSRRTSRRAGASRTWASCLRPSSPPSPRPPASSPLASSRPWAPSGRDSGLSGSRGMGWTGCGWLETREWR

SEQ ID NO: 7466 - protein, 213 aa, Zea mays
  unsure (1)..(213): unsure at all Xaa locations
  Clone ID: TF_LIB4729-067-R1-K1-G7.pep
IPSRPASVAHDAEKKPAAKKPAEEDPAAEEAPGEKKPEEEKRLPAGXLLPREAGXGTRGKKDGKNSVASYNIFFLEVLKEVHPVIVFSSEVMFMMNFFIDDFFEKLADDADLLGCYNKNTIISSREIQSFGRLLLAGEVEQHAFYEGTEGVTKISSYYAGPPLVGGFSAVITFVAVSRCCWLLAFMDVYYPAGTAVLSDRTVMVIIPPRFFFF

SEQ ID NO: 7467 - protein, 102 aa, Zea mays
  Clone ID: TF_jC-zmXLIB3527P015Bh10d1.pep
QSGGTGAPVYLAAVLEYLVAEVLELAGNAAKDNKKTRIIPRHVLLAIRNDEELEKLLYGATIAHGGALPTIKPVLLPTKTAETAAAQDAKPPNKAVPPPKKA

SEQ ID NO: 7468 - protein, 149 aa, Zea mays
  unsure (1)..(149): unsure at all Xaa locations
  Clone ID: TF_LIB4185-036-R1-K1-H7.pep
MAPKAEKKPPPKKPPEEEPAAEKATAGKKPKAEKRLPPGKSPGKEGGEKKGKKKAKKSVETYKIYIFKVLKQVHPDIGILSKAMSIMNSFINDIFXKLAAEAAKLARYNKKPTITSREIQTSVRLVLPGELAKHPVSEGPKTVPKFPSS

SEQ ID NO: 7469 - protein, 153 aa, Zea mays
  Clone ID: TF_ZmC520105_1.pep
MAPKADKKPVAENKVEKAAEKTPAGKKPKAEKRLPAGKTASKEAGGEAKTRGRKKGSKAKKSVETYKIYIFKVLKQVHPDIGISSKAMSIMNSFINDIFEKLAGESAKLARYNKKPTITSREIQTSVRLVLPGELAKHAVSEGTKAVTKFTSS

SEQ ID NO: 7470 - protein, 136 aa, Zea mays
  Clone ID: TF_LIB4826-019-A1-N1-F2.pep
MARTKQTARKSTGGKAPRKQLATKAARKSAPTTGGVKKPHRYRPGTVALREIRKYQKSTELLIRKLPLQRLVREIAQDFKTDLRFQSHAVLALQEAAEAYLVGLFEDTNLCAIHAKRVTIMPKDIQLARRIRGERA

SEQ ID NO: 7471 - protein, 137 aa, Zea mays
  unsure (1)..(137): unsure at all Xaa locations
  Clone ID: TF_LIB4762-109-Q1-K1-E12.pep
MGRTILTARNSSDDKASRKRLVTNVPDQVCPRPLPVLNKPHRXRPDTVMLREIRKNQKSTNLLILKLSIXQLLCEIDQNFKTDLRFQSSGCAALKXESEIYLDGLFKDTNLCCIHVKSDTIMAKDIHFARRIPGYKT

SEQ ID NO: 7472 - protein, 106 aa, Zea mays
  Clone ID: TF_LIB3637-255-Q6-N6-H9.pep
FQGVGRGAPVCLPPVLEGLPREVLELAGNSAKATKKRGFVPRQGLRGIRTQGELGNLVGGGSLGPGGVLPENHSVFRPKKVAEKGASAGTKEPRSPKRGAWSPPRA

SEQ ID NO: 7473 - protein, 134 aa, Zea mays
  unsure (1)..(134): unsure at all Xaa locations
  Clone ID: TF_LIB3969-010-Q1-M6-G2.pep
RSVKTGLQFFFARMGCYVKKSRYAQCVGTGTSVCLTSVMXNLPAXVMQLTSFSAKSTNKASIVSGHVVFAIHNAEQLGNLVTSVPVALGGVLPNIHSVILPKKTSEKASTGGSKXTKSPKKFFKFLSYKAEGFK

SEQ ID NO: 7474 - protein, 75 aa, Zea mays
  unsure (1)..(75): unsure at all Xaa locations
  Clone ID: TF_LIB3150-075-P1-N1-F7.pep
MARTKHTARKSTGGKAPRKQLATKAVRKSAPTTGGVKNPHRYRPCTVALFEIRKFQKSTVLLIRKLPFSXLVREI

SEQ ID NO: 7475 - protein, 148 aa, Zea mays
  unsure (1)..(148): unsure at all Xaa locations
  Clone ID: TF_LIB4766-007-R2-K1-D10.pep
MAGRGKAIGSGAAKKATSRSSKAGLQFPVGRIARFLKAGKYAERVGAGAPVYLAAVLEYLAAENNGRILAEDLNLXVLELASNAARDNKKTRIVPRHIQLAVRNDEELSRLLGTVTIASGGGMPNIHNLLLPKKAGGGSAKAAAGDKD

SEQ ID NO: 7476 - protein, 128 aa, Zea mays
  unsure (1)..(128): unsure at all Xaa locations
  Clone ID: TF_LIB4740-009-R1-K1-F6.pep
MARTKQTARKSTGGKAPRKQLATKAARKSAPTTGGVKKPHRYRPGTVALREIRKYQKSTELLIRKLPFQRLVREIAQDFKTDLRFQSHAVLALQEAAEAYLVGLFXGPXLCALLAXRVAFLPLGLLLA

SEQ ID NO: 7477 - protein, 112 aa, Zea mays
  Clone ID: TF_LIB3357-004-P1-K1-G11.pep
AQGYTNQQQGKFSHSTLFYAGNIWLPATGGKGLCKDGSNRHRKVLRDNIQGITKPAIRRLARRGGVKRISGLIYEETRGVLKIFLENVIRDAFTYTEHARRKTVTAMDVFYA

SEQ ID NO: 7478 - protein, 126 aa, Zea mays
  Clone ID: TF_ZmC6351_58.pep
WLLCACWTSYNQKIEIFSRKKKKKKKKKKKKSATNLAFRGNSPAHHRPERKKPCPGAVRVARGSARAARSVTGRCCATTSRASPSRRSGGWRGGAASSASRGSSTRRPAACSRSSSRTHPRRRHLH

SEQ ID NO: 7479 - protein, 46 aa, Zea mays
  Clone ID: TF_LIB3357-035-P1-K1-H3.pep
EAHRFARTVALREIRRYQKSTELLIRKLPFQRLVREIAQELQRLDL

SEQ ID NO: 7480 - protein, 106 aa, Zea mays
  unsure (1)..(106): unsure at all Xaa locations
  Clone ID: TF_LIB3070-005-Q1-N1-B3.pep
MDSNDTGSXAKGKKGADGRKDCNPRKKSESEAVKAILQLHVCRIVRYLKKGRYTQHVSTCANVYLAAVLEYLAAEVLELAGNAARDIKMTRIITSHELMAIRNDEE

SEQ ID NO: 7481 - protein, 157 aa, Zea mays
  Clone ID: TF_ZmC2834_1.pep
MARTKHQAVRKTAEKPKKKLQFERSGGASTSATPERAAGTGGRAASGGDSVKKTKPRHRWRPGTVALREIRKYQKSTEPLIPFAPFVRVVRELTNFVTNGKVERYTAEALLALQEAAEFHLIELFEMANLCAIHAKRVTIMQKDIQLARRIGGRRWA

SEQ ID NO: 7482 - protein, 157 aa, Zea mays; identical to SEQ ID NO: 7481
  Clone ID: TF_ZmC2834_2.pep

SEQ ID NO: 7483 - protein, 136 aa, Zea mays
  Clone ID: TF_ZmC2834_4.pep
MARTKHQAVRKTQERAAGTGGRAASGGDSVKKTKPRHRWRPGTVALREIRKYQKSTEPLIPFAPFVRVVRELTNFVTNGKVERYTAEALLALQEAAEFHLIELFEMANLCAIHAKRVTIMQKDIQLARRIGGRRWA

SEQ ID NO: 7484 - protein, 187 aa, Zea mays
  Clone ID: TF_ZmC2834_5.pep
MARTKHQAVRKTAEKPKKKLQFERSGGASTSATPVSACVRGSVPSFCLFCGLLLLACKLFDGMQERAAGTGGRAASGGDSVKKTKPRHRWRPGTVALREIRKYQKSTEPLIPFAPFVRVVRELTNFVTNGKVERYTAEALLALQEAAEFHLIELFEMANLCAIHAKRVTIMQKDIQLARRIGGRRWA

SEQ ID NO: 7485 - protein, 167 aa, Zea mays
  Clone ID: TF_uC-zmflteosinte067f04b1.pep
SERDPGGPMAEKKPAAKKPAEEEPAAPAEKAPAGKKPKAEKRLPAGKSAGKEGGVDKKGRKKAKKSVETYKIYIFKVLKQVHPDIGISSKAMSIMNSFINDIFEKLAGEAAKLARYNKKPTITSREIQTSVRLVLPGELAKHAVWRAQGRTKSPRLALLVGLSAGRL

SEQ ID NO: 7486 - protein, 138 aa, Zea mays
  Clone ID: TF_LIB4730-049-R1-K1-C4.pep
MEPKRSRAETQVDRGAKGSRKQLATKAARTSSPSTGGVKKPHRLRPGTVALREIRKYQKSTKLVIRKLPIQRLEREIAQDFKTDLRFQSSAVAALQEAVEAYLVGLFEDTNLCAIHAKRVTIMPMDIQLARRIRGERA

SEQ ID NO: 7487 - protein, 136 aa, Zea mays
  Clone ID: TF_LIB4977-005-R1-K1-A4.pep
MARTKQTVRKSTGGKAPRKQLATKAARKSAPATGGVKKPHRFRPGTVALREIRKYHKSTELLIRKLPFQRLVREIAQDFKTDLRFQSSAVSALHEAAEAYLVSLFEDTNLCAIHAKRVTIMPKDIQLARRIRDERD

SEQ ID NO: 7488 - protein, 136 aa, Zea mays
  Clone ID: TF_LIB5026-038-Q1-XP2-B2.pep
MARTKQTARKSTGGKAPRKQLATKAARKSAPATGGVKKPHRFRPGTVALREIRKYQKSTELLIRKLPFQRLVREIAQDFKTDLRFQSSAGSALQEAAEGYLGGLFQDTNLWGIHGKGGTIMAQDIQLGRRIRGERA

SEQ ID NO: 7489 - protein, 102 aa, Zea mays
  Clone ID: TF_uC-zmroteosinte019g10a1.pep
DKKGRKKAKKSVKTYKIYIFKVLKQVHPDIGISSKAMSIMNSFINDIFEKLAAEAAKLARYNKKPTITSREIQTSVRLVLPGELAKHAVSEGTKAVTKFTSS

SEQ ID NO: 7490 - protein, 144 aa, Zea mays
  unsure (1)..(144): unsure at all Xaa locations
  Clone ID: TF_LIB4762-139-Q1-K1-C10.pep
EGGCEEPAQEEPAVAKAPADQXKPRTDKRLPAAKSTEKERGHQRAKKNAKNCXYTYYIYIFKVLKCDHSHIYISSEGMSXIMNSFINDIFEKLVVEAAKLARXNKKPTITSREIQTSVRLVLPGDVDKYALSEGTMGATKLTSS

SEQ ID NO: 7491 - protein, 150 aa, Zea mays
  Clone ID: TF_ZmC369_61.pep
MAPKAEKKPAAKKPAEEEPAAEKAPAGKKPKAEKRVPAGKSAAKEGGEGKRGRKKGKKSVETYKIYIFKVLKQVHPDIGISSKAMSIMNSFINDIFEKLAAEAAKLARYNKKPTITSREIQTSVRLVLPGELAKHAVSEGTKAVTKFTSA

SEQ ID NO: 7492 - protein, 134 aa, Zea mays
  Clone ID: TF_LIB5025-063-A1-XP1-B8.pep
MTGGGKSGGKASGSKNAQSRSSKAGLAFPVGRVHRLLRKGNYAQRVGAGAPVYLAAVLEYLAAEILELAGNAARDNKKTRIIPRHLQLAIRNDEELNKLLGHVTIAQGGVLPNIHQNLLPKKTGKTGKNASQEL

SEQ ID NO: 7493 - protein, 71 aa, Zea mays
  unsure (1)..(71): unsure at all Xaa locations
  Clone ID: TF_LIB4976-032-R1-K1-G8.pep
LYGGATGNLKNTRIWPHHIQLYVFSDHXLTKLLRTSTIPSGAVMPTIHQPLLSSNADSSNASDNNHNNCDC

SEQ ID NO: 7494 - protein, 79 aa, Zea mays
  Clone ID: TF_3341037.pep
KQVHPDIGISSKAMSIMNSFIKDIFEKLAGEAAKLVRYNKKPTIMSREIQTSVRLVFPGELAKHAVSEGTKAVTKFTSN

SEQ ID NO: 7495 - protein, 136 aa, Zea mays
  Clone ID: TF_LIB4762-048-R1-K1-H7.pep
MARTKQTARKSTGGKAPRKQLATKAARKSAPATGGVKKPHRFRPGTVALREIRKYQKSTELLIRKLPFQRLVREIAQDFKTDLRFQSSAVAVLQEAAEAYLVGLFEDTNLCAIHAKRVTMMPKDIQLARRIRGERA

SEQ ID NO: 7496 - protein, 136 aa, Zea mays
  Clone ID: TF_LIB4719-012-R1-K1-F1.pep
MARTKQTARKSTGGKAPRKQLATKAARKPAPTTGGVKKPHRYRPGTVALREIRKYQKSTDLLIRKLPFQRLVREIAQDFKTDLRFQSHAVLALQEAAEAYLVGLFEDTNLCAIHAKRVTIMPKDVQLARRIRGERA

SEQ ID NO: 7497 - protein, 136 aa, Zea mays
  unsure (1)..(136): unsure at all Xaa locations
  Clone ID: TF_3341197.pep
RQFAAASHPREPPPAVGNSPQPLTLASHLPQPAEDDPATDNVDNAPAGNKPKADKRLPAGKSNEGGEGYKGKKNANKSVETYKIYIFEVLKQVHPDIGISSNAMSIMNSFINDIFDKLAAESAXLARYXQKPTITS

SEQ ID NO: 7498 - protein, 124 aa, Zea mays
  unsure (1)..(124): unsure at all Xaa locations
  Clone ID: TF_LIB3595-023-Q1-N6-C2.pep
GKKPKAEKRVPAGKSAGKEGGEGKRGKKKGKKSVKTYKIYSSKVLKQVHPDIGISSKAMSIMNSFINDIFEKLAGEAAKLARYNKKPTITPREIQTPVRLVLPGELAKHAVXEGTKAVTKFTSP

SEQ ID NO: 7499 - protein, 170 aa, Zea mays
  Clone ID: TF_LIB4730-002-R1-K1-E2.pep
MAPKAEKKPAEKKPAAEEKAEKTTAGKKPKSEKRLPASKSSGKEGGEKKGKKKAKKSVETYKIYIFKVLKQVHPDIGISSKAMSIMNSFINDIFEKLAGEAAKLARYNKKPTITSREIQTSVRLVLPGELAKHAVSPSYKGSSSCPLPLPLPAYVCAVKIVMFSSGEQGQ

SEQ ID NO: 7500 - protein, 142 aa, Zea mays
  Clone ID: TF_ZmC584870_1.pep
MAPKAEKKPAAAEKTPAAEKTTAGKKPKAEKRPPKSKEGGADKRKKKAKKSVETYKIYIFKVLKQVHPDIGISSKAMSIMNSFINDIFEKLAGESAKLARYNKKPTITSREIQTSVRLVLPGELAKHAVSEGTKAVTKFTSS

SEQ ID NO: 7501 - protein, 153 aa, Zea mays; identical to SEQ ID NO: 7228
  Clone ID: TF_ZmC369_137.pep

SEQ ID NO: 7502 - protein, 152 aa, Zea mays
  Clone ID: TF_ZmC369_69.pep
MAPKADKKPAAKKPAEEPATEKAEKAPAGKKPKAEKRLPAGKSAGKEGGEGKKGKKKAKKSVETYKIYIFKVLKQVHPDIGISSKAMSIMNSFINDIFEKLAAESAKLARYNKKPTVTSREIQTSVRLVLPGELAKHAVSEGTKAVTKFTSS

SEQ ID NO: 7503 - protein, 133 aa, Zea mays
  Clone ID: TF_ZmC1223464_1.pep
MSGGKGGKAGGDKAASQSRSSKAGLQFPVGRIHRLLRKGNYAQRVGAGAPVYLAAVLEYLAAEILELAGNAARDNKKSRIIPRHLQLAIRNDEELNKLLGQKDISQGGVIPQIHSELLPAKSKDKTSKVSQEV

SEQ ID NO: 7504 - protein, 128 aa, Zea mays
  unsure (1)..(128): unsure at all Xaa locations
  Clone ID: TF_LIB4729-091-Q1-K1-H12.pep
PRPPPXXPPPPPPPPPPPVSVPPAPPGRRPRALLVSAHRGSGSGAHALGVLAGLEETGDPAGWERQPSLGAPGRRLVRGASANRLAGGRHCFARQGDRAAGAGVMRRGIWFNREXGCXSRERGGGPAG

SEQ ID NO: 7505 - protein, 111 aa, Zea mays
  unsure (1)..(111): unsure at all Xaa locations
  Clone ID: TF_ZmC114_32.pep
MARTKQTARKSTGGKAPRKQLATKAARKSAPTTGGVKKPHRYRPGTVALREIRKYQKSTELLIRKLPFQRLXEAYLVGLFEDTNLCAIHAKRVTIMPKDIQLARRIRGERA

SEQ ID NO: 7506 - protein, 55 aa, Zea mays
  Clone ID: TF_LIB148-002-Q1-E1-B12.pep
VVVHISTQDHGIEGAADAYLVGLFEDTNLCPIHAKRVTIMPKDIHLAMRIRRERA

SEQ ID NO: 7507 - protein, 66 aa, Zea mays
  Clone ID: TF_LIB3206-021-P1-N1-D8.pep
PRHVLLAIPNHEELGKFLTGVTIARGGVLPNINPVLLPKKTAEKASTGGSKEAKSPKKPAQSPKKA

SEQ ID NO: 7508 - protein, 154 aa, Zea mays
  unsure (1)..(154): unsure at all Xaa locations
  Clone ID: TF_LIB4730-061-R1-K1-A9.pep
GRREARRACRVARIGGPQEDSWMLRTVKAXSQIPVGRWARYIEEGXRYAQGGGTGAPVYLADVLEYVFAEVLELVGNAVRDNMKTRIIPSHVLLTIRNDEEIGKLLCGVTIAHGGVLTNINPDMLPKKTEREAYSXDSKEAKSTKKAAKSPKKA

SEQ ID NO: 7509 - protein, 148 aa, Zea mays
  unsure (1)..(148): unsure at all Xaa locations
  Clone ID: TF_jC-zmX700552707a1.pep
MAPKADKKSAAKKPVVDEPGGDKAHGGKKPKAEKCLPAAKXAGNDGGYKKGKKKATKWGETYKIYTFKVLKQVHPDIGISSKAMSIRNSFIDDIFDMLAGEAAKLARYNRKPTITCGEIQTSGRLVLAGELAKHAVFEGTMADTKFTS

SEQ ID NO: 7510 - protein, 153 aa, Zea mays; identical to SEQ ID NO: 7228
  Clone ID: TF_ZmC369_144.pep

SEQ ID NO: 7511 - protein, 168 aa, Zea mays
  Clone ID: TF_ZmC369_65.pep
AHGGLDLAGRDADAWADAWADAWAAAKKPAEEEPAAEKAEKAPAGKKPKAEKRLPAGKSAGKEGGEGKKGKKKAKKSVETYKIYIFKVLKQVHPDIGISSKAMSIMNSFINDIFEKLAAESAKLARYNKKPTVTSREIQTSVRLVLPGELAKHAVSEGTKAVTKFTSS

SEQ ID NO: 7512 - protein, 136 aa, Zea mays
  Clone ID: TF_ZmC584893_1.pep
MAPKAEKKPAAEKKPVETEKKPKAEKRVPGKDGGADKKKKKAKKSVETYKIYIFKVLKQVHPDIGISSKAMSIMNSFINDIFEKLAGESAKLARYNKKPTITSREIQTAVRLVLPGELAKHAVSEGTKAVTKFTSS

SEQ ID NO: 7513 - protein, 365 aa, Zea mays
  Clone ID: TF_ZmC21094_1.pep
MYHPQCELLTMAHETPDLDAGQPHLTVSGVASIPAELSFHLLHSLDAAAAVNPVTAPPQSTIDYFLGGADPHQQAMQYEPLPPAAGGHHQYTMDMFRDYCDGHYPTAEPYIRGTMTGALVFGATDDDDSAAAYMPGGHFETSPPPPRATGRGRKRGRALGGGFHAVLANGVEKKEKQRRLRLTEKFTALMHLIPNVTKTDRATVISDAIEYIQELGRTVEELTLLVEKKRRRRELQGDVVDAAPAAVVAAAGEAESSEGEVAPPPPAVPRQPIRSTYIQRRSKDTSVDVRIVEEDVNIKLTKRRRDGCLAAASRALDDLRLDLVHLSGGKIGDCQIYMFNTKIHKGSSVFASAVAGRLMEVVDEY

SEQ ID NO: 7514 - protein, 223 aa, Zea mays
  Clone ID: TF_ZmC3534_3.pep
NMNTGKCLEDGKRKGSGEDSSSLRSLGETSALQREVSMECADEKAGDARAKREDYVHVRAKRGQATNSHSLAERFRREKINERMKLLQDLVPGCNKITGKAMMLDEIINYVQSLQRQIEFLSMKLSAIGPGLNCDLDLQDILCTQDASSAFPGYNLQTSNVHINLYRASEEGFSHRNRIIPSPANVHVTRNAQLSAFPQRGVIWNEELCSIASDRNADSMKVE

SEQ ID NO: 7515 - protein, 156 aa, Zea mays
  Clone ID: TF_ZmC14919_2.pep
LIPHCNKTDKASILDETIEYLKSLQMQVQIMWMTSGMVPMVFPGAHQYMPPMALGMNSGCIPAAQGLSQMRRLPYMNHPMPNHIPLNSSPAMNPMNPLNTVNQFQNGHLREVPRPGPHVYGHQIAQAEEHNRILEVAASTVIPTSKAGQPPTFDGV

SEQ ID NO: 7516 - protein, 316 aa, Zea mays
  Clone ID: TF_ZmC25517_1.pep
MSSSGPLPATGTHHGSQRAECKSQGSTSARKVQKADREKMRRDKLNEQFQDLGNALDPDRPRNDKATILGDTIQMLKDLTTQVNKLKAEYTSLSEEACELTQEKNELRDEKASLKSEVDNLNNQYQQRMRVLYPWVGMEPSVVMGPPPAYPYPVPVPIPSGAVPMHPQLQTYHFFHSQASGTIPNTCIPYMAYTQPCHPPTDQPSNQLNTPVAHSSSHRSNSPAQDCRSKSSTLQQPSCGVRSSDAGDIATDLELKTPGSSCQSHAEIANNDSSSDLKTKKHCIKQINDCTLTESSSSSRCSSNGPPDVSNSAIDE

SEQ ID NO: 7517 - protein, 395 aa, Zea mays
  Clone ID: TF_ZmC6825_1.pep
MEDFGGWNMQYAAELCLPSRRDDDDDGLLGDFLGGGGLDIRSDHGGLNLPSSHPAVQNLVPCHGGVSLSVSDAFMGLDTADMLASVTGALDCSLLDTFACGSDAVVVAEEPAAQPTASSNAFSGYSSTTGGNYGNISSGESNTYGGSGGGHDTEVASPTCASKRKLAGKYPAIAASASATATTTTAEGQVAAPRRGTKRDSATSSSSTSATVAGHGGGNHAAGGGGSSSVGDGNGYEPDSEAIAQVKEMIYRAAAMRPVHQLVCGAAGGEPPSSSQNKPRRRNVRISSDPQTVAARLRRERVSERLRVLQRLVPGGSRMDTASMLDEAAGYLKFLKSQVKALERANPSSNGGYNDSSFLPQNYTGCLCVDGGTSVAFGSDGAIGGYVKPGRNMHR

SEQ ID NO: 7518 - protein, 231 aa, Zea mays
  unsure (1)..(231): unsure at all Xaa locations
  Clone ID: TF_ZmC35411_1.pep
EASGSGKHADGGKADREAIQLPGLFPPVFGGGVQPPHLRATPPTQVFHAQQPKQGGAAVGPQPPAPRPKVRARRGQATDPHSIAERLRRERIAXRMRALQELVGTRNKTDRAVMLDEILDYVKFLRLQVKVLSMSRLGGAGAVAQLVADIPLSVKGEASDSGSKQQIWEKWSTDGTERQIAKLMEEDIGAAMQFLQSKALCMMPISLAMAIYDTQHSQDGQPVKPEPNTPS

SEQ ID NO: 7519 - protein, 68 aa, Zea mays
  unsure (1)..(68): unsure at all Xaa locations
  Clone ID: TF_700085722H1.pep
PALASKNKRVEGKPSMNLMADRCCRKRLNDRLSILRSVVPXISKMDRTSILGFTIYYIKELLVSINLL

SEQ ID NO: 7520 - protein, 84 aa, Zea mays
  Clone ID: TF_jC-zmXLIB3527P075bd10a1.pep
MLAGCQHRNQFRFPCSLAYVQERRTRISKRLKKLQDLVPNMDKQTNTSDMLDLAVEYIKELKDQVEKLKHDQANCCCLGNKSCC

SEQ ID NO: 7521 - protein, 226 aa, Zea mays
  unsure (1)..(226): unsure at all Xaa locations
  Clone ID: TF_LIB5116-051-A1-PF1-E3.pep
NSPQEDGFFYSHHGACHADSSQGTECKAQSSVTARKVHKADRERMRRDKLNEQFLELGTTLDPDRPRHDKATILGDTVQMLKDXTSQVNKLKAEYSSLFEEECELTKEKNELRSEKASLKSDVDNLNNHYQQRIQMLYLCTTMEPSVLVGPPPSYPFSLQVPIPAGAVTMHPQLQPCPFFQNQTSGAISNPCTPYMAYSQSCQAPSDQPSSQFSTPVLLSVVIDLT

SEQ ID NO: 7522 - protein, 298 aa, Zea mays
  Clone ID: TF_ZmC4799_1.pep
MDPFYFGPDQLDAAAAVDEDYLTSLGLVVLSPEPVAPLPGGAFEAYQRRAPALLEHSLQTMSRRYSGEQNMHRRMFSYLRRVAHDAGAAVVAAPAFPAPARESVPGFGVGTSQAPRSSRFRNIMRERLRRERLSQGFADLHALLPHGASSKGGKNDIVGAAAGYVRELVARKEQLSARNQELLEKAASRWKQQGGTRSGVGRGMVVKVQAESQDHSMALGAFVRVLQRLKAMEAGLQVTAIRTRFSAGGVWMNIGVEGQVSACDVDKSITNALIELEGNDPRSSKPRFSCQVETVQMD

SEQ ID NO: 7523 - protein, 182 aa, Zea mays
  Clone ID: TF_LIB4729-053-R1-K1-G9.pep
PDRHPRRPPSASSPPSPPPTPSRKRLNDRLSMLRSVVPKISKMDRTSILGDTIDYMKELLERIKLLQEEIGQQQEEAPGMLSVFRELNPNEMVARNTPKFDVERKEGGDTRVEIYCAAKPGLLLSTVSTLDTLGLDIQQCVVSCFNDFGMHASCSEMQREMISADAIKQELFKNAGYGGGCL

SEQ ID NO: 7524 - protein, 136 aa, Zea mays
  Clone ID: TF_ZmC8592_3.pep
QRKARLLIVSVEVGSYVNTNDVFKEPNDVFKEPGSNKRLRSGSNDVHVPTSKASREKLRRNKLNDRFLELGSTLEPGKPVKADKAAILSDVTLMVIQLRSEAQQLKETNGSLEEKIKELKVIQPFLLNTVNPQIMH

SEQ ID NO: 7525 - protein, 101 aa, Zea mays
  unsure (1)..(101): unsure at all Xaa locations
  Clone ID: TF_ZmC2238_2.pep
KKTTHQARREKINARMELLKELVPGCSKVSGTALVLDEIINHVQSLQSXLSMRLATVNPRGDFGGLDSFLTTEINVSLEYHGWPTYYFQERLGKCSDMHTC

SEQ ID NO: 7526 - protein, 287 aa, Zea mays
  Clone ID: TF_LIB4746-137-Q2-K1-C12.pep
IGYLEAGRGDHRYVHFTVVHTVRVCPPNHQAIEPSNHRFSHPSSILEMNYTGYTIGSNSDYSPAQEMLSYPDQLGGTYIPDNYTTSPGFSLESFFDQAAFPSADVSTIFPKEQGQYATFPSSGASTTNDMAGNRISSHSTSRHPSDAAPLGKLEQFSFGFSFDALSTEPFERACFSPNTHISSRTPSLCGDASEKTSSPSSLTLSPCSLKRESPSSPDSASEEQPTPPRPQRKRGRPRLDRNETISSTSSPKGPKTGRLPHNQVERKYREGLNAELERLRKAVPTLT

SEQ ID NO: 7527 - protein, 167 aa, Zea mays
  Clone ID: TF_ZmC1150_1.pep
SLASREGRKKISERMKLLQDLVPGCSKITGKAVMLDEIINYVQSLQRQVEFLSMKLATVNPELGFDIEQIISKQMLLSQDRHLAFYGVDPGSSGLTGPFNQGIMQPALMCTISNPADVLHGAIHDVSTMNQIPSMWEGLQNMPQMNFNPGVAADSGTNNSGSMKIEQ

SEQ ID NO: 7528 - protein, 201 aa, Zea mays
  unsure (1)..(201): unsure at all Xaa locations
  Clone ID: TF_ZmC37662_1.pep
XGKRKGLPANNLMAVSPVAGKKLNDRLYMLRSVVPKISKMDRASILGDAIEYLKELLQKINDLQNDLESSPSTASLPPTPTSFHPLTPTLPTLPSRVKEELCPSALPSPTFQQPRVEVRMREGRAVNIHMLCARRPGLLLSAMRAIEGLGLDVQQAVISCFNGFSLDIFKAELCKEGPGLLPEEIKSVLLQSAGFHGGVMP

SEQ ID NO: 7529 - protein, 208 aa, Zea mays
  Clone ID: TF_LIB3279-183-Q1-K6-C7.pep
GRVGALALGSRVSTSLRSLDAGNADGLLQLQLRQFLPRRGSVLLPARCRAALPGAAHRPHCLARGAGAALRAADAGRVPGLPAGRRGRGGGSAVRGGQRARAGDRRDGRGRRAARAEHGNGGGRGGAAAVESSRGFRHMMRERQRREKLSQSYADLHALVAARSRGDKNSIVQAAAVYIHELRGARNQLQRPDEELKARILHDAGQQC

SEQ ID NO: 7530 - protein, 299 aa, Zea mays
  Clone ID: TF_ZmC14684_1.pep
MQMDSYNYNYASFFHDEAPSFYPHVAVPPSPELPIGLIASPGEPEPPFAPPMPASFQDYTGAVGVGVGVRAPFGGASVHGQAIDALGGGDGQREQSMAMAEDGEEPAPRRRQPAGGPAAAAVESSRGFRHMMRERQRREKLSQSYADLHALVAARSRGDKNSIVQAAAVYIHELRGARDQLQRRNEELKARILGHDAGQQCVKVQFEVDEPASAIDSMIGALRRLKGMDVRARGIRSSLSGRRLWTEMNVETTMAADEVERGVEEALLQEVERKQQQQLGAGSAAPGFPGPSSHVQNVF

SEQ ID NO: 7531 - protein, 182 aa, Zea mays
  Clone ID: TF_LIB3689-204-Q1-N6-A6.pep
HCNKTDKASMLDEAIEYLKSLQLQVQMMWMGSAGIAAPPAVMFPGVHQYLPRMGVGMGAAAAAARPSMPRLPFMAPQPVVPSAPVSVGPVPAYRGHMPAVGITEPYGHYIGVNHLQPAPPPPQVQHYAQGVSYYPPPLGATAKAVQQAAELHHVPGPGGSIMPAGAAPGVLLPESAQGRGPG

SEQ ID NO: 7532 - protein, 133 aa, Zea mays
  unsure (1)..(133): unsure at all Xaa locations
  Clone ID: TF_uC-zmflb73012g11b1.pep
MSKRPRGKRLSGISETVAPGKGKHARPKAGTKKKAEAASVAAAAAAAGHNTDYIDVRARRGQATISHSLFERLRRERISXRMPHLQELLPGFRKVTVKACMLDEIINYMQSLQKQAEFLSMKIDAFNPVVSFH

SEQ ID NO: 7533 - protein, 185 aa, Zea mays
  Clone ID: TF_ZmC5874_1.pep
MSARSMETVEEDVEEYSWREVVLPHLVPVVPGAQPELERETGERRRGRDLLVAVDFGPNSKHAFDWALGHIARMADTVHLVHAVSSVQNEIVYDKSRELMEDLAVEAFKTLLVRTKARIVEGDAGKVICREADRLKPAAVILGTRGRGLIQSVLQGSVSEYCFHNCKAAPIIIVPGKEAGEQSVL

SEQ ID NO: 7534 - protein, 191 aa, Zea mays
  Clone ID: TF_LIB3912-048-Q6-K6-D12.pep
MHSARCCCWFLERRDPEGMALEAVVLSQQGSRFGCGAMAAGGPWSGLFFSGMEGVVEIGSGAGGGRDVAGCSPPQLLQEPAARALPVASSVGSASGGAGQDAPAALAVTATAAAGTGRRKRRRMRPLKNEEEVESQRMVHIAVERNRRKQMNEYLAALRSLMPPAYTQRVTDELDSDDPHASHARPFLVPS

SEQ ID NO: 7535 - protein, 266 aa, Zea mays
  Clone ID: TF_ZmC3274_1.pep
MVPRDRAHSAAAATAPPTEKPVQGPIQNNKCEKKAPKKVHKSEREKRKRDKQNDLFGELGNMLEPDRQNNGKACILSDTTRILKDLLSQVESLRKENNTLKNESHYVALERNELLDETNMIRGEISDLQNEMRMRLEDNSIWSHDTSRPNLTAPHPATTVFTLQHSPHPQVIATMTLPLQQPAVVEQSYAAPRRELQLFPEAAPTEDTEPPQNEGTSNHVMRPQARSPPAMTTLPGHVYPVLPRVEDEQRSSGTTGSRKEGGVGNR

SEQ ID NO: 7536 - protein, 125 aa, Zea mays
  Clone ID: TF_ZmC3753_1.pep
PRVRPTFKVRKEKLGDRITALQQLVSPFGKTDTASVLHEAIEYIRFLHDQVASLSSPYLGCGRPVVQQIQQRRQAKDDGGAAAKEDLRSRGLCLVPVASTTTYAVAAGGETAPEFWLPNFGGTLR

SEQ ID NO: 7537 - protein, 89 aa, Zea mays
  Clone ID: TF_ZmC35784_1.pep
MSSRRPSSRGNISEDEINELISKLQALLPSSRRRGSGQASTTKLLKETCSYIKSLHREVDDLSDRLSDLMATMDHNSPGAEIIRSILRS

SEQ ID NO: 7538 - protein, 89 aa, Zea mays; identical to SEQ ID NO: 7537
  Clone ID: TF_ZmC35784_4.pep

SEQ ID NO: 7539 - protein, 52 aa, Zea mays
  Clone ID: TF_20803362.pep
MDGECSPMAATTRSGTGRSHSEAERKRRQRINAHLATLRTLLPAASRMDKAA

SEQ ID NO: 7540 - protein, 155 aa, Zea mays
  Clone ID: TF_ZmC1210628_1.pep
RRKQLNDLYSSLRSLLPDADHTKKLSIPTTVSRVLKYIPELQKQVDNLERRKRELTNANCKPGVLNTSEIVTTPIVSATCLNDTEIMVQVSLHSNVAATALPLSKCIKVLEDAGLHLISSSTYSTFGNKTFYSLHLQVCMHVHSMVPAVSFNFFI

SEQ ID NO: 7541 - protein, 175 aa, Zea mays
  Clone ID: TF_LIB3632-010-Q1-K6-F2.pep
MALEAVVFSQPQAAAGHFGYGRGDSTTYAVPWCDLLQGGVGGGGGGFGDLCAAGEWDLDIDTWAAAAAAAAPTVELGGDDWDWEALSRDYQSSDASTEYYHGGSRKAAAAPEPAGRRKRRRAKAVKNKEEIESQRMTHIAVERNRRRQMNEYLAVLRSLMPPSYAHRGDQASIVG

SEQ ID NO: 7542 - protein, 240 aa, Zea mays
  unsure (1)..(240): unsure at all Xaa locations
  Clone ID: TF_ZmC584642_1.pep
MSLPPTDGGDDWFLDCGILEDLPAAACGAFPWDASVSSSNPSAEVGSHVNKLDLPKDSGSNKRLRSEPCGRPTSKACREKVRRDKLNDRFLELGTTLDPGKPVKADKAAILSDATRMVTQLRAEAQQLKDTNGSLEDKIKELKAEKDELRDEKQKLKLEKETLEHQMKLLTATPAYMPHPTMMPSPFAQAPMAPFHAQGQALGQKLMMPFVGYPGYPMWQLMPASEVDTSKDSEACPPXA

SEQ ID NO: 7543 - protein, 290 aa, Zea mays
  Clone ID: TF_ZmC3491_1.pep
RPTLPQGQKKKKQSAALEARKSCRPEMDKYWEETQRYLEYEELSIYLEAQEDAMSCYDSSSPDGSISHSSSSAAACGNKNILMERDRRRKLNDKLYALRSVVPNITKMDKASIIKDAIEYIQQLQAEERRVLQELRVLDDDTAAAATAQVECCDVDGGLLRREAERAKKMKRAQSVASGAQSAPPPPPPAPPHVEVLELRVSEVGDHVLVVSVTCRKRRDAMARVCRAIEDLRLRVITANVTSVAGCHVHTVFVEVDKIDHIQVKNMIEAALTLLDAPGSPHSSMSYYET

SEQ ID NO: 7544 - protein, 224 aa, Zea mays
  Clone ID: TF_ZmC14059_1.pep
MMDAAAMPPFQQARPAKRSYDDMAAVAEAANAPSANTRPASQNQDHILAERKRREKLSQRFIALSKIVPGLKKMDKASVLGDAIKYVKQLQDQVKGLEDDARRRPVEAAVLVKKSQLSADDDEGSSCDDNSVGAEASATLLPEIEARLSGRTVLVRVHCDNRKGVLIAALSEVERLGLSVMNTNVLPFTASSLDITIMAMAGDDFCLSAKDIVKKLNQAFKSPF

SEQ ID NO: 7545 - protein, 84 aa, Zea mays
  Clone ID: TF_ZmC14059_3.pep
MMAEAARAPAAAAAAARPASQNQDHILAERKRREKLSQRFIALSKIVPGLKKMDKASVLGDAIKYVKQLQDQVKGLEDDARKRP

SEQ ID NO: 7546 - protein, 562 aa, Zea mays
  Clone ID: TF_ZmC13586_3.pep
MALSASPAQEELLQPAGRPLRKQLAAAARSINWSYALFWSISSTQRPRVLTWTDGFYNGEVKTRKISHSVELTADQLLMQRSEQLRELYEALRSGECDRRGARPVGSLSPEDLGDTEWYYVICMTYAFLPGQGLPGRSSASNEHVWLCNAHLAGSKDFPRALLAKSASIQTIVCIPLMGGVLELGTTDKVPEDPDLVSRATVAFWEPQCPTYSKEPSSNPSAYETGEAAYIVVLEDLDHNAMDMETVTAAAGRHGTGQELGEVESPSNASLEHITKGIDEFYSLCEEMDVQPLEDAWIMDGSNFEVPSSALPVDGSSAPADGSRATSFVVWTRSSHSCSGEAAVPVIEEPQKLLKKALAGGGAWANTNCGGGGTTVTAQENGAKNHVMSERKRREKLNEMFLVLKSLVPSIHKVDKASILAETIAYLKELQRRVQELESRRQGGSGCVSKKVCVGSNSKRKSPEFAGGAKEHPWVLPMDGTSNVTVTVSDTNVLLEVQCRWEKLLMTRVFDAIKSLHLDALSVQASAPDGFMRLKIGAQFAGSGAVVPGMISQSLRKAIGKR

SEQ ID NO: 7547 - protein, 423 aa, Zea mays
  Clone ID: TF_ZmC14919_1.pep
MDGNARSAATNQKKPVVADDDLVELLWHNGSVVAQPQAHQRPAPTYDPDRPGTSGLTGEETAAWFPDTLDDALEKDLYTQLWYSTIADAAPQHEGTLPGPTSQPSPSPPVGSSGVESSWAGDICSTFCGSNQVLRTPARIRGKDAALQSELPSNTGAHDGTSSSGGSGSNYGGSGLPSDSVHVQKRKGRCRDDSDSPSEDAECEEASEETKPSRRYGTKRRTRAAEVHNLSERRRRDRINEKMRALQELIPHCNKTDKASILDETIEYLKSLQMQVQIMWMTSGMAPMMFPGVHQFIPQMALGMNPGCIPAAQGLSQMPRLPYMNHTLPNHIPLNSSPAMNLMNPLNAANQVQIGHLRDAGSHVLHLDGGRAAVVPQVPGPGPHVVHGHQIAQAEEHNKILEVAASTVIPTSKAGQPPTFHGV

SEQ ID NO: 7548 - protein, 105 aa, Zea mays
  unsure (1)..(105): unsure at all Xaa locations
  Clone ID: TF_jC-zmXLIB3527P004ce08d1.pep
MALWKEEPSGRCFLEEREEEAESQQMTHIAVDRNRRKHINEHLSALRSLMPSDHTHRGDQAFIEXGSINCGKELDQLLQTLEARRPHPQGSAYARNPDDTAAEAD

SEQ ID NO: 7549 - protein, 195 aa, Zea mays
  Clone ID: TF_ZmC26240_1.pep
MMCLSCSPSGDGVVMTTVAVMEQWADKQQQAASTNAAAAAAQMPFLALLQGAGVVVEAEQQEEQHHDGRKRQAFARAVSDLDLLESCVTQAVAPAAAASAPVAGRTERRRKRQRPRARAAPPPEKRKKPEEAESQRMTHIAVERNRRRLMNDHLASLRSLIPSSYTPRGDQATVVGGAIDYVKQLEQQLVALQAA

SEQ ID NO: 7550 - protein, 290 aa, Zea mays
  Clone ID: TF_ZM4442.C1.o15.fg.pep
MDDLLSPCSSFSPPSPASFFSHAGHPVIEFASCEVPEQWLLDDLVVAKNEGYDDVDDLWPVRSSLSPDSEVSEQPLPPQPPPPSQQELTSVTAAPAQQQQRLGKRRGRKPGPRPDGPAVSHVESERQRREKLNRRFCDLRAAVPTVSRMDKASLLADAASYIAELRGRVARLEADSRRATAARWDPAVTAAASASAAAMGLAGAGGGADEAVEVRMLGPDAAAVRATSAGPHAPARLMGALRSLELHVQHACVTRVNGVTVQDVVVDVATPLQDDDGGLRAALLQMMQDS

SEQ ID NO: 7551 - protein, 237 aa, Zea mays
  Clone ID: TF_ZmC3240_1.pep
MSCAGQAGGWLLDYALVEEEIQGSEFIYMVDDPAVSSVILGFDAPRKEDGVQDNPGAKKRSRPESSAPPGTKACREKLRRDRLNERFNELCAILEPGKPPKADKVAILSDAARLLNQLQGEAQKLKQSNESLQESIKSLKAEKSELRDEKTRLKAEKERLEQMLKGVVSHAAVAAPGPFVPHPAAVAPSFHHHPAAFAQAGKFVPYPSYPPPAAFWQWIPPTSLDTTKDPAHWPPVA

SEQ ID NO: 7552 - protein, 285 aa, Zea mays
  Clone ID: TF_ZmC3240_10.pep
MSCAGQAGGWLLDYALVEEEIQGSEFIYMVDDPAVSSVILGFDAPRKEDGVQDNPGAKKRQSFSSSFLSVDPQHKRKSVHITLSPILLPLKSVGIICCAFLFPFLLRRSRPESSAPPGTKACREKLRRDRLNERFNELCAILEPGKPPKADKVAILSDAARLLNQLQGEAQKLKQSNESLQESIKSLKAEKSELRDEKTRLKAEKERLEQMLKGVVSHAAVAAPGPFVPHPAAVAPSFHHHPAAFAQAGKFVPYPSYPPPAAFWQWIPPTSLDTTKDPAHWPPVA

SEQ ID NO: 7553 - protein, 191 aa, Zea mays
  Clone ID: TF_ZmC3240_4.pep
ELLCANSFPFLLRRSRPESSAPPGTKACREKLRRDRLNERFNELCAILEPGKPPKADKVAILSDAARLLNQLQGEAQKLKQSNESLQESIKSLKAEKSELRDEKTRLKAEKERLEQMLKGVVSHAAVAAPGPFVPHPAAVAPSFHHHPAAFAQAGKFVPYPSYPPPAAFWQWIPPTSLDTTKDPAHWPPVA

SEQ ID NO: 7554 - protein, 108 aa, Zea mays
  Clone ID: TF_LIB4764-117-A1-K1-E8.pep
STSSRGPSRSSKDSKSLYAKRRRERINEKLRTLQQLIPNGTKVDMSTMLEEAVQYVKFLQLQIKVGTKVAAVSLKTNTTTHKILGVLTKGNTQIVCHIISPIRHALRC

SEQ ID NO: 7555 - protein, 316 aa, Zea mays
  Clone ID: TF_ZmC18277_1.pep
MAGFSRPNNSLLLKMPATLASSHTPNLSSLLFYDQNHGQAVNANAAAMTMVEDDASLQSSSAVLDTSPQPQGSAAAASPMERKRKPAEDSATLSSAQSKEDCKQQQESKSRRGKRPHNKEANTEEKSATEDEATRGYIHVRARRGQATDSHSLAERVRRERISERMRMLQALVPGCDKVTGKALILDEIINYVQSLQNQVEFLSMRIASMSPVLYGFGLDSDGLHDHAQKMGVMFQEALAMAGPVLSQASPAAPSEAIMDTTTPYSLHGHGQGSISFSQDNGSSTYLMQHQQAAGEPTRQQELLSQLVFNNMCSFQ

SEQ ID NO: 7556 - protein, 143 aa, Zea mays
  Clone ID: TF_LIB3597-024-Q1-K6-H7.pep
MKRAHPDYSSSDSELDETVEVEKESADENGNLSSALGSMSPTTSSQILARKRRRGIIEKRRRDRINNSLSELRRLVPSAFEKQGSAKLEKAEILQMTVDHLKMLHTAGGKGYFDAHALAMDYRSLGFRECLAEVARYLSIIEG

SEQ ID NO: 7557 - protein, 101 aa, Zea mays
  Clone ID: TF_LIB4764-112-A1-K1-B8.pep
ASSSRSEDDSAGACEEPIVLKQITISRGPRRSSKDSKSLYPKRRRERINEKLRTLQQLIPNGTKVDMSTMLEEAVQYVKFLQLQIKCSALRVPWKYASLLS

SEQ ID NO: 7558 - protein, 59 aa, Zea mays
  unsure (1)..(59): unsure at all Xaa locations
  Clone ID: TF_ZmC261576_1.pep
ARERRSKXNEKMKALQSLIPNSNKTDKASMLDEAIEYLKQLQLQVQLVGATLQRQALGQ

SEQ ID NO: 7559 - protein, 113 aa, Zea mays
  Clone ID: TF_LIB3245-181-P1-N2-A2.pep
KRKGSGEDSSSLRSLGETSALQREVSMECADEKAGDARAKREDYVHVRAKRGQATNSHSLAERFRREKINERMKLLQDLVPGCNKITGKAMMLDEIINYVQSLQRQIGFLSMK

SEQ ID NO: 7560 - protein, 287 aa, Zea mays
  Clone ID: TF_ZmC3534_1.pep
MMYSPPRTDPDREEEQCFSIGSNLLASLDHYHTMDFDEPVVSPMTNAGMQEGVQLYSSTGDAQLNRNMNTGKCLEDGKRKGSGEDSSSLRSLGKRKGSGEDSSSLRSLGETSALQREVSMECADEKAGDARAKREDYVHVRAKRGQATNSHSLAERFRREKINERMKLLQDLVPGCNKITGKAMMLDEIINYVQSLQRQIEFLSMKLSAIGPGLNCDLDLQDILCTQDASSAFPGYNLQTSNVHINLYRASEEGFSHRNRIIPSPANVHVTRNAQLSAYPQVFIRRP

SEQ ID NO: 7561 - protein, 351 aa, Zea mays
  Clone ID: TF_ZmC412624_1.pep
MTSHARVRKLGIRLEAAHQLLPWLGAAPFSEPAAVAGLGAAMGAYACDGVGGLGHGGVFGFGFDAAVQQQQQQQRAADGSGKAVVVSGLLGSLQAELGRMTAREMMDAKALAASRSHSEAERRRRQRINGHLARLRSLLPNTTKTDKASLLAEVLDHVKELKRQTSAMMAATDADADADDEGAGRTQAQAQAQLLPTEADELCVDAGADGAGRLVVRASLCCEDRPDLIPDIVRALAALQMRARRAEITTLGGRVRSLLLITADRRADVQRGGGGGGGDGDDDEEEEDEEEGGERAASHRRHECIASVQEALRGVMDRRTASSCDTSSSGGGGGSIKRQRMNYGAQEQCSV

SEQ ID NO: 7562 - protein, 253 aa, Zea mays
  unsure (1)..(253): unsure at all Xaa locations
  Clone ID: TF_LIB3205-339-Q1-K1-B8.pep
PRVRAWSQSKEVRFSCAPALAAGNLHQDMPLGRPGNNMTPQGKMEXQKACEVAVATPSLCSGNGESWREQKRKSQAECSASQDDDLDDESGGMRGSGGRGTKRSRTAEVHNLSERRRRDRINEKMRALQELIPNCNKIDKASMLDEAIEYLKTLQLQVQMMAMGSGLCIPPMLLPRAMQLQIPSIAHFHHLGMGLGYGMGXVLDMNSTAAVPFQPIPGAHYTCPMIPGTPPQGLGIGMPGTNTMPVFGLPGSI

SEQ ID NO: 7563 - protein, 257 aa, Zea mays
  Clone ID: TF_ZmC8592_2.pep
MSLAPDPADGGAGTGTGDDWFLDCGILDDLPAAACGAFPWDASPSSSNPSVEVGSYVNTNDVFKEPNDVFKEPGSNKRLRSGCNDVHVPTSKASREKMRRNKLNDRFLELGSTLEPGKPVKADKAAILSDATRMVIQLRSEAQQLKETNGSLEEKIKELKAEKDELRDEKQKLKLEKESLEHQMKLMTSTPTYMPHPTLMPAPFPQAPLAPFHAQGQAAGQKLMMPFVSYPGYPMWQFMPPSEVDTSKDSEACPPVA

SEQ ID NO: 7564 - protein, 255 aa, Zea mays
  Clone ID: TF_ZmC312_1.pep
GGFFAPLPASGFNDAGMSWDDEDEIDQSVDASSMAISASMENAAGAVAGASGAGGGSGRGKKKGMPAKNLMAERRRRKKLNDRLYMLRSVVPKISKMDRASILGDAIEYLKELLQRISDLHNELESAPSSSLVGPTSASFNPSTPTLQTFPGQVKEELCPGSFPSPTGQQATVEVRMREGHAVNIHMFCARRPGILLSTMTALDSLGLDIEQAVISCFNGFAMDVFRAECADGPGMVPEEIKAVLMHTAGLHNAM

SEQ ID NO: 7565 - protein, 124 aa, Zea mays
  unsure (1)..(124): unsure at all Xaa locations
  Clone ID: TF_ZmC112780_1.pep
MDAQQQLDLVMRHQSMATVCESEDALGSSESDPARPARPRGKRSRAAEVHNLSEKRRRSRINEKMKALQTLIPNSSKTDKASMLDDAIEYLKHLQLQVQMLSMRNGLYLPPGNLXSGAPETLAP

SEQ ID NO: 7566 - protein, 166 aa, Zea mays
  unsure (1)..(166): unsure at all Xaa locations
  Clone ID: TF_ZmC1150_2.pep
AKRGQATNSQSLAERLGRKKISERMKLLQDLVPECSKIIGKAIMLDEIINYVQSLQRQVEIISKQVKPPTRSPYLPLGSSGLTGPFNQGIMQPXLMCTIANPVDVLHGAIHEANISTKKKKKKKKKGGPQIPSMWEGLQSMPQMNFNPGVAADSGTNNSGSMKIEQ

SEQ ID NO: 7567 - protein, 231 aa, Zea mays
  Clone ID: TF_ZmC3246_1.pep
MMNCAGGGDPVEDFLISGAVDDEDLAIFCDGGLGIEGVNGDACGFEQSNLGKRSRDEPCSSGLKSKACREKMRRDKLNDRFLELSSVMNPGKQAKLDKANILSDAARMVAQLRGEAEKLKESNEKLRENIKDLKEEKNELREEKVRLKVEKDRLEQQVKAMSVAPTGYVPHLPHPASYHPAAFAPFVPPQQAAGNKSAPIPAPFPGMAMWQWLPPTIVDTTQDPKLWPPNA

SEQ ID NO: 7568 - protein, 129 aa, Zea mays
  Clone ID: TF_ZmC13338_1.pep
RSTQRPAGAADMVTNFSTIDPQFGLSNSSLELPGMDDYLQLQQDSVACRVRARRGCATHPRSIAERERRTRISKRLKKLQDLVPNMDKQTNTSDMLDLAVEYIKELKDQVEKLKHDQANCCCLGNKSCC

SEQ ID NO: 7569 - protein, 255 aa, Zea mays
  Clone ID: TF_ZmC34773_1.pep
MEPSPAVAAELWCSPHLAAGGGRPLEATSAVTEKSSGGRGGGGAVRRRPRETPVSEDDSSRIVSTSGGGGGQDLTDLEAKRSKTNKSSNNKGSLRTEVETDSRSAGKAVSKNIPAAEPPKQDYIHVRARRGQATDSHSLAERARREKISERMKVLQDLVPGCNKVIGKASVLDEIINYIQSLQCQVEFLSMKLEAVNAQANQGVEVFPAKDYGSQTYNTAPGLTFDTQTSREYAQGTSTSEWLHMQIGSGYERVS

SEQ ID NO: 7570 - protein, 253 aa, Zea mays
  Clone ID: TF_ZmC8592_1.pep
MSLPPGPADSGAGTGDDWFLDCGILDDLPAAACGAFPWDASPSSSNPSVEVGSYVNANDAFKEPNDVFKEPGSSKRLRSGSSDMPTSKACRERMRRNKLNDRFLELGSALEPGKPVKADKAAILSDATRMVIQLRSESQQLKETNGSLEEKIKELKAEKDELRDEKQKLKLEKESLEHQMKLMASAPAYMPHPTLMPAPFAQAPLAPFHAQGQAAGQKLMMPFVGYPGYPMWQFMPPSEVDTSKDSEACPPVA

SEQ ID NO: 7571 - protein, 203 aa, Zea mays
  unsure (1)..(203): unsure at all Xaa locations
  Clone ID: TF_ZmC8592_5.pep
EQVLAKYEKKVHVQLELLITLIFHSVEVGSYVNANDAFKEPNDVFKEPGSSKRLRSGSSDMPTSKACRERMRRNKLNDRFLELGSALEPGKPVKADKAAILSDATRMVIQLRSESQQLKETNGSLEEKIKELKAEKDELRDEKQKLKLEKESLEHQMKLMASAPAYMPHPTLMPAPFXPAPLAPFHAXGQAAGQKLMMPFVGY

SEQ ID NO: 7572 - protein, 263 aa, Zea mays
  Clone ID: TF_ZmC28558_1.pep
EGEEGSPVKLSKPEQAGSDSSVEDGGAQNQKPPPPGKGKNAKPVEPPRDYVHVRARRGQATDSHSLAERVRRERISQRMKVLQDLVPGCNKVIGKALMLDEIINYVQSLQRQVEFLSMKLATVNPLDLSNLPTLLQKDMFQACGASASSVFSLESCSPGFPFGGQGDVFQSFVPNGLENPCGGLNPLDLALSQATGGQFGFQDGTAGTNLQQRNYWEEEEEDLQSVFHIDDNGQSQEHGASASAQSFHGQLQPQEGHMKMEFF

SEQ ID NO: 7573 - protein, 167 aa, Zea mays
  Clone ID: TF_LIB5116-057-A1-PF1-A9.pep
MQNRIQSHPAGASSSASSGGDGSGSGFCLSDIMEIDAGSGGDHKAPGSPRSKHSATEQRRRCKINERFQILRDLVPQSDQKRDKATFLLEVIEYVKFLQEKVQKHEACAGGDWSQENTKLAPWSSNRVPVDLMPGVAPTTKIGSAGNFLDNSIPTMPEMLQNAETVV

SEQ ID NO: 7574 - protein, 705 aa, Zea mays
  unsure (1)..(705): unsure at all Xaa locations
  Clone ID: TF_ZmC9134_1.pep
MNLWTDDNASMMEAFMASADLPTFPWGAPAGGGNSSAAAASPPPXEMPAAMAPGFNQDTLQQRLQAMIEGSRETWTYAIFWQSSLDSATGASLLGWGDGYYKGCDEDKRKQKPLTPSAQAEQEHRKRVLRELNSLISGAAAAPDEAVEEEVTDTEWFFLVSMTQSFLNGSGLPGQALFAGQPTWIASGLSSAPCERARQAYNFGLRTMVCFPVGTGVLELGSTDVVFKTAESMAKIRSLFGGGAGGGSWPPVQPQAPSSQQPAAGADHAETDPSMLWLADAPVMDIKDSLSHPSAEISVSKPPPHPPQIHFENGSTSTLTENPSPSVHAPPPPPAPAAPQQRQHQHQNQAHQGPFRRELNFSDFASTPSLAATPPFFKPESGEILSFGADSNARRNPSPVPPAATASLTTAPGSLFSQHTATMTAAAANDAKNNNKRSMEATSRASNTNHHPAATANEGMLSFSSAPTTRPSTGTGAPAKSESDHSDLDASVREVESSRVVAPPPEAEKRPRKRGRKPANGREEPLNHVEAERQRREKLNQRFYALRAVVPNVSKMDKASLLGDAISYINELRGKLTSLETDKETLQTQVEALKKERDARPPSHSAGLGGHDGGPRCHAVEIDAKILGLEAMIRVQCHKRNHPSARLMTALRELDLDVYHASVSVVKDLMIQQVAVKMASRVYTQDQLSAALYSRLAEPGSAMGR

SEQ ID NO: 7575 - protein, 197 aa, Zea mays
  Clone ID: TF_LIB3597-024-Q1-K6-G11.pep
MQHLKSAAPGSPSGFRGAQTRRNPCGETAPLPGAPCRTVLTPTFRYCRRECTVAPARRAMERIPSAQPPPACLPKAPGLEPGDLPGMDFAHMYQVYKSRRGIKRSEDSKETYKLPHRLIEKKRRDRINECIAQLKDLLPEHLKLTTLGHLEKAVVLELTLKHVKALTNLIDQQQQKILALQSGLQAGELSGRNVEAG

SEQ ID NO: 7576 - protein, 220 aa, Zea mays
  Clone ID: TF_ZmC3797_1.pep
TTTRNMDMERTRRRKLNERLYALRSVVPNITKMDKASIVRDAIAHIEHLQEQERRLLAEISVLQSSDDGTAAAAAVKTEDAAATGGAAYDVDSVPWRKKPRAVPLPSVYFTDNPTSSISSSPPVRILEVQVSQAGERVAVVSLWCSRGRDAVGKICLALEPLRLRVVTATITARGDTVFHTLFVETGETGGARLKEAILAALARFNVLANADQVVHELLG

SEQ ID NO: 7577 - protein, 315 aa, Zea mays
  unsure (1)..(315): unsure at all Xaa locations
  Clone ID: TF_ZM3641.C1.o6.fg.pep
MAAQMPFLALLQGAXRRGGGGGGGAAAAARARRAQAAXAFARAVSKLDLLESCLTQAVDPAAEACAPVASRTTERRRKRPRTRARAAPPPEKRSKPEEAESQRMTHIAVERNRRRLMNDHLASLRSLIPSRYIPRVSHAMQSPCMHAAFRFDLTTQRLHAMQGDQATVVGGAIDYVKQLEQRLVALQAAAGARRGSSAASDDGVFLVSPQYASYSGSRGGGGGLGVDVEATGAVGGHVRVRVAGRRWPGRLVRAVAALEGLRLAVLHLAVTSVGRDAVVCCFNLKMEEGCEVATADEVATVVHQIFACSAAGACC

SEQ ID NO: 7578 - protein, 135 aa, Zea mays
  Clone ID: TF_jC-zmXLIB3527P004be08d1.pep
MAAAAASGRRKRWRMMPVKSEEEVESQRMIHIAVERNRRKQMNEHLAALRSLMPPAHTQRGDQASIVGGAINFVKELEQLLQSLEARRRSPQCAAYAVDPDDAGPFADFLTFPQYSMCAVIAAPENTGHHEGGAV

SEQ ID NO: 7579 - protein, 155 aa, Zea mays
  Clone ID: TF_LIB4073-014-Q6-K1-H9.pep
DSTENYYSCGSRKKATGGARRSHPAETHNLTEKRRRRKIDDKLKTLRQLVPGCDDKSNQASILDQTIQHINSLQQQIQVQPKAISLGCDAIKPPAVYPVVLPQGTAVAAAGELLPPAAALPPAVLAMAARGHVRPGLAPLHHLRRWCLSVPFFQW

SEQ ID NO: 7580 - protein, 285 aa, Zea mays
  unsure (1)..(285): unsure at all Xaa locations
  Clone ID: TF_ZmC792773_1.pep
MEDSSLFLQWAMSTLRHEQQPAAAVNDDCSSEATFPSLQALREASHAAEMVQELIGEAPANSWSSGDTTDGSIGGNSNSVPGPAAAAMEHDVWPAASSKTSPARRALSRSSSDTNPPVSWNFSAAASAQLAGSADGMLPEFAPKSALPPDQAYGSPRARRAGLKSLAGSMSSAAYAQDHIIAERKRREKINQRFIELSTVIPGLKKMDKATILSDATKYVKELHGKLKDLEAGGSNRRKXXETVVLVKRPCPHAAPAPDDDALPLSASSGTPAETKTQLPEIEAR

SEQ ID NO: 7581 - protein, 188 aa, Zea mays
  Clone ID: TF_ZmC10010_1.pep
MDDMGSVPFADAGLLDGFYGGSHGHGGDYELLASQLGAGASSTSPAILDGSVPLVDAAASAEEATRSKGDHLQDDKAAMALKSHSEAERRRRERINAHLATLRTMVPCSDKMDKAAVLAEVITHVKKLKSTAAHIRDRCAAVPADADDVVVELVHGGAAPPSAGGGVLVRATLSCDDGADVFADVRHA

SEQ ID NO: 7582 - protein, 257 aa, Zea mays
  Clone ID: TF_ZmC18771_3.pep
MLRPPWRISELLPERRRVLHGECCARGGSGGGKKKGMPAKNLMAERRRRKKLNDRLYMLRSVVPKISKASVTRALKKGTTLDSVIEMLKGVTPELSCPIVLFTYYNPILKRGVGNFMSTIKQAGIHGLVVPDLPLEETALLRSEAIMHNIELVLLTTPTTPTDRMKGIAQASEGFLYLVSAVGVTGARSNVNLRVEHLLREIKKVTDKPVAVGFGVSTPEHVKQIVGWGADGVIVGSAIVRQLCEAATPEEGLERLE

SEQ ID NO: 7583 - protein, 177 aa, Zea mays
  Clone ID: TF_ZmC252_1.pep
CPRSQRWTARRSEGAAQRLPAEAGGTSLGTQWAGSGWEDSSALMSDNLSGMKRPRDSSEPGQSGLTHQFSVPKTSSEMATIEKFLQFQDAVPWKIRARRGCATHPRSIAERGRRTKISERIRKLQELVPNMDKQTNTSDMLDLAVDYIKDLQKQVKVLKESQDNCTCSASKNQQHSC

SEQ ID NO: 7584 - protein, 160 aa, Zea mays
  Clone ID: TF_LIB4729-044-R1-K1-F12.pep
RRRDRINEKLRALQELLPNCTKTDKVSMLDEAIDYLKSLQLQLQMLVMGKGGGMAPVVPPELQQYMHYITADPAHQMMPPPLRPSAGQLQPAAGRQFQITQAAAAAANNDNDPQRRRQSNVESDFLSQMQNLHPSDQPPHHHNFLRPPRLQLFTPEQRGG

SEQ ID NO: 7585 - protein, 357 aa, Zea mays
  Clone ID: TF_ZmC2238_1.pep
MAPLPPSAASGPVSSSPRSLVPDACAEPMRRASPPQELPVARGEIQAALAPANASSAGAHGGGGSFTALLGLPTSQAMELLLPRTTPPALATAPAPTFPSDPHLVDRAARLSTFAPPSPSPSSTMTDQPLPAAANAGKRKADPVDRAPKGKAAKKGKTAEEKLAGGDGDDEKPAYVHVRARRGQATDSHSLAERARREKINARMELLKELVPGCSKVSGTALVLDEIINHVQSLQRQVEYLSMRLAAVNPRVDFGGLDSFLTTECGRIAGFNCKNGIDLEQVTWPEMGVHGARQLMQLQQQFWHGDLAHPHQVASQWEKRGDGHPPVFSNSSPSLFGYDLTSSGAQQTPASKLKTEL

SEQ ID NO: 7586 - protein, 252 aa, Zea mays
  Clone ID: TF_ZmC2238_3.pep
PPWVDPASAPTFPSDPHLVDRAARLSTFAPPSPSPSSTSPAPPLPAAANAGKRKADEKPAYVHVRARRGQATDSHSLAERARREKINARMELLKELVPGCSKVSGTALVLDEIINHVQSLQRQVECGRIAGFNCKNGIDLEQVTWPEMGVHGARQLMQLQQQFWHGDLAHPHQVASQWEKRGDGHPPVFSNSSPSLFGYDLTSSGKPCTQSYITFLNEFSCLSLTSHITAWLAPQLLSLSLSRQCSLENKVY

SEQ ID NO: 7587 - protein, 318 aa, Zea mays
  Clone ID: TF_ZmC18277_2.pep
MADADLTPNHSLLLKMPAASAHAHSPSLSSLLLYGQESHGEAAPANANANAAAATVEDAASLETSSAVVDSASPMERKRKATAEDSAAISSPQPKDCKQESKSRRGKRPRKETEEKSSTDEDEASKGYIHVRARRGQATDSHSLAERVRRERISERMRMLQALVPGCDKVTGKAMVLDEIINYVQSLQNQVEFLSMRIASMSPVLYGFGTNSEGLHDHHAPMGGVSFQEAAIAVPAGPAAAVSQASSRPAPSEATMNTACTTTPYSVSLQAQASISFSPSQENGGTYYLVQQAVGEQATRQEELLLSQLVFSNMCSFQ

SEQ ID NO: 7588 - protein, 103 aa, Zea mays
  Clone ID: TF_LIB3356-049-P1-K1-D8.pep
KLPLLSLIGSTPSISSYCTCKCITAGETSALQREVSMECADEKAGDARAKREDYVHVRAKRGQATNSHSLAERFRREKINERMKLLQDLVPGCNKITGKGMML

SEQ ID NO: 7589 - protein, 247 aa, Zea mays
  Clone ID: TF_ZmC25915_1.pep
MMDHQLFDDPFGSSISSLEAEIFSAAAQLPPSPPWPDIDLDDDYDIHDLSAPAANAATSSGGGYGSGGSGGHRKLSHNAYERGRRKQLNELYSSLRSLLPDADQTKKLSIPTTVSRVLKYIPELQKQVDNLERRKKELTNANCKPGVLKTTKAVTPIVSATCLNDTEIMVQVSLHSDVAATALPLSKCIKVLENEGLHLVSSSTYSSAFENKTFYSLHLQRSQRTMKEECPAFCEQLEKIVRKKAGA

SEQ ID NO: 7590 - protein, 285 aa, Zea mays
  Clone ID: TF_ZmC1916_1.pep
MAGQPPPSGASEDDFLEHFFAFPSAASAGAAGGHAGAGVGGDHPFPLALSLDAAAEAKPDRDPVQLAGLFPPVFAGAGGVHQPHLRGPPPPQMFQAQPKPGEGGMAPQPPAPRPKVRARRGQATDPHSIAERLRRERIAERMRALQELVPNTNKTDRAAMLDEILDYVKFLRLQVKVLSMSRLGGAGAVAQLVADIPLSVKGEAGDGGGAPQQQQQQHVWEKWSTDGTEKQVAKLMEEDIGAAMQFLQSKALCMMPVSLAMAIYDTQHPLDGHGHSLKPEPNASS

SEQ ID NO: 7591 - protein, 197 aa, Zea mays
  Clone ID: TF_LIB3587-269-Q1-K6-D12.pep
PRVRKLFVSWGAGNEEVGELDSIDAMTMEQLAKSLADELWDQPATTTHHQEQQQGRQLTNTTGFPFLGDMSRRSYAEADEGFLPTTAAISAGGNDSLFSFTGGKSKQLSFASREPKHESNGGGTTAAGTPMESSKGGRRASSGVHEHIVAERMRRQKMNHQFAALASMIPDITKTDKVSLLGSTIEYVQHLRGRLKA

SEQ ID NO: 7592 - protein, 198 aa, Zea mays
  Clone ID: TF_ZmC39148_1.pep
GAPKPRVRARRGQATDPHSIAERLRREKISDRMKNLQELVPNSNRTDKASMLDEIIEYVKFLQLQVKVLSMSRLGATEAVVPLLTQSQTENSGGGLLLSPRSGSGRQQQARGGSLPPSSSEVRDGAAFEQEVAQLMESDMTTAMQYLQSKGLCLMPVALASAISGQKGASSAAVQPENGGAKEMLRAVKPLASPIHGR

SEQ ID NO: 7593 - protein, 161 aa, Zea mays
  Clone ID: TF_ZmC693_10.pep
STPSEKNDRRTEAETNSGNASKSADKKPAPKEPPKDYIHVRARRGQATDSHSLAERARREKISERMKVLQDIVPGCNKVIGKASVLDEIINYIQSLQRQVEFLSMKLEAINAHVSNATVAFPTKDFGVAPYNTAPSLTLDPQTPREYAQGSMSDWLLSWAS

SEQ ID NO: 7594 - protein, 233 aa, Zea mays
  Clone ID: TF_ZmC253117_1.pep
MALEAVVFSQPQAGHFGCGRGDSPYAVPWSDLLQGGGGGGGGFGDVCAAGEWVDQHDLDTCWAAPTVGDDRDWGEALSRDHSSSDAASTDHGSRKAAPEPAAGRRKRRRTKVVKNKEEIESQRITHIAVERNRRRQMNEYLAVLRSLMPPSHAHRGDQASIVGGAINYVRELEQLLQSLEVQKSLKQSRERRPAAGGASCSPPFAGFFSFPQYSTASSTTSSSGGEKCRGHDV

SEQ ID NO: 7595 - protein, 77 aa, Zea mays
  Clone ID: TF_LIB3595-016-Q1-N6-F5.pep
ATHPRSIAERVRRTKISERIRKLQELVPNMEKQTNTADMLDLAVDYIKDLQKQVKVLNDGRASCTCSAGELQGQFTR

SEQ ID NO: 7596 - protein, 204 aa, Zea mays
  unsure (1)..(204): unsure at all Xaa locations
  Clone ID: TF_ZmC848_2.pep
MSAYCGKYADELIKNAAYIGTPGKGILAADESTGTIGKRLSSINVENVEENRRALRELLFCCPGALQYISGVILFEETLYQKTKDGKPFVDVLKEGGVLPGIKVDKGXEVVGTDKETTTQGHDDLGKRCAKYYEAGARFAXWRAVLKXGPNEPSQLAIDLNAQGLARYAIICHLPRLDMLIAALTVALLSTGRAGSPHRSPAAG

SEQ ID NO: 7597 - protein, 240 aa, Zea mays
  Clone ID: TF_ZmC3763_1.pep
MVGVPGVSGNIFQEIDGRQFDSPILGSRKQKGGFGKGKGKANFATERERREQFNVKYGALRSLFPNPTKNDRASIVGDAIEYINELNRTVKELKILLEKKRNSADRRKILKLDEEAADDGESSSMQPVSDDQNNQMNGTIRSSWVQRRSKECDVDVRIVDDEINIKFTEKKRANSLLCAAKVLEEFHLELIHVVGGIIGDHHIFMFNTKIPKGSSVYACAVAKKLLEAVEIKKQAYNIFN

SEQ ID NO: 7598 - protein, 232 aa, Zea mays
  Clone ID: TF_ZmC1926_1.pep
MGFLDVVEPKAASAALVDGAAGLGACKVEPGLAESGGAFGAGAGAAPPPALASKKKRVEGMPSKNLMAERRRRKRLNDRLSMLRSVVPKISKMDRTSILGDTIDYMKELLERIKLLQEEIGQQQEEAPGMLSVFRELNPNEMVARNTPKFDVERKEGGDTRVEIYCAAKPGLLLSTVSTLDTLGLDIQQCVVSCFNDFGMHASCSEMQREMISADAIKQELFKNAGYGGGCL

SEQ ID NO: 7599 - protein, 333 aa, Zea mays
  Clone ID: TF_ZmC7965_1.pep
MALEAVVFPKEHLAGTAKARSASSLACGFRTEEVEDNGGVVLQGEAGAATTWEYWDAALCPCSTAPAGAVEECWDVRHRLSASPPPPAPSAAVAAPSSGHGKAAAAARRRRRQRPKAVKNTEEVESQRRNHIAVERNRRRQMNEYLSVLRSALPPSYPQRGDQASIVAGAINFVKELEHLLQSLEAQKRRRQGCTEPPAPAPFAGLFTFPQYSTAATGVVAGSGDGAGCGAAGARRGVADIEVAVAESHASVKVVTPRRPRQLLRMVVALQCLGLTVLHLNVTTTADQLVLYSLSLKMEDECRLSSVDDIAAAVNDILAKISDERASRHLVAA

SEQ ID NO: 7600 - protein, 222 aa, Zea mays
  unsure (1)..(222): unsure at all Xaa locations
  Clone ID: TF_ZmC11694_1.pep
RQQKRKSQAECSASQDDDLDDESGGMRGSGGRGTKRSRTAEVHNLSERRRRDRINEKMRALQELIPNCNKIDKASMLDEAIEYLNTLQLLGKMKAVRNRRCTPPMVSTTKLPCLNIRSHSPWKSLTSFMIRQPDVSLEKGPINQDGFGGGMFRLSELRCSIVLXFVDGTGLPVRPNLAPQVPAVMANMVQEQQQGVATQQQQSLNNEAQQKANTGDPQILQK

SEQ ID NO: 7601 - protein, 275 aa, Zea mays
  Clone ID: TF_ZmC223756_1.pep
MDMEEQLLHLEHFMPSSPGFFDVGSGHDPAHFPNGGLFVEQVGATDDGGWVEELMQLGEELFGGPGDGGIMGDADDHYQQWQCDDDVDGGSPDGGPPPSVSLDGDDASPGEQGAGELASEPHREDGDDVSGATRKRRDRSKTIVSERKRRVRMKEKLYELRSLVPNITKMDKASIIADAVVYVKNLQAHARKLKDEVATLEARPRSPTRQDQPQHGRRAGPGRRRQQQQQQVERRDAGSAGAGARVTHVGAAQVGDGRFFVTVECERRDGVAAPC

SEQ ID NO: 7602 - protein, 251 aa, Zea mays
  unsure (1)..(251): unsure at all Xaa locations
  Clone ID: TF_21212345.pep
MASPEGTTWVFDCPLMDDLAVAADFAAAPAGGFFWAAPPSLQPQAPVQSVVAASAPNPCMEISSSVDCGQEKEQPTNKRPRSESTTESSTKASREKIRRDKLNERFLELGAILEPGKTPKMDKTAILSDAIRVVGELRSEAKKLKDSNENLQEKIKELKAEKNELRDEKPKAEXRKESLEHQIKFLNARPSLVPHHPVIPASAFPAPQGPATARHKLMMPVIGYPGFPMWQFMPPSDVDTSDDPRSCPPVA

SEQ ID NO: 7603 - protein, 252 aa, Zea mays
  Clone ID: TF_ZmC2546_1.pep
MASPEGTTWVFDCPLMDDLAVAADFAAAPAGGFFWAAPPSLQPQAPVQSVVAASAPNPCMEISSSVDCGQEKEQPTNKRPRSESTTESSTKASREKIRRDKLNERFLELGAILEPGKTPKMDKTAILSDAIRVVGELRSEAKKLKDSNENLQEKIKELKAEKNELRDEKQRLKAEKESLEQQIKFLNARPSLVPHHPVIPASAFPAPQGPAAAARHKLMVPVIGYPGFPMWQFMPPSDVDTSDDPRSCPPVA

SEQ ID NO: 7604 - protein, 223 aa, Zea mays
  Clone ID: TF_ZmC2546_2.pep
KRTEKLGRLAVRNRFWWPEVEKSPNKQGHSMEISSSVDCGQEKEQPTNKRPRSESTTESSTKASREKIRRDKLNERFLELGAILEPGKTPKMDKTAILSDAIRVVGELRSEAKKLKDSNENLQEKIKELKAEKNELRDEKQRLKAEKESLEQQIKFLNARPSLVPHHPVIPASAFPAPQGPAAAARHKLMVPVIGYPGFPMWQFMPPSDVDTSDDPRSCPPVA

SEQ ID NO: 7605 - protein, 215 aa, Zea mays
  Clone ID: TF_ZmC1313_1.pep
MEDGSSAPRRATPAPTRRSRSADFHNFSERRRRDRINEKLRALQELLPNCTKTDKVSMLDEAIDYLKSLQLQLQMLVMGKGGGMAPVVPPELQQYMHYITADPAHQMMPPPLRPSAGQLQPAAGRQFQITQAAAAAANNDNDPQRRRQSNVESDFLSQMQNLHPSDQPPHHHNFLRPPRLQLFTPEQRGGGGGLPNTSHNAGWISGRSSSYNFME

SEQ ID NO: 7606 - protein, 232 aa, Zea mays
  Clone ID: TF_ZmC3246_2.pep
MMDCAGGRDPVEDFLLGGAGAGDDGDLVAVFCDDGGLGIEGIHGDACGFEQSNLGKRGRDEPCSSGPTSKACREKMRRDKLNDRFLELSSVMSPGKEAKLDKANILSDAARMVAQLRGEAEKLKESNEKLRENIKDLKEEKNELREEKVRLKVEKDRLEQQVKAMSVAPTGYVPHLPHPASYHPAAFTPFAPPPANKSAPIPAPFPGMAMWQWLPPTIVDTTQDPKLWPPNA

SEQ ID NO: 7607 - protein, 368 aa, Zea mays
  unsure (1)..(368): unsure at all Xaa locations
  Clone ID: TF_ZmC21109_1.pep
MASAGHQQQWALPFAGSLQVSPPPQQAPPDRKGRGGAGGGVMESGSRSSGGAGFDDDDGLTTRREVSSSLQDLAVRVDRKGGSCSDGGTDQGPNTPRSKHSATEQRRRSKINDRFQILRELLPHNDQKRDKATFLLEVIEYIRFLQEKAQKYEATFPEWNQENPTMLPWSKGQIPGDSPPDXHISMRNGSSPGSNFTGKLDDNHNIVTSAAASGAQDQAETDHMASGCYRSAETTANFTNNAMSQSQPQWTGPSPVDDSAVNSETLNNQQLVIDEGTIRVSSNYSQELLNSLTHALQSSGVDLSQANISVQINMGKRAAKRPAAGVSSNSKEPADPASSNELGHQLTLSGAGADCLSHATKRHKRSNS

SEQ ID NO: 7608 - protein, 481 aa, Zea mays
  Clone ID: TF_ZmC1877_1.pep
MDFSAGSYFSSWPVNSASESYSLADGSVESYGGEGIMPPSSYFMTARSDHNLKFSVHEQDSTMLPNDQLTYAGARQTDLLPGETPSRDKLCENLLELQRLQNNSNLPSNLVPPGVLQHNSTPGAFHPQLNTPGLSELPHALSSSIDSNGSEVSAFLADLNAVSSASALCSTFQNASSFMEPVNLEAFSFQGAQSDSVLNKTTHPNGNISVFDSAALASLHDSKEFISGRLPSFASVQETNVAASGFKTQKQEQNAVCNVPIPTFTARNQIAVAAMPGSLIPQKIPSWINENKSEGPVSHPSDVQIQPNSVGNGVGVKPRVRARRGQATDPHSIAERLRREKISDRMKNLQDLVPNSNKADKASMLDEIIDYVKFLQLQVKVLSMSRLGAPGAVLPLLAESQTEGYRGQLLSAPTNAQGLLDTEESEDTFAFEEEVVKLMETSITSAMQYLQNKGLCLMPVALASAISTQKGVSAASIPPEQ

SEQ ID NO: 7609 - protein, 175 aa, Zea mays
  Clone ID: TF_ZmC1877_4.pep
DVQTQPNSAVNGVGVKPRVRARRGQATDPHSIAERLRREKISDRMKNLQDLVPNSNKADKASMLDEIIDYVKFLQLQVKVLSMSRVGAPGAVLPLLTESKTEGYHGQPLPQGLLDALDSEDSFVFEEEVVKLMETSITSAMQYLQSKGLCLMPVALASAISTQKGVSAAAVPPER

SEQ ID NO: 7610 - protein, 177 aa, Zea mays
  Clone ID: TF_ZmC178986_1.pep
MDELVCPAASSCSSPSPTSFFAAGHVPELEFVSWDVPEEWMEGTDWFDEPLDGDEGSRSAGNDLSGEPPAPAPKRRRGRKPGPRTNGPTLSHVEAERQRRDKLNRRFCELRAAVPTVSRMDKASLLADAVTYIGELRDRVEQLEAEAKQASAAVTTAVAAASHSFAPLHEKLGLEVR

SEQ ID NO: 7611 - protein, 203 aa, Zea mays
  Clone ID: TF_ZmC9134_3.pep
KRFLKPANGREERVNHVEAERQRREKLNQRFYALRAVVPNVSKMDKASLLGDAISYINELRGKLTSQQPAAGGDHVETDPSMLWLADAPVMDIKDSLSHPSAEISVSKPPPHPPQIHFDGGSGIMGLEALIRVQCHKRNHPSARLMTALRELDLDVYHASVSVVKDLMIQQVAVKMASRMYSQDQLSAALYSRLAEPGSVMGR

SEQ ID NO: 7612 - protein, 123 aa, Zea mays
  Clone ID: TF_ZmC13338_2.pep
NFRGDPPVRFVQFGLSNSSLELPFMDDYLQLQQGSVSCRVRARRGCATHPRSIAERERRTRISKRLKKLQDLLQDLVPNMDKQTNTSDMLDLAVDYIKELKDQVEKLKHDQANCCCLGNKSCC

SEQ ID NO: 7613 - protein, 262 aa, Zea mays
  unsure (1)..(262): unsure at all Xaa locations
  Clone ID: TF_LIB4758-026-R1-K1-A7.pep
MDGCRAVLTGDMQWHEATMSNSSCDSDHLHRERGEQGLMSSQLQQQLEQIYMLMDMELEHELHLHHNVPPQGCSQRQLSSPFLPFAVSSDVTSSPVLTSSSTTTFCQQPAEASPSPLDTPFSPLPYSYSDTIPDLEEIMSRPRHKDGHAESSISAFRQCVRHLRPKKKLKQGGCGQRAIKTAMSVLARMHSSRLSQWQRQISSTEMAAAVPSDESKNVQLLHVRSERKRREKINDSFEALKNALPPSCSQRDXTSILMRGRD

SEQ ID NO: 7614 - protein, 318 aa, Zea mays
  Clone ID: TF_ZmC3765_1.pep
MAAFGAAADHQPMNSAFSGSSEALLDHQRTKDGSDKGEPELGRNGHDGVLSSEAAAAGDCSSKGTSDSKKRRRPNEVMGGDQVQSSNLPADSANESVHSKDKGEESSLATTTTGPGKSKGKGARETSESQKEDYIHVRARRGQATNSHSLAERLRREKISERMKLLQDLVPGCSKVTGKAVMLDEIINYVQSLQRQVEFLSMKLATVNPRLDLNIEGLLSKDLLRFPGVPSSSLGFSPEMMHPQLQLSQPGLIQGGAAGMANPDVFRRIMQAQLSAKDGSQMPPHALNGAFSDVAQQQMAYPSSQDLSIGPSQDGFQM

SEQ ID NO: 7615 - protein, 303 aa, Zea mays
  Clone ID: TF_ZmC848_4.pep
MASHHQQEQMMLHSQSQSQHQQETGRSGGGLYRTVSSAMEAGGTGVGAASSLIRQSSSPAGFLDHFGMDNGYGAMLRASMGMGFQEGVASDSLAGGGGGGGSGRLGGQLSFSSRQGSLMSQISEMDSQEDVVVGASSPDAGGGGDAAYMPGYPMSSGGWDDSSSALLPDSLPATNKRPRDSLEHGGGLAHQFSLPKTSSSEVAAIEKFLQFQDAVPCKVRAKRGCATHPRSIAWRVRRTKISERIRKLQELVPNMEKQTNTADMLDLAVDYIKDLQKQVKVLNDGRANCTCSGGGKLQDPFTS

SEQ ID NO: 7616 - protein, 486 aa, Zea mays
  unsure (1)..(486): unsure at all Xaa locations
  Clone ID: TF_ZmC21109_2.pep
MGIQGNKAATHEHDFLSLYAAAAAKDAPLLLHDSKAPPPSQGNFLLKTHDFLQPLDQKPGAPPEPSPLPASAAESRHQPQQQVVVANQHALPLPGGVGTFSISPAPVSVALPAAVVKSEPPFVLWGQPAATLHPGARGHQQQWALPFAGAGQVRLPPQQAPPDRKGRGGAGGGVMESGSRSSGGAGFDDDDGLTTRREVSSSLQDLTVRVDRKGGSCSDGGTDQRPNTPRSKHSATEQRRRSKINDRFQILRELLPHSDQKRDKATFLLEVIEYIRFLQEKVQKYEATFPEWNQENAKMLPWKWIFPXGSNFTGKLDDNHNIVTSAAASGAQDQAETDHMASGCYRSAETTANFTNNAMSQSQPQWTGPSPVDDCAVNSETLNNQQLVIDEGTIRVSSNYSQELLNSLTHALQSSGVDLSQANISVQINMGKRAVKRPAAGVSTNSKEPADPASSNELGHQLTLSGGGAGADGLSHATKRHKRGSS

SEQ ID NO: 7617 - protein, 340 aa, Zea mays
  Clone ID: TF_ZmC21109_4.pep
MESGSRSSGGAGFDDDDGLTTRREVSSSLQDLTVRVDRKGGSCSDGGTDQRPNTPRSKHSATEQRRRSKINDRFQILRELLPHSDQKRDKATFLLEVIEYIRFLQEKVQKYEATFPEWNQENAKMLPWSNMYFRSFWKNAQSKGQISGDSPPDPSHFMRNGSSPGSNFTGKLDDNHNIVTSAAASGAQDQVETDHMASGCYRSAETTANFTNNAMSQSQPQWTGPSPVDDSAVNSETLNNQQLVIDEGTIRVSSNYSQELLNSLTHALQSSGVDLSQANISVQINMGKRAAKRPAAGVSSNSKEPADPASSNELGHQLTLSGAGADCLSHATKRHKRSNS

SEQ ID NO: 7618 - protein, 82 aa, Zea mays
  Clone ID: TF_ZmC252_2.pep
LKNRLDRTRPRTRGAQVRRTKISERIRKLQELVPNMDKQTNTSDMLDLAVDYIKELQKQVKVLKETQANCTCPASKSQQHSC

SEQ ID NO: 7619 - protein, 267 aa, Zea mays
  unsure (1)..(267): unsure at all Xaa locations
  Clone ID: TF_LIB5116-009-A1-PF1-D8.pep
MDQLDEQSFLDELMSLRREEAPSPAPWQAYPGSGMMTTSDLLFYGGEGTTEASSGMDFAGPFQQPMAPPPATSPHRPHEKFNFDCLSEVCNPYGSCVGGVPKPGVVHAAGQAYALQDAMAQNGTSGGKLHHGGGXASSSPAPFVFAGVAGESSEMTRGAFSGAHARSKLNGGTTSKNLMAERRRRKRLNDRLSMLRSIVPKITKMDRTSILGDTIDYVNELTERIKPFEGEIGATXPEDLNLXDTTKNFSSGYSEEMPMRNPPSLSS

SEQ ID NO: 7620 - protein, 610 aa, Zea mays
  Clone ID: TF_ZmC13586_1.pep
MALSASRVQQAEELLQRPAERQLMRSQLAAAARSINWSYALFWSISDTQPGVLTWTDGFYNGEVKTRKISNSVELTSDQLVMQRSDQLRELYEALLSGEGDRRAAPARPAGSLSPEDLGDTEWYYVVSMTYAFRPGQGLPGRSFASDEHVWLCNAHLAGSKAFPRALLAKSASIQSILCIPVMGGVLELGTTDTVPEAPDLVSRATAAFWEPQCPSSSPSGRANETGEAAADDGTFAFEELDHNNGMDDIEAMTAAGGHGQEEELRLREAEALSDDASLEHITKEIEEFYSLCDEMDLQALPLPLEDGWTVDASNFEVPCSSPNPAPPPVDRATANVAADASRAPVYGSRATSFMAWTRSSRQSSCSDDAAPAAVVPAIEEPQRLLKKVVAGGGAWESCGGATGAAQEMSGTGTKNHVMSERKRREKLNEMFLVLKSLLPSIHRVNKASILAETIAYLKELQRRVQELESSREPASRPSETTTRLITRPSRGNNESVRKEVCAGSKRKSPELGRDDVERPPVLTMDAGTSNVTVTVSDKDVLLEVQCRWEELLMTRVFDAIKSLHLDVLSVQASAPDGFMGLKIRAQFAGSGAVVPWMISEALRKAIGKR

SEQ ID NO: 7621 - protein, 354 aa, Zea mays
  Clone ID: TF_ZmC12850_1.pep
MDSDYVASLLMGMGSSAPALDFAALDAGFLETLCGGGGGLFGVSGVAAGAGCGGVSPEGSSVSDPAWARARDDDNVRKRKAPPTGSAGGKEACPGKAAEAKGPDGKRCRVGGSDSPVKPKVEEVAASDASVELKAQKKGKGKTAKPAVEPPKDYVHVRARRGQATDSHSLAERVRREKISQRMKFLQDLVPGCNKVVGKALMLDEIINYVQSLQQQVEFLSMKLATVNPQLDFSNLSTLLHKDMYQPCGPSANSVFPLESDGAAFPFCDQADLFHSFGSGSAAMEDQCSLSLLDTALPHAANPQFAFQKQQRDFWEDGLQNALPTGSEQRQEEDGLLVPNFDGQLHADQTKVEF

SEQ ID NO: 7622 - protein, 352 aa, Zea mays
  Clone ID: TF_ZmC12850_2.pep
MDSDYIASLLMGSSAPALSFAAVDAGFLDTLRGGGGGGGLFGVPAEAGCGGGSPEGSSVSDPAWARARDYGNARKRKAPPTGSAGGKEACLSKVAEANGPDGKRCRVGASDSPVKPKEEEAAAAAAASGALVEVKAQKKGKGKSSKPAVEPPKDYVHVRARRGQATDSHSLAERVRREKISQRMKFLQDLVPGCNKVVGKALMLDEIINYVQSLQQQVEFLSMKLATVNPELDFSNLSTLLHKDMYQQPCGGPSASSVFPLESAGAAFPFCEQADLFHSFGSGGSGSGSGMEDQCSLSLLLDTALPHAASPQFAFQKQQRDLWEDGLQHALPTPTTGSEQRQEEDGLLVPDP

SEQ ID NO: 7623 - protein, 116 aa, Zea mays
  Clone ID: TF_LIB3607-057-Q6-N6-A4.pep
NKKHCGAGRKASKAKLASTAPTKDPQSLAAKNRRERISERLRALQELVPNGTKVDLVTMLEKAISYVKFLQLQVKVLATDEFWPAQGGKAPEISQVREALDAILSSASQSQRGQLN

SEQ ID NO: 7624 - protein, 612 aa, Zea mays
  Clone ID: TF_ZmC13586_2.pep
MALSASRVQQAEELLQRPAERQLMRSQLAAAARSINWSYALFWSISDTQPGVLTWTDGFYNGEVKTRKISNSVELTSDQLVMQRSDQLRELYEALLSGEGDRRAAPARPAGSLSPEDLGDTEWYYVVSMTYAFRPGQGLPGRSFASDEHVWLCNAHLAGSKAFPRALLAKSASIQSILCIPVMGGVLELGTTDTVPEAPDLVSRATAAFWEPQCPTYSEEPSSSPSGRANETGEAAADDGTFAFEELDHNNGMDIEAMTAAGGHGQEEELRLREAEALSDDASLEHITKEIEEFYSLCDEMDLQALPLPLEDGWTVDASNFEVPCSSPQPAPPPVDRATANVAADASRAPVYGSRATSFMAWTRSSQQSSCSDDAAPAVVPAIEEPQRLLKKVVAGGGAWESCGGATGAAQEMSATKNHVMSERKRREKLNEMFLVLKSLLPSIHRVNKASILAETIAYLKELQRRVQELESSREPASRPSETTTRLITRPSRGNNESVRKEVCAGSKRKSPELGRDDVERPPVLTMDAGTSNVTVTVSDKDVLLEVQCRWEELLMTRVFDAIKGLHLDVLSVQASAPDGFMGLKIRAQFAGSGAVVPWMISEALRKAIGKR

SEQ ID NO: 7625 - protein, 906 aa, Zea mays
  unsure (1)..(906): unsure at all Xaa locations
  Clone ID: TF_ZmC2137_2.pep
MAASAPPIYFCAAPAFCPCRPHAKPDSKDVDEARVTMAPTTPICLRVAPAPRPCRVRVGRGRGGQRQQSGRDGLDTFMLFYTVFSVIDPKCDARDSHVPMSTNQRYRLFPRRQFHNTLHLLNDSRLLRDLRFRFFIAKCPHPHWPLPLCQGHGREEPISSAWSKHRQDPIQEGQSIGVIANDVDKNGKPHKVRLYSIASSANGDFGNSRQVLPSLAGLPDLLCRFSCHLICFSVLLAFLLELYVFLKLTPVKRRLFNRGCKEQHCESYSCIIAIVSVVHPDGWRSKWQIKLCYVPTLPGCHVFIRGKGSIKDPGKILGYSLNEAHQLLQECRQQQMNLDELLEKKCSTLANRGDGGSDQSGTAPSSPPHVFGSATPLRAGTSGQWHTHHKDEDLNQDEKWEQLVHLLKGIAVETEKFQATPLSQEVLIVWGDHDQLFPVEKAFAVHSSFKDSSECCCFPVTKKIPRNHFLSSSTGCLSSCSKTIAVLQVVVAAPTPASAIGFEGYEKRLEISFYEAPIFADPNGRGLNRLAGVAAGLPHDLGLASQTRHKAERSPGLAKIFRKDLNLGRPSVGLVVGVSKXDERTWEQRSAVGGTSLLPSVQKGLQNFSWSQARGLNSHQQKFGNGVLIVSNNEAAHRNNGAVDSPSTAQFQLQKVPQLQKLQLQKLPVVQKTPQLGNQQPMQTQVPRQIDFSAGSSSKPGVLVTRAAVLDGESAEVDGLCKEEGAPPVIEDRRPRKRGRKPANGREEPLNHVEAERQRREKLNQRFYALRAVVPNISKMDKASLLGDAITYITDLQKKLKEMETERERLLESGMVDPRERAPRPEVDIQVVQDEVLVRVMSPMENHPVKKVFQAFEEAEVRVGESKVTGNNNXGTVVHSFIIKCPGTEQQTREKVIAAMSRAMSS

SEQ ID NO: 7626 - protein, 265 aa, Zea mays
  Clone ID: TF_ZmC579456_1.pep
MEWAMDTLLQEEEPAALYDGCGEAVAVFPSLQGLRDASHAAEMVRELMAAVETDDAANSWTTSGSGGEVTDGGSSGATDPAAPAAAEAADFYGGSGPPHSPNSFPSGKTNTSLPTVRVSWNFVTGSAAAQPRSDGVLEKGAVPIRRVPPELAHRRRSPPPPPRRAHHPTRGMGAASCTPEHIVAERKRREKINNRLIELSTVIPGLKKMDKATILSDAAKYVKELQQRLRPLERAAAAAAGSSRTKAPTTTDENGGSRSPTSASS

SEQ ID NO: 7627 - protein, 181 aa, Zea mays
  unsure (1)..(181): unsure at all Xaa locations
  Clone ID: TF_ZmC944_3.pep
LGQLCFVYIFFYLIIHPLILFCVSLQKRRDRINQKMKTLQKLVPNSNKTDKASMLDEVIDYLKQLQAQVQLMSRMGSMMMPMAMPQLQMSMMAQMAQMAQMAQMAQMNMGSLGQPGYAGLTPPMMHPPPFVPVSWDTTXTVTTFLAPQAGSGTVPADAFYAFLACQAQQNGQQQPGSMEAY

SEQ ID NO: 7628 - protein, 287 aa, Zea mays
  Clone ID: TF_ZmC28831_1.pep
MASFPHLTQMEHGLASGASHGTPSFFFCHGTATADSASLETSSGVLDTSPRGTSSDDNKACRKHKEDSGASFSSARSKDSNSKESSKRSGGKRDRSSKKVDEEEPKGYIHVRARRGQATDNHSLAERVRRERISERMRVLQALVPGCDKVTGKALILDEIINYVQSLQNQVEFLSMRIASLSPVLYGFGMDSSDAFSDLITQKIEGMAHHEAFAMPSSSVLNGTPSEALVDTHTSSSSPSYEVHGDGGTASVSFPQDSGSYMVQTVGEPRQELFSQVVFSNHMCPFQ

SEQ ID NO: 7629 - protein, 167 aa, Zea mays
  unsure (1)..(167): unsure at all Xaa locations
  Clone ID: TF_ZmC178000_1.pep
MPRRQRTRSSEELKAEDFVDSVLNFGGEEEDGEEEKQEAGGDGQPAAEFKSKNLEAERKRRGKLNRNILALRAVVPNITKMSKESTLSDAIDLIRKLQNQVLELQRQLADSPGEAWEKQGSASCSESFTATENMPYQGQIELVPLGPCKYHLRIFCKKGXGXSSKGC

SEQ ID NO: 7630 - protein, 75 aa, Zea mays
  Clone ID: TF_LIB3245-506-P1-K1-G5.pep
QARREKISERMKVLQDLVPGCNKVIGKASVLDEIINYIQSLQCQVEFLSMKLEAVNAQANQGVEVFPAKDYGSQT

SEQ ID NO: 7631 - protein, 257 aa, Zea mays
  Clone ID: TF_ZmC238625_1.pep
MMPGSMAARQPLQGKQELQPYDGRDPSALGAGGSPVLLPRQQESAAPPAVRVAPPPDMSSSSGSGRSATEARALKVHSEAERRRRERINAHLATLRRMVPDTRQMDKATLLARVVEQVKLLKRKASEAATTTTQSTPLPPETDEVSIELHTGDAGADRSVYIRASISCADRPDLVAGLAQAFHGLRLKTVRANMTSLGGRARHVFVLCMEDGWGSAGASLRSLKEAVRQALARVASPETAYGSSPFQSKRQMILESH

SEQ ID NO: 7632 - protein, 403 aa, Zea mays
  Clone ID: TF_ZmC16354_1.pep
MAELVMAQCGVPSGGEGGAWPPGFAWDGGAADASRGMYGDAVPPSLSLFDAAGSVAADPFQAVQQAPGAGGGGVDDVAGWQYAAAAGSELEAVQLQQEQQPRDADSGSEVSDMQGDPEDDGDGDAQGRGGGKGGGKRQQCKNLEAERKRRKKLNERLYKLRSLVPNISKMDRAAILGDAIDYIVGLQNQVKALQDELEDPADGAGAPDVLLDHPPPASLVGLENDESPPTSHQHPLAGTKRARAAAEEEEEEKGNDMEPQVEVRQVEANEFFLQMLCERRPGRFVQIMDSIADLGLEVTNVNVTSHESLVLNVFRAARRDNEVAVQADRLRDSLLEVMREPYGVWSSSAPPVGMSGSGIADVKHDSVDMKLDGIIDGQAAPSVAVGVSEDHYGGYNHLLQYLA

SEQ ID NO: 7633 - protein, 150 aa, Zea mays
  Clone ID: TF_ZmC222321_1.pep
AVGAAGAGAERPRRKNVRISSDPQTVAARLRRERVSERLRVLQKLVPGGSKMDTASMLDEAASYLKFLKSQVQALETLGTTTATNANSSASATTSRSSAASRSPQYNYYGGGGNNNNPAGFLGFSNVISPAGYVNPGGSSSNTGSNKLLF

SEQ ID NO: 7634 - protein, 213 aa, Zea mays
  Clone ID: TF_LIB4976-045-A1-K1-G9.pep
MADADLTPNHSLLLKMPAASAHAHSPSLSSLLLYGQESHGEAAPANANANAAAATVEDAASLETSSAVVDSASPMERKRKATAEDSAAISSPQPKDCKQESKSRRGKRPRKETEEKSSTDEDEASKGYIHVRARRGQATDSHSLAERVRRERISERMRMLQALVPGCDKVNGKAMVLDEIINYVQSLQNQVEVIKTQTMNQVEVIQAWFWINC

SEQ ID NO: 7635 - protein, 224 aa, Zea mays
  Clone ID: TF_LIB3689-245-Q1-K6-D2.pep
SIIFWKNKREREREKLAFLFGVRSSFQGGEAAGVFGGSFAGSLHHHQQQQQHFQSHPQQTAPLPGQGFGGGAGASGGVSQPQAGAACGGAAAPPRQRVRARRGQATDPHSIAERLRRERIAERMKALQELVPNANKTDKASMLDEIVDYVKFLQLQVKVLSMSRLGGAAAVAPLVADMSSEGRGGVAVAAGSDDGLAVTEQQVAKLMEEDMGTAMQYLQGKGLC

SEQ ID NO: 7636 - protein, 471 aa, Zea mays
  Clone ID: TF_ZmC6843_1.pep
MQPTTREMQAMAAAGQQISLDDLRAAAGGVHDDFLDQMLGGLPPSAWPELSSAAGGKAPDGGAQAEQMQHQPQHLGGGGGLYDDSALLASRLRQHQISGGGGGEAVKQMVLQQLADLRQEHHVLLQGMGRSTSTGGSRDGGLLLPLSLGSGGSGGDVQALLKAVADSAGGEAAGVFGGSFAGSLHHHQQQQQHFQSHPQQQTAPLPGHGSGGGAGASGGVSQPQAGAACGGAAAPPRQRVRARRGQATDPHSIAERLRRERIAERMKALQELVPNANKTDKASMLDEIVDYVKFLQLQVKVLSMSRLGGAAFLLWTVRVCVVQGRGGVAVAAGSDDGLAVTEQQVAKLMEEDMGTAMQYLQGKGLCLMPVSLASAISSATCHMRPPVGGPGLGVAAAAAHHMAAMRLPPHAMNGGAGAGADAVPASPSMSVLTAQSAMAPNGAGGGTDGEGSHSQQQQRHHPKDAASVSKP

SEQ ID NO: 7637 - protein, 121 aa, Zea mays
  Clone ID: TF_ZmC32276_1.pep
MNPRGHRSNRTSLFDGIEEGGIRATSYSSHEIDEQENDGAIDGLQDRVSILKRLSGDIHEEVETHNRMLDRMGNDMDTSRGFLSGTVDKFKMVFETKSSRRMGTLVASFVALFLLVYYLTR

SEQ ID NO: 7638 - protein, 174 aa, Zea mays
  Clone ID: TF_ZmC1672_5.pep
VPKKRTHYQLNSITSGTTLSITNSEQALLVYSISKDRQLPDATEQQSPVRPNDDEISLLTASTWAAQSFTRHPSLITLLVPVVDLGLGLVRITRQCGSSSRLLVVIGVHLLCVLNLQLLGLRYVGSLLLRFRNCTTSKGGQGNKRILHRSVEVNMQVEQNPSRNEQISTSNSTK

SEQ ID NO: 7639 - protein, 119 aa, Zea mays
  unsure (1)..(119): unsure at all Xaa locations
  Clone ID: TF_LIB143-063-Q1-E1-G12.pep
TFSCSNNQTLIPIKAQGLQNKSMAQSNGWQPRLSVKEKKVEKDPTIPKRPPTPSSSSRENLRKDSKENHPKLKQVSLIGKAGCDKXVLSDSENAHYVSKAEKLKAEYTKKIDAYNNKQS

SEQ ID NO: 7640 - protein, 159 aa, Zea mays
  unsure (1)..(159): unsure at all Xaa locations
  Clone ID: TF_ZmC677_15.pep
GPASTGRSGTRFLFFLVIVTVLLVKLLCGCCCRLRAGGAAGKRKKAAASGKPKRPPSAFFVFMSEFRQEYQALHPGNKSVATVSKAAXXEKWRAMSDQEKQPYVDQAGQKKQDYEKTKANFDKKESTSSKKAKTEDEDGSKXVREDEDGSSDEENDDDE

SEQ ID NO: 7641 - protein, 128 aa, Zea mays
  unsure (1)..(128): unsure at all Xaa locations
  Clone ID: TF_LIB4742-022-R1-K1-E8.pep
RARLDTSKKDEGRLXRPGAHGKRKRAGASAIVKRPPCALIVLMSEFRQEHXALYTDNKSVATASKAPGEKWRAMSYKEKHPYVDQVXQKKQDCEETRANCHNKESTSSENAITEDDDGSKDMLKTRMA

SEQ ID NO: 7642 - protein, 96 aa, Zea mays
  unsure (1)..(96): unsure at all Xaa locations
  Clone ID: TF_700354730H1.pep
PYSCSHTQTVDAIRLKRLKLRSKDRYTTGDSRLSVMKPNAEXDPYKRKMPQSAFFVFMEEFWKDYEDKHPHEKQVSLVGTAGGAKWKSLSDDADAP

SEQ ID NO: 7643 - protein, 75 aa, Zea mays
  unsure (1)..(75): unsure at all Xaa locations
  Clone ID: TF_LIB4729-108-A1-K1-F3.pep
MKGKADTSKKDEGRLRAGGAAGKRKNAAASGKSXRPPSAFFVFMSEFWXEYQVLHPVFKSVATVIQAAGEQCRAM

SEQ ID NO: 7644 - protein, 137 aa, Zea mays
  Clone ID: TF_uC-zmflteosinte92e09b1.pep
LFSQPPRHFLLLLRIVILLSTGPPQNVRPHAVFPAVNPSSSRDGDIPAKGRKGKAGKDPNKPKRAPSAFFVFMEEFRKEFKEKNPKNKSVAAVGKAAGDRWKSLSESDKASYVAKANKLKLEYNKGIAAYNKGESTA

SEQ ID NO: 7645 - protein, 126 aa, Zea mays
  unsure (1)..(126): unsure at all Xaa locations
  Clone ID: TF_ZmC677_11.pep
MKGKADTSKKDEGRLRXGKPKRPPSAFFVFMSEFRQEYQALHPGNKSVATVSKAAGEKWRAMSDQEKQPYVDQAGQKKQDYEKTKANFDKKESTSSKKAKTEDEDGSKSEVDDEDGSSDEENDDDE

SEQ ID NO: 7646 - protein, 188 aa, Zea mays
  Clone ID: TF_ZmC677_3.pep
MKGKADTSKKDEGRLRAGGAAGKRKKAAASGKPKRPPSAFFVFMSEFRQEYQALHPGNKSVATVSKAAGEKWRAMSDQEKQPYVDQAGQKKQDYEKTKANFDKKESTSSKKAKTEDEDGSKSEVDDEDGSSDEERYALPHPKGKPTTSPTTLRLRLRHSCRFESPRPDPSQNPSSNHHEGQGQRLQEG

SEQ ID NO: 7647 - protein, 139 aa, Zea mays
  Clone ID: TF_ZmC677_4.pep
MKGKADTSKKDEGRLRAGGAAGKRKKAAASGKPKRPPSAFFVFMSEFRQEYQALHPGNKSVATVSKAAGEKWRAMSDQEKQPYVDQAGQKKQDYEKTKANFDKKESTSSKKAKTEDEDGSKSEVDDEDGSSDEENDDDE

SEQ ID NO: 7648 - protein, 139 aa, Zea mays; identical to SEQ ID NO: 7647
  Clone ID: TF_ZmC677_5.pep

SEQ ID NO: 7649 - protein, 101 aa, Zea mays
  Clone ID: TF_ZmC176449_1.pep
MPKAAAPAKRATRTKRAKKDPNAPKRGLSAYMFFANEQRENVREENPGISFGQVGKLLGERWKALNEKQRAPYEAKAAADKKRYEDEKQAYNADQEEEESS

SEQ ID NO: 7650 - protein, 101 aa, Zea mays
  Clone ID: TF_ZmC176449_2.pep
MPKAAAGKRGKAEKTKRGKKDPNAPKRGLSAYMFFANEQRENVREENPGISFGQVGKLLGERWKALNEKQRAPYEAKAAADKKRYEDEKQAYNADQEEEES

SEQ ID NO: 7651 - protein, 123 aa, Zea mays
  Clone ID: TF_4995920.pep
MKDTSFKATGAKRKKVGGAKRGLTPFFAFLAEFRPQYLEKHPELKGVKEVSKAAGEKWRSMSDEEKAKYGSSKKQDGKASKKENTSSKKAKADVREGDEAEGSNKSKSEVEDDEQDGNEDEDE

SEQ ID NO: 7652 - protein, 138 aa, Zea mays
  Clone ID: TF_1845196.pep
MKGKANASKKDEARLRAGGGGAGKRKKAAASGKPKRPPSAFFVFMSEFRQEYQAQHPGNKSVAAVSKAAGEKWRSMSEQEKQPYVDQAGQKKQDYEKTKANIEKSTSSKKAKTDDDDGSKSEVDDEDGGSDEDNDDDE

SEQ ID NO: 7653 - protein, 145 aa, Zea mays
  Clone ID: TF_ZmC677_10.pep
GFARGQDEGFRIGSCGAGGGGAGKRKKAAASGKPKRPPSAFFVFMSEFRQEYQAQHPGNKSVAAVSKAAGEKWRSMSEQEKQPYVDQAGQKKQDYEKTKANIEKESTSSKKAKTDDDDGSKSEVDDEDGGSDEDNDPRVRIFFFF

SEQ ID NO: 7654 - protein, 139 aa, Zea mays
  Clone ID: TF_ZmC677_14.pep
MKGKANASKKDEGRLRAGSGGAGKRKKAAASGKPKRPPSAFFVFMSEFRQEYQAQHPGNKSVAAVSKAAGEKWRSMSEQEKQPYVDQAGQKKQDYEKTKANIEKESTSSKKAKTDDDDGSKSEVDDEDGGSDEDNDDDE

SEQ ID NO: 7655 - protein, 139 aa, Zea mays; identical to SEQ ID NO: 7654
  Clone ID: TF_ZmC677_21.pep

SEQ ID NO: 7656 - protein, 139 aa, Zea mays
  Clone ID: TF_ZmC677_6.pep
MKGKANASKKDEGRLRAGGGGAGKRKKAAASGKPKRPPSAFFVFMSEFRQEYQAQHPGNKSVAAVSKAAGEKWRSMSEQEKQPYVDQAGQKKQDYEKTKANIEKESTSSKKAKTDDDDGSKSEVDDEDGGSDEDNDDDE

SEQ ID NO: 7657 - protein, 107 aa, Zea mays
  Clone ID: TF_ZmC190193_1.pep
SARVNRKPHRSGRRKKNKRRWDPNYPKPNRSGYNFFFAEKHYTLKTLYPNREREFTKMIGQSWNSLSPEERMVYQNIGLRDKERYKRELTEYKEKMKLRQTSEVGRP

SEQ ID NO: 7658 - protein, 126 aa, Zea mays
  Clone ID: TF_ZmC518120_1.pep
MKAKAGSRAGDSRLAVKKSKAEKDPNKPKRPPSAFLVFMDTFRKEYKEKHPDVKQVSVIGKAGGEKWKSLSDAEKAPYAAKAEKLKAEYAKKIDAYNNPQAGEASGDSDKSKSEVNDEDDGSEGDE

SEQ ID NO: 7659 - protein, 120 aa, Zea mays
  Clone ID: TF_LIB5116-064-A1-PF1-E12.pep
MRSKANGDTAFKASGKNKTATGGVAKPKRAPTPFFAFLAEFRPQYMEKHPEAKGVAAVTKAAGEKWRSMSDEEKAKYGGKKADAPASKAVNKKESTSSKKTKTNADEEGSDVEDDEEDEE

SEQ ID NO: 7660 - protein, 320 aa, Zea mays
  Clone ID: TF_ZmC677_2.pep
MKGKADTSKKDEGRLRAGGAAGKRKKAAASGKPKRPPSAFFVFMSEFRQEYQALHPGNKSVATVSKAAGEKWRAMSDQEKQPYVDQAGQKKQDYEKTKANFDKKESTSSKKAKTEDEDGSKSELDDEDGSTASEPGNALGASPPKKENQPPLPPPSASACATAADSKALVLTPRKTLAPTTMKGKANASKKDEARLRAGGGGAGKRKKAAASGKPKRPPSAFFVFMSEFRQEYQAQHPGNKSVAAVSKAAGEKWRSMSEQEKQPYVDQAGQKKQDYEKTKANIEKESTSSKKAKTDDDDGSKSEVDDEDGGSDEDNDDDE

SEQ ID NO: 7661 - protein, 206 aa, Zea mays
  Clone ID: TF_LIB5025-006-R1-XP-E8.pep
MSLSKLFSNLTIQTRSISSYRHMHPTKFVSILQNVPMKPRSAWQVYIREHLKGTKTTQEGLTKSSTELSAKWKALSEHEKQKYYTIYESEKDAYEKAFAVAVNNASPKQFYQENLLRKKYKLPLLVDPKKPKRPLNAYLSYYQALRDSKHASMEGQPVAEQAKIVGRLYKELPESEKKIYKDKANQAMEQYKKQVAEYNREAGIHA

SEQ ID NO: 7662 - protein, 218 aa, Zea mays
  Clone ID: TF_ZmC37456_1.pep
MATAAVESKRGSARGRKALVAVLDNEANISAGKAAQAADLSSCSAQKKAKRAPSRSSKAKAAAASAVVVVDDIAELQGMLERLRLEKEKAEEMVRERDEVIRKKEEEIETRDKEQERLQAELRKAQRAKEFKPTVSFPLVKSLLEKEQEADDKGKKKKGKGGHERKKPCPAYVLWLKDQWTEVKKENPEPDFKEVSNTLGAKWKALGAEEKQPYEDRY

SEQ ID NO: 7663 - protein, 123 aa, Zea mays
  Clone ID: TF_ZmC137_2.pep
MKHPSFKATGAKRKKVGGAKRGLTPFFAFLAEFRPQYLEKHPELKGVKEVSKAAGEKWRSMSDEEKAKYGGSKKQDGKASKKENTSSKKAKADVREGDEAEGSNKSKSEVEDDEQDGNEDEDE

SEQ ID NO: 7664 - protein, 188 aa, Zea mays
  Clone ID: TF_ZmC677_13.pep
MTSHARVRKLGIRLEPPSASACATAADSKALVLTPRKTLAPTTMKGKANASKKDEGRLRAGGGGAGKRKKAAASGKPKRPPSAFFVFMSEFRQEYQAQHPGNKSVPAMMSYFFVLVDQVSKAAREKWRSMSEREKQPYVDQAGQKKQDYEKTKANFEKKESTSSKKAKTDDDDGSKSEVDDEDDEDDE

SEQ ID NO: 7665 - protein, 117 aa, Zea mays
  Clone ID: TF_ZmC1209466_1.pep
MTTRYKKKSPSLSVGDISKEIGARWKKVSDDVRKRYEQKAAVEKQKYEVRVAEYKKSGGGGASSSPAKGGKGAAKGGSKKAAPAKGGKKKPAAKSKSSDEDNDDDDDDDDEDEDDEE

SEQ ID NO: 7666 - protein, 134 aa, Zea mays
  Clone ID: TF_LIB3067-045-C4_FLI.pep
NASKKDEGRLRAGGGGAGKRKKAAASGKPKRPPSAFFVFMSEFRQEYQAQHPSNKSVAAVSKAAGEKWRSMSEQEKQPYVDQAGQKRQDLQRVVPPERELHHRLQERGQYRRVLQARGLHVHQRVCREYWRCWC

SEQ ID NO: 7667 - protein, 139 aa, Zea mays
  Clone ID: TF_LIB4729-127-A1-K1-B9.pep
MKGKANASKKDEGRLRAGGGGAGKRKKAAASGKPKRPPSAFFVFMSEFRQEYQAQHPSNKSVAAVSKAAGEKWRSMSEQEKQPYVDQAGQKKQDYEKTKANIEKESTSSKKAKTDDDDGSKSEVDDEDGGSDEENDDDE

SEQ ID NO: 7668 - protein, 139 aa, Zea mays; identical to SEQ ID NO: 7667
  Clone ID: TF_ZmC677_7.pep

SEQ ID NO: 7669 - protein, 317 aa, Zea mays
  unsure (1)..(317): unsure at all Xaa locations
  Clone ID: TF_ZmC4984_1.pep
PVQNYRVDPRVYSGFSFLTSVHFKEVSKTLGAKWKALGAEEKQPYAERYRQEKEAYLQVVGQEKREAEAMQLLAQQPMQWTAKELLGQYLKFRQEAEEGDCKKGRKKKSKKDKDPSKPKQPMSAYFVYSQERRATLVAEKKSXEIGKITGEEWKNMTEGQRAPYEEVARKQKEEYHKQMEVYKQKKAEEAASLEKEEQEHKKIMKHEALQLLKKKEKADNIIKKTKEKRQKKKQENADPNRPKRPASSFLLFSKEERKQLIEERPGINNSTLNALITVKWKELSGEERQAWNAKAAPAMAAYKKEMEEYTKAQSSSA

SEQ ID NO: 7670 - protein, 229 aa, Zea mays
  unsure (1)..(229): unsure at all Xaa locations
  Clone ID: TF_ZmC4984_2.pep
AELRKAQRVKEFKPTVSFPLVKSLLEKEQEADDKGKKKKGKGGHERKKPCPAYVLWLKDQWTEVKKENPEADFKEVSNTLGAKWKALGAEEKQPYEERYRQEKEAYLQVVGQEKREAEAMKLLEEQQMQWTAKELLDQYLKFRQEAEEGDCKXXRKNKSKKDKDPSKPKQPMSAYFVYSQERRATLVAEKKNVPEIGKITGEEWKNMTEGQRAPYXEVARKQKEEYHKQ

SEQ ID NO: 7671 - protein, 85 aa, Zea mays
  Clone ID: TF_ZmC13336_1.pep
KKDPNAPKRGLSAYMFFANENRERVRDENPGIAFGALGRKLGELWKGLSDAERKPYEDKAAADKKRYEDQKATYLAGGDDDEESS

SEQ ID NO: 7672 - protein, 126 aa, Zea mays
  Clone ID: TF_ZmC1672_1.pep
MKSRARSTAGDSRLSVRKTKAEKDPNKPKRPPSAFFVFMEEFRKDYKEKHPNVKQVSLIGKAGGDKWKSLSDAEKAPYVSKAEKLKAEYTKKIDAYNNKQSGDPTASGDSDKSKSEVNDEDEEGDE

SEQ ID NO: 7673 - protein, 126 aa, Zea mays; identical to SEQ ID NO: 7672
  Clone ID: TF_ZmC1672_3.pep

SEQ ID NO: 7674 - protein, 165 aa, Zea mays
  Clone ID: TF_ZmC1672_4.pep
MPTAPYFKSRPLVGLGCDSHQSGAGLQPFSCSHTQTLVAIRPQGLEMKSRARSTAGDSRLSVRKTKAEKDPNKPKRPPSAFFVFMEEFRKDYKEKHPNVKQVSLIGKAGGDKWKSLSDAEKAPYVSKAEKLKAEYTKKIDAYNNKQSGDPTASGDSDKSKSEGDE

SEQ ID NO: 7675 - protein, 84 aa, Zea mays
  Clone ID: TF_ZmC146668_1.pep
AGKRKKATTSGKPKRPPSAFFVFMSEFRQEYQVQHPGNKSITAVSHLALCSPFIFWCVCRCDSLFVLVDQVSKAAGEKWHAMTD

SEQ ID NO: 7676 - protein, 115 aa, Zea mays
  Clone ID: TF_LIB4738-132-A1-K1-D9.pep
MKTRSQTSPKPLKTVAMAPRPSSTKRKPRPKPAGKGDPRAPKKPPTAFFYFMEDFRKIYKQEKPSVKSMQEIGKACGEKWNTMTFEEKVKYYDIATEKRAEFEKAMIEYNKKKES

SEQ ID NO: 7677 - protein, 115 aa, Zea mays; identical to SEQ ID NO: 7676
  Clone ID: TF_ZmC2000_1.pep

SEQ ID NO: 7678 - protein, 158 aa, Zea mays
  unsure (1)..(158): unsure at all Xaa locations
  Clone ID: TF_LIB3078-029-Q1-K1-F11.R2.pep
ALRFESAVECAKKGAKYKGAAKVDAKMAVKNKGAENPNGGTKGNADKDPNXPKRASSAMLEFMEEFREEITENNPLNKSVNAVGKACSHRRKSLSDSYKATYVTKANKLKLEYNNDISDYSTGDSTAANKAHDEEEEEEYEEDSDEFNDEDNDEGHEE

SEQ ID NO: 7679 - protein, 68 aa, Zea mays
  Clone ID: TF_LIB3151-003-Q1-K1-E11.pep
RSKSHTKSAKLSAKFQAGKKWEKASQDPNKPKRPPRAFFAFIEEFREQYKKDHPKNKSPAGVGKACGD

SEQ ID NO: 7680 - protein, 123 aa, Zea mays
  Clone ID: TF_ZmC137_1.pep
MKDTSFKATGAKRKKVGGAKRGLTPFFAFLAEFRPQYLEKHPELKGVKEVSKAAGEKWRSMSDEEKAKYGGSKKQDGKASKKENTSSKKAKADVREGDEAEGSNKSKSEVEDDEQDGNEDEDE

SEQ ID NO: 7681 - protein, 212 aa, Zea mays
  Clone ID: TF_ZmC15996_1.pep
MAGGKSTGNAARSRKRVEATVLKRSRDGSAFTRCEACNKDVPVVLIDMHSCSLDEKIRMTLEAQVVEKTVEVASADRKKSSAKGGGNKDAKRKRSPTAFFLFMDDFRKEFKATHPDNKSVATVAKEGGERWKSMTDEEKKPYIEKAAELKAEAENGEGSGENNVATKKAKTDDQEVDQPAKKLRKCKALHEDEDDDGDQEDEDEKNELDDDM

SEQ ID NO: 7682 - protein, 212 aa, Zea mays
  Clone ID: TF_ZmC15996_2.pep
MAGGKSTGNAARSRKRVEATVLKRSRDGSAFTRCEACNKDVPVVLIDMHSCSLDEKIRMTLEAQVVEKTVEVASADRKKSSAKGGGNKDAKRKRSPTAFFLFMDDFRKEFKATHPDNKSVATVAKEGGERWKSMTDEEKKPYIEKAAELKAEAENGEGSGENNVATKKAKTDDQEVDQPAKKLRKCKALHEDEDDEGDQEDEDEKNELDDDM

SEQ ID NO: 7683 - protein, 337 aa, Zea mays
  Clone ID: TF_ZmC1306_1.pep
EILAEKYKDRLESSYRGLIHEVFSKVLRGLSSAKVTRPSTFRSCLDGYAVKSSLKAEDGLLYPLEKGFFFLPKPPTLIPHEEIEYVEFERHGAGGASISSHYFDLLVKLTNDQELLFRNIQRNEYHNLFNFISGKHLKILNLGDGQGRTSGVTAVLQSTDDDSVDPHLERIKNQAGNEESDEEDEDFVADKDDSGSPTDDSDAEGSDASMSGGEKEKPSKKEASSSKPPVKKKQKSGPDEGSQKKKPKKKKDPNAPKRAIAPFMYFSKAERANIKSSNPELATTEIAKKLGERWQKMTAEERQPYVEQSQVDKQRYAEESAAYRGAAAQQGSGAGSE

SEQ ID NO: 7684 - protein, 223 aa, Zea mays
  Clone ID: TF_ZmC1306_2.pep
PTCFYESDIASCPFIIFLSGKHLKILNLGDGQGRTSGVTAVLQSTDDDSVDPHLERIKNQAGNEESDEEDEDFVADKDDSGSPTDDSDAEGSDASMSGGEKEKPSKKEASSSKPPVKKKQKSGPDEGSQKKKPKKKKDPNAPKRAIAPFMYFSKAERANIKSSNPELATTEIAKKLGERWQKMTAEERQPYVEQSQVDKQRYAEESAAYRGAAAQQGSGAGSE

SEQ ID NO: 7685 - protein, 139 aa, Zea mays; identical to SEQ ID NO: 7647
  Clone ID: TF_ZmC677_1.pep

SEQ ID NO: 7686 - protein, 178 aa, Zea mays
  Clone ID: TF_ZmC677_12.pep
MSSNEERVGGRVGGRVGGRVGGRVGALGASPPKKENQPPLPPPSASACATAADSKALVLTPRKTLAPTTMKGKANASKKDEARLRAGGGGAGKRKKAAASGKPKRPPSAFFVFMSEFRQEYQAQHPGNKSVAAVSKAAGEKWRSMSEQEKQPYVDQAGQKKQDYEKTKANIEKESTSS

SEQ ID NO: 7687 - protein, 84 aa, Zea mays
  Clone ID: TF_700351302H1.pep
KTEAEKDADMPKMPPRAFFVFMEEFRKDYNEQYPSVEQVSLIGNAGRDEWKSLSDAEKAHYVSKAVKLKDEYTKKIDVYSNKQS

SEQ ID NO: 7688 - protein, 694 aa, Zea mays
  Clone ID: TF_ZmC26216_1.pep
MSSLRRALRSTASAPQSRSQASCAPGLGLTGEAELEDRRCSGDTKRSAAGATSAEMTDGHHFNNILLGGRGGTNPGQFKVHSGGLAWKRQGGGKTIEIDKADVTAVTWMKVPRAYQLGVRIKAGLFYRFIGFREQDVSNLTNFIQKNMGVTPDEKQLSVSGQNWGGIDIDGNMLTFMVGSKQAFEVSLPDVAQTQMQGKTDVLLELHVDDTTGANEKDSLMDLSFHVPTSNTQFVGDESRPPAHILWETILKFADVGSSEEPVVTFEGIAILTPRGRYSVELHLSFLRLQGQANDFKIQYSSIVRLFLLPKSNNPHTFVVITLDPPIRKGQTLYPHIVIQFETEAVVERDLALSKELLVEKYKDRLEESYKGLIHEVFTKVLRGLSGAKVTRPGSFRSCQDGYAVKSSLKAEDGLLYPLEKGFFFLPKPPTLILHEEIEFVEFERHGAGGASISSHYFDLLVKLKNDQEHLFRNIQRNEYHNLFNFINGKNIKIMNLGGDGQGASGVVTDVLRDTDDDAVDPHLERIKNQAGDEESDEEDEDFVADKDDSGSPTDDSGDEESDASDSGGEKEKSSKKEASSSKPVQKRKHKARDDEGQEKKKPKKKKDPNAPKRAMTPFMYFSMAERGNMKSSNPDLPTTEIAKKLGEMWQKMSGEEKQPYIQQAQVDKKRYEKESAVYRGEATVDVDSGNESD

SEQ ID NO: 7689 - protein, 120 aa, Zea mays
  Clone ID: TF_LIB4742-042-R1-K1-D11.pep
MKSRARSGGGDSRLSVRKTKVEKDPNKPKRPPTAFFVFMEEFRKDYKEKHPNVKQVSVIGKAGGDMWKSLSDAEKAPYVSKAEKLKVEYTKKMDAYNNKQSGGGPTLSGDSDKSKSEGDE

SEQ ID NO: 7690 - protein, 127 aa, Zea mays
  Clone ID: TF_ZmC1672_2.pep
MKSRARSGGGDSRLSVRKTKVEKDPNKPKRPPTAFFVFMEEFRKDYKEKHPNVKQVSVIGKAGGDMWKSLSDAEKAPYVSKAEKLKVEYTKKMDAYNNKQSGGGPTLSGDSDKSKSEVNDGDEEGDE

SEQ ID NO: 7691 - protein, 125 aa, Zea mays
  Clone ID: TF_ZmC1258051_1.pep
IRSTRSQCTFTVWQRSCESHIESVSKHRIYHRKSKKKNPNKPKRAPSAFFVFMEEFRKEFKEKNPKNKSVAAVGKAAGDRWKSLSESDKAPYVAKANKLKLEYNKAIAAYNKGESTAAKKAPAKE

SEQ ID NO: 7692 - protein, 87 aa, Zea mays
  unsure (1)..(87): unsure at all Xaa locations
  Clone ID: TF_LIB3597-037-Q1-K6-H11.pep
MSAGSGSGDEDDDEGDLKNLGLSKDHAAVLEECFKTHHTFTSXQNAGLASRLGLRARKVXVWLQNRRARTKLKQTVVDCEYLRRWCE

SEQ ID NO: 7693 - protein, 360 aa, Zea mays
  Clone ID: TF_ZmC2781_1.pep
MEDLSDLGGHGHPGAAAWRPAAPSLASSSKVSVQVYTVPSSAATGREARGQGVAPMMHASSVAGHGGRAADLDPVKAKIVSHPSYHRLLAAFLDCHKVGCPPEAAEEIAAVAREREAWQRAAAGDVAHTRPDPELDQFMESYCELLVTWKEELTRPLREAEEFLTTVEAQLNSITNTGPTMGAFISSAAAADKTGVVDMSDDEQEEGSGMEAEVALGIDPCSDDKELKKQLLRKYSGCLGNLRKELCKKRKKDKLPKEARQKLLSWWELHYRWPYPSEMEKIALAESTGLEQKQINNWFINQRKRHWKPSEEMQFAVMDGFHPAPPNAAAFYVDARLVGATPAMFYARPDHGAHHGLWHN

SEQ ID NO: 7694 - protein, 153 aa, Zea mays
  Clone ID: TF_ZmC44427_1.pep
KHILARQTGLSRSQVSNWFINARVRLWKPMIEEMYTEEVNPKPADDTSQNPSAGGGVGVGVAIKPEQQVSTAAAGATIGGGGGGDHLFGPSYPSMYGSHGGAVSLTLGLQQQPFASTMMHQRRPLMTFQGDEQEPALPYRDLMGSQLLHHFAG

SEQ ID NO: 7695 - protein, 78 aa, Zea mays
  unsure (1)..(78): unsure at all Xaa locations
  Clone ID: TF_jC-zmXLIB3552003af03b1.pep
MAASHRTAGPGPSDGSSAGARKKLQLTNEQSTLLEDSXRAHNILSNAQKQELARQVDLSARQVEVWFQNTHVQITCFA

SEQ ID NO: 7696 - protein, 352 aa, Zea mays
  Clone ID: TF_ZmC1681_1.pep
MHSSIPQTIKYPQIARWLARMEKQLPALTGGSKAATTTPFYLALDHRAAATSSSPPAEAPTLPPSAAAVSDPSRQSNSDRGSEIIKAKIMSHPLYPALLRAFIDCRKVGAPLEIVGRLSALADDVETNSDGRQEEQPADPELDQFMEIYCHMLVRYRQELTRPIQEADEFFKSMEAQIDSFSLDDNGYEEGGGSSDEDEQETVDLGGLPVPETGSPSGEGKELKNHLLNKYSGYLSSLWRELSRKKKKGKLPRDARQKLLHWWQLHYRWPYPSELEKAALAESTGLDAKQINNWFINQRKRHWKPAPPTMALGTPDYRMGQHGGGASSSSASAGLRVQGQYFTGGSSYPRGP

SEQ ID NO: 7697 - protein, 189 aa, Zea mays
  unsure (1)..(189): unsure at all Xaa locations
  Clone ID: TF_LIB3606-036-Q1-K6-E1.pep
MIMSQLRNTSKVAASDGIGKDDMANFALMGGGADHLRGNSVNTFSQAHNIWRPQRGXPERAVSVLRSWLFEHFLHPYPTDSDKQMLAKQTGLTRNQVSNWFINARVRLWKPMVEEIHNLEMRQQXQKNTSAVDKTQLGMQQLIQHSSANSRQRGQSSGGTTRNQDELPPXMPHDMXGQGQQQQQXVSFA

SEQ ID NO: 7698 - protein, 579 aa, Zea mays
  unsure (1)..(579): unsure at all Xaa locations
  Clone ID: TF_ZmC2191_1.pep
MSSAAGGGYGAAGGAEHQHLLLGQASGQLYHVPQHSRREKLRFPPDPADSPPPTAWPAPPPFYSYASSSTSSYSPHSPTLAHTQLVAHALPAGAGAQIPSQNFALSLSSASSNPPPAPRRQLAAGVAAGPYGPFTGYAAVLGRSRFLGPAQKLLEEICDVGGRPPHLDRRSDDEGMLDMDAAGGVDHEMDGGDSCATAEAGXPVSGAEQQWRKTRLISLMDDVCRRYKQYYQQLQSVISSFETVAGLSNAAPFAFMALRTMSKHFKCLKGMVMSQLRNTSKVIANHGIIAKDDMANFALMGGGAGLLRGNSVNAFSQPHNIWRPQRGLPERAVSVLRSWLFEHFLHPYPTDSDKQMLAKQTGLTRNQVSNWFINARVRLWKPMVEEIHNLEMRQLHKTTSVDQNQLGMQQQNHHSSDGSGRPSSDPSNSQRGQSSGMTRNLSSRAPRHIQDDELSQMPHDMAGQVSFAYSGLPPAHHGLALSHHHHPQQAQAEAVGVGGVAASSGGGVSLTLGLHQNNNNNNRAYIAEPLPAALPLSLPHRFGLEDVSDAYVMGPFGGQDRHFSKGIGGGHNLLHDFVG

SEQ ID NO: 7699 - protein, 93 aa, Zea mays
  Clone ID: TF_LIB3067-032-F8-R1A.pep
DAWTDAWADAWADAWALAESTGLEQKQINNWFINQRKRHWKPSEEMQFAVMDGFHPAPPNAAAFYVDARLVGATPAMFYARPDHGAHHGLWHN

SEQ ID NO: 7700 - protein, 215 aa, Zea mays
  Clone ID: TF_LIB5117-049-A1-PF1-F11.pep
RAGTTDPTRRSMEMTVNGRDTEHHHHLGLALGLGLGLSLGMSGTTSPVEPAAPQTAAAPSSKLGLGQQSWNGAGLFFPASSGEQRSHADDRRLAALACHEMPFLRGIDVNRAPTTGGARGSCGASEDEEPGASSPDSTLSSLSGKRGAPTRSAGGEQERTGAGSDDEDDSGAGGGGSRKKLRLSKDQSAVLEDSFKEHSTLKPKQKAALARQLGL

SEQ ID NO: 7701 - protein, 146 aa, Zea mays
  Clone ID: TF_LIB3066-028-Q1-K1-E9.pep
PRVRPRVRPRVRSLRSAKRCSRRAPAREQNNEHTQSEQLHGSASEQQAREQLHGSVSKQQTEVLRSNVSSGDASKCHFGPIVTQKLKEHFEKDPYPCRATKEGLAQELGLTFNQISKWFSATHHYSRDAVAKNQKYPGENTTENNS

SEQ ID NO: 7702 - protein, 759 aa, Zea mays
  unsure (1)..(759): unsure at all Xaa locations
  Clone ID: TF_ZmC1775_3.pep
PAWPGEKVFPEAASIANGSKQVDTSDLLPDHIKHSDNPALVEGLMVNEVRLSAEDDSKGDGDFDPSGPDSSEDQKDGLNSEESDFTSDSDDFCAEIAKSCGQDEVSASPLSNVINHTYRMKLRASNNRSNEENHDHVFMDMELGQDMVLPVSSRRQVERLDYKKLYDEAYGKESSNSSDDKEWSGKELLEGXETDSLSERPHPVKRCSRXAQAEQQNNEHTPQSEQLHGSASEQQAREQLHGSVSKQQTEVLRSNVSSGDASKCHFGPIVTQKLKEHFEKDPYPCRATKEGLAQELGLTFNQISKWFSATHHYSRDAVAKNQKYPGENTTENNSSTIFDGIQVIEPNFGLIDKPDADTNDMISEKLMVQINLNEGIEEDIPPSQYTTRCEEKLTMTQAAISREAGPPGYGPGENFLQVSSRITSCEQSVIMAPSAIARGVGPPGYTPGEHQGNGAPWNTSYERRPFTSPATSSREVGPPGYGPEENQGSGISCNTSREQILFMSPTTISRELGPPGYLPRENQRSDTSWNTSCESGLFMSPATTSIEHGPPGYGPGENQENDSTSCELRMFTSPTIVSREVGPPGYQQGVFMSPKTISREVCPPGFGSGENQGNDTTWYKQSAFTSPTTISREVGPPGYGQEDQGNGGSWNTSCEQGVFTSPTRGISREVGPPGYGPGESQGNTTSWISTCQQRMLAGIQRTGGSRSMDLEAFPPGYGPGGASGSVISPQARSAENVEFSDEARKKAIQRELRRRQKFR

SEQ ID NO: 7703 - protein, 145 aa, Zea mays
  Clone ID: TF_LIB3067-036-Q1-K1-B12.pep
SNGMASSPSPFFPPNFLLQMRQTPSDHDPQEHHHLPAPPLHLHHNPFLPSSQCPSLQDFRGMAPMLRKRPTMYCGADDVGVGGEEANCGATNEDEVSDDGSLQAGGPGEKKRRLNVEQVRTLEKNFELGNKLEPERKLQLARALG

SEQ ID NO: 7704 - protein, 134 aa, Zea mays
  Clone ID: TF_ZmC115778_1.pep
KRLKLRPRQVEVLFQNRRARSKLKQTEVDCEYLKRWCEKLAQENRRLQREVADLRRLCSAAYPFYGAAAGFGVATARVCPSSCDNDVSEAAISGAPSAAAPPPSTLFASWPPHFGPFTVVVPPLLRRQPSATTS

SEQ ID NO: 7705 - protein, 616 aa, Zea mays
  Clone ID: TF_700221310_FLI.pep
YFLIKIKLEQNLLDAYSGDGWNGQSREKIKPEKELQRARKQIIKCKIAIRDIIRQLDLYTSTGSVDDPLMPTDQSTNPEHTMCSTCKSHESFPSNKIIFCKGPCKRACHEKCLEPPLNKSVLPTSSHGWLCKFCLCKVRILETINAHLGTSFTVKCHFEDIFKETTELIDSEDALDEDWLSEYSGDEDYDPDENEASGDCMDSGEKIMSDDSNGSGSPLYSPNDDIPDFISADLNVVEGFCHTNLDLGIDAVEDDFAQILTYQRPRRDVDYRRLNEEMFGKITGNEEQSEDEDWGHERRKKRTHSGVAGDNSVGFLNVISDEKSQKKGRKLFRIPPAAVEVLRRAFAENELPPRDVKENLSRELGISFEKIDKWFKNTRCAALRDRKAEGNSHNTAPSKSSKNKGKAGISGKTGRNGHVTGPCNNLRTNEEKTGISGKFDSGDNSCLVPFSEVINVPTRLPHNFEMRKMESTRSPARLHNKGGCLSATIQIKESTLLPTGKPCWQSEMSHPTTNEVSTSAQATTWIDAGACAEEQEPTPWVDIGASDYQPFLDVIDDMCGLEWRLQRLKENMLSSSIDGQTAASESDKRNQTVVLVPTAELKEKLPHDGLFGHYCP

SEQ ID NO: 7706 - protein, 721 aa, Zea mays
  unsure (1)..(721): unsure at all Xaa locations
  Clone ID: TF_ZmC1207_1.pep
MHSSENKLGWNETSMGLVPVPKRPARPDASHQCKSDSFMKRSPRKVRNATLAKSIKSKYHYSPLKQRKGSDSVPGKIVTGLTARKKKKRKIQITDEATRLERRARYFLIKIKLEQNLLDAYSGDGWNGQSREXINLERELQRDRKLIIKCKIAKREIIXPIDGHEEMLIIDGSLMTREQTTNPEHTMCSTCKSHESFPSNKIIFCKGPCKRACHEKCLEPPLNKSVLPTSSHGWLCKFCLCKVRILETINAHLGTSFTVKCHFEDIFKETTELIDSEDALDEDWLSEYSGDEDYDPDENEASGDCMDSGEKIMSDDSNGSGSPLYSPNDDIPDFISADLNVVEGFCHTNLDLGIDAVEDDFAQILTYQRPRRDVDYRRLNEEMFGKITGNEEQSEDEDWGHERRKKRTHSGVAGDNSVGFLNVISDEKSQKKGRKLFRIPPAAVEVLRRAFAENELPPRDVKENLSRELGISFEKIDKWFKNTRCAALRDRKAEGNSHNTAPSKSSKNKGKAGISGKTGRNGHVTGPCNNLRTNEEKTGISGKFDSGDNSCLVPFSEVINVPTRLPHNFEMRKMESTRSPARLHNKGGFLSATVQIKESTLLPTGKPCWQSEMSHPTTNEVSTSAQATTWIDAGACAEEQEPTPWVDIGVSDYQPFLDVIDDMCGLEWRLQRLKENMLSSSIDGQTAASESDKRNQTVVLVPTAELKEKLPHDGLFGHYCP

SEQ ID NO: 7707 - protein, 554 aa, Zea mays
  Clone ID: TF_ZmC295_2.pep
MAAYYHGGAGTDIQASTDGLQTLYLMNPSYAGGYADDGGASTPGAANMMLLNSAVTTMTPASFAHHHQQQSPPAAQQHFVGIPLQVQAPPPSGYNLWTPAMAGGAADMSPQAQAQTPGAAGAAGVSAVLSLSSREAPPVTVAAVAACTDEGKYLGVSATPQGQMVMSSKYLKAAQELLDEVVSVSKGVEDAKTAAAAATKSLAAVKKKEDSEGASGGGTDDGAGAKSGGGAAPEMSTAERQEMQMKKSKLLNMLDEVEQRYRQYHGQMQAVSSSFEAAAGAGSARTYTALALRTISRQFRCLRDAIASQVRAASRALGEDADAAVAGGRTVGSRLRYIDHQLRQQRALQQLGMMQGGAWRPQRGLPERSVSILRAWLFEHFLHPYPKDSDKIMLAKQTGLTRSQVSNWFINARVRLWKPMVEEMYLEETKDQDAGGGGNDEGKSGGGGSKSSDTVDGVMPRADVMSKSAVRVGGGGAGAESASTNKGIHGSSLLELGGGDHQQSHAGFYDDDEDDGDDVMGRRLKKARGNEPAPAFHHVHDIATLHAQAAAAAD

SEQ ID NO: 7708 - protein, 192 aa, Zea mays
  unsure (1)..(192): unsure at all Xaa locations
  Clone ID: TF_ZmC106001_4.pep
RPQRGLPXRSVNILRSWLFEHFLHPYPSDADKHLLARQTGLSRNQVSNWFINARVRLWKPMIEEMYQQECRELDGSSAGGGGPESVNDPSGADDSHSPTTTGAAQLPQQQHHLGTVPGVMPHKPDPGAAGPSAADAAFVGIDPVELLGGGADDLYGRFEPGVRVRYGPAAAGAAAGDVSLTLGLQHAGAGNA

SEQ ID NO: 7709 - protein, 289 aa, Zea mays
  unsure (1)..(289): unsure at all Xaa locations
  Clone ID: TF_ZmC11178_2.pep
MEQEEVGLALGLSLGSGHHHQELKPQHPSHPCAALLEPSLSLGSPATKDDGPTAPVRRFAAVKRELQTMEGNDDEATGRVLVYSVASSAVVTADDDEGCNSSRKKLRLSKEQSALLEDHFKEHSTLNPKQKAALARQLNLSPRQXEVWFQNRRARTKLKQTEVDCEILKRCCETLTEENRRLHRELQQLRAFFMPTAAAAALSIWSSSALLPPEHLPPPEPPPVQKISLRRAAPAAERHTCSALSPILPPAEHAYICIYMHAHTYIRMWCLALAASHALSFIDGHLLAR

SEQ ID NO: 7710 - protein, 132 aa, Zea mays
  Clone ID: TF_LIB4735-005-R1-K1-G6.pep
QRRVRGDGNDGSDGMGFGPLILTEGERSLVERVRKELKNELKQGYKEKLVDIREEIMRKRRAGKLPGDTASVLKAWWQAHSKWPYPTEDDKARLVQETGLQLKQINNWFINQRKRNWHSNPTSSAEKTKKKR

SEQ ID NO: 7711 - protein, 208 aa, Zea mays
  unsure (1)..(208): unsure at all Xaa locations
  Clone ID: TF_ZmC1104_1.pep
GGPSGGEELDLFMTHYVLLLCSSXVRPRVRQHVRVHAMEAVMGCWELEQSLQSLTGASPGEGTGATMSDDEDNQVDSEANMFDGNDGSDGMGFGPLMLTEGERSLVERVRQELKNELKQGYKEKLVDIREEIMRKRRAGKLPGDTASVLKAWWQAHSKWPYPTEDDKARLVQETGLQLKQINNWFINQRKRNWHSNPTSSGEKTKKKR

SEQ ID NO: 7712 - protein, 183 aa, Zea mays
  Clone ID: TF_ZmC1104_2.pep
KEQLQQHVRVHAMEAVMGCWELEQSLQSLTGASPGEGTGGTMSDDEDNQVDSEANMFDGNDGSDGMGFGPLILTEGERSLVERVRKELKNELKQGYKEKLVDIREEIMRKRRAGKLPGDTASVLKAWWQAHSKWPYPTEDDKARLVQETGLQLKQINNWFINQRKRNWHSNPTSSAEKTKKKR

SEQ ID NO: 7713 - protein, 84 aa, Zea mays
  unsure (1)..(84): unsure at all Xaa locations
  Clone ID: TF_ZmC1104_4.pep
LVDIREEXMRKRRAGKLPGDTASVLKAWWQAHSKWPYPTEDDKARLVQETGLQLKQINNWFINQRKRNWHSNPTSSAEKTKKKR

SEQ ID NO: 7714 - protein, 477 aa, Zea mays
  Clone ID: TF_ZmC895_1.pep
QHQSDSDDNNSHYLPSSLHRSVSWRRLVLLKTMATFFSTSTNQRDLAGGGGDMSSFHHYAYSDPPAGGLMPFPATIVSSEGHVAHGGDDGGRGAFVDVNARDGPTGGAEMGLQTQLLMANAASAVQHQGLSLSLGTQGVPVSLYQYRQAQAGMAAAAFLSPDQASAAASRSAQSIYVQNSRYLKAARELLDEVVNVQDAIKRKGDKSQQGKDSGGGGGGGEGKDAETSDEKAGEHEGNSSAPELSPSERQDLQNKVSALMALLDQVDRKYRHYHHQMQMVMSSFDAVAGAGAARPYTALALQTISRHFRSLRDAVGAQVQSLRRSLGEKDGSAQGGGLPRLRYIDQQLRQQRAMQQFGMMQQPQHAWRPQRGLPESAVSVLRAWLFEHFLHPYPKDSEKLMLARQTGLSRGQVSNWFINARVRLWKPMIEEMYREEFGAEMDSHSSSENAAGNKGKDEAISSEDHEEFQSPSSAAAA

SEQ ID NO: 7715 - protein, 246 aa, Zea mays
  unsure (1)..(246): unsure at all Xaa locations
  Clone ID: TF_LIB4757-069-Q1-K1-F12.pep
CFRKKLGEDDDASGKEGKLIRLRYIDQQIRQQRAFQQYGMLQQNAWRPQRGLPENSVSILRAWLFEHFLHPYPKDSEKLMLSRQTGLTRSQISNWFINARVRLWKPMIEDMYKEEIGEAELDSNSSSDNVQPNKDKPPSSEEKDHKTSTSQVCQTSQLGESKANIGGVVSFCGAPAGGFHNDANPDDSFMSLMLKAQRPGETDGSGLLHDAVAHHSDESARFMAXHLTEFGRYGNNNVSLTLGLQH

SEQ ID NO: 7716 - protein, 641 aa, Zea mays
  Clone ID: TF_ZmC352_1.pep
MATYYSSPGSERDSQTMYSAESGNVSYPVPSALGNFLYTNNASSGPYTEFSGIVQPQQNFMELTGHPSAMSHDSSSNEATNMGSSLTEQRSFGPLKDMRNEMLMHLMDGAHSSGSDLIHNDAHSTVQLEFGMLNNHNSTSVPLAPGQGLSLSLNTHILAPSYPHWSAKQDLLTPNSYQGDDNRMKNMQSEASQAIRNSKYLKAAQELLDEIVSVWKSVKQKTDKGPSEAGKSYRWKTDGGTKSEGVSFDPQESGANTAAELSTAEKQELQNKMAKLMTMLDEVDRKYKHYYHRMQLVMSSFDMVAGAGAAKPYTAVALQTISRHFRCLKDAINDQISVIRKKLGEDDNTSGKEGKLTRLRYIDQQIRQQRAFQQYGMLQQNAWRPQRGLPENSVSILRAWLFEHFLHPYPKDSEKLMLSRQTGLTRSQISNWFINARVRLWKPMIEDMYKEEIGEAELDSNSSSDNVQRNKDKAPSSEENEDHKTSTSQVCQTSQLGESKANIGGVMSFSGAPAGGFHNDANPDDSFMSLMLKAQRPGETDGSGLLHDAVAHHSDESARFMAYHLTEFGRYGNNNVSLTLGLQHAENTQPGFPGVRDQDIYNSTAPLNVTSTSSEYDSASQIDQQQRQRFEVSPLMHDFVA

SEQ ID NO: 7717 - protein, 176 aa, Zea mays
  Clone ID: TF_ZmC114837_1.pep
MAKGGGAPRLRVIDQCLRQHRAYQTGVVLESQPWRPQRGLPERAVSILRAWMFERWGGPYPSDVDKHILARQTGLSRSQVSNWFINARVRLWKPMVEEMYSEEMKDPKEGACSNANSSVNTGAGYASEELGQPLGHGGACGGVDEQKPTRAQLVHDAGSLASVVSIGSSRDQQQIS

SEQ ID NO: 7718 - protein, 264 aa, Zea mays
  Clone ID: TF_ZmC32595_1.pep
RQLLKGEIAVHPLCEQLVAAHVGCLRVATPIDHLPLIDAQLAQSSGLLHSYAAHHRPFLSPHDKHDLDSFLAQYLMLLCSFREQLQQHVRVHAVEAVMACREIEQSLQDLTGATLEEGTGATMSEDEDEAPMLEVGLDMGSDGHDMMGFGPLMPTDSERSLMERVRQELKMELKQGFKSRIEDVREEILRKRRAGKLPGDTTSILKQWWQEHSKWPYPTEDDKAKLVEETGLQLKQINNWFINQRKRNWHNNSQTSTLKSKRKR

SEQ ID NO: 7719 - protein, 553 aa, Zea mays
  Clone ID: TF_ZmC13862_1.pep
MAHDPSLGFADYFSAAAAAAAAGATAMDDDVGASELYGLHADDMEFLGMRGLAAMPPAAAHHQHHHHHGHSKAGALLDDDDAGVGPDVSGSADDATMRFLSEQQQQQQHQAPLSLSLCRPDVTTTLHEQHHLAGGGSSSRYHQEQQPAAWVQQQQHDYSPSPQIQAMDALELQRLKDKLYIMLEEVDRRYRRYCEQMRALAGGFEAVAGERAAAAYTALASRTISRHFRSLRDGVVAQLQAARRALGEKDVAVPGMTRGDTPRLRVLDQCIRQHKALTQAAGMMESHPWRPQRGLPERAVTILRAWLFEHFLHPYPSDVDKHILARQTGLSRSQVSNWFINARVRLWKPMVEEMYVEEMKAEGQQDGGGQQQAGVANNPNPSSAAHAHASEAAEDDGRGDSGGAAAVVDRKPTRAQLLHDAGSLASVVNIGGGSRAGFGIMDHLDFDAYGGHHAGAVSLTLGLQQHDSHADTGGVNIAFGAPPPAHHHGYLFAPTTAAAGHQMGAGVHPGIHHHVQFSGAGAGIDGGEAAHGQEHYRGLQGGGGFHLLRDLAG

SEQ ID NO: 7720 - protein, 316 aa, Zea mays
  Clone ID: TF_ZmC2618_1.pep
MAFNYHDHALAMDPAAAAAVGAAANPSFVSGGGMAGGPGWEREKAAIAAHPLYERLLEAHVACLRVATPVDQLPRIDAQIAARPPPMEAAAAAAAAGGAHSGGEELDLFMTHYVLLLCSFKEQLQQHVRVHAMEAVMACWELEQTLQSLTGASPGEGTGATMSDDEDNQVDSESNMFDGNEGSDGMGFGPLMLTEGERSLVERVRQELKHELKQGYRDKLVDIREEILRKRRAGKLPGDTASTLKAWWQAHSKWPYPTEEDKARLVQETGLQLKQINNWFINQRKRNWHNNSASSSSDKSKRKRNTAGDGNAEPAW

SEQ ID NO: 7721 - protein, 87 aa, Zea mays
  unsure (1)..(87): unsure at all Xaa locations
  Clone ID: TF_ZmC32595_2.pep
PGQDRXVREEILRKRRAGKLPGDTTSILKQWWQQHSKWPYPTEDDKARLVEETGLQLKQINNWFINQRKRNWHNNSQTSTLKSKRKR

SEQ ID NO: 7722 - protein, 158 aa, Zea mays
  unsure (1)..(158): unsure at all Xaa locations
  Clone ID: TF_ZmC105851_1.pep
ANKLEPXRKAQLARALGLQPRQVAIWFQNRRARWKTKQLEKDYDALRRQLDAARAENDALLSHNKKLQTEIMALKGGGGGRQEAASELINLNVKETEASCSNRSSDENSSEINLDISRPPRAADESPAAMDSYRGIPFYACARADDVDQLQLLHSGGH

SEQ ID NO: 7723 - protein, 248 aa, Zea mays
  Clone ID: TF_ZmC311845_1.pep
QVLDEFVIRLLQDVAGFAGGGEASCPLPSSSYCSKTTSSNPNPSVFVSSEEHHNELKNDFQKLLQIMDQRCKQCLDEIQNAASKYGSLVRPGGGGGALSTLFAQRAVSATHRRLRARITGEIAAATRGGNQPSSSSSLSLADRERSWESAFIQKHWALRQLRRGDQQSWRPQRGLPEKSVAVLKAWMFENFLRPYPRDKEKEMLAARSGLSRSQVSNWFINARVRLWKPMIEEMYEDLKKASAGIMEA

SEQ ID NO: 7724 - protein, 264 aa, Zea mays
  Clone ID: TF_ZmC74_263.pep
MALSCRYPKDSEKLMLARQTGLTRSQISNWFINARVRLWKPMIEDMYKEETGDIEQDSNSSSDNAPAGSKAKTASSRDKEDHLARSCCTPRAVCESSSQLSEPPGGASMRAMSVAAAAAGAPMGLFQNEPGHDHDHDDSFMSLMLKEQRPNDGGGGLLLHHSAVAQHQDENARFMAYHLAELGRYGNGNVSLTLGLQRSSSSLSVPHAQQSFPGVGIGVGDDDIYNATAAPLGVSVASPDYESMSQMDQRQRFEQSPLLHDFVA

SEQ ID NO: 7725 - protein, 356 aa, Zea mays
  Clone ID: TF_ZmC30025_1.pep
MVMAKQQHDKGLPKQARNEPAPFRLEQCCRCDDAHRQADDESMDAAGSAGPLHLTLGPLGSAAGPRCSCGVAPAPAPALAAPATVAVLRGSRYMRPAQELLGEVVRVADLAAADDEDEDQATERLEGGGHRAARRAAGNDGDGVQAKLLYLLSELESRRERYFGELERVVSSFEPALGGGAAAAYTTLMARAMGRHFGNLRRAILRRLRLQAAAAARRSLRRGGEDQDDDDDDDGDSDGEVTEELVDRLARRTKLAAAARAEQAWRPLRGLPDGSVAVLRAWLFDHFLHPYPNDGEKLRLAVTTGLSRRQISNWFINARVRLWKPMIEEMYKDEFSDGSAVSSYDDASASGASSSS

SEQ ID NO: 7726 - protein, 377 aa, Zea mays
  Clone ID: TF_ZmC352_3.pep
KLMTMLDEVDRKYKHYYHQMQLVMSSFNMVAGAGAAKPYTAVALQTISRHFRCLKDAINDQISVIRKKLGEDDNTSGKEGKLTRLRYIDQQIRQQRAFQQYGMLQQNAWRPQRGLPENSVSILRAWLFEHFPLPYPKDSEKLMLSRQTGLTRSQISNWFINARVRLWKPMIEDMYKEEIGEAELDSNSSSDNGQRNKDKAPSPEENEDLQTPTSQACQTSQLGQSKAIVGGVMGFSGVLAGGFHTEANPDDSFMSLMLKAQRPGETEGTGLLHDAVAHHSDDGARFMAYHLAEFGRYGNSSNVSLTLGLQHAENSLAVPPNTQPGFPGVRDQDMYNATAPPLNVASTSSEYDSASQIDQQQQRQRFEPSPLMHDFVA

SEQ ID NO: 7727 - protein, 278 aa, Zea mays
  Clone ID: TF_ZmC352_4.pep
QLKAWIWLLITRALAVKEIHKQCTQQSHAFVFLHPYPKDSEKLMLSRQTGLTRSQISNWFINARVRLWKPMIEDMYKEEIGEAELDSNSSSDNGQRNKDKAPSPEENEDLQTPTSQACQTSQLGESKAIVGGVMGFSGVLAGGFHTEANPDDSFMSLMLKAQRPGETEGTGLLHDAVAHHSDDGARFMAYHLAEFGRYGNSSNVSLTLGLQHAENSLAVPPNTQPGFPGVRDQDMYNATAPPLNVASTSSEYDSASQIDQQQQRQRFEPSPLMHDFVA

SEQ ID NO: 7728 - protein, 282 aa, Zea mays
  unsure (1)..(282): unsure at all Xaa locations
  Clone ID: TF_ZmC437205_1.pep
SRPAEFGTRPTRIAATTPHDILQPQPHSTGPAPQTTGGRGHLPASFSGHHRRPCKTCTDEAYLLIRRRGHGVLAVPHQVVDAHAVEHQLLPPQVPGRRGVLLIRLAPAARRSTSLRASRRGGGAYIQTRAPPLVGGAADGRRKRPFQLTAHDELQLQLQLQLDDELCGLDYELHGPQQERTTKRRLTAEQVRELELSFEEEKRKLEPERKSELXARRLGIAPRQVAVWFQNRRARWRSKQLEQDFDRLRAAHDDLIAGRDALLADNDRLRSQVITLTEKLQT

SEQ ID NO: 7729 - protein, 148 aa, Zea mays
  Clone ID: TF_UC-ZMFLMO17002E04_FLI.pep
PAGVLFVFEQKQKIALAKQLKLRPRQVEVWFQNRRARTKLKQTEVDCELLKRCCESLSEENRRLQRELQELRALKLAGPHPQAPSSSPAAATQGVPVPQLPMLPAATLSLCPSCERLRGGPAAPKAEPDRPQAANHRFFNPFTHSAAC

SEQ ID NO: 7730 - protein, 295 aa, Zea mays
  Clone ID: TF_ZmC2618_2.pep
MAFNYHDHALAMDPANPSFVSGGGMAGGPGWEREKAAIAAHPLYERLLEAHVACLRVATPVDQLPRIDAQIAARPPPMEAAAAAAAHEGAHSGGEELDLFMTHYVLLLCSFKEQLQQHVRVHAMEAVMACWELEQTLQSLTGASPGEGTGATMSDDEDNQVDSESNMFDGNEGSDGMGFGPLMLTEGERSLVERVRQELKHELKQGYRDKLVDIREEILRKRRAGKLPGDTASTLKAWWQAHSKWPYPTEEDKARLVQETGLQLKQINNWFINQRKGNWHNNSASSSSDKSKRKR

SEQ ID NO: 7731 - protein, 224 aa, Zea mays
  Clone ID: TF_ZmC32182_1.pep
HFLHPYPTDGDKQMLAKQTGLTRNQVSNWFINARVRLWKPMVEEIHNLEMRQVHKHPVLDKGQHVLHHQTQHSFESSGKPSDPSDSQLGQSSSITRNHNIPASQGFADELSEMSHSIQQGQVTFAYNGMSAPHHSLASSQHHQQAGPMSGIGGAGNGGVSLTLGLHQNNRVCIAEPLPASVPPNLAHRFGLEEVSDPYMMGSFGNQDRHFGKEIGGHLVHDFVG

SEQ ID NO: 7732 - protein, 197 aa, Zea mays
  Clone ID: TF_ZmC1389_7.pep
FDLGGGRWVGGWLTKVVSVSALQKQKAALASRLGLRARQVEVWFQNRRARTKLKQTEVDCEYLRRWCEQLAEENRRLGKEVAELRALSAAPAPAAPLTALTMCLSCRRVSSSSCSSSPPNTHAHAAAAGTGRSVAAAAATTLPAHRQFLCGFRDGGPPDWTADGRVQKGSAAIEFINLSSIDHVLLPCYLSWRQYRP

SEQ ID NO: 7733 - protein, 869 aa, Zea mays
  Clone ID: TF_ZmC354_4.pep
MSTALAVVGGGKDRPSPGGGGAPQVDTGKYVRYTPEQVEALERVYSECPKPSSLRRQQLIRECPILSNIEPKQIKGLACLPLNRVSIVVGRCREKQRKESSRLQTVNRKLSAMNKLLMEENDRLQKQVSRLVFDNGYMKNRLHSPSVATTDTSCESVVTSGQHNQQQNPAVLHPPQRDANNPAGLLAIAEETLAEFMSKATGTAVNWVQMVGMKPGPDSVGIIAVSHNCSGVAARACGLVSLEPTKVAEILKDRASWYRDCRRVDILHVIPTGNGGTIELIYMQTYALTTLAEPRDFWTLRYTSGLDDGSLVICERSLTHSTGGPSGPKTPDFIRAEVLPSGYLIRPCDGGGSMIYIVDHVDLNACSVPEVLRPLYESPKILAQKMTAAALRHIRQIAHESSGETPYGAGRQPAVLRTFSQRLSRGFNDAVSGFPDDGWSSLLSSDGAEDISITINSSPNKLIGSDVSPSPFFSAMGGGIMCAKASMLLQNVPPALLVRFLREHRSEWADPGVDAYSAASLRANPYNVPGLRAGGFMGNQVILPLARTVEHEECLEVIRLQGHGFSHDEVLMSPDMFLLQLCSGIDEDAPGACAQLVFAPIDESFADDAPLLPSGFRVIPLDAKTDVPSATRTLDLASALEVGSGGGLCALSDSGSGTRSTRSVLTIAFQFSFENHLRESVAAMARQYVRAVMAIVQRVAMAISPSRLGPHVELKHPPGSPEALALASWIGRSYRAHTGTEIRWSDTEDAAGSPLTLFWKHSDAIICCSLKPAFTLKFANSAGFDILETTVANVQDLQLEAVLDDGGQKALVAQLPKIMLQGLAYLPGGVCRSSMGRQASYEQAVAWKVVGDDGAPQCLALMFVNWTFI

SEQ ID NO: 7734 - protein, 84 aa, Zea mays
  unsure (1)..(84): unsure at all Xaa locations
  Clone ID: TF_uC-zmflteosinte017a09a1.pep
LHYKWPYPSETKKMALAETTGLAPKQITNWFINHRKRHWKXXSKYMPFAMMEGGFHVAQGTAALYMDRPAPPFMADGGMYRLGS

SEQ ID NO: 7735 - protein, 196 aa, Zea mays
  Clone ID: TF_ZmC13584_1.pep
MEVPRLPQGALPSMALPRPSPQSTPRSRAHLPAIKVVTPDEDGRESPHGGPGPSDSSGAGARKKLRLTNEQSTLLEDTFRAHNILSNAQKQELGRQVDLSARQVHIVFCVYVVVSSSILFVGKTLIGIFPAISLIGDIIIVGIFYFIGFALFCLEAFLNMWVIQLLHPSDQFRREPGEPCTCGVVHLESDTIIEYD

SEQ ID NO: 7736 - protein, 147 aa, Zea mays
  Clone ID: TF_ZmC1202393_1.pep
MESSDDGGSGPAAGSPGPPSAPAAVGGASSAPGASGSGGKPPVKRVMKTPYQLEVLERTYAEDSYPNETKRAELSVQLNLTDRQLQMWFCHRRLKDRKPPAKRQLRDEEVSVPVIGPPPPVLPPPLPPSEMMVGTVGTYGEQLLPVF

SEQ ID NO: 7737 - protein, 1579 aa, Zea mays
  unsure (1)..(1579): unsure at all Xaa locations
  Clone ID: TF_ZmC1775_1.pep
HTNPQARSAESEVSPSKRYPLRSAHSSGRVLRSALANNNKDSEPLNAAAATQATVKERSGNQLDSPNSTVRLLRSTSNIKDEAHSGPLNDRIIDKPAANKRKRANPSQVGSPSSSVRVLRSAIKNKDMARSEPQSDRTAGEAATNKRKNANSSKVGSLSSGLSVLRSASKAKDETCIKPLNDSPAVEPASSKRKCTSPSKVGSPSNSVRVLRSTSKYKNETCTEPLNDSGAVEPAANKRKGVSRSKEGSPNSSVRVLRSASNNKIDVSIEPLNNSTTGQPAAKRKKKNSSFKSSARVLCSTSERKNEASSEPLNDSTAAQPAARKKKGGAMPKTDNPKIGVRVLRSASGKKNETCTEPVNRSTSREPTVTKKRNCKPSKDRGPKKDYLKICQRIKYILNRMKYEQAFIQAYASEGWKGQSLEKIRPEKELERAKAEILQCKLRIREAFRNMDSLLSKGKLEESLFDSAGEISSEDIFCAVCGSKDVTLQNDIILCDGACDRGFHQNCLSPPLLTEEIPPGDQGWLCPACVCKADSIDALNELQGSKLSIHDSWVKVFPEAASTANGSKQVDASDLLPDHIKDSDNPALVEGLMVNEIRISEEDDSKADDLGLPSEDSGDGDFDPSGPDSSEDQNDGLNSEESDFTSDSDDFCAEIAKSCGQDEVSASPLSNVINHTDRMKLRAXNRRSNEENHDHAFMDMELGQDIVLPVASRRQVERLDYKKLYDEAYEEESSNSSDEEEWSGKELLEGSGTDSLDEPSSCKRLSRRAPAGQQNNELTPQSRPHGSNSEQKTEVLRSNGSSSTGRKYDPEVTQKLKVHFEKDPYPSRETKENLSEELGLTFNQVSKWFSSTRHYSRVASAKKEMHPDSHTCENNDETTVDSMQAKQPNAGVMEKLTGDRNDIVSEKPMVQDNLNQGAMEKLTRDRNDIVPEKQVMQSSLNQCNNEDIPLSGTEIEMESYEQESSESSDEEWSTLSTPRKTKLQDHGKSSVTESLRSAKRCSRRAPAREQNNERIQSEQLHGSASEQQTEFLRSNVSSGKVSKYHFGPIVSQKLKEHFEKDPYPCRATKESLAQELGLTFNQISKWFSGTRHYSRDAVAKNQKRPGENTTVNNNSTTFDDIQVIEPNVGLIDKPAADVNDMISEKLMVQINLNEGIEEDIPPSQYARCEEKITMTPAAISREAGLPGYGPGXNFLQVSSRNTSCEQSVIMAPSAIAREVGPPGYATGENQGNGAPWNTSYERRLFMNPVTSSRAVSPPGYGPEESRGSGISWNTSSEQILFMSPTTISRELGPPGYGPREDQCSGTSWNASCELGVFMSPVTTSREDSPPGYGPRENQENDNMRCELRMFTSPTTISREVGPPGYELTGKNKGNGASCTTNYQQGAFTSPEAFPREACPPGFVSGENQGNDTPWYMSSKQMAFTSPTTNPRVGPPGYGQENQGSRVSWNTSYEQGVFMSSTNISREAGPPGYGPGESQGNITSWISTGGQRMFTGPSTIPNEVGQQGYGPSGIPGTDGSRSMDLKAFPPGYGPAGENQGGGASGSVISPQARSAENVEFSDDARKKAIQRELRRRQKFR

SEQ ID NO: 7738 - protein, 373 aa, Zea mays
  Clone ID: TF_ZmC508_4.pep
MTPARRMPAMIGRNNGVAFGSSSALSLSQVIIPADFLDSHHLQQAFEQQLFEQIPSTAVDSSDNIIHGRSDALVDEFESKSCSENPDGTASGDDGQGDEDPNQRPNKKKRYHRHTQHQIEEMEAFFKECPHPDDKQRKELSRELGLEPLQVKFCSQNKRTQMKNQHERQENAQLRAENDKLRAENMRYKEALGTASCPSCGGPAALGEMSFDEHHLRLENARLRDEIDRISGIAAKHVGKPMVSFPVLSSPLAAAAAAARSPLDLAGAYGVQSAAAGLGADHVLFGAGAGDLLRSVSAGQLDADKPMIVELAVAAMDELLRMARPDALLWGGGASAGAQQQQLDEEEYVRTFPAGLGPRQYGLRPEASRDSAV

SEQ ID NO: 7739 - protein, 185 aa, Zea mays
  Clone ID: TF_LIB3591-095-Q6-K6-G2.pep
GSERSWSERRACVAMDGAEDDGTEWMMHGAGGKGKGGGALDKNKKRFSDEQTKSLESMFATQAKLEPRQKLQLARELGLQPRQVAIWFQNKRARWKSKQLEREYSALRDDYHALLCSYESLKDEKRALLKQVRDQDDANKAHASCMPSIDLPCISRSFVRSRTALHAPHADLYICMLELRRSCIY

SEQ ID NO: 7740 - protein, 211 aa, Zea mays
  unsure (1)..(211): unsure at all Xaa locations
  Clone ID: TF_ZmC254_1.pep
GSERSWSERRACVAMDGAEDDGTEWMMHGAGGKGKGGGALDKNKKRFSDEQTKSLESMFATQAKLEPRQKLQLARELGLQPRQVAIWFQNKRARWKSKQLEREYSALRDDYHALLCSYESLKDEKRALLKQLEKLAEMLHEPPQGKYYGGNADDVRSGGVGGTKEEEESTDACAGAALYSSDSTPAAAGXSSSAEQTCSGSQWWELESLSE

SEQ ID NO: 7741 - protein, 344 aa, Zea mays
  Clone ID: TF_ZmC3817_2.pep
MRPMASNGMASSPSPFFPPNFLLQMQQTPSDHDPQEHHHLPAPPLHLHHNPFLPSSQCPSLQDFRGMAPMLRKRPTMYCGADDVGVGGEEANCGATNEDEVSDDGSLQAGGPGEKKRRLNVEQVRTLEKNFELGNKLEAERKLQLARALGLQPRQVAIWFQNRRARWKTKQLEKDYDALRRQLDAVKADNDALLSHNKKLQAEILALKGREAAGGSSELINLNKETEASCSNRSEDSSEINLDISRTPPASEGPMDHPPPPPPHHAAGGGLIPFYPSVGGRHSIAAGVGMDQLLHASTPKLEQHGDGCAVAVQAAETAGSFGNLLCGVDETPPFWPWADHHHFH

SEQ ID NO: 7742 - protein, 349 aa, Zea mays
  unsure (1)..(349): unsure at all Xaa locations
  Clone ID: TF_ZmC3817_3.pep
MRPMASNGIASSLSPFFPPNFLLQMQQTPSDHDPQEHHHLPAPPLHLHHNPFLPSSQCPSLQDFRGMAPMLRKRPTMYCGADDVGVGGEEASCGATNEDEVSDDGSLQAVGPGEKKRRLNVEQVRTLEKNFELGNKLEAERKLQLARALGLQPRQVAIWFQNRRARWKTKQLEKDYDALRPQLDANICTLIYTNSQRLINRSLLMHAXILALKGREAAGGSSELINLNKETEASCSNRSEDSSEINLDISRTPPASEGPMDHPPPPPPHHAAGGGLIPFYPSVGGRHSIAAGVGMDQLLHASTPKLEQHGDGCAVAVQAAETAGSFGNLLCGVDETPPFWPWADHHHFH

SEQ ID NO: 7743 - protein, 132 aa, Zea mays
  Clone ID: TF_LIB4172-024-R1-L1-A4.pep
MSTALAVVGGGKDRPSPGGGGAPQVDTGKYVRYTPEQVEALERVYSECPKPSSLRRQQLIRECPILSNIEPKQIKVWFQNRRCREKQRKEASRLQTVNRKLTAMNKLLMEEDDRLQKQVSRLVYENGYMRQQ

SEQ ID NO: 7744 - protein, 166 aa, Zea mays
  unsure (1)..(166): unsure at all Xaa locations
  Clone ID: TF_LIB4739-120-Q1-K1-C7.pep
MSTALAVVGGGKDRPSPGGGGAPQVDTGKYVRYTPEQVEALERVYSECPKPSSLRRQQLIRECPILSNIEPKQIKVWFQNRRCREKQRKEASRLQTVNRKLTAMNKLLMEENDRLQKQVSRLVYENGYMRQQLHNPSAATTDXXCESVVTSGQHHQQQNTAAPASS

SEQ ID NO: 7745 - protein, 178 aa, Zea mays
  Clone ID: TF_ZmC102447_1.pep
PSPPSSTPPFFVPVPVHWLVMGATSPSGLELTMAVPGLSSSSGSEGFVCNNNISNNGGGNMRDLDMNQPASGGEEEDFLMGGVEEDEEERGAGGPHRPKKLRLSKEQSRLLEESFRLNHTLSPKQKEALAIKLKLRPRQVEVWFQNRRARTKLKHTEMECEYLKRCFGSLTEENRRLQ

SEQ ID NO: 7746 - protein, 235 aa, Zea mays
  Clone ID: TF_ZmC8754_1.pep
MERGDCQFTVVPPRQYDEAQFMHQLMVAGDQQDPAGAGRGAAAAGGERKRRFTEEQVRSLETTFHARRAKLEPREKAELARELGLQPRQVAIWFQNKRARWRSKQLEHDYAALRAQFDAMHARVESLRQEKIALAAQVDELRGRLNERQDQSGSCEVNDAEAAADDKRNNSTSSLVQDDGATPPPAAVDASEDSAATGEYYDHVAYEYDGLHDPFVCATPDLWDTWPLLEWNAVA

SEQ ID NO: 7747 - protein, 235 aa, Zea mays
  Clone ID: TF_ZmC8754_2.pep
MERGDCQFTVVPPRQYDEAQFMHQLMVAGDQQDPAGAGRGAAAAGGERKRRFTEEQVRSLETTFHARRAKLEPREKAELARELGLQPRQVAIWFQNKRARWRSKQLEHDYAALRAQFDAMHARVESLRQEKIALAAQVDELRGRLNERQDQSGSCEVNDAEAAADDKRNNSTSSLVQDDGATPPPAAVDASEDSAATGEYYDHVAYEYDGLRDPFVCATPDLWDTWPLLEWNAVA

SEQ ID NO: 7748 - protein, 171 aa, Zea mays
  Clone ID: TF_LIB4172-013-Q1-L1-G12.pep
MMSYLKQPPYAVNGLSLTTSGMDLLHPSVGYPGPWASCPAATPRKQRRERTTFTRAQLDVLEALFAKTRYPDIFMREEVALKINLPESRVQVWFKNRRAKCRQQQQQQQNGGQNKVRPAKKKSSPAREVSSESGTSGQFTPPSSTSVPTIASSSAPVSIWSPASISPLSDP

SEQ ID NO: 7749 - protein, 692 aa, Zea mays
  Clone ID: TF_ZmC260_66.pep
MEKKTVHVPAEGNGEIENGTSSSQNPETLEHPVLLSASQTVPNNLGIRKNYKRAANRGKKGSQGLTGQAYTLRSSDIDVRVLRSTSGSKTTSTEHVQPPGQPAAKRRKRSRASNKNSTDEFSQIRKRVRYILNRMNYEQSLIEAYASEGWKNQSLDKIRPEKELERAKSEILRCKLRIREVFQNIDSLLSKGKIDESLFDSEGEISCEDIFCATCGSKNATLGNDIILCDGACDRGFHQNCLNPPLRTEDIPMGDEGWLCPACDCKLDCIDLINELQGSDISIEDPWEKVFPEAAAMTNGSKQDEAFDLPSDDSDDNDFDPNMPEEHVASKEEGSSEEEEDDDGGSDSDDSDFLTCSDDLEPLIDKKKVDDLGLPSEDSEDDDYDPAGPDSDKDVEKKSNSDESDFTSDSDDFCKEIKKSGGHDEVSSPPLPDVRVGDMEKNTAQSNTTSSADDPMETEIDQSVVLPVSRRRQAERLDYKRLYDEAYGEASSDSSDEEEWSGKNTPIKSNEEGEVGSPAGKGSRVAHHNELTTQNTKESLHSLHGSVDEKHGDLTSNGSNIKDRKGHFGPVISQKLHEHFKTQPYPSRSLKESLAEELGLTFHQVNRWFENRRHFARLASSRKGISPDKHSPQNTNSPVTPSMQPKEPEGTVMEESNVCINRDATISKKAVSSKVGSRKNLSKSSPKSRVKS

SEQ ID NO: 7750 - protein, 291 aa, Zea mays
  unsure (1)..(291): unsure at all Xaa locations
  Clone ID: TF_ZmC26143_1.pep
QRPPFYTSPDELLEEEYYDEXAXPEKKRRLTPEQVHLLERSFEEENKLEPERKTELARKLGLQPRQVAVWFQNRRARWKTKQLERDFDRLKASFDALRADHDALLQDNHRLRSQVVSLTEKLREKEATEGDANGAAAALPAVGVVRASVADDVEEPEPEPEPEAEAAAFEERQVKSEDRLSTGSGGSAVVDAADALLYNGRIGGAAVDSSVESYFPGAEVQDQYHGCGTMGPVTHGAGGIQSDDDDGAGSDEGCSYYADEEAAAAFLSEHTHHADGDDEDAGQVSWWWMWN

SEQ ID NO: 7751 - protein, 217 aa, Zea mays
  Clone ID: TF_ZmC894_2.pep
MESGRLIFNAPGSGAGQMLFLDCGAGGGPGGGLFHRGGRPMLGLEEGRGVKRPFYTSPDELLEEEYYDEQLPEKKRRLTPEQVHLLERSFEEENKLEPERKTELARKLGLQPRQVAVWFQNRRARWKTKQLERDFDRLKASFDALRADHDALLQDNHRLRSQVVSLTEKLREKEATEWRRQCRAAAALPAVGVVRASRVTDDVENPGGVRAAGEATG

SEQ ID NO: 7752 - protein, 239 aa, Zea mays
  Clone ID: TF_ZmC11791_1.pep
MGCEEEERLLFPSFVFPESFAEAATPGSGGEQKKARQRRRRKPRPAEGGEGADEQARKRRLSDDQARFLELSFRKERKLETPRKVQLAAELGLDAKQVAVWFQNRRARHKSKLMEEEFSKLRAAHDAVVLHNCHLETELLKMKDRLAEVEEEKTKLVAAAAAAAGGAAGAGSSSPSSSSFSTVTHHPAAALQVGQFGVEPEEAADLAYMTEYAYNSYMNMMDLAPAYFGGVVYDYDHFN

SEQ ID NO: 7753 - protein, 163 aa, Zea mays
  Clone ID: TF_ZmC1389_8.pep
MPLLLPAKRTTEVTGEDGLRGGSDEEDGGCGIDGSRKKLRLSKDQSAVLEDSFREHPTLNPRQKAALAQQLGLRPRQVEVWFQNRRARTKLKQTEVDCEYLKRCCETLTEENRRLQKEVQELRALKLVSPHLYMHMSPPTTLTMCPSCERVSSSNGNSAAATA

SEQ ID NO: 7754 - protein, 797 aa, Zea mays
  unsure (1)..(797): unsure at all Xaa locations
  Clone ID: TF_ZmC508_1.pep
MTPARRVPPAAMIGRNGFAFGSSSALSLSQADLLDSHQLQQAFQQQLFDQIPTTTTVDDSSDNLIHGRSDTLVDEFESKSCSENPDGTSGDDGLEEDPNQRPNKKKRYHRHTQHQIQEMEAFFKECPHPDDKQRKELSRELGLEPLQVKFWFQNKRTQMKNQHERHENAQLRAENDKLRAENMRYKEALGTASCPSCGGPAALGEMSFDEHHLRLENARLRDEIDRISGIAAKHVGKPMVSFPVLWGSEDIYQWGVKNAPLDLAGAYGVQSAAAGLGADHLFGAGAGDLLRSVSAGQLDADKPMIVELAVAAMDELLRMARPDALRRVVVASAGTXQQLLVDEEEYVRTFPAGLGPRQYGLRPEASRDSAVVIMTCDSLIEILMDANRFAAVFSSIVSRASTHEVLSTGVAGSYNGALQVMSMEFQVPSPLVPTRESYFVRYCKNNPDGTWAVVDVSLDSLRPSPVIKCRRRPSGCLIQEMPNGYSKVTWVEHVEVDDRSVHNLYRPLVNSGLAFGAKRWVGTLDRQCERLASAMASNIPNGDLGVITSIEGRKSMLKLAERMVASFCGGVTASAAHQWTTLSGSGAEDVRVMTRKSVDDPGRPPGIVLNAATSFWLPVPPKRVFDFLRDETSRSEWDILSNGGAVQEMAHIANGRDHGNCVSLLRVNSANSNQSNMLILQESCTDASGSYVVYAPVDVVAMNVVLNGGDPDYVALLPSGFAILPDGPPPAGAAPSHGEGLDAGGGGSLLTVAFQILVDSVPTAKLSLGSVATVNSLIACTVERIKAAVCAEAGNPQ

SEQ ID NO: 7755 - protein, 63 aa, Zea mays
  Clone ID: TF_ZmC62880_1.pep
MYLYVLPGSEQTKARQLSDGQARKRRLSDGQARFLELSFGKERKLETPRKVQLAAELGLDAKQ

SEQ ID NO: 7756 - protein, 300 aa, Zea mays
  Clone ID: TF_ZmC1455_2.pep
MEDLYSIHPGISRHGAAATSEASGVAGGPGSPPPPPPPAADLTELVKAQIAGHPRYPSLLSAYIDCRKVGAPSEVATLLEEIGRERCAAASAGGEVVGMDPELDEFMETYCRLLERYKEELSRPLDEAASFLSNVRTQLSSLCGGAASLSDENEMVESSENEPCSGDTDATTDPGQEHSSRLADRELKEMLLKKYSGCLSRLRSEFLKKRKKGKLPKDARSALMDWWNTHYRWPYPTEEDKVRLAAMTGLDPKQINNWFINQRKRHWKPSEDMRFALMEGGVAGSSSGTTLYFDTGTIGP

SEQ ID NO: 7757 - protein, 298 aa, Zea mays
  Clone ID: TF_ZmC1455_3.pep
MEDLYSIHPGISRHGAAATSEASGVAGGPGSPPPPPPPAADLTELVKAQIAGHPRYPSLLSAYIDCRKVGAPSEVATLLEEIGRERCAAASAGGEVVGMDPELDEFMETYCRLLERYKEELSRPFDEAASFLSSVRTQLSSLCGGAASLSDEMVESSEDEPCSGDTDATTDPGQEHSSRLADRELKEMLLKKYSGCLSRLRSEFLKKRKKGKLPKDARSALMDWWNTHYRWPYPTEEDKVRLAAMTGLDPKQINNWFINQRKRHWKPSEDMRFALMEGGVSGSSSGTTLYFDTGTIGP

SEQ ID NO: 7758 - protein, 298 aa, Zea mays
  Clone ID: TF_ZmC1455_4.pep
MEDLYSIHPGISRAGGAATSEASGVAGGPGSPPPPPPPAADLTELVKAQIAGHPRYPSLLSAYIDCRKVGAPSEVATLLEEIGRERCAAASAGGEVVGMDPELDEFMETYCRLLERYKEELSRPLDEAASFLSNVRTQLSSLCGGAASLSDEMVESSEDEPCSGDTDATTDPGQEHSSRLADRELKEMLLKKYSGCLSRLRSEFLKKRKKGKLPKDARSALMDWWNTHYRWPYPTEEDKVRLAAMTGLDPKQINNWFINQRKRHWKPSEDMRFALMEGGVAGSSSGTTLYFDTGTIGP

SEQ ID NO: 7759 - protein, 292 aa, Zea mays
  Clone ID: TF_ZmC1389_6.pep
MAQEDVHLDDAGLALGLSLGSGSGGASGAARHGGISRRLSREVRLPSPHPLEPSLTLSLPDEATATGSGGGGAAHSVSSLSVAGVKRERVDDAEGERASSTAALPRACAGAEDDDDDGSTRKKLRLTKEQSALLEDRFKEHSTLNPKQKVALAKQLKLRPRQVEVWFQNRRARTKLKQTEVDCELLKRCCESLTEENRRLQRELQELRALKFAPHPQAPPSSATQAGAAAGVVPAPPPPLYMQMQMPAAATLSLCPSCDRLAGPGAAAKAEPRPKAAATHHFFNPFTHSAAC

SEQ ID NO: 7760 - protein, 121 aa, Zea mays
  Clone ID: TF_ZmC24942_3.pep
MEQYDGLFPPAYVDSSSSLLLVPNANGTAQEERPRARRRRRRAARCGGGGGELDGGGDHKKRRLTDEQVEMLELSFREERKLETGRKVHLAAELGLDLLYVPDYAYADSSVVEWFSLYGLM

SEQ ID NO: 7761 - protein, 222 aa, Zea mays
  Clone ID: TF_ZmC1389_14.pep
MMERVEDLGLSLRLSSSLAFPRTQHVATMLLRAPEKRFLEMPLLLPAKRTTEVTGEDGLRGGSDEEDGGCGIDGSRKKLRLAKDQSAVLEDSFREHPTLNQKQKAALAKQLNLKPRQVEVWFQNRRARTKLKQTEVDCEFLKRCCETLTEENRRLQREVAELRVLKLVAPHHYARMPPPTTLTMCPSCERLASASASADQAGRAGPCWGPLPVFVDGPARRP

SEQ ID NO: 7762 - protein, 269 aa, Zea mays
  Clone ID: TF_ZmC3383_1.pep
MKRPRGATPSLSAMPNHQEDDGYGVVGMEADVDVDVDEEMMACGGGGEKKRRLSSEQVRALERSFEVENKLEPERKARLARDLGLQPRQVAVWFQNRRARWKTKQLERDYSALRQSYDALRHDHDALRRDKDALLAEIKELKAKLGDDEAAASFTSVKAEPAASDGPAPAGVGSSESDSSAVLNDADPPVAEAPAPAPEVQGTLLVAPAGPVAGAAAANHGGVFFHGSFLKVEEDETGLLDDDGPCGGFFAVEQPPAMAWWNEPAEHWN

SEQ ID NO: 7763 - protein, 261 aa, Zea mays
  Clone ID: TF_ZmC3383_2.pep
MKRPRGASPPLAAMTNPNDDGYGVVGMEADADADADEEMMACGGGGEKKRRLSSEQVRALERSFEVENKLEPERKARLARDLGLQPRQVAVWFQNRRARWKTKQLERDYSALRQSYDALRHDHDALRRDKDALLAEIKELKAKLGDEEAAASFTSVKAEPAASDGPPPVGVGSSESDSSAVLNDADPPVAEAPVPEVRGTLLDAPGAVAANHGGVFFHGSFLKVEEDETGLLDDDEPCGGFFSVEQPPPMAWWTEPTEHWN

SEQ ID NO: 7764 - protein, 279 aa, Zea mays
  unsure (1)..(279): unsure at all Xaa locations
  Clone ID: TF_ZmC3383_3.pep
LPASPVLFFLRESIVFGGDVVAERVRRIESSCVFPDDGYGVVGMEADADADADEEMMACGGGGEKKRRLSSEQVRALERSFEVENKLEPERKARLARDLGLQPRQVAVWFQNRRARWKTKQLERDYSALXQSYDALRHDHDALRRDKDALLAEIKELKAKLGDEEAAASFTSVKAEPAASDGPPPVGVGSSESDSSAVLNDADPPVAEAPVPEVPGYSSXRASAPVAANHGGVFFHGSFLKVEEDETGLLDDDEPCGGFFSVEQPPPMAWWTEPTEHWN

SEQ ID NO: 7765 - protein, 175 aa, Zea mays
  Clone ID: TF_LIB3689-215-Q6-K6-D4.pep
MLGLEEGRGVKRPFFTSPDELLEEEYYDEQLPEKKRRLTPEQVLLLERSFEEENKLEPERKTELARKLGLQPRQVAVWFQNRRARWKTKQLERDFDRLKASFDALRADHDALLQDNNRLRSQVVSLTEKLQEKEDATEGGATADTAAPAVDVEASLADDVEEPAEPAATFEVLRV

SEQ ID NO: 7766 - protein, 330 aa, Zea mays
  Clone ID: TF_ZmC894_1.pep
MESGRLIFNAPGSGAGQMLFLDCGAGGGPGGGLFHRGGRPMLGLEEGRGVKRPFFTSPDELLEEEYYDEQLPEKKRRLTPEQVLLLERSFEEENKLEPERKTELARKLGLQPRQVAVWFQNRRARWKTKQLERDFDRLKASFDALRADHDALLQDNNRLRSQVVSLTEKLQEKEDATEGGATADTAAPAVDVEASLADDVEEPAEPAATFEVLQEVKSEDRLSTGSGGSAVVDADALLYGRFAAAVDSSVESYFPGGEDHYHDCGTMGPVNHGAGGGIQSDDDGAGSDEGCSYYADEAAAAAAAFFAGHATHHHADEDEDAGQISWWMWN

SEQ ID NO: 7767 - protein, 368 aa, Zea mays
  Clone ID: TF_ZmC894_5.pep
DFKWATFLASQRKKIDPLLYRPTTFVSRAGHPPLPPRSGRLIFNAPGSGAGQMLFLDCGAGGGPGGGLFHRGGRPMLGLEEGRGVKRPFFTSPDELLEEEYYDEQLPEKKRRLTPEQVLLLERSFEEENKLEPERKTELARKLGLQPRQVAVWFQNRRARWKTKQLERDFDRLKASFDALRADHDALLQDNNRLRSQVVSFVSLTEKLQEKEDATEGGATADTAAPAVDVEASLADDVEEPAEPAATFEVLQEVKSEDRLSTGSGGSAVVDADALLYGRFAAAVDSSVESYFPGGEDHYHDCGTMGPVNHGAGGGIQSDDDGAGSDEGCSYYADEAAAAAAAFFVGHATHHHADEDEDAGQISWWMWN

SEQ ID NO: 7768 - protein, 327 aa, Zea mays
  Clone ID: TF_ZmC1455_6.pep
MEDLYSIHPGISRAGGAATAASEVSGVAGGPGSPPPPPSQPPPPPPADLTELVKAQIAGHPRYPSLLSAYIECRKVGAPPEVATLLEEIGRERCAAASAGGEVGLDPELDEFMEAYCRVLERYKEELSRPFDEAASFLSSVRTQLSSLCGAAASLSAIYYTTANPETTSSFNIALVYEMVGSSEEDEACSGGDTEATEPGQQEHSSRLADHELKEMLLKKYSGCLSRLRSEFLKKRKKGKLPKDARSALMDWWNTHYRWPYPTEEDKVRLAAATGLDPKQINNWFINQRKRHWKPSEDMRFALMEGVTGGGPSSGTTLYFDTGTIGP

SEQ ID NO: 7769 - protein, 146 aa, Zea mays
  Clone ID: TF_ZmC13584_2.pep
MEVPRLPQGALPSMALPRPSPQSTPRSRAHLPAIKVVTPDEDGRGSPHGGPGPSDSSGAGARKKLRLTNEQSTLLEDTFRAHNILSNAQKQELGRQVDLSARQVEVWFQNTHVQITHMFMLMLTPHRTISNVMLYIHFLDMGGIFY

SEQ ID NO: 7770 - protein, 327 aa, Zea mays
  Clone ID: TF_ZmC11178_1.pep
IGGRETRRPTRPSFSFSLSPSWTILSISFLSLHILRRAEAARDTIGKLLQQEIKLSPTQDQKKLCMEQEEVGLALGLSLGSGHHHQELKPQHPSHPCAALLEPSLSLSGPATKDDGPTAPVRRFAAVKRELQTMEGNDDEATGRVLVYSVASSAVVTADDDEGCNSSRKKLRLSKEQSALLEDHFKEHSTLNPKQKAALARQLNLSPRQVEVWFQNRRARTKLKQTEVDCEILKRCCETLTEENRRLHRELQQLRALSHPHPHPAAFFMPTAAAAALSICPSCQRLVATGASAAAATTAGADNKPKAGGPGGRAPHVFSPFTNSAAC

SEQ ID NO: 7771 - protein, 227 aa, Zea mays
  Clone ID: TF_ZmC1389_2.pep
PRLCPSRRCRAAAAAASSSPNNSASSFPTDFSAHGQVAPGADRACSRASDEDDGGSARKKLRLSKEQSAFLEDSFKEHATLNPKQKLALAKQLNLRPRQVEVWFQNRRARTKLKQTEVDCEYLKRCCETLTEENRRLQKELSELRALKTVHPFYMHLPATTLSMCPSCERVASNSAPAPASSPSPATGIAAPAPEQRPSSFAALFSSPLNRPLAAQAQPQPQAPANS

SEQ ID NO: 7772 - protein, 725 aa, Zea mays
  Clone ID: TF_ZmC19193_1.pep
SLVLPSSDPKQGMSFGDLDGGGSKRKKPYNRHAPRQIEQLEAMFKEFHHPDEKQRAQLSRQLGLDPRQVKFWFQNRRTHLKNQLERQENARLKQENDKLRVENLSIREAIRDLVCSCCGGPAVLGELSPEEHQLRLENARLRDELARVCTVTSKFIGKPMSHMELLLAKEPHPITGSSLELAVAVGVGSGVPSSKMPVSTISELAGSTSSSTGTVTTPMVTASLPMVSIVIDKSKFAQLAVSAMNELVKMARMNEPLWIPTIPSPGSPIMETLNFKEYLKAFSPCVGVKPTGFVSEASRESGIVTIDSSAALMEVFMDERRWSDIFYCIVAKASIVEEILPGVAGSRNGALLLMQAELQMLSPRVPIREVTFLRFCKQLAEGAWAVVDVSIDGLQTDQCLDTNTKCRRLPSGCVLQDTPNGCKVTWVEHAEYPEASVHQLYQPLMRSGLALGAGRWLATLQRQCECLAILMSSLAAPEHDSAAVSLEGKWSLLKLARRMMENFCAGMGASSSREWSMLDGLTGSMGKDVRVMVQNSVDEPGVPPGVVLSVATAVWLPVTPERLFNFLRDEELRAEWDILSNGGPMQQVLRITKGQLDGNSVALLRSDHTDSHLNSILILQETCTDRSGAMVVYAPVDFPAMQLVLGGGDSKNVALLPSGFVILPAGSSAGGVGHKSRGSLLTVAFQILVNSQPTAKLTVESVDTVYSLISCTIEKIKAALHCDVC

SEQ ID NO: 7773 - protein, 234 aa, Zea mays
  Clone ID: TF_ZmC24942_1.pep
MEQYDGLFPPAYVDDSSSLLLVPNANGTAQEERPRARRRRRRAARCGGGGGELDGGGDHKKRRLTDEQVEMLELSFREERKLETGRKVHLAAELGLDPKQVAVWFQNRRARHKSKLLEEEFAKLKQAHDAAILHKCHLENEVMRLKDKLVLAEEELTRFRSAGNHAVSGDGGDVMARAVCSGSPSSSFSTGTCQQPGGGGGGGDHLGDDDLLYVPDYAYADSSVVEWFSLYGLM

SEQ ID NO: 7774 - protein, 206 aa, Zea mays
  Clone ID: TF_ZmC24942_2.pep
SAPARPGARRRRRRAARCGGGGGELDGGGDHKKRRLTDEQVEMLELSFREERKLETGRKVHLAAELGLDPKQVAVWFQNRRARHKSKLLEEEFAKLKQAHDAAILHKCHLENEVMRLKDKLVLAEEELTRFRSAGNHAVSGDGGDVMARAVCSGSPSSSFSTGTCQQPGGGGGGGDHLGDDDLLYVPDYAYADSSVVEWFSLYGLM

SEQ ID NO: 7775 - protein, 185 aa, Zea mays
  Clone ID: TF_ZmC24942_4.pep
MEQYDGLFPPAYVDSSSSLLLVPNANGTAQEERPRARRRRRRAARCGGGGGELDGGGDHKKRRLTDEQVEMLELSFREERKLETGRKVHLAAELGLDPKQVAVWFQNRRARHKSKLLEEEFAKLKQAHDAAILHKCHLENEVMRLKDKLVLAEEELTRFRSAGNPRVSGDGGDVMRAVCSGSPSS

SEQ ID NO: 7776 - protein, 166 aa, Zea mays
  Clone ID: TF_ZmC8754_4.pep
DPTDVDRAIDMDRPCHHQHQFFMPPPPQQQQLCVPMMDDPSSFLAEMGIGGGDGPSSSARGERKRRFTEEQIRSLESTFRARHGHAKLEPREKAELARELGLQPRQVAIWFQNKRARWRSKQLEHDYAVLRAKFDDLHARVESLKRDKLALSTQLNELSEKMKDRE

SEQ ID NO: 7777 - protein, 240 aa, Zea mays
  Clone ID: TF_ZmC254_2.pep
GVAMEGDDDGPEWMMEVGGAGATGKGKGGALDKNKKRFSEEQIKSLESMFATQTKLEPRQKLQLARELGLQPRQVAIWFQNKRARWKSKQLEREYSALRDDYDALLCSYESLKKEKHTLLKQLEKLAEMLHEPRGKYSGNADAAGAGDDVRSGVGGMKDEFADAGAAPYSSEGGGKFAHFTDDDVGALFRPSSPQPSAAGFTSSGPPEHQPFQFHSGCWPSSTEQTCSSSQWWEFESLSE

SEQ ID NO: 7778 - protein, 1540 aa, Zea mays
  unsure (1)..(1540): unsure at all Xaa locations
  Clone ID: TF_ZmC1775_2.pep
MGRKGSEMSPSKRYPLRSPHSSGRVLRSALANDNKDSEPLNAAAATQAAVKKRSGSQLDSPNSSVRLFHSTSKNKNEACSGPLNDRIPDKPAANKRKRASPSQVGSSSNSVRVLRSAIKNKDEACSKSLSDRTAGEPAANKRKNVNRSKTGSLSCGVRVLLSASKAKDETSTKPLNDSAAVEPASGKRKGTSPSKVGSASNSVRVLRSTSKYKNETCTEPLNDSGAVEPAANKRKGVSRSKERSLNSSVRVXALASNNKIEVSIKPLGNSTAGQPAAKRRKSGSSFEAGSPVSSARVLRSTSERKNEASKPLNESTAAQPAARKKKXAGVISKTDNPKIGLRVLRSASGKKNEACIGHVNDSTSAEPTVTKRNRKPSMDRSPKKDYLKICQRVRYILNRMNYQQTFIQAYASEGWKGQSLEKIRPEKELERAKAEILQCKLRIREAFRNMDSLLSKGKLEESLFDSAGEISSEDIFCAVCGSKDVTLQNDIILCDGACDRGFHQNCLNPPLLTEDIPPGDQRWLCPACVCKADSIDALNELQGSKLSIHDSWEKVFPEAASIANGSKQVDTSDLLPDHIKHSDNPALVEGLMVDEVRLSAEDDSKADDLRLSSEDSGDGDFDPSGPDSSEDQKDGLNSEESDFTSDSDDFCAEIAKSCGQDEVSASPLSNVINHTYRMKLRASNNRSNEENHDHVFMDMELGQDMVLPVSSRRQVERLDYKKLYDEAYGKESSNSSDDKEWSGKELLEGSETDSLSERPHPVKRCSRRAQAEQQNNEHTPQRERLHGSESEQKTGILRSNGSSSTGRKFGPVATQKLKVHFEKDPYPSRETKENISEELGLTFNQVSRWFSSTRHYSRVASARKEMHPDGHTSENNDTTTVDSMQARQPNTVVMEKLTGNRNDIVSEKPMVQNNLNQGVAEKLTRDRNDIVPEKQVVQSNLNQCNNEDIPLSGTEIEMESYEQESSESSDEEWSTLSTPRKTKLQGNEKVSLTESLRSAKRCSRRAPAREQNNEHTQSEQLHGSVSKQQTEVLRSNVSSGDASKCHFGPIVTQKLKEHFEKDPYPCRATKEGLAQELGLTFNQISKWFSATHHYSRDAVAKNQKYPGENTTENNSSTIFDGIQVIEPNFGLIDKPDADTNDMISEKLMVQINLNEGIEEDIPPSQYTTRCEEKLTMTQAAISREAGPPGYGPGENFLQVSSRITSCEQSVIMAPSAIARGVGPPGYTPGEHQGNGAPWNTSYERRPFTSPATSSREVGPPGYGPEENQGSGISCNTSREQILFMSPTTISRELGPPGYLPRENQRSDTSWNTSCESGLFMSPATTSIEHGPPGYGPGENQENDSTSCELRMFTSPTIVSREVGPPGYQQGVFMSPKTISREVCPPGFGSGENQGNDTTWYKQSAFTSPTTISREVGPPGYGQEDQGNGGSWNTSCEQGVFTSPTRGISREVGPPGYGPGESQGNTTSWISTCQQRMLAGIQRTGGSRSMDLEAFPPGYGPGGASGSVISPQARSAENVEFSDEARKKAIQRELRRRQKFR

SEQ ID NO: 7779 - protein, 129 aa, Zea mays
  unsure (1)..(129): unsure at all Xaa locations
  Clone ID: TF_LIB4744-009-R1-K1-B9.pep
MKRQSKRPTASRDSPETGTVDKQLALAESLTARKTEPDELGEKKRRLAPDQVRALERCFEADNRLDPDRKARVARDLALNPRQVAVWFQNRRARWKAKALHRDFAALRARHDALXXDKDALAAEIRELR

SEQ ID NO: 7780 - protein, 154 aa, Zea mays
  Clone ID: TF_LIB3960-010-Q1-K6-B2.pep
MASSRGRLRLSPRAAAAPQLDAGKYVRYTAEQVEALERAYGECPKPSSLRRQQLIRDCPVLTNVEPRQIKVWFQNRRCREKQRRESSRLQTVNRKLGAMNKLLMEENDRLQKQVSRLVFDNGYMKNRLHSPSVATTDTSCESVVTSGQHNKQQQ

SEQ ID NO: 7781 - protein, 247 aa, Zea mays
  Clone ID: TF_LIB5117-048-A1-PF1-F5.pep
MTRHRPWPPSHPPPPHPLPLRVVAAAPQATGSGAGKKMARLSPGAAAPQVDTGKYVRYTPEQVEALERVYNECPKPSSLRRQQIIRDCPILCNIEPKQIKVWFQNRRCREKQRKESSRMQTVNRKLTAMNKLLMEENDRLQKQVSRLVYENASVKSLKTKIHKASAATTDTSCESVVTSGQQQALAAPRPQRDANNPAGLLAIGEETLTAFLSKATGTAVEWVQMMGMKPGPDSWESSLFAQLYWRT

SEQ ID NO: 7782 - protein, 856 aa, Zea mays
  unsure (1)..(856): unsure at all Xaa locations
  Clone ID: TF_ZmC354_1.pep
MASAMVVFGGGKDRPSPGGGGAPQVDAGKYVRYTPEQVEALERVYGECPKPSSLRRQQLIRDCPILSNIEPKQIKVWFQNRRCREKQRKEASRLQTVNRKLTAMNKLLMEENDRLQKQVSRLVYDNGYMKKQLHSPSAATTDTSCESVVTSGQHHQQQNPAAXSPQRDANNPAGLLAIAEETLAEFMSKATGTAVDWVQMVGMKPGPDSIGIIAVSHNCSGVAARACGLVSLEPTKVAEILKDRPSWYRDCRCVDILHVIPTGNGGTIELIYMQTYAPSTLAAPRDFWTLRYTSGLEDGSLVICERSLTQSTGGPSGPNTPNFVRAEVLPSGYLIRPCEGGGSMIHIVDHVDLDAWSVPEVLRPLYESPKILAQKTTIAALRHIRQIAHESSGEMPYGGGRQPAVLRTFSQRLSRGFNDAVNGFPDDGWSLMSSDGAEDVTIAINSSPNKLIGPHVNSSQLFTAIGGGILCAKASMLLQNVPPALLVRFLREHRSEWADPGVDAYSAAALRASPYAVPGLRASGFMGSQVILPLAHTLEHEEFLEVIRLEGHSLCHDEVVLSRDMYLLQLCSGVDENAAGACAQLVFAPIDESFADDAPLLPSGFRVIPLDAKTDPPSGTRTLDLASTLEVGSGGTTRASSDASSTCNTRSVLTIAFQFSYENHLRESVAAMARQYVRTVVASVQRVAMAIAPSRIGGQLEMKQTPGSPEAHTLARWIGRSYRFHTGAELLRTDTQCTDASLKALWQHSDSIMCCSLKAAPVFTFANQAGLDMLETTLIALQDISLEKILDDDGRKALCTEYPKIMQQGFAYLPGGVCVSSMGRPVSYEQAVAWKVLSDDDTPHCLAFMFVNWSFV

SEQ ID NO: 7783 - protein, 86 aa, Zea mays
  Clone ID: TF_uC-zmflteosinte108d01b1.pep
MVLVRKGKGGASLDKNKKGFIDEQTTSLEAMFATQAMLEPRQKLQLAQELGLQPRHEVMWFQNKRARLKSKLLERKHSALRDDYHA

SEQ ID NO: 7784 - protein, 295 aa, Zea mays
  Clone ID: TF_ZmC1455_1.pep
MEDLYSIHPGISRVVGGAASEASVAGAGAGGPSPSDLTELMKAQIASHPRYPSLLSAYIECRKVGAHPHVTSLLEEVSRERRPDAGAGEIGVDPELDEFMDAYCRVLVRYKEELTRPFDEAASFLSSIQAQLSDLCSGGSSPAATATHSDDMMGSSEDEQCSGDTDVPDMGQEHSSHLGDHELKEMLLKKYSGCLSRLRSEFLKKRKKGKLPKDARTVLLEWWNTHYRWPYPTEEDKVRLAAMTGLDPKQINNWFINQRKRHWKPSEDMRFALMEGVAGGSSGTTLYFDTGTIGP

SEQ ID NO: 7785 - protein, 261 aa, Zea mays
  Clone ID: TF_ZmC1389_3.pep
MMPQASASLDLGLSLGLTLTSQGSLSSSTTTAGSSSPWAAALSSVVADVARARGDAYAQHHAGAAMTMRASTSPDSGDTTTAKREREGELERTGSGGVRSDEEDGADGGAGGRKKLRLSKDQAAVLEECFKTHSTLNPKQKVQLANRLGLRPRQVEVWFQNRRARTKLKQTEVDCEYLKRWCDRLADENKRLEKELADLRALKAAPPSSAAAQPASAAATLTMCPSCRRLASASASADQAGRAGPCWGPLPVFVDGPARRP

SEQ ID NO: 7786 - protein, 842 aa, Zea mays
  Clone ID: TF_ZmC12602_1.pep
MVPREIGMFPFMLLPLKFNLVPNSARVQVAKDEDMDQLEMEMELSGGSGSGHLDGLLSFADVDDDRPEQKPQHSGLELQTTADAAGQQQQLATANGKKKRYHRHTAHQIQQMEALFKECPHPDDKQRLKLSQELGLKPRQVKFWFQNRRTQMKAQQDRADNVLLRAENESLKSDNYRLQAAIRNVVCPNCGHAAVLGEMSYEEQQLRIENARLKDELDRLACIATRYGGGRQPSMSSSALVCLSAPPPVLMPPLDLDMNVYSRHFTDQSPVMGCGDLIQSVLGPPSQQITGTAEHHASTPSFMGAMAPVQEQDRQLVLDLLRAFSMTLAKMCRAGESLWLRRRGASSEVMVADEHARMFSWPVNGGQQDSSASPGGAAARTEGSRDGTVVIMNSITLVDAFLDANKWMELFPSILSKARTIQVINHGSASGHMGSGSLLLMQAELQFPSPLVPAREVVFFRYCVHNGDEGTWSLVDFPAEGFQLEALQTPSVVRCCRRPSGCIIQDMPNGYSSVVWVEHTEIVGEEKPLHQVFKDYVASGSAFGATRWVSLLQRQCERLASELARNIADLGVIRTPEARTNMMKLSQRMITSFSANISASGSQSWTSLSETTEDTIRVTTRKNTDPGQPSGVILTAVSTSWLPFNHQKVFELLADEQQRCQLEIMSSGGSLHEVAHIANGSHPKNCISLLRINAASNSSQNVELMLQESSTHPDGGSLVVFATVDVDAIQVTMSGEDPSYIPLLPLGFAIFPAANPSAAATSAAGSGDGQSSPAGNADEPASGCLLTVGMQVLASAVPSAKLNLSSVTAINSHVCNAVHQITAALKGAGAGGAAEPAAAASE

SEQ ID NO: 7787 - protein, 124 aa, Zea mays
  Clone ID: TF_uC-zmrob73033d11b1.pep
LERSFEKETKLEPERKTELARKLGLQPRQVAVWFQNRRARWKPKQLERDFDRLKASLDALRADHDALLQDNHRLRSQVLTSSRPQQPREQSFVPRPRSESEHVADDGGVARLLVLWLVSLRWCR

SEQ ID NO: 7788 - protein, 280 aa, Zea mays
  Clone ID: TF_ZmC1389_5.pep
PTRPLGLQWPPPDGGICHVGRDEAPARGFDVNRAPSVAGSALALEDDEEEPGAAALSSSPNDSAGSFPLDLGGPRAHAEGAAARAGGERSSSRASDEDEGASARKKLRLSKEQSAFLEESFKEHSTLNPKQKAALAKQLNLRPRQVEVWFQNRRARTKLKQTEVDCEYLKRCCETLTEENRRLHKELAELRALKTAPPFFMRLPATTLSMCPSCERVASGPSPASTSAPASSTPPATAATTAISYAAAAAAPVRADHRPSSFAALFAATRSFPLASQPRP

SEQ ID NO: 7789 - protein, 387 aa, Zea mays
  unsure (1)..(387): unsure at all Xaa locations
  Clone ID: TF_ZmC1389_4.pep
SGSAWTTPRASGRRRRPPLRGPVPAPRIRHERQLHRFIHRYLSLFQLQGKPSSKWQPSMDIMALNARDEEQYGNNHLGLGLSLSLGLGVATAAPVEVEPPPPPAAAAAAAAASYQRRAHHLPPRAVVVXWNGPGLFFGTTMDPSLERNQQQQHPAAARHGHEMPFLRGVDVNRAPAGETRRGSCSEDDEEPGGASSSPNSTLSSSLSGKRAAPARSGGEVADHTPRAGGGSDDEDSGGGSRKKLRLSKDQAAVLEESFKEHNTLNPKQKAALAKQLNLKPRQVEVWFQNRRARTKLKQTEVDCEFLKRCCETLTEENRRLQREVAELRVLKLVAPHHYARMPPPTTLTMCPSCERLASASASADQAGRAGPCWGPLPVFVDGPARRP

SEQ ID NO: 7790 - protein, 319 aa, Zea mays
  Clone ID: TF_ZM5012.C1.o5.fg.pep
MDIMALNARDEEQYGNNHLGLGLSLSLGLGVATAAPVEVEPPPPPRQQQQRAISVAPITSLPAPQWWKWNGPGLFFGTTMDQQQQPAAARHGHEMPFLRGVDVNRAPAGDTRRGSCSEDDEEPGGASSSPNSTLSSSLSGKRAAPARSGGEVADHTPRAGGGSDDEDSGGGSRKKLRLSKDQAAVLEESFKEHNTLNPKQKAALAKQLNLKPRQVEVWFQNRRARTKLKQTEVDCEFLKRCCETLTEENRRLQREVAELRVLKLVAPHHYARMPPPTTLTMCPSCERLASASASADQAGRAGPCWGPLPVFVDGPARRP

SEQ ID NO: 7791 - protein, 719 aa, Zea mays
  Clone ID: TF_ZmC260_62.pep
MEKNIAHCPVEGNGEIENGASSSQNPESLEHSVLLSTSQTMPNNLGIRKNYKRAANRGKKGSQGLTGQAYTLMSSNSDVRVLRSTSSSKTTSTEHVQAPVQPAAKRRKMSRASNKSSTDEFSQIRKRVRYILNRMNYEQSLIEAYASEGWKNQSLDKIRPEKELERAKSEILRCKLRIREVFRNIDSLLSKGKIDETLFDSEGEISCEDIFCSTCGSNDATLGNDIILCDGACDRGFHQNCLNPPLRTEDIPMGDEGWLCPACDCKIDCIDLINELHGSNISIEDSWEKVFPDAAAMANDSKQDDAFDLPSDDSDDNDFDPNMPEEHVVGKDEESSEEDEDGGSDSDDSDFLTCSDDSEPLIDKKVDDLRLPSEDSEDDDYDPAGPDSDKDVEKKSSSDESDFTSDSDDFCKEISKSGHDEVSSPLLPDAKVGDMEKITAQAKTTSSADDPMETEIDQGVVLPDSRRRQAERLDYKKLYDEAYGEASSDSSDDEEWSGKNTPIIKSNEEGEANSPAGKGSRVVHHNDELTTQSTKKSLHSIHGSVDEKPGDLTSNGSNSTARKGHFGPVINQKLHEHFKTQPYPSRSVKESLAEELGLTFRQVNKWFETRRHSARVASSRKGISLDKHSPQNTNSQVTASMEPKEPEGTVVEESNVCLNGGTTISKEAVSSKVGSRTPGSDVGGSKVDSAEDQNPGPDLAEKARQKAIQQELRKKKMGR

SEQ ID NO: 7792 - protein, 789 aa, Zea mays
  Clone ID: TF_ZmC1775_4.pep
RCILPSCATTAIGAKYDPEVTQKLKVHFEKDPYPSRETKENLSEELGLTFNQVSKWFSSTRHYSRVASAKKEMHPDSHTCENNDETTVDSMQAKQPNAGVMEKLTGDRNGIVPEKPMVQDNLNQGAMEKLTRDKNDIVPEKPVMQSSLNQCNNEDIPLSGTEIEMESYEQESSDSSDEEWSILSTPRKTRLQDHGKSSVTESLRSAKRCSRRAPAREQNNERIQSEQLHGSASEQQTEFLRSNVSSGKVSKYHFGPIVSQKLKEHFEKDPYPCRATKESLAQELGLTFNQISKWFSGTRHYSRDAVAKNQKRPGENTTVNNNSTTFDDIQVIEPNVGLIDKPAADVNDMISEKLMVQINLNEGIEEDIPPSQYARCEEKITMTPAAISREAGLPGYGPGPGENFLQVSSRNTSCEQSVILAPTAIAREVGPPGYATGENQGNGAPWNTSYERRLFMNPVTSSRAVSPPGYGPEESRGSGISWNTSSEQILFMSPTTISRELGPPGYGPREDQCSGTSWNASCELGVFMSPVTTSREDSPPGYGPRENQENDNMRCELRMFTSPTTISREVGPPGYELTGKNKGNGASCTTNYQQGAFTSPEAFPREACPPGFVSGENQGNDTPWYMSSKQMAFTSPTTNPRVGPPGYGQENQGSRVSWNTSYEQGVFMSSTNISREAGPPGYGPGESQGNITSWISTGGQRMFTGPSTIPNEVGQQGYGPSGIPGTDGSRSMDLKAFPPGYGPAGENQGGGASGSVISPQARSAENVEFSDDARKKAIQRELRRRQKFR

SEQ ID NO: 7793 - protein, 254 aa, Zea mays
  Clone ID: TF_ZmC1389_1.pep
MAPQSLDLGLSLGLGVAAFQPSFCHPAGNDAAEREASPTADERERRCSPAGSPTSSGSGKRVAAERSAGSGSGDEDDDGGARKKLRLSKDQAAVLEECFKTHHTLTPKQKAALASRLGLRARQVEVWFQNRRARTKLKQTEVDCEYLRRWCEQLAEENRRLGKEVAELRALSAAPAPAAPLTALTMCLSCRRVSSSSCSSSPPNTHAHAAAAGTGRSVAAAAATTLPAHRQFLCGFRDGAGRPSIHVYFWACML

SEQ ID NO: 7794 - protein, 344 aa, Zea mays
  Clone ID: TF_ZmC3817_1.pep
MRPMASNGMASAPSPFFPPNFLLQMQQTPSDHEHQEQHHHHHHHEHHLAAPPLHPHHNPFLPSSQCPSLQDFRGMAPIMLGKRPMYGADVQVVGGEEVNGCGGVNEDELSDDGSQAGGEKKRRLNVEQVRTLEKNFELGNKLEPERKLQLARALGLQPRQVAIWFQNRRARWKTKQLEKDYDALKRQLDAVKADNDALLSHNKKLQAEILSLKGREAGGSSELINLNKETEASCSNRSENSSEINLDISRAPASEAPLDPTPPPGAGGGGMIPFYPPSVGGRPASAAGVDIDQLLHTSAPKLEQHGSGGAVVVQAAETASFGNLLCGVDEPPPFWPWADHQHFH

SEQ ID NO: 7795 - protein, 778 aa, Zea mays
  unsure (1)..(778): unsure at all Xaa locations
  Clone ID: TF_ZmC13476_1.pep
MSDFVGSRYTKQEDFHVLLSKKDPGEPPEHKHVLWMAHWTKASSNNGSSNPLEGTTKGTTTKDSETLPYEFTESTVAKRLMVGVSHGSASMQHDRQFNSSVWGMARHISNELGPKNSEHVDGSFEKFVKKDAVNLRARAVVSETYSVHKLSELPLDFQHLGDSDDPSPDWSHFXPQSRLSRPTRMAASHRTAEFDPILNGQAGFHPDNPGPSASHVMALSSQEYMMHSHQTADENMDTCKPAEGFASRVEDHAGFNSDPPGPKLKGQLLDTMSCSCSKDDNNSADCPIDEQHTSHYFANSKHELPSVSNKKKFKFAGNNHNRIVASASHDLKTKRSAVHKQQSAAEAVFCAPVLDSEFQNEPITISNIDKKDGENFHDMYKCLGKAVSCPLLPYEHRHLNTQRTESAENLKVCTLPDHQTANKLTEKSHGELLTYGPKPKKNTGSCNRRSLYLFEKLTIPSKSQSAYPKNSASSGKSSGFGVCMYGTNIGSQLFGAQNQSSSKTETLHSDALIGSKSSAGIASLSAQKDNGCPAPAPAPAPDEAKSEQLAAPSSNTKQGGESAYSKEDGSHNLNEGHDVSSKAAIGSKQPCMPGAGITNLDLILSQMSRMRNQIPSGGVTQPPIGAEPSDRWLKRLQLGVPDPDVPGSKTKRPKVGDSPPPPRQINRSFDVALPCNPGKQEEQSLNGGGKVQGRAPPIPEKSVSRWIGRWCQGGTPVFREGPGQQGRQATKPAGRLSEELEGQFFPSTAAMAMMGRAMHKLRPCEQQQKGPFVVWKID

SEQ ID NO: 7796 - protein, 223 aa, Zea mays
  Clone ID: TF_ZmC3309_1.pep
PDQLNFLFRSSGLRFSNLYCDPLIIPGGHKITARQRWQPTPMQLQILESIFDQGNGTPSKQKIKEITAELSQHGQISETNVYNWFQNRRARSKRKQAAASLPNNAESEAEADEEPLADKKPKSDRPPPPPPPIQDNTKATGALSADRVSGGTRHLDTGHDQTSGVMYGCNDSGLLRSSGSSGQMSLYENFMSNPRIDRFPAKVESSRSFPHLQQHGEGFGMFG

SEQ ID NO: 7797 - protein, 784 aa, Zea mays
  Clone ID: TF_ZmC39640_1.pep
MQFPFTTGFSSSPALSLGLDNAGGGMVGRMLPVGGAPADGGMARDAADAENDSRSGSDHLDAMSAGAGAEDEDDAEPGNPRKRKKRYHRHTPQQIQELEALFKECPHPDEKQRGELSKRLGLDPRQVKFWFQNRRTRMKTQLERHENALLKQENDKLRAENMAIREAMRSPMCGSCGSPAMLGEVSLEEQHLCIENARLKDELNRVYALATKFLGKPMPVLSGPMLQPNLSLPMPSSSLELAVGGLRGLGSIPSLDEFAGGVSSPLGTVITPARATGSAPPPMVGVDRSMLLELAISAMDELVKLAQVDEPLWLPSLSGSPDKKLLNFEEYAHSFPPSVGAVKPVGYVSEASRESGLVIIDNSLALVETLMDVRRWSDMFSCMIAKATVLEEVTSGIAGSRNGALLLMKAELQVLSPLVPIREVTFLRFCKQLAEGAWAVVDVSIDGLVRDHNSGTASNAGNIRCRRLPSGCVMQDTPNGYCKVTWVEYTEYDEASVHQLYRPLIRSGLAFGARRWLAMLQRQCECLAILMSPDTVSANDSSVITQEGKRSMLKLARRMTENFCAGVSASSAREWSKLDGAAGSIGEDVRVMARKSVDEPGEPPGVVLSAATSVWVPVAPEKLFNFLRDEQLRAEWDILSNGGPMQEMANIAKGQEHGNSVSLLRASAMSANQSSMLILQETCTDASGSMVVYAPVDIPAMQLVMNGGDSTYVALLPSGFAILPDGPSSVGAEHKTGGSLLTVAFQILVNSQPTAKLTVESVETVNNLIFCTIKKIKTALQCDA

SEQ ID NO: 7798 - protein, 641 aa, Zea mays
  Clone ID: TF_ZmC354_2.pep
MAAVASRERLSPGAAPQVDAGKYVRYTPEQVEALERVYSECPKPSSLRRQHLIRDCPILRNIEPKQIKVWFQNRRCREKQRKESSRLQTVNRKLSAMNKLLMEENDRLQKQVSRLVFDNGYMKNRLHSPSVATTDTSCESVVTSGQHNQQQNPAVLHPPQRDANNPAGLLAIAEETLAEFMSKATGTAVTGCKWGRGFNDAVSGFPDDGWSCLLNTDGAEDITVTINSSPNKLVGSHVSASPLFSAMGGGIMCAKASMLLQNVPPALLVRFLREHRSEWADPGIDAYSVASLRANPYTVPGLRAGGFMGNQVILPLARTLEHEESLEVIRLEGHGFSHEEVLMSRDMFLLQLCSGVDEDAPGACAQLVFAPIDESFADDAPLLPSGFRVIPLDAKTDVPTATTRTLDLASALEVGSGGSGMRASCDGSGTCATRSVLTIAFQFSFENHLRESVAAMAKQYVRGVMASVQRVAMAIAPSRLGSRIELKHPPGSPEALALATWIGRSYRAHTGTEIRWSDTEGADSPLMLFWKHSDAILCCSLKPPAFTLKFANSAGFDILETTMVNIQDLPLEAVLDEEGQKALSAQLPAIMQQGLAYLPGGVCRSSMGRQASYEQAVAWKVVGDDGAPQCLALMLANWTFI

SEQ ID NO: 7799 - protein, 142 aa, Zea mays
  unsure (1)..(142): unsure at all Xaa locations
  Clone ID: TF_LIB4148-005-Q6-K1-H3.pep
MLPAVVPYKGSLREIDAGPMTSYYREKREGHWPSMAAGVAMDGAEATGRTGMRNGGDRQRKMQRRTRQEQERSYDEQTKSMESMFTTHAKLDPRQKLQLARELCLHPHQVAIWFQNKRSRXKYKRLEREYLALRDDYHAPTL

SEQ ID NO: 7800 - protein, 119 aa, Zea mays
  Clone ID: TF_LIB3245-448-P1-N1-C8.pep
RRFTEEQIPAVESTFRARHGHAKLEPREKAELARELGLQPRQVAIWFQNKRARWRSKQLEHDYAVLRAKFDDLHARVESLRRDKLALSTQLFAWCARVHDQLNELSERLRDREDPAAAG

SEQ ID NO: 7801 - protein, 294 aa, Zea mays
  Clone ID: TF_ZmC17115_1.pep
MKRPTSRGSSMVSGQATTDLQEDSCRSMEPHGVDGDATAAAERDDVDAGAYDEEEDEEEELAGSRGGLGEKKRRLAADQVRALERSFEVDNKLDPERKARIARDLSLHPRQVAVWFQNRRARWKTKQIERDFAALRVRHDALRVECDALRRDKDALAAEIKELRGMVEKQMEVKLESAAEELLPVATRSAAAAAVYNKDGSTDSDSSAVFNEEASPYPYSGAALDHQQQQETSHPLGFTGFTSFLTSSFPSVYHGDSHLDQEADGFFSAAAAGDGFFAEEQSAGIGSWYGGEGW

SEQ ID NO: 7802 - protein, 175 aa, Zea mays
  unsure (1)..(175): unsure at all Xaa locations
  Clone ID: TF_ZmC254_3.pep
VGREAGREGAMEQGEEDGDWMMEPAAGKKGGAMIDRKKRFSEEQIKSLESMFATQTKLEPRQKLQLARELGLQPRQVAIWFQNKRARWKSKQLERQYAALRDDYDALLSSYDQLKKDKQALLNQLEKLAEMLREPGGAKCGDNAGAARRDDVRLAVXGMNMKDEFVDAGGASKLY

SEQ ID NO: 7803 - protein, 285 aa, Zea mays
  Clone ID: TF_ZmC12553_1.pep
RDLDLRHPRIAWLDRTKASAAAAAAAADERAGGAEGLAGYVKVMTDEQMEVLRKQISIYATICEQLVEMHRALTEHQDTIAGELRIRFSNLYCDPQIIPGGHKITARQRWQPTPMQLQILENIFDQGNGTPSKQRIKEITAELSHHGQISETNVYNWFQNRRARSKRKQAASLPNNAESEAEVDEESLTDKKPKSDRSLQDNKAMGAHNADRISGMHHLDTDHDQIGGMMYGCNDNGLRSSGSSGQMSFYGNIMPNPRIDHFPGKVESSRSFSHLQHGEGFDMFG

SEQ ID NO: 7804 - protein, 273 aa, Zea mays
  Clone ID: TF_ZmC12553_2.pep
MEWVDRTKASAAAAAAAADERAGGAEGLAGYVKVMTDEQMEVLRKQISIYATICEQLVEMHRALTEHQDTIAGIRFSNLYCDPQIIPGGHKITARQRWQPTPMQLQILENIFDQGNGTPSKQRIKEITAELSHHGQISETNVYNWFQNRRARSKRKQAASLPNNAESEAEVDEESLTDKKPKSDRSLQDNKAMGAHNADRISGMHHLDTDHDQIGGMMYGCNDNGLRSSGSSGQMSFYGNIMPNPRIDHFPGKVESSRSFSHLQHGEGFDMFG

SEQ ID NO: 7805 - protein, 325 aa, Zea mays
  Clone ID: TF_UC-ZMFLB73016H05_FLI.pep
MSFGGMFDGAGSGVFSYDATGGGTGMHNPGRLVPAPPLPKPGGFGATGLSLGLQTNMEGAQLGDLGRMGLIGGGGSGSGGDGDSLGRGREDEIDSRSGSDNVDGASGDEIDPDNSNPRRKKKRYHRHTPQQIQELEAVFKECPHPDEKQRMELSKRLNLESRQVKFWFQNRRTQMKTQIERHENALLRQENDKLRAENMTIREAMRNPICANCGGAAVLGEVSLEEQHLRIENARLKDELDRVCALAGKFLGRPISSGSSMSSSLQGCSGLELAVGSNNGYGPGPLGASALQPLPDLLGAGLPGPVGSAAMRLPMGIGALDVALH

SEQ ID NO: 7806 - protein, 863 aa, Zea mays
  unsure (1)..(863): unsure at all Xaa locations
  Clone ID: TF_ZmC3271_1.pep
MSFGGMFDGAGSGVFSYDATGGGTGMHNPGRLVPAPPLPKPGGFGATGLSLGLQTNMEGAQLGDLGRMGLIGGGGSGSGGDGDSLGRGREDEIDSRSGSDNVDGASGDEIDPDNSNPRRKKKRYHRHTPQQIQELEAVFKECPHPDEKQRMELSKRLNLESRQVKFWFQNRRTQMKTQIERHENALLRQENDKLRAENMTIREAMRNPICANCGGAAVLGEVSLEEQHLRIENARLKDELDRVCALAGKFLGRPISSGSSMSSSLQGCSGLELGVGSNNGYGLGPLGASALQPLPDLPSSHGGIPDPGEQLRLPMGIGALDVARQQPALLGIDRTVLLELALAAMEELMKVAQMDEPXWLRRPDGSGLEALNLDEYHRAFARVFGPSPTGYVTEATREAGVAITSSVDLVDSLMDAARWSEMFPCIVARASTTDIISSGMGGTRSGSIQLMHAELQVLSPLVPIREVVFLRFCKQHAKGLWAVVDVSVDAILRPDGGHHHAQNGGGAGYMGCRLLPTGCIVQDMNNGYSKVTWVVHAEYDEAVVHQLYRPLLQSGQALGARRWLASLQRQCQYLAILCSNSLPARDHAAITPVGRRSMLKLAQRMTDNFCAGVCASAAQKWRRLDEWRSGEGGDAAGNGGSAAAGEGEEKVRMMARHSVGAPGDPPGVVLSATTSVRLPATSPQRVFDYLRDEQRRGEWDILANGEAMQEMDHIAKGQHHGNAVSLLRPNATSGNQNNMLILQETCTDPSGSLVVYAPVDVQSMHVVMNGGDSAYVSLLPSGFAILPDGHCQSPNTAHQGSPSCGGSSSSSSTGSLVTVAFQILVNNLPTAKLTVESVETVSNLLSCTIQKIKSALQASIVTP

SEQ ID NO: 7807 - protein, 840 aa, Zea mays
  unsure (1)..(840): unsure at all Xaa locations
  Clone ID: TF_ZmC14030_1.pep
MAAAVAMRGGSSDSGGFDKVPGMDSGKYVRYTPEQVEVLERLYIDCPKPSSSRRQQLLRECPILSNIEPKQIKVWFQNRRCRDKQRKESSRLQAVNRKLTAMNKLLMEENERLQKQVSQLVHENAHMRQQLQNTSLANDTSCESNVTTPPNPIRDASNPSGLLAIAEETFTEFLSKATGTAIDWVQMPGMKPGPDSVGIVAISHGCRGVAARACGLVNLEPTKVIEILKDRPSWFRDCRSLEVFTMFPAGNGGTIELIYMQMYAPTTLVPARDFWTLRYTTTMEDGSLVVCERSLTGSGGGPNAASAQQFVRAEMLPSGYLVRPCEGGGSIVHIVDHLDLEAWSVPEVLRPLYESSRVVAQKMTTVALRHLRQIAQETSGEVVYALGRQPAVLRTFSQRLSRGFNDAISGFNDDGWSVMGGDGIEDVVVACNSTKKIRNTSNAGITFGAPGGIICAKASMLLQSVPPAVLVRFLREHRSEWADYNIDVYLASSLKTSACSLPGLRPMRFSGGQMIMPLAHTVENEEILEVVRLEGQPLTHDEALLSRDIHLLQLCTGIDEKSVGSSFQLVFAPIDEHFPDDAPLISSGFRVIPLDMKTDGVSSGRTLDLASSLDVGSAAPQASGDAPPDDCNLRSVLTIAFQFPYEMHLQDSVATMARQYVRSVVSAVQRVSMAISPSQSGLNAGQRMLSGFPEAVTPTIWVWQSYHYHLXAGEALLKMLWHHPNAVLCCSFKEKPMFTFFKEKPMFTFANKAGLDMLETSFIALQDLTLDKIFAESGRKAIFSDISKLMEQGYAYLPSGVCMSGMGRHVSFDQAVAWKVLGEDSSVHCLGLCFVNWSFV

SEQ ID NO: 7808 - protein, 324 aa, Zea mays
  unsure (1)..(324): unsure at all Xaa locations
  Clone ID: TF_ZmC74833_2.pep
QQTSPLTVYASIPQMLVRVVKLLKNPHFMAKPAAIDLIRSIIQAEGASTEQALSSALTSIMDALKSTDWNTRKAASLALSSIAVSSGYLVTSFRTSCLRSLERSKFDKVKPVRDTIIHAIQLWXAIPGSHTPEPSEAGSSTKENYFGDHHDARSIHDGGSRDTSFRRTDHGPSVSVISGSSLSSAKRRSPLSINKVAINNAANLQRMKTGDWRVEVSVPKQSMIPLVNNDEKGSSKACSLKDTKRNAYESVDVDSKFDYDIVDDKQECSSVSEVASRSFETKHVTTAQECTEDCDSAEVTEQCPRGRESKSIGSTLQMLLLMTH

SEQ ID NO: 7809 - protein, 186 aa, Zea mays
  unsure (1)..(186): unsure at all Xaa locations
  Clone ID: TF_LIB4741-079-Q1-K1-H2.pep
MPEVDAPADPHPLEGLLHGPQLPPFLSKTHQLESEPXLHGVISXGAADNSFTGCDPSTFARDGLPHNFQHNHFSTFARXINTYGLRKAHADTRQIAREDLLQDTKHLLKTMVRRRTSPRKQGGVLPGLSSVESSLDPELSRXEREEPLLEEVARVTQEHLLTIDAMNTLNHWLVSAEDRQMXMVSF

SEQ ID NO: 7810 - protein, 138 aa, Zea mays
  Clone ID: TF_LIB4757-078-A1-K1-B1.pep
MDKSMLGDLDGLPEEDKMRMAAMIDQLQIRDRFVPYQRISWAEQGRSFMVWKPVELARDLLPLHFKHYNFSFVRPLTTYVSTSKTPSTIYTTSILLVTEIVAAKSRFKFGSICVAFVYVQSKLMEKKTLASGGVTVAL

SEQ ID NO: 7811 - protein, 102 aa, Zea mays
  Clone ID: TF_LIB3912-037-Q6-K6-D2.pep
TSHMVSDPATHSGGRWGGFHNIFHVLYPDYLLDYLLKYYFKHRYFRSFNRYLNTYGFTNVDTDRHEFVHEWQLRLLALLLPLIKHEENNAGAGARGLGQDLY

SEQ ID NO: 7812 - protein, 132 aa, Zea mays
  Clone ID: TF_ZmC12124_7.pep
MDKPVAPGIIKEELLEQQPPTQDGVGGGGDAPRPMEGLHEVGPPPFLTKTFDLVEDPATDAVLSWSRAGNSFIVWDPHVFADGLLPRLFKHSNFSSFVRQLNTYLDGTRYWMKYQESDCFVLEDSTDHLHML

SEQ ID NO: 7813 - protein, 242 aa, Zea mays
  Clone ID: TF_LIB4705-001-R1-K1-H10.pep
GKLLYYKLYSMLEDSSISHLISWAENGESFVMSPSADFSKVLSQYFKHTNISSFVRQLNMYGFHKERDVFHTGHPESTLWEFKHGNGNFKRGDLLGLREIKRRASRHALVHRENSYAKPSSSHPGTPAEAMPMPPETSESRMTSIEHTLFDLSARLQRSEEAAQYMHVRNSVITDTMGRLLHFNQELSRTVLSLFPSESPHYRDVMALQAGIQKQVDAVRALDEHHEAPYGGRQHYFGAMEN

SEQ ID NO: 7814 - protein, 359 aa, Zea mays
  unsure (1)..(359): unsure at all Xaa locations
  Clone ID: TF_ZmC2162_1.pep
MSHGNGMLNSVKVERWPAAVAANGQPRPMDVLHDGSSPPFLTKTYDMVDDPTTNAVVSWSAANNSFVXWDPHIFGTVLLPRYFKHNNFSSFVRQLNTYGFRKVDPDRWEFANEEFLRGQRHLLKNIRRRKPPHSSPNQQSLGSYLEVGHFGYEEEIDQLKRDKQLLMAEVVKLRQEHQNTRSDLQAMEEKLQDTEQKQQQMMAFMARVMQNPDFMRQLISQREMRKELEDAISKKRRRRIDQGHEAGSMGTGSSLEQGPQGVFEPQEPVESVANGVPSDLESSSVEAKGLEVRQGVSSGGSEHLNGRPSGELNDDFWEDLLHEGGLGADAGNAVGQDDMNMDMDPDVSLPQLKQHGPRH

SEQ ID NO: 7815 - protein, 508 aa, Zea mays
  Clone ID: TF_ZmC3537_2.pep
MHRARPTAHANDPDAPYAAAAAMLLEPKLEDEELPLQQLASPGTFVSLDQLMPPVTAPAEPRPLEALLHGPQLPPFLSKTYDLVNEPSLDGVISWGAAGNSFVVWDPSTFARDVLPHNFKHNNFSSFVRQLNTYGFRKVHADRWEFAHEDFLRDSKHLLKRIVRRRSSPTKQCSVQPGSSSGESSLDPELHTLRREKNALLEEVARLKQEHRQTIEQMSTLNHRLESAEDRQRQMVSFLAKLLQNPSFVRKLKLHREKKEIDSTRVKRKFLKHVPHGSVESGESSSQHAGESGSYFAVSSPMATTTSVHDDITELQNFLLEDDDLNFGMDSENTGLEGTEAPDDIGELIQGFDTQEELDLGSGAELQEMPPASGSLAQDPTIGRFKGKNVLCPGLDATSSEGDCLSPLPDNMGLLSGTMLGTAGSMMAADDEQIWGVDASAALQSSCSGTSQQAFGSHVSDPYLMDIANRPERFWELDFQALDEADLQLDKCAIDDPALQQQPSMKKP

SEQ ID NO: 7816 - protein, 417 aa, Zea mays
  Clone ID: TF_ZmC2340_1.pep
MGFTKRSPQHPASPAGGEVGAQTAGKVTPVPAAPESAPVAVVPRPPDVAPFLTKVYDMVSDPATDAVISWSAGGGSFVIWDSHAFERDLLPRHFKHNHFTSFIRQLNTYGFHKVDPDRWEWANEGFVKGQKHLLKTIKRKKKSSQDVPSDLQSVPVKTAPGTENIEIGKYGGLEKEVETLKRDKALLMQQLVDLRQYQQSSSAEVQNLIQRLRVMEQNQQQMMALLAIVVQNPDFLNQLVQQQRRSNWWNDDGNRKRRFQALEHGPVDDQETSGGGAQIIQYRPPVPETSNQPIPANEAFYSTPAQPASSPALEMPMDVEMTSNNVDTFDSTGNDFTDTSALCEWDDMDIFGDELEHILQQPEQDFQVDPPLTVEDYGYDHPRLEQDCQMEAQQNCKNPQYVACVLKQRESHASDVH

SEQ ID NO: 7817 - protein, 365 aa, Zea mays
  unsure (1)..(365): unsure at all Xaa locations
  Clone ID: TF_ZmC10545_1.pep
GFKKIDPEQWEFANDDFIRGQQHRLKNIHRRKPIFSHSSHTQGSGPLPDTERRDYEEEIERLKCDNAALTSELEKNAQKKLVTEKRMQDLEDKLIFLEDRQKNLMAYVRDIVQAPGSFSSFVQQPDHHGKKRRLPVPISLYQDSNAKGNQVVHGGFITNPPACRESFDKTESSLNSLENFLREASEAFNISYDDGLPXPSSAVVITELHSSGESDPHVPSPVSRMHTSSAGAGDSLSSRDLTESTSCAESPRLPQIQPCTDSRTKVSEIDVNREPAVTETGPTRDQPAEEPPHVAAGVNDGFWQQFLTEQPGPDVHQEAQSERRDGDDDKGDQTRIGDRENFWWGKKNVEQMREKLGRLTSVEKT

SEQ ID NO: 7818 - protein, 133 aa, Zea mays
  Clone ID: TF_LIB5117-035-A1-PF1-F1.pep
MGEQAAAVSSCETPAPAEVGTGVGQRSLPTPFLNKTYQLVDDPAVDDVISWSEDGSAFIVWRPAEFARDLLPKYFKHNNFSSFVRQLNTYGFRKIVPDRWEFANDCFRRGEKRLLCDIHRRKVTPTVSPLHPL

SEQ ID NO: 7819 - protein, 249 aa, Zea mays
  Clone ID: TF_ZmC476_1.pep
MGSECKGYGVGVATSPQQEQEQAGAAVAPFVAKTFHMVSDPATDAVVRWGGASNTFHVLDPATFSDYLLPSYSRVRNFASFVRQLNTYGFRKVDTDRWEFAHESFLRGQARLLPLVVRKRKKAGAGAGAGGRELCEAGEEVRGTIRAVQRLREQQRGVEDELRAMDRRLRAAESRPAQMMAFLAKLADDPGLVLRAMLAKEEELALIDKGSEAQPAKRRRIGAEAVDLAHSRGGGAVPFPFSVLGQVFY

SEQ ID NO: 7820 - protein, 375 aa, Zea mays
  Clone ID: TF_ZmC38206_1.pep
MDSTLNQVKEESHGEGGDLMAGTVEAADGPSAAVAAAPKPMEGLHDPGPPPFLTKTYDMVDDSDTDLIVSWSATNNSFVVWDPHAFATVLLPRHFKHNNFSSFVRQLNTYGFRKVDPDRWEFANEGFLRGQRHLLKNIRRRKPPAQNATNQQSIGPYLEVGHFGYDAEIDMLKRDKQLLMAEVVKLRQEQQNTKANLKAMEDRLQGTEQKQQQMMAFLARVMRNPEFLKHLVSQNEMRKELQDAISKKRRRRIDQGPEADDLGASSSLEQGSPVLFNAQDPVEFLVDGIPADLESPAFDGHGLIGPHDIDIDIDIGSTYEQQQDMPQEDLNDNFWEQLLNEGLGEENDSPVIEDDMNVLSEKMGYLNSDGPTSSN

SEQ ID NO: 7821 - protein, 184 aa, Zea mays
  unsure (1)..(184): unsure at all Xaa locations
  Clone ID: TF_LIB5117-051-A1-PF1-F7.pep
MDPMPTLVKEEEDGHGTGESPGATAASRPVKGLRDARPSLFLTKTYDMVDDRSTDDVVSWSAGNNSLVVWDLHHFSTVLLPRHFKHSNFSSFVKQLNTYGFRKVDPDRWEFANEGFLRXQRHLLKNIRRRRPPANTASNQQSLGSYLEVGHFGXHTDTDQLKRDKQLLMAEVVKAKAEQQSMKT

SEQ ID NO: 7822 - protein, 117 aa, Zea mays
  Clone ID: TF_ZmC12124_3.pep
MDKPVAPGIIKEELMEQQPPMQDGVGGGGDAPRPMEGLHEVGPPPFLTKTFDLVEDPATDAVLSWNSARNSFIVWDPHVFADGLLPRLFKHSNFSSFVRQLNTYVSRQNPNPLLSFL

SEQ ID NO: 7823 - protein, 184 aa, Zea mays
  unsure (1)..(184): unsure at all Xaa locations
  Clone ID: TF_LIB4766-021-Q1-K1-C7.pep
MTPAAGNGSATAAPPPPFLMKTYEVVDDPATDDVISWGPGNNSFIVWNTPEFARDLLPKYFKHSNFSSFVRQLNTYGFRKVDPDRWEFANEGFLRGQKHLLKTINRRKPSLQGNSQPQQPQSQNAPVPSCVEVGKFGLEEEIERLKRDKNVLMQELVRLXTAQQTTDHQLQTLGKRLQGMGVTA

SEQ ID NO: 7824 - protein, 101 aa, Zea mays
  Clone ID: TF_ZmC2162_4.pep
MNHGNGMLNSVKVERWPAAVAANGQPRPMDVLHDGSSPPFLTKTYDMVDDPTTNAVVSWSAANNSFVVWDPHIFGTVLLPRYFKHNNFSSFVRQLNTYVSC

SEQ ID NO: 7825 - protein, 271 aa, Zea mays
  unsure (1)..(271): unsure at all Xaa locations
  Clone ID: TF_LIB4738-034-R1-K1-C9.pep
MTMVDDPTTNAVVSWSAANNSFVVWDPHIFGTVLLPRYFKHNNFSSFVRQLNTYVAVLPCLFLRLWNHARRDDAAVXKGFRKVDPDRWEFANEEFLRGQRHLLKNIRRRKPPHSSPNQQSLGSYLEVGHFGYEEEIDQLKRDKQLLMAEVVKLRQEHQNTRSDLQAMEEKLQDTEQKQQQMMAFMARVMQNPDFMRQLISQRKMRKELEDAISKKRRRRIDQGHEAGSMGTGSSLEQGPQGVFEPQEPVESLANGVPSDLESSSVEAKGLE

SEQ ID NO: 7826 - protein, 371 aa, Zea mays
  Clone ID: TF_ZmC5551_1.pep
MDPFHGIVKEEFDLDFDFTCASAAAAAAASWAVALPEMPRPMEGLGEVGPTPFLTKTYDVVDDPNTDTIVSWGFAGTSFVVWDANAFALVILPRYFKHSNFSSFVRQLNTYGFRKVDPDRWEFANEGFQRGQRELLRTIKRRRPPSSPSAQQGQAPSACLEVGQFGLDGEVHRLQRDRGILLAEVVKLRQEQQATRAQMQAMEKRITTAEQKQQQMTVFLARAMKNPSFIRMLVDREGLGGCRRELEDALSRKRRRPIEYLPRDGERSGTATESAVSDYISGLPVGVNGVAEADDDERRWERRGGGGGGEDTESFWAKLLNLGLEEKHREGRCDGEEGNGADVDNDVDDDVDVLVQSIYHLNPNPGSPGGK

SEQ ID NO: 7827 - protein, 186 aa, Zea mays
  Clone ID: TF_LIB5074-012-R1-XP1-F10.pep
MMTELAPNTIQTDENIPCFIRKTYKILEDGNYSNIICWNNEGTAVVIRNPADFAQNVLPIYFKHNNLNSFIRQLNMYDFHKKKTPDGEHVYFHELFQRDKKHLLRNIKRKSTEYSGGNTEKNKLGQELSRTKQDIATIINENFLLKQINREHLATITNLEAQANEISLKNQAILSQLMKKKKKKGP

SEQ ID NO: 7828 - protein, 212 aa, Zea mays
  Clone ID: TF_ZmC142676_2.pep
MEVAGAREPGSGGGGGGGGGGPAPFLLKTYEMVDDPSGDAVVSWSDASDGSFVVWNQPEFAARMLPTYFKHNNFSSFIRQLNTYGFRKIDPERWEFANEYFVKGQKHLLKNIHRRKPIHSHSHQPGALPDNERALFEDEIDRLSREKAALQADLWKFNQQQSGAVNQLEDLERRVLDMEQRQTKMLSFLQQARKNPQFGRKLVKMAEESPIF

SEQ ID NO: 7829 - protein, 226 aa, Zea mays
  unsure (1)..(226): unsure at all Xaa locations
  Clone ID: TF_ZmC8681_1.pep
AASRHVAAGGGRDGGXGQRSVPTPFLSKTYQLVDDPAVDDIISWNDDGSAFIVWRPAEFARDLLPKYFKHNNFSSFVRQLNTYGFRKIVPDRWEFANDCFRRGEKRLLCDIHRRKVSPATGAVTVAAAAAAAIPMALPVGSPVYSGEEQVLSSSSPEPPSLQQHPPAPSGSGSGGVVSGDVGEENERLRRENARLARELGQMKKLCNNILLLMSKYAATQQPDAAK

SEQ ID NO: 7830 - protein, 294 aa, Zea mays
  unsure (1)..(294): unsure at all Xaa locations
  Clone ID: TF_ZmC142676_1.pep
MEVAGAREPGSGGGGGGGGGGPAPFLLKTYEMVDDPSSDAVVSWSDASDGSFVVWNQPEFAARMLPTYFKHNNFSSFIRQLNTYGFRKIDPERWEFANEYFVKGQKHLLKNIHRRKPIHSHSHQPGALPDNERALFEDEIDRLSREKAALQADLWKFNQQQSGAVNQLEDLERRVLDMEQRQTKMLSFLQQARKNPQFVRKLVKMAEESPIFADAFHKKRRLPGLECITDATGTATSFFDDHSSSSRQEMGNLLNQHFSDKLKLGLCPAXGGNNLITLSTQSSHEDNGSPLGKH

SEQ ID NO: 7831 - protein, 156 aa, Zea mays
  Clone ID: TF_ZmC2234_2.pep
MERCGSWDCDAAAAQKAVPAPFLTKTYQLVDDPATDHIVSWGDDRVSTFVVWRPPEFARDILPNYFKHNNFSSFVRQLNTYGFRKVVPERWEFGNEFFRKGEKQLLCEIHRRKTSTSAAPPSPPPFFAAPHFPLFHPDAPHHHHHHQFVGGGDDGA

SEQ ID NO: 7832 - protein, 204 aa, Zea mays
  unsure (1)..(204): unsure at all Xaa locations
  Clone ID: TF_LIB4743-074-R1-K1-C12.pep
GRAAWLAPPGCRAGHHRCGCGRAAGGGSGXGQRSVPTPFLTKTYQLVDDPAVDDVISWNDDGSAFIVWRPAEFARDLLPKYFKHNNFSSFVRQLNTYGFRKIVPDRWEFANDCFRRGEKRLLCDIHRRKVTPPAAAATVVATIPMALPVDSPVYSGEEQVLSSSSSPEPPSLLQQQPTPSALVSGDLGEENERLWWENAWFARE

SEQ ID NO: 7833 - protein, 116 aa, Zea mays
  Clone ID: TF_LIB3356-009-P1-K1-H1.pep
MVAEQATTTVAVGEPPTATPQPAAAAAAGQRSVPTPFLTKTYQLVDDPAVDDVISWNDDGSAFIVWRPAEFARDLLPKYFKHNNFSSFVRQLNTYGFKKIVPDRWEFANDCFRRGE

SEQ ID NO: 7834 - protein, 159 aa, Zea mays
  Clone ID: TF_ZmC2234_1.pep
MERCGSWDCDAAAAQKAVPAPFLTKTYQLVDDPATDHIVSWGDDRVSTFVVWRPPEFARDILPNYFKHNNFSSFVRQLNTYGFRKVVPERWEFGNEFFRKGEKQLLCEIHRRKTSTSAAPPSPPPFFAAPHFPLFHPDAPHHHHHHQFVGGGDDGAVAA

SEQ ID NO: 7835 - protein, 167 aa, Zea mays
  Clone ID: TF_ZmC3537_1.pep
MHRARPTAHANDPDAPYAAAAMLLEPKLEDEELPLQQLASPGTFVSLDQLMPPVTAPAEPRPLEALLHGPQLPPFLSKTYDLVNEPALDGVISWGAAGNSFVVWDPSTFARDVLPHNFKHNNFSSFVRQLNTYVRTHNSSVPLFLPPHKSTIRRSVVGMLCFGSCPP

SEQ ID NO: 7836 - protein, 182 aa, Zea mays
  Clone ID: TF_ZmC10545_2.pep
MEGGSSLPPFLSKTYEMVDDPATDAVVAWTPLGTSFVVANQAEFCRDLLPKYFKHNNFSSFVRQLNTYGFKKIDPEQWEFANDDFIRGQQHRLKNIHRRKPIFSHSSHTQGSGPLPDTERRDYEEEIERLKCDNAALTSELEKNAQKKLVTEKRMQELEDKLIFLEDRQKNLMAYVRDIGQA

SEQ ID NO: 7837 - protein, 298 aa, Zea mays
  Clone ID: TF_ZmC12537_1.pep
MQLTERCACSSLCDVQGFRKIDPDSWEFANEGFLRGQRHLLRLIKRRRPAPPPPYLQASQSQGSCLEVGRFGGLDGEMERLRRDKSILLAEVVKLRQEQQSTRADMRAMEERLRHAEHKQVQMMGFLARAVQSPDLFQLLAQQQGRRRELEGAALLSAASRKRRRPIGAAPANGGLQQQEEEQQQGDDDDPTATRALFAELDERGTTSELENLALNIQGLGKRRQDGSEKQGGRARSQQQGGFETAELTDDFWEELLNEGMKGGAEAETLPPERRRPAWYVDALAQKLSSMSNNTTAK

SEQ ID NO: 7838 - protein, 146 aa, Zea mays
  Clone ID: TF_ZmC11401_1.pep
MAEQGGAAGEAAGSDPPAPAPATAPAPAPALAADAAGQRSLPTPFLTKTYQLVDDPAVDDVISWNEDGSTFVVWRPAEFARDLLPKYFKHNNFSSFVRQLNTYGFRKMVPDRWEFANDFFRRGEKRLLCDIHRRKVAPAPAAGLAT

SEQ ID NO: 7839 - protein, 327 aa, Zea mays
  unsure (1)..(327): unsure at all Xaa locations
  Clone ID: TF_ZmC1964_1.pep
MAFLVERCGEMVVSMESPHAKPVPAPFLTKKYQLVDDPCTDHIVSWGDDDTTFVVWRPPEFARDLLPNYFKHNNFSSFVRQLNTYGFRKLVXADRWEFANEFFRKGAKHLLAEIHRRKSSQPLPTPLPPHQPYHHHHHHLHHHLSPFSPPPLAQPVPSYHHHFQEEPIATATAPHGGAQAAAGGGNNEGSGAGAGAGGDFLAALSEDNRQLRRRNSLLLSELAHMKKLYNDIIYFLQNHVAPVTSPSSAAHASLPSAGGGGAAASSCRLMELDPADSPSPPRRPEADDGTDTDTVKLFGVALQGKKKKRAHQEDGDDGNHEQGSSDV

SEQ ID NO: 7840 - protein, 357 aa, Zea mays
  Clone ID: TF_ZmC12124_1.pep
MDKPVAPGIIKEELLEQQPPTQDGVGGGGDAPRPMEGLHEVGPPPFLTKTFDLVEDPATDAVLSWSRAGNSFIVWDPHVFADGLLPRLFKHSNFSSFVRQLNTYGFRKVDPDRWEFANEGFLRGQRHLLKMIKRRKPPSAVAPLRQQRAPASCLEVGEFGFEEEIDRLKRDKNILITEVVKLRQEQQSTKDHVRAMEERLRVAEQKQVQMMGFLARAMRNPEFFQQLAQQQDKRKELEDTISKKRRRPIDNTPFYSDGESEQLDSQLKMFESGVLNGLNEPELENLAVNIQELGKGSIDDGNLTQVSDQSELNDDFWAELLVEDFGDKAGQPELEGRTEDVNDLAQQLGYLSSSSPK

SEQ ID NO: 7841 - protein, 182 aa, Zea mays
  Clone ID: TF_ZmC363424_1.pep
EGVRQDDFIRGHKHLLKRIHRRKPVHSHSLRTQASGPLAESQRRELEDEISRLRYEKSLLLADLQRQNQQQRGISWQMQSLESRLAQMEERQRSVVASLCDILRRRGVVRVPASAMETTDHSSKKRRVPIPKTDLFVAGEQPKVEEQQVLPFLQAVGAEAPGVSTIRVLDAEPFEKMELALV

SEQ ID NO: 7842 - protein, 527 aa, Zea mays
  Clone ID: TF_ZmC3627_1.pep
MQGGVMAHAAAAAAAASTVTTAVAPPVTAHAVAVAPPVTAHAAAAAGNGSATAAPPPPFLMKTYEVVDDPATDDVISWGPGNNSFIVWNTPEFARDLLPKYFKHSNFSSFVRQLNTYGFRKVDPDRWEFANEGFLRGQKHLLKTINRRKPSLQGNSQPQQPQSQNAPVPSCVEVGKFGLEEEIERLKRDKNVLMQELVRLRQQQQTTDHQLQTLGKRLQGMESRQQQMMSFLAKAMQSPGFLAQFVQQNEKSRRRIVAANKKRRLPRQDGGLDSESAAASLDGQIIKYQPLINEAAKAMLRKILKLDSSHRLESMGNSENGNFLLENYMPGAQAFESSSSTRNSGVTLSEVSANPGLPYGGGGGTSSGLSAICPPEIQCPVVMDNMSSNQVPSMSAVPPVSKATIDMGIPEFSALADLVNEGSVDIPGGAFEMPGPEFPLPEGDDSVPIETDETMYNNNDETQSLPGIIDSFWEQFLVGSPLSADNDEVDSGSPQENGWSKVGNIGDLTEQMGLLSSTNHRDSGNGL

SEQ ID NO: 7843 - protein, 495 aa, Zea mays
  unsure (1)..(495): unsure at all Xaa locations
  Clone ID: TF_ZmC3627_2.pep
SPRAPRPTXTTPLLAVPGRAGLPYMTPPFLMKTYEVVDDPATDDVISWGPGNNSFIVWNTPEFARDLLPKYFKHSNFSSFVRQLNTYGFRKVDPDRWEFANEGFLRGQKHLLKTINRRKPSLQGNSQPQQPQSQNAPVPSCVEVGKFGLEEEIERLKRDKNVLMQELVRLRQQQQTTDHQLQTLGKRLQGMESRQQQMMSFLAKAMQSPGFLAQFVQRNENSRRRIVAANKKRRLPKQDGGLESESSAASLDGQIIKYQPSINEAAKAMLRKILNVDSSHMFESMGNSDNSNNNNNNLLEDYMPAGQAFESSSSTRNSGVTLAEVPANSGLAYVGTSSAICSPPAAPEMQCPVVLDNKAYKQVASMSAVPPVSSDMGIIPEFSDLADLVSVDILGGAFEMMPGPEFPLPEEGDDGTTMYNNNDEEAQSLPGIINSIWEQFLVGSPLSTDNEEVDSAGGLYAQEDGWSKVGNIANLTEQMGLVSSTNHRDSGNGLY

SEQ ID NO: 7844 - protein, 106 aa, Zea mays
  Clone ID: TF_LIB4185-044-R1-K1-H6.pep
TPLPPPPRGGGAPPPPPPLFVNPAGRKSFPPPPFFLGKTPPPPGGGGGTPGARHGVIGWGNGNNSFVFADPFVFFQTVLPGPFKPNNFSSFVRQLNPFVSLIPPPR

SEQ ID NO: 7845 - protein, 138 aa, Zea mays
  Clone ID: TF_LIB5116-017-A1-PF1-D3.pep
MDGLHTELALGLIGCGHGDLQTAPFVAKTYQMVCDPRTDALVRWGKGNNSFLVTDVAGFSQLLLPCFFKHGNFSSFVRQLNTYGFRKVHPDRWEFAHESFLRGQTHLLPRIVRRKKRGEGRCWRLVLVCSRRRRAAPA

SEQ ID NO: 7846 - protein, 57 aa, Zea mays
  Clone ID: TF_LIB4315-023-R1-N1-F11.pep
FCCMVRKIFIYPKEEVRKMNPGPLSCRSEEKAVVGEGSDAKDAKSASNPSLSSAGNS

SEQ ID NO: 7847 - protein, 54 aa, Zea mays
  Clone ID: TF_UC-ZMROMO17026D01_FLI.pep
LVADAMEYHQRVPHEKPAHVLTYEDRDGDWMMVGDVPWELFLGSVKKLRICKNR

SEQ ID NO: 7848 - protein, 87 aa, Zea mays
  Clone ID: TF_ZmC12865_5.pep
GRTAYLPGAELKGERRCLGQAFFHLCSGICVLLSRTPILPTSWSSRAVAFCLGKIAYCLLYDTFICVRKFVALHILEGSKENVHAVR

SEQ ID NO: 7849 - protein, 121 aa, Zea mays
  unsure (1)..(121): unsure at all Xaa locations
  Clone ID: TF_LIB4303-018-R1-M1-C3.pep
ISDIQFLDRNLRGSSSXVQHRTRTYTKVHKRRAARRANDTDRQNAYXELXHDXDRXFGIEGHLINQNRPGWKLVYDDHYVDVPLVVDYPCEDFLNCARCIRILSPHDERXMMLXIDYGDSF

SEQ ID NO: 7850 - protein, 175 aa, Zea mays
  Clone ID: TF_LIB3632-008-Q1-K6-C5.pep
AWAVSSSSPAAGAGTAAPSKRAKADAAPNSPGTVASGHPQSSFGVVGWPPIRTFRMNSLFNQAKENASEAGAKKPIVEPDMQEDKEESKKGRTVGWVKVNMEGDIIGRKVDLNAHRSYKTLASALELMFMKPSIGLCTSSKSYSLIFYFHYIYRYNPVAYLAIHLGHDTVLDIVS

SEQ ID NO: 7851 - protein, 66 aa, Zea mays
  Clone ID: TF_LIB5116-066-A1-PF1-A4.pep
DLRHLLETYALYFVVPTLLYACYFHPCKWLVSSARATAVFDDSYVFCHSCPEPVVRRKCEGCKTII

SEQ ID NO: 7852 - protein, 68 aa, Zea mays
  Clone ID: TF_ZmC784_7.pep
RGYSLSLSLSDGAPYLRKIDLKTYKNYKDLSTALEKMFSGFSTGEMSRGYSLSLSLSDGASVSNYVSF

SEQ ID NO: 7853 - protein, 75 aa, Zea mays
  Clone ID: TF_ZmC435820_1.pep
GDDPWQEKGSSVSCIKILSGHKVKQMGKHPLELLSSAPARRFGSNCAVSVSRQELRSLSPGVGAVGSVGGGLPAR

SEQ ID NO: 7854 - protein, 145 aa, Zea mays
  Clone ID: TF_LIB5025-034-A1-XP1-E4.pep
MSGGAASGSGSGGASFQQHAKRRRPPAGPQRLTLSVQDADADDAAAAVVPPVTVVLDGRCICHRVHLNRHTGYRSLAGTLRRMFVDSDDDSDQQQQQQRRRAEDDLDLANAVPGHVVAYEDMEDDLLLAGDLKWNSIDLLSRWCA

SEQ ID NO: 7855 - protein, 74 aa, Zea mays
  Clone ID: TF_LIB4171-041-R1-K1-C3.pep
KMFSGFSTGKDGFFESPKEGENVFPSEAKDGDWMLVGDVPWEMFVDFFPRVGFLKGSNAIGLAPRAGFKSKNCH

SEQ ID NO: 7856 - protein, 112 aa, Zea mays
  unsure (1)..(112): unsure at all Xaa locations
  Clone ID: TF_jC-zmX700440508a1.pep
ISRGGTGTVNIHHAPYSAKDIQSTAQGALTRSWTTAHKHGVLLGMGEDLCKSTDYGELQSELDKMLDFXGELVSRYQNWEMVYTDHQGDMMLEGDDPREDDCNITRKSYIYT

SEQ ID NO: 7857 - protein, 82 aa, Zea mays
  unsure (1)..(82): unsure at all Xaa locations
  Clone ID: TF_LIB3912-054-Q6-N6-B5.pep
TDNEGDMMLVGDDPXXEFCDMVHKIFIYTREEVERMNPGALNARLEDCLSDSLGRGLASKEPRSGPSTSAVDFENRANLSSQ

SEQ ID NO: 7858 - protein, 315 aa, Zea mays
  Clone ID: TF_ZmC9734_1.pep
RGKKLCVPLYPELPLEGQFPAPMFHGSPLLGRGGAGGPMCYFPDGTPAGIQGARHAQFGISLSDLHLNKLQPGLSPHGLHRQLDHGVQVQVQQPRIAAGLIVGGHPAARDDVSCLLTIGTPKSKKPPSDVKKASTAAAPQLMLFGKAILTEQQISLGGGNVVPALLAKKSPSDDDDDVAERTVSNSDVSSPGRSNQDGTSSGGGPAARACWQEEECNNRAAGSEDDLLGHCKVFMQSEDVGRTLDLSAVASYEELYQRLADMFGVDKAELTSHVFYRDDASGALKHPGDEPFSEFTKTARRLTILTDESSDSLAR

SEQ ID NO: 7859 - protein, 98 aa, Zea mays
  Clone ID: TF_LIB3608-010-Q1-N6-C6.pep
CQDNKAAATATDDDDLLGHCKVFMQSEDVGRTLDLSAVASYEELYQRLADMFGVDRAELTSHVFYRDGASGALKHAGDEPFSEFTKTARRLTILTDAR

SEQ ID NO: 7860 - protein, 193 aa, Zea mays
  unsure (1)..(193): unsure at all Xaa locations
  Clone ID: TF_LIB4979-126-Q1-K1-G8.pep
LPLAPLTGTLLVTTITDTPHLTRPTRQVLAGPHDHPASRPLVLGLSPAVAAADDHHDLKAMHLRLGVPGCESPDXRDESDITGPLHLLPSIVGYRAPADQVPTPSTEADSDQQKKAAQYSDQWNVEETTASDAXDYRRPASPPIPTYRENTMSTTHMKGIQEDXEAKHDQLFLHIQVSMDGAPHLKKIDLMTY

SEQ ID NO: 7861 - protein, 139 aa, Zea mays
  Clone ID: TF_LIB3354-016-P1-K1-B5.pep
GQEAPRRRGGGGKQARRGGSTPGGQLLVTNSCRAPVVGWPPVRSYRKSCFQQAKQQAVSSSSKAADKEDAAAPAPSCTASAAASNATASAGAGSFVKVSMDGAPYLRKLDLRMYKGYRELREALEAMFVSFGSANNNNN

SEQ ID NO: 7862 - protein, 99 aa, Zea mays
  Clone ID: TF_LIB4977-002-R1-K1-H7.pep
GRAAYLPGAELKGERRCLGQAFFHLCSGICVLLSRTPILPTSWSSRAVAFCLGKIAYCLLYDTFICVRKFVALHILEGSKENVHVSGENFYKKKKKKGP

SEQ ID NO: 7863 - protein, 244 aa, Zea mays
  Clone ID: TF_ZmC148771_1.pep
MLVRRSLSRQESSLLYPGLRRPGAVGQTVPTPSVPGTDLTIGGAPARDGVPCALSVGASKQNPDAVKPAGLVLFGRTILTEHQMSLSSSGGATSPAATGNSSLCWTAEKGPNVSEGSGSGSGSGVIQNSPTGKNTSSERLPWFGDGSSQQASEPGLEPGQCKVFVESDTVGRNLDLSALGSFDELYGRLSEMFGVEGAEMRSRVLYRGATGEVRHAGDEPFSDFVKSARRITILTDAGSDNLGS

SEQ ID NO: 7864 - protein, 45 aa, Zea mays
  Clone ID: TF_jC-zmX700344041a1.pep
FGSRFYTHFSIGKDAKPTWKLVDPVNGTAHLPTYKDRVRDWMLVG

SEQ ID NO: 7865 - protein, 104 aa, Zea mays
  unsure (1)..(104): unsure at all Xaa locations
  Clone ID: TF_LIB4172-001-Q1-K1-C12.pep
GKKVWRLFGPRGQMEDPFRSGWHLVFVSRGGNVLLVGDVPRQGFLYSVSCIKILSPXEVQRMGKPGLPLLRAAPSKRVGNGSARSASIQKPRGLWAGGAPVGSV

SEQ ID NO: 7866 - protein, 82 aa, Zea mays
  Clone ID: TF_ZmC2665_2.pep
RTRGRTRGRTRGRTRGEDHEKDVLLVGDDPWEDFVNCVRCIRILSPQEERQMRLASDYGDSFVGNQACSSSDGGRPWRVTGD

SEQ ID NO: 7867 - protein, 74 aa, Zea mays
  Clone ID: TF_701186148_FLI.pep
VGDLPWEVDYLRGWRSSPLGRFFAYRQRGTAVASQSHTGAVSYFTSICRKLKIMRGSDAVGIAPRTVEQTGQNK

SEQ ID NO: 7868 - protein, 39 aa, Zea mays
  Clone ID: TF_ZmC1098_3.pep
SYLFLFSYFTSICRKLKIMRGSDAVGIAPRTIEQTGQNK

SEQ ID NO: 7869 - protein, 100 aa, Zea mays
  Clone ID: TF_ZmC2833_20.pep
TRKKSDLWLCTTTHHGDSTRLSTPFACLAKHTHTHTHTPLLGAQKKKNKATTHHSTHAQSFPLSLPLVPSKQLHLSPRHVSGLLLAAAPLLADNARGEGT

SEQ ID NO: 7870 - protein, 201 aa, Zea mays
  unsure (1)..(201): unsure at all Xaa locations
  Clone ID: TF_LIB4828-045-R1-N1-D2.pep
MAECKDDDSGRRSPSSSMDSSTHPPALSTASSASRRPPERRDQLSPDLQLGLSLSPASSALLVAETNNSIVPSTPRNQALPDWPPIKPFLRSALTASARRRRTLFVKVYMEGVPIGRKLDMLLLDGYSSLLAKLCHMFKASITXVPHEKAAHVLTYEDHDGDWMMVXDVPXELFLSVKSRCENRQVLDSKLFMRGDSPLSF

SEQ ID NO: 7871 - protein, 103 aa, Zea mays
  Clone ID: TF_ZmC258_2.pep
YIYRSLPQILLLKEAYISHLTKLHGQMGNNGTQMPEFLLPGGSCWHGSPKASKTQGNRTPTTSSAHGAMVHGQFTPIVNGGNNKISQVIQTVSLRRSASCCHC

SEQ ID NO: 7872 - protein, 136 aa, Zea mays
  unsure (1)..(136): unsure at all Xaa locations
  Clone ID: TF_LIB3597-060-Q1-K6-A9.pep
RVLSGLAGSTARTPGSRSPYVLAGSEPCAAADGEGSLYLYFWKGCGLRDPDRKRACYDAGPRIDPPQVGAFYDAEPAPKDGVAGWPPVRSYRKXARRRRGLQKAVKVAKEASDGAPYLRKEDLQAYAGYDQMHRAL

SEQ ID NO: 7873 - protein, 60 aa, Zea mays
  unsure (1)..(60): unsure at all Xaa locations
  Clone ID: TF_LIB4759-002-R1-N1-D4.pep
IIFNIEQSLSTIEDRHSSARTRTHASSIRASHDXKFPAKCGEQAAKRTLEITSKCLIHHR

SEQ ID NO: 7874 - protein, 84 aa, Zea mays
  Clone ID: TF_ZmC615_1.pep
SEDVGRTIDLSVFGSYEELYGQLADMFGSEKAEVMSHLCYRDAAGAVKRTGDEPFCDFMKVARRLTIVESTEGRLQKPLVEYMA

SEQ ID NO: 7875 - protein, 229 aa, Zea mays
  Clone ID: TF_LIB5116-030-A1-PF1-G6.pep
SLQSSLSPHGLHQVDHGGQPPRIAAGLIIGHPAARDDISCMLTIGSHQNNNNNKSDVKKASPQLMLFGKPILTEQQITLGNSGGFSPSAARKSSSEMSAEKSANNSDLPSPQSNQNGTTKNLSCGGVPLCQDNKVLDLGLDIGHCKIFMQSEDVGRTLDLTAVGSYEELYRRLSDMFGMEKAELMSHVFYRDAAGALKHTGDEPFSDFTKTARRLTILTDTSGDSSVAS

SEQ ID NO: 7876 - protein, 77 aa, Zea mays
  Clone ID: TF_jC-zmX700553368a1.pep
MKATPLDKVNMDGAPYLSKVDLMAYSTYKDLSLALKRISGTCTLCGNNHNQGRLLDPASDTVDIDTTHDDVDRDGTL

SEQ ID NO: 7877 - protein, 215 aa, Zea mays
  Clone ID: TF_LIB4738-131-A1-K1-C12.pep
MHTCGQHMAGCKQDDDAVGRSPSSSSMDSSSSTHPPALSAASSSGFRPTTTERRDDLSTDLQLGLCRLSPAAPSALLVVPETKSIPSTPRTTQDWPPIKPFLRSALTASARRRRRTLLVKVYMEGVAIGRKLDLLLLDGYDSLLAKLRHMFKASITSSMAGCKQDDDAGGRSPSSSSMDSRSTTHPPGLSAASSFVFRPTKERRDDFSTDLSLGL

SEQ ID NO: 7878 - protein, 73 aa, Zea mays
  unsure (1)..(73): unsure at all Xaa locations
  Clone ID: TF_LIB3156-001-Q1-K1-D9.pep
LNDFMKNDNLMHLLNLXDYVPTYXHKDPDCILDCDHPCEMLIESCKKLHIMKCTEAIELSPRAMDKCNIRISS

SEQ ID NO: 7879 - protein, 176 aa, Zea mays
  unsure (1)..(176): unsure at all Xaa locations
  Clone ID: TF_14203817.pep
MAFDSIXSAIDXGVMLXGXSCPPAPPRGMRXFXXVYRRGAVGXSIDMGGFSGYXXLXHAVARMFGMEGXLGXXRXMGWXLVYPXHGDDXILLLGXAPWGXFVNCVXCIXXXSPXXVPQMXXDGXLGXXVLSDRACXXXVGGXAWXPRRARXPGXPSIGFCGXFGPGPGGSGWGFWL

SEQ ID NO: 7880 - protein, 101 aa, Zea mays
  Clone ID: TF_ZmC427602_1.pep
NGELKGFNKEWMVVFPDYEGDIILVGGDPWNKFFSMGPKIFVYPRGGVQGMNPGALNLRPEENGLPNLTERGSAFIFFVKKAPGYQSAFLFKSDNCLCLGN

SEQ ID NO: 7881 - protein, 61 aa, Zea mays
  Clone ID: TF_ZmC1117_6.pep
DALFTNSFSAAAEGGGDHHQHAIAYEDKDGDLMLAGDVPWDMFISSCKKLRIMKGSASEAR

SEQ ID NO: 7882 - protein, 78 aa, Zea mays
  Clone ID: TF_ZmC965_4.pep
RRIMLAGDDPWNEFCHMVHKILIYTREEVERMNPGALNSRLEDCLSDSLGRGVASKEPRSGPSTSAVDSENRANLSSQ

SEQ ID NO: 7883 - protein, 127 aa, Zea mays
  Clone ID: TF_18178970.pep
APTPDRHACRRRTGNRMTEADLNVRAAEASSGQDLHCCTYIAQVARGKLANVTTTQFWTRFQHTIPTTTYDLLTYYMSCACAAGMQLTSLTSKHFSSISSLRDFDFGHAHLPLPSPSSCHIIALFLL

SEQ ID NO: 7884 - protein, 160 aa, Zea mays
  Clone ID: TF_LIB3689-252-Q1-K6-C5.pep
MSVDTERSSTESSAASGLGYEDTALALTLRLPGSDPGRSSPLAAPSDAAPSPKARVVGWPPVRSYRKNALADSSKASRAANFVKVAVDGAPYLRKVDLQAYGGYDQLLRALQDKFFSHFTIRKFADDERKLVDAVNGTEYVPTYEDKDGDWMLVGDVPWK

SEQ ID NO: 7885 - protein, 305 aa, Zea mays
  Clone ID: TF_ZmC784_2.pep
HPSNRSLFAPAPTRTLSPSLPFPLPGSHSHPFRLPTQTAHELTATSHVPHPLVHVLLLPMSPPLELDYIGLSPPAAAAAAENDELKGTELRLGLPGSGSPDRRVVAATATTLDLLPAKGAKRGFSDEAPPPSPVATAGKGKKVAEEEYDEKKVAATPQPAAKAQVVGWPPVCNYRKNTMTTTQLEGSKEDGDAKQGQGFLYVKVSMDGAPYLRKIDLKTYKNYKDLSTALEKMFSGFSTGKDGSSEYRKDGEYVLTYEDKDGDWMLVGDVPWEMFAGSCRRLRIMKGSDAIGLAPRAADKSKNRN

SEQ ID NO: 7886 - protein, 138 aa, Zea mays
  unsure (1)..(138): unsure at all Xaa locations
  Clone ID: TF_LIB3332-001-P1-K1-G7.pep
HASGTRVVGWPPVRXYRKNALSDSGEGNRSSSFVKVAVDGAAYLRKVDLQAYGGYDQLLRALQDKFFSHFTISQCFVHRPALGLVFRSALLCLIERRLRLMKGSEAVNLGTYVFSSKALPSFMCYKIRSDCKPSGSFF

SEQ ID NO: 7887 - protein, 205 aa, Zea mays
  Clone ID: TF_ZmC1407_1.pep
MAGCKQDDDAVGRSPSSSSMDSSSSTHPPALSAASSSGFRPTTTERRDDLSTDLQLGLCSLSPAASSALLVVAESKSVLSTPRGSRTTQDWPPIKPFLRSALTASARRRRRTLFVKVYMEGVAIGRKLDLLLLDGYDSLLAKLRHMFKASITFADAMEYHQRVPHEKPAHVLTYEDRDGDWMMVGDVPWELFLGSVKKLRICKNR

SEQ ID NO: 7888 - protein, 168 aa, Zea mays
  Clone ID: TF_ZmC2230_2.pep
MEMIDAELRLGPPGSNNRDVINVVQPALAAAKRPSSSVLESEASGTDDHDHDDAAPTSKVQVVGWPPVRVYAAGESQQGGGGLYVKVSMDGAPYLRKVDLRTYGGYRELRDALDALFGCFSSSADGGCQFAVAYEDKDGDLMLAGDVPWEMFICSCKKLRIMRGSEAR

SEQ ID NO: 7889 - protein, 228 aa, Zea mays
  Clone ID: TF_ZmC13155_2.pep
MAWNARFGDDEEGSGLELSLGLPGYFSGSPDQAAGFEEKASRGSAAAPPPPPPAAARAKGSDGFKARPAAAAPVVGWPPVRAFRRNLATSSSKPSSHGGKEPAASADGGNKGLFVKVNMDGVPIGRKLDLAAHAGYDTLSAAVDSLFRGLFAAQAAGPGGEQQAVAGILSGGGGGEHTLVYEDDEGDQMLVGDVPWPMFVATARRLRVLKSSDLSPSSLRAARAAAEC

SEQ ID NO: 7890 - protein, 212 aa, Zea mays
  Clone ID: TF_ZmC31703_1.pep
TEGLLVSAINPVKCQSNLSTDVEINYRIQKDAQQEISTSMVSQSFGQSDIAFNSIDSAINDGVMLNRNSCPPAPPQRMRTFTKVYKRGAVGRSIDIGRFSGYEELKHAVARMFGIEGQLEDRQRIGWKLVYTDHEDDVLLLGDDPWEEFVNCVKCIRILSPQEVQQMSLDGDLGNNVLSNQACSSSDGGNAWKPRRDQNPGNPSIGFYDQFE

SEQ ID NO: 7891 - protein, 200 aa, Zea mays
  unsure (1)..(200): unsure at all Xaa locations
  Clone ID: TF_LIB4742-105-Q1-K1-G3.pep
DRLFCWRXRRRRTWPPGPPGAPGSPCPSSGRASAGSGRRPCXPXRMSRPRRRRWRLRRLRTXVQLXRXAPQPSLFVGRLAAAAADGLLLCLLEAALPVRPHRWPSDHGRLGRRGCCLRVALVCLLLLGGGALLAPSRVGRRRGHLQLGLLLVLAAVVHGARQAKPQLGRHEVSHDGFHVPMHSALKSRVDLLLRLQQLGL

SEQ ID NO: 7892 - protein, 74 aa, Zea mays
  Clone ID: TF_ZmC1167_6.pep
TLQISKVMELQTFLRQKQQVTAVHIAIYMSREDPQNSDEVRSLVPPTSQATKSQCILVTVELRLRLIGRLLVPS

SEQ ID NO: 7893 - protein, 234 aa, Zea mays
  Clone ID: TF_ZmC1428_1.pep
MKLKQEQADDDCSKMQGGRGLMSSLELRLGMSSDNGDASCGGDPWLGVGVHPWSLAGRQAEKVALEQDHQRPPPPQPVGWPPVGAFRRSHLQVGAKAVEEPTSKVKLGEQGPAPARSTMFVKVNMEGCAVGRKVDLQAHCGYASLSRALQAMFHGFLSDGQWRIAGREEDDDDDNEQQPEPTKKGESKSNKKAYILLYEDNEGDRMLVGDVPWELFMASVKRLYIAQDPRKTKN

SEQ ID NO: 7894 - protein, 282 aa, Zea mays
  Clone ID: TF_ZmC965_3.pep
MPEGANFTGKSAFTSLQDHGTDKCSTGCFGHIESSSHTDHASSSLIRPQPLVLGNGVQKSKGTSFKLFGIPLGSPEKSEPLVSPPSVAYDGKLQTSPSEKGNQLDVVEVDNCSHPSKTVKPLDGPQSDSITENNQPSPEATLNIQNKVQSSSTRSCKKVHKQGSALGRSIDLTKFACYDELIAELDQMFDFDGELKSPCKSWLVVYTDNEGDIMLVGDDPWNEFCDMVHKIFIYTREEVERMNPGALNSRSEDSLSDSLGRGVASRDPRGGGSTSALDSENC

SEQ ID NO: 7895 - protein, 296 aa, Zea mays
  unsure (1)..(296): unsure at all Xaa locations
  Clone ID: TF_ZmC1433_1.pep
MGDVAKDLTAGTVGGAANLIVGHPFDTIKVKLQSQPTPAPGQLPKYAGAIDAVKQTVAAEGPRGLYKGMGAPLATVAAFNAVLFSVRGQMEAFLRSEPGVPLTVKQQVVAGAGAGIAVSFLACPTELIKCRLQAQSSLAEAATASGVALPKGPIDVAKHVVRDAGAKGLFKGLVPTMGREVPGNALMFGVYEATKQYLAGGPDTSGLGRGSQVLAGGLAGAAFWLSVYPTDVVKSVIQVDDYKKPKYSGSLDALRKIVAADGVKGLYKGFGPXPPRSRRSNAATCGAYEITRSVLG

SEQ ID NO: 7896 - protein, 123 aa, Zea mays
  unsure (1)..(123): unsure at all Xaa locations
  Clone ID: TF_LIB3357-037-P1-K1-E7.pep
MEMIDAELRLGPPGSNNRDVINVVQPALAAAKRPSSSVLESEASGTDDHDHDDAAPTFKVHVVGWPPVRVYRKNAFHAAAEAKRTRRCEQQGGGGLYVKVSMDXAPYLRKVDLRTYXGYRELR

SEQ ID NO: 7897 - protein, 100 aa, Zea mays
  Clone ID: TF_ZmC1428_2.pep
VDLQAHCGYASLSRALQAMFHGFLSDGQWRIAGREEDDDDDDEQPEPTKKGENKSNKKAYILLYEDNEGDRMLVGDVPWELFMASVKRLYIAQDPRKTKN

SEQ ID NO: 7898 - protein, 267 aa, Zea mays
  Clone ID: TF_ZmC784_3.pep
GKTTTLRFDSHSHSPFPLSGSHSPPTGYPTHHTQTATPHLPRPPVHVLLLPMSPPLDLDYIGLSPAAAAAAAHDDLKGTELRLGLPGSGSPDRRVVAATATTLDLLPAKGAKRGFSDEAPTPSPGAASGKGKKVAEEEDDKKVAATPQPVAKAQVVGWPPIRSYRKNTMSTTQLKGSKEDAEAKQDQGFLYVKVSMDGAPYLRKIDLKTYKNYKDLSTALEKMFSGFSTGEMSRVTLLSRMARQYVIVFHFDVDGVRSTSRSLLKAS

SEQ ID NO: 7899 - protein, 198 aa, Zea mays
  Clone ID: TF_ZmC1407_2.pep
MAECKDDDSGRRSPSSSMDSSTHPPALSTASSASRHPAERRDQLSADLQLGLSLSPASSALLVAETNNSIVPSTPRNQALPDWPPIKPFLRSALTASARRRRTLFVKVYMEGVPIGRKLDMLLLDGYSSLLAKLCHMFKASITYADAVEYHQRVPHEKAAHVLTYEDHDGDWMMVGDVPWELFLGSVKKLRIAKTDRC

SEQ ID NO: 7900 - protein, 166 aa, Zea mays
  Clone ID: TF_ZmC2833_10.pep
SSGPEDAPKKRDCETDADADAAPPPAAKAQLVGWPPVRSYRKSCFQQQAAAKNKPAAALAEEAPAAGGLFVKVSMDGAPYLRKVDLKMYKGYRELREALEAMFLCFSGAADAPAVNPSDFAVTYEDKDGDLMLVGDVPFGMFISTCKRLRIMKGSEARGLGSAKNN

SEQ ID NO: 7901 - protein, 228 aa, Zea mays
  Clone ID: TF_ZmC1405_3.pep
MAGADVDVGTELRLGLPGGGAAAAKKDTIDLKLKLPTAGMEEAAAAARPEPAAEKAKRPAEAPAADAEKPPAPKAQAVGWPPVRSYRRNAMTVVQAVRSKKEEEPEKQQQPAAANAFVKVSMDGAPYLRKVDLKTYGSYKDLSAALKKMFGTFVTATGNSMNEGRLVDPAGDADDVVTTYEDKDGDWMLVGDVPWEMFVDSCKRLRIMKSSEAIGLAPRTKDKCKNKS

SEQ ID NO: 7902 - protein, 112 aa, Zea mays
  Clone ID: TF_LIB3689-238-Q1-K6-B1.pep
IKVTNQLVSCLEHRAKTLCLRQDTYLEFFYIHPPKHRKQSTRIIQYDSMNTIPRQTHGNTPLAKKNRHDVALFYRIGKDYPYLFYVPNPSRGFYVRKREYLFHSIKNNKPIL

SEQ ID NO: 7903 - protein, 111 aa, Zea mays
  Clone ID: TF_ZmC1206_12.pep
RSLPSSSGSRSRLVSPHPLLLLLLKKWKVIYTDDEDDMMLVGDDPWSEFCRMVKRIYIYSYEEAKSLTPKAKLPAIGGDTGVKPDPSKLPAESDVPQSDSDNSAPVAADKD

SEQ ID NO: 7904 - protein, 128 aa, Zea mays
  Clone ID: TF_LIB3116-025-P1-K1-C6.pep
PPLRASRRNTFQAEAAETAKRADQNQNQGGLSLKVSMAGPPYLRRGDLRLSKGSRELRGVLDPLLTNSFSGGEKGGGNNNQNALVYKAKDGNLMLAENVPWDMLIFSCRKLRIMKGFAFEARGSLIHT

SEQ ID NO: 7905 - protein, 240 aa, Zea mays
  Clone ID: TF_ZmC784_12.pep
CAALEAAGRDHHTQTATPHLPRPPVHVLLLPMSPPLDLDYIGLSPAAAAAAAHDDLKGTELRLGLPGSGSPDRRVVAATATTLDLLPAKGAKRWFSDEAPTPSPGAASGKGKKVAEEEDDKKVAATPQPVAKAQVVGWPPIRSYRKNTMSTTQLKGSKEDAEAKQDQGFLYVKVSMDGLSEYRKDGEYVLTYEDKDGDWMLVGDVPWEMFADSCRRLRIMKGSDAIGLAPRAADKSKNRN

SEQ ID NO: 7906 - protein, 260 aa, Zea mays
  Clone ID: TF_ZmC1405_6.pep
MAGADVDVGTELRLGLPGGGADAAKAAKRGFEDTIDLKLKLPTAGMEEAAAAAAAKPEPAAEKAKRPAEAPAADAEKPPAPKNAEPVANKNINMHDLATIVKKYQFEALTRIIVTRAQAVGWPPVRSYRRNVMTVQSVKSKKEEEPEKQQSAANAGGNGSAFVKVSMDGAPYLRKVDLKMYNSYTELSVALKKMFSTFTTSGNNMNEGKLVDPVSGADVVTTYEDKDGDWMLVGDVPWEMFVESCRRLRIMKSSEAIGLG

SEQ ID NO: 7907 - protein, 383 aa, Zea mays
  Clone ID: TF_ZmC790_1.pep
MLFDCLSLLTSSPRTSSAPRTTPSISMGDSGGRRGPPLPRLLDLIPDGKERKGREAQDAGRSKNSGGFGGEEDAKLELKLGPPGLTLVEEGTTATVPRDGGVLQRETTTTPTLSLGCFPRNPSKPAVDAATAGTKRGFFDTAVEAKTEGRDERMEQQAGAGCGNELALDEKTAAAAASERQKGSCCPPTPQHAPPAATVHSGAHVLQLGRRPPTRPPTRPPTRPRTRGLAHHHHGSSSKQPTEPQNSEASRKEKPACKKNPLVKINMDGIPIGRKVDLAAYDSYERLSLGVKELFHGFLQAQKDMSPTAGKIFSQLLDGSGEYTLVYEDNEGDRMLVGDVPWNVFVSTAKRLRVLRSSELAKGLVGTRPPQIAVAPRRGPPDC

SEQ ID NO: 7908 - protein, 122 aa, Zea mays
  Clone ID: TF_ZmC790_2.pep
LVKINMDGIPIGRKVDLAAYDSYERLSLGVKELFHGFLQAQKDMSPTAGKIFSQLLDGSGEYTLVYEDNEGDRMLVGDVPWNVFVSTAKRLRVLRSSELAKGLVGTRPPQIAVAPRRGPPDC

SEQ ID NO: 7909 - protein, 229 aa, Zea mays
  Clone ID: TF_ZmC2833_4.pep
MEVAAASAAGYGFKADDDVDSLRATELRLGLPGTEEEEAEESQNKAPPPPPSTPRGKKRDVVASSGPEDAPKKRDCETDTDAAPPPAAKAQLVGWPPVRSYRKSCFQQQAAAKNKPAAALAEEAPAAGGLFVKVSMDGAPYLRKVDLKMYKGYRELREALEAMFLCFSGAGAADAPAVNPSDFAVTYEDKDGDLMLVGDVPFGMFISTCKRLRIMKGSEARGLGSAKNN

SEQ ID NO: 7910 - protein, 237 aa, Zea mays
  Clone ID: TF_ZmC1405_1.pep
MAGADVDVGTELRLGLPGGGADAAKAAKRGFEDTIDLKLKLPTAGMEEAAAAAAAKPEPAAEKAKRPAEAPAADAEKPPAPKAQAVGWPPVRSYRRNVMTVQSVKSKKEEEPEKQQSAANAGGNGSAFVKVSMDGAPYLRKVDLKMYNSYTELSVALKKMFSTFTTSGNNMNEGKLVDPVSGADVVTTYEDKDGDWMLVGDVPWEMFVESCRRLRIMKSSEAIGLAPRTKDKCKNRS

SEQ ID NO: 7911 - protein, 234 aa, Zea mays
  unsure (1)..(234): unsure at all Xaa locations
  Clone ID: TF_ZmC13155_1.pep
MAWNGRFGDDEEGSGLELSLSLPGYFSGSPTQAAAGFEDKADGGSAAAAAAGRAKGSNGFKARPAAAAPVVGWPPVRAFRRNLASASSKPSRDPPPXTEETSPRAAGGKAVEGGNKGLFVKVNMDGVPIGRKLDLAAHAGYDTLSAAVDSLFRGLFAAQAAGPGGERQAVAGILSGGGGGEHTLVYEDDEGDQMLVGDVPWQMFAATARRLRVLRSSDLNPSSLRAATRKRAAA

SEQ ID NO: 7912 - protein, 108 aa, Zea mays
  unsure (1)..(108): unsure at all Xaa locations
  Clone ID: TF_ZmC37343_1.pep
RSELERLFGLEGQLEXDPVRSGWQLVFVDRENDILLVGDDPWQEFVNSVWCIKILSPQDVQQMVRGGGDLLSTTGVRTLQGSVCDDYSAGHDMQNLTGSIAPVVPLDY

SEQ ID NO: 7913 - protein, 156 aa, Zea mays
  Clone ID: TF_ZmC792_1.pep
SFRRNLANGSSSKQSLEQQQQNDDEASCDKAKQTCKRSPLIKINMDGIPIGRKINLSAYDSYQKLSSAVQDLFCGFLDAAQKDESRGRGAEEKMFSGLLDGTGEYTLVCEDSEGGRTLVGHLPWNVFVSTAKRLRVMESSELPHGLIKTASKRADG

SEQ ID NO: 7914 - protein, 110 aa, Zea mays
  Clone ID: TF_LIB3245-012-P2-N1-D10.pep
ARNSARVVKVAVDGAPYLRKVDLAAHDGYAALLRALHGMFASCLVAGAGADGAGRIDTAAEYMPTYEDKDGDWMLVGDVPFKMFVDSCKRIRLMKSSEAVNLSPRTSSRQ

SEQ ID NO: 7915 - protein, 198 aa, Zea mays
  Clone ID: TF_ZmC6227_1.pep
MQQDLRNSERRNPEQAHPVMSASSTNSAASPAVSGLDYDDTALTLALPGSSAEPAADRKRAHADHDKPPSPKARAVGWPPVRAYRRNALRDEARLVKVAVDGAPYLRKVDLAAHDGYAALLRALHGMFASCLVAGAGADGAGRIDTAAEYMPTYEDKDGDWMLVGDVPFKMFVDSCKRIRLMKSSEAVNLSPRTSSRQ

SEQ ID NO: 7916 - protein, 118 aa, Zea mays
  unsure (1)..(118): unsure at all Xaa locations
  Clone ID: TF_ZmC3003_2.pep
FWDTSPIPLHGGYALLLVGTLEWNRYRQNLQVHKQGVALDRSMDLSRCTDXGELKAELDMMFEFEGELVSANQNWQIVYTDNEGDMMLVGDDPWENLMWLCMMYFIFWHTMHKNKCLL

SEQ ID NO: 7917 - protein, 211 aa, Zea mays
  Clone ID: TF_ZmC13783_4.pep
EQQQQQAWKQKFMGSQSMSFGGSVSLNSPTTKDGPVDNKIGRDVQNQTLFSPQVDSSSLLYNMVPNLTSNVADNNISTIPSGSTYLQSPMYGCLDDSSGLLQNTGENDPTTRTFVKVYKSGSVGRSLDITRFSNYAELREELGQMFGIKGQLDDPDRSGWQLVFVDRENDVLLLGDDPWESFVNSVWYIKILSPEDVHKMGKPGNDPRYLS

SEQ ID NO: 7918 - protein, 122 aa, Zea mays
  unsure (1)..(122): unsure at all Xaa locations
  Clone ID: TF_ZmC13783_6.pep
MYGCLDDSSGLLQNTGENDLXTRTFVKVYKSGSVGRSLDITRFSNYAELREELGQMFGIKGQLDDPDRSGWQLVFVDRENDVLLLGDDPWESFVNSVWYIKILSPEDVHKMGKPGNDPRYLS

SEQ ID NO: 7919 - protein, 81 aa, Zea mays
  unsure (1)..(81): unsure at all Xaa locations
  Clone ID: TF_ZmC1249_9.pep
KMFDFXGELVSGSQNWQIVYTDDEGDMMLVGDDPWEEFCSIVRKIYIYPKEEVQKMNSKSAAPRKEESPAPGGGGCPPPNE

SEQ ID NO: 7920 - protein, 136 aa, Zea mays
  Clone ID: TF_LIB4746-023-R1-K1-H9.pep
CRRARPTPRLPRPCPASTTTTRRSPSRSRAPPPSPPPIASAPYLRKVDLAAHDGYAALFRALHGMFASCLVAGAGADGAGRIDTAAEYVPTYEDKDGDWMLVGDVPFKMFVDSCKRIRLMKSSEAVNLSPRTSSRQ

SEQ ID NO: 7921 - protein, 212 aa, Zea mays
  unsure (1)..(212): unsure at all Xaa locations
  Clone ID: TF_LIB4742-134-Q1-K1-A5.pep
MELDADNLSATELRLGLPGTSSSSSSDDWQKKPSPSVGAKRALDDGTKSEASGTSTAAGDLDFDHDHDTAAPPXVRTRPPMAQVVGWPPVRAYRKNTFQAAAAAKKVEQKQKQQQQGGLYVKVSMDGAPYLRKVDLRMYKGYRELREALDALFTNSFSAAAEGGGDHHQHAIAYEDKDGDLMLAGDVPWDMFISSXQKLRIMKGSASESGGQ

SEQ ID NO: 7922 - protein, 39 aa, Zea mays
  unsure (1)..(39): unsure at all Xaa locations
  Clone ID: TF_cC-zmle189022c10d1.pep
NVPWEMFVXSCKRFRIMKGKEALGLGLAPKAMAKSKNRS

SEQ ID NO: 7923 - protein, 118 aa, Zea mays
  Clone ID: TF_ZmC342443_1.pep
AKVHMDGYAIGRKINLRAQGGYASLSRVLTNMTTNFYSPADCSTGATGTGEKDLPTNNDKFIFLYEDFEGDRMQVGDVPWELFLASAKRLYIVRNPTSSDKGQGEDDRKYTTEQPTDD

SEQ ID NO: 7924 - protein, 186 aa, Zea mays
  Clone ID: TF_ZmC1167_2.pep
MSVDTERSSTESSAASGLGYEDTALALTLRLPGSDPGRSSPLAAPSDAAPSPKARVVGWPPVRSYRKNALADSSKASRAANFVKVAVDGAAYLRKVDLQAYGGYDQLLRALQDKFFSHFTIRKFADDERKLVDAVNGTEYVPTYEDKDGDWMLVGDVPWKMFVETCRRLRLMKDSEAVNLAPRAAR

SEQ ID NO: 7925 - protein, 203 aa, Zea mays
  Clone ID: TF_ZmC1426_2.pep
SRESDRMELELGLAPPNPHQPLAAAAEFVGLLSSSAGSCGNKRVLGDAFGAAKAATLPLFVCEDGDGGGGDRDRDGVVDHEQQSNNVPRKKRLVGWPPVKCARRRSCGGGYVKVKLEGVPIGRKVDVSIHGSYQELLRTLESMFPSGNQQDHAEDEVVVSHERRRRHPYVVTYEDGEGDWLLVGDDVPWEVFVKSVKRLKILA

SEQ ID NO: 7926 - protein, 111 aa, Zea mays
  Clone ID: TF_ZmC1328_2.pep
SASGSYDELSLSVDKLFRGLLAAQQDPLAAGAKECSQEEVAISGLLDGTGEYTLVYEDYEGDRVLVGDVPWGMFVSSVKRLRVLKTSDLSSSLTAPPGQKRTVTECPVFTS

SEQ ID NO: 7927 - protein, 191 aa, Zea mays
  unsure (1)..(191): unsure at all Xaa locations
  Clone ID: TF_ZmC12865_4.pep
MPPPPPLLEPRDYLGAGATSSCCSSSCSSGREGAGPHLALRLGLPGSDDSPGRGADAEHARAHVDAALTLGPAPAPAPPRGSAKRGFADSLDRSAKLDGVAADDAAGGVTRVAGAAAGAPPAANAMDRAQVVGWPPVRSYRKNTLAASATKTNGGDEGTSEAGCCYVKXSMDGAPYLRKVDLQTYSSYEDL

SEQ ID NO: 7928 - protein, 147 aa, Zea mays
  unsure (1)..(147): unsure at all Xaa locations
  Clone ID: TF_LIB4766-015-R1-K1-F6.pep
MAGADVDFWTELRLGLPGGGAAAAKKDTIDLKLKLPTAGMEXRAAAAARPEPAAEKAKRPAEAPAADAEKPPAPKAQAVGWPPVRSYRRNAMTVVQAVRSKKEEEPEKQQQPAAANAFVKVSMDGAPYLRKVDLKTYGSYKDLSAAL

SEQ ID NO: 7929 - protein, 263 aa, Zea mays
  Clone ID: TF_ZmC1117_1.pep
MRPARPVVATSQPPYKARGLRLAGTSSIPVPHKVSPRSSSPPSLESRAEQLPNKLSFRFRSMELDADNLSATELRLGLPGTSSSSSDDWQKKPSPSVGAKRALDDGTKSEASGTSPAARDLDFDHDHDTAAPPKAQVVGWPPVRAYRKNTFQAAAAAKKVEQKQKQQQQGGLYVKVSMDGAPYLRKVDLRMYKGYRELREALDALFTNSFSAAAEGGGDHHQHAIAYEDKDGDLMLAGDVPWDMFISSCKKLRIMKGSASEAR

SEQ ID NO: 7930 - protein, 112 aa, Zea mays
  Clone ID: TF_LIB4744-117-Q1-K1-E4.pep
LIHDFSLLLCALQTDDNVLGSSVGNSTKCKMQLIMSSSPRASDFGPNFECYVQEDGKYITQESYHHRCRDHELCLLSEEVLIKVVSCTTNNTSYLDHHIMYHPTMSTNQLRL

SEQ ID NO: 7931 - protein, 118 aa, Zea mays
  Clone ID: TF_ZmC2833_15.pep
SFSISLHLRPLVPIQASSFIFSLMADEEGMVQHKPILPHASDAQQSPAHACTSRRVRGSRSGLHNGRRLPLPQSLFLADPRPSLASDPFMILSRLQVPMNMLLADAPLLADNARGEGT

SEQ ID NO: 7932 - protein, 198 aa, Zea mays
  Clone ID: TF_ZmC1407_3.pep
MAECKDDDSGRRSPSSSMDSSTHPPALSTASSASRRPPERRDQLSPDLQLGLSLSPASSALLVAETNNSIVPSTPRNQALPDWPPIKPFLRSALTASARRRRTLFVKVYMEGVPIGRKLDMLLLDGYSSLLAKLRHMFKTSITYADAVEYHQRVPHEKAAHVLTYEDHDGDWMMVGDVPWELFLGSVKKLRIARTDRC

SEQ ID NO: 7933 - protein, 181 aa, Zea mays
  Clone ID: TF_ZmC2230_1.pep
MEMIDAELRLGPPGSSNRDVINVVQPSLAAAKRPSSSVVESEASGTDDHDHDDAAPTSKVQVVGWPPVRVYRKNAFHAAAEARRTRRGEQQGGGGLYVKVSMDGAPYLRKVDLRTYAAATGMRDALDALFGCFSSSADGGCQFAVAYEDKDGDLMLAGDVPWEMFICSCKKLRIMRGSEAR

SEQ ID NO: 7934 - protein, 173 aa, Zea mays
  unsure (1)..(173): unsure at all Xaa locations
  Clone ID: TF_LIB4172-012-Q1-K1-H10.pep
ISSKDSQQELSSSMISXHPFGVADIAFNSIDSSINDIQFLNRNSRAPGPVQQRMRTYTKVHKRGAVGRSIDINRYSGYDELKHDVARMFGIEGQLSDQNRVGWKLVYEDHEKDVLLVGDDPWEDFVNCVRCIRILSPQEERQMRLASDYGDSFLGNQACSSSDGGRPWRVTGD

SEQ ID NO: 7935 - protein, 228 aa, Zea mays
  Clone ID: TF_ZmC2833_8.pep
MEVAAAASYSYYGLEAADDDVDNLRATELRLGLPGTEAAAAEEEEPRQAQKVAPPPSTPRGKKRDGVSAAPPAAKAQVVGWPPVRSYRKSCFQQQQQAAAASAKGKPAAADEGAPGPAGGGVFVKVSMDGAPYLRKVDLGTCGGYRQLREALEAMFLCFSGPGSGSGDASGGGGGSPSDFAVTYEDKDGDLMLVGDVPFSMFIGTCKRLRIMKGSEARLGLGSAKNND

SEQ ID NO: 7936 - protein, 256 aa, Zea mays
  Clone ID: TF_ZmC2833_9.pep
MEVAATSAAGYGFKADDDVDSLRATELRLGLPGTEEEEADEGHNKAPPPPPSTPRGMKREEAAAAAAEAEEEEPRQAQKVAAPPSTPRGKKRDGVSGVTDPAPPAAKAQVVGWPPVRSYRKSCFQQQQAAAGAKGKPAAADEGAPGPAGGGVFVKVSMDGAPYLRKVDLGTCGGYRQLREALEAMFLCFSGPGSGSGDASGGGSPSDFAVTYEDKDGDLMLVGDVPFGMFIGTCKRLRIMKGTEARLGLGSAKNND

SEQ ID NO: 7937 - protein, 167 aa, Zea mays
  unsure (1)..(167): unsure at all Xaa locations
  Clone ID: TF_ZmC2734_3.pep
DKVNRPPATFVKVYKSGTYGRSLDITRFSSYHELRRELGRLFGLEGQLEDPLRSGWQLVFVDREEDVLLVGDDPWQXALHATLFLFFFCILPHIALATQPHREFVSTVSCIKILSPQEVQQMGKQGLELLSSAPARRLGSSCDDYVSRQESRSLSTGIASVGSVELG

SEQ ID NO: 7938 - protein, 85 aa, Zea mays
  unsure (1)..(85): unsure at all Xaa locations
  Clone ID: TF_ZmC1249_5.pep
AELDKMFDXEGELVSGSQNWQIVYTDDEGDMMLVGDDPWEEFCSIVRKIYIYTKEEVQKMNSKSAAPRKEESPAAGGGGCAATNE

SEQ ID NO: 7939 - protein, 335 aa, Zea mays
  Clone ID: TF_ZmC784_1.pep
SLPRFHSPFPLPLPLSLSLSTLRLPLPPYRLPYPSHTNGHRELTTLRFDSHSHSPFPLSGSHSPPTGYPTHHTQTATPHLPRPPVHVLLLPMSPPLDLDYIGLSPAAAAAAAHDDLKGTELRLGLPGSGSPDRRVVAATATTLDLLPAKGAKRGFSDEAPTPSPGAASGKGKKVAEEEDDKKVAATPQPVAKAQVVGWPPIRSYRKNTMSTTQLKGSKEDAEAKQDQGFLYVKVSMDGAPYLRKIDLKTYKNYKDLSTALEKMFSGFSTGKDGLSEYRKDGEYVLTYEDKDGDWMLVGDVPWEMFADSCRRLRIMKGSDAIGLAPRAADKSKNRN

SEQ ID NO: 7940 - protein, 293 aa, Zea mays
  Clone ID: TF_ZmC1324_1.pep
MRGGGAGPTAAFMSDEPPPADAEEVEENSGAEEEDEETVVEQDDDELELGLCLGSKQQQQQHPPPCRILTARDLQPRSLSPDSSVSSSSPAAGAGTAAPSKRAKADAAPNSPGTVASGHPQSFGVVGWPPIRTFRMNSLFNQAKENASEAGAKKPIVEPDMQEDKEESKKGRTVGWVKVNMEGDIIGRKVDLNAHRSYKTLASALELMFMKPSIGLCTSSSSKTLKLLDSSSEYQLTYEDRDGDWMLVGDVPWEMFVGSVKRLKIMRTSDAKGLGPRFQGSHRPTAACTRGRT

SEQ ID NO: 7941 - protein, 118 aa, Zea mays
  Clone ID: TF_ZmC347_3.pep
VANRSEHRNVQSEPNVCLSYVRYVAPVVGWPPVRSYRKLDLRMYKGYRELREALEAMFVSSGSANNNNNLSEFAVTYQDKDGDLMLVGDVPFEMFASTCRKLRIMKRSEATGLGSARQ

SEQ ID NO: 7942 - protein, 229 aa, Zea mays
  Clone ID: TF_ZmC2833_7.pep
MEVAAASAAGYGFKADDDVDSLRATELRLGLPGTEEEEAEESQNKAPPPPPSTPRGKKRDVVASSGPEDAPKKRDCETDTDAAPPPAAKAQLVGWPPVRSYRKSCFQQQAAAKNKPAAALAEEAPAAGGLFVKVSMDGAPYLRKVDLKMYKGYRELREALEAMFLCFSGAGAADAPAVNPSDFAVTYEDKDGDLMLVGDVPFGMFISTCKRLRIMKGPEARGLGSVKNN

SEQ ID NO: 7943 - protein, 204 aa, Zea mays
  unsure (1)..(204): unsure at all Xaa locations
  Clone ID: TF_ZmC1117_4.pep
MELDADNLSATELRLGLPGTSSSSSDDWQKKPSPSVGAKRALDDGTKSEASGTSPAAGDLDFDHDHDTAAPPKAQVVGWPPVRAYRKNTFQAAAAAKKVEQKQKQQQQGGLYVKVSMDGAPYLRKVDLRMYKGYRELREALDALFTNSLSAAAEGGGDHHQHAIAYEGKDGDLMLAGDAPFXALMFISSCKKLRIMKGSASEAR

SEQ ID NO: 7944 - protein, 113 aa, Zea mays
  Clone ID: TF_ZmC37228_1.pep
GIYLHRGRRPNACMRASSCSTASPAGSYDHTHHGHDQMEHGSMEVMVQGSRRRSTRHAVSPATSQADVLWTADWTCMHVRSEIIQPSSIGEKLLPRNFFGTVHASSYAVAYAC

SEQ ID NO: 7945 - protein, 87 aa, Zea mays
  Clone ID: TF_ZmC1167_3.pep
LVVLQDVRGNLPAPSSDERFRGRELGYVHVFPLKPTSMCLKTSAFFHSHRSCSFSQHQEPPDEAHSVGRWHARTHWRLEGKGELCWS

SEQ ID NO: 7946 - protein, 67 aa, Zea mays
  Clone ID: TF_ZmC1249_4.pep
WQIVYTDNEGDMMLVGDDPWEEFCNIVRKIYIYTKEEVQKMNSKSSAPRKEEPPAAGEGCAAAAANE

SEQ ID NO: 7947 - protein, 100 aa, Zea mays
  Clone ID: TF_ZmC2833_22.pep
TRKKSDLWLCTTTHHGDSTRLSTPFACLAKHTHTRTPLLGAQKKKNKATTHHSTHAQSFPLSLSPPPSKQAASSFSSPCLWFAASCCSIVGTDNARTRGA

SEQ ID NO: 7948 - protein, 108 aa, Zea mays
  Clone ID: TF_ZmC1237_1.pep
PRVRPRVRPRVRPRVREDLRHDLACMFGIQGQLEDPYRTDWKLVYVDHENDILLVGDDPWEEFVSCVKSIKILSSVEVQQMSLDGDLGCIPPQTQACSASDDANAWRA

SEQ ID NO: 7949 - protein, 99 aa, Zea mays
  unsure (1)..(99): unsure at all Xaa locations
  Clone ID: TF_21213622.pep
ARGYPGRQKLFHGFLQAQKDMSPTTGKXFSQVLDGSDEXTLVYEHNEGDTMLVGDVPWNVFVSTAKRLRVLRSSELAKGLVGPRPPQIAVAPRRGPPDC

SEQ ID NO: 7950 - protein, 205 aa, Zea mays
  Clone ID: TF_ZmC1117_3.pep
MELDADNLSATELRLGLPGTSSSSSSDDWQKKPSPSVGAKRALDDGTKSEASGTSTAAGDLDFDHDHDTAAPPKAQVVGWPPVRAYRKNTFQAAAAAKKVEQKQKQQQQGGLYVKVSMDGAPYLRKVDLRMYKGYRELREALDALFTNSFSAAAEGGGDHHQHAIAYEDKDGDLMLAGDVPWDMFISSCKKLRIMKGSASESEAR

SEQ ID NO: 7951 - protein, 101 aa, Zea mays
  Clone ID: TF_LIB3637-253-Q6-K6-C11.pep
SFFKIQVYKSGSVGRSLDITRFSNYAELREELGQMFGIKGQLDDPDRSGWQLVFVDRENDVLLLGDDPWESFVNSVWYIKILSPEDVHKMGKPGNDPRYLS

SEQ ID NO: 7952 - protein, 131 aa, Zea mays
  Clone ID: TF_LIB4666-004-Q1-K1-E11.pep
TKPLREKFGFSDPNVNSSSFISSSSNENMLESNFLQVYKSGSVGRSLDITRFSNYAELREELGQMFGIKGQLDDPDRSGWQLVFVDRENDVLLLGDDPWESFVNSVWYIKILSPEDVHKMGKPGNDPRYLS

SEQ ID NO: 7953 - protein, 86 aa, Zea mays
  Clone ID: TF_ZmC784_9.pep
KNYKDLSTALEKMFSGFSTGKDGLSEYRKDGEYVLTYEDKDGDWMLVGDVPWEMFADSCRRLRIMKGSDAIGLERRHNSWSLHLWW

SEQ ID NO: 7954 - protein, 224 aa, Zea mays
  Clone ID: TF_ZmC347_2.pep
METVVGDLMATELRLGLPGTVDDCSQHQQQTQLKVAAPPSNPTRGKKRPAAEEEEANKRDAEAAPPAAKAPVVGWPPVRSYRKSCFQQAKQQAVSSSSKAADKEDAAAPAPSCTASAAASNATASAGAGSFVKVSMDGAPYLRKLDLRMYKGYRELREALEAMFVSSGSANNNNNLSEFAVTYQDKDGDLMLVGDVPFEMFASTCRKLRIMKRSEATGLGSARQ

SEQ ID NO: 7955 - protein, 227 aa, Zea mays
  Clone ID: TF_ZmC1405_2.pep
MAGADVDVGTELRLGLPGGGAAAAKKDTIDLKLKLPTAGMEEAAAAARPEPAAEKAKRPAEAPAADAEKPPAPKAQAVGWPPVRSYRRNAMTVVQAVRSKKEEEPEKQQQPAAANAFVKVSMDGAPYLRKVDLKTYSSYKDLSAALKKMFGTFTASGNSMNEGRLVDPAGDADDVVTTYEDKDGDWMLVGDVPWEMFVESCKRLRIMKSSEAIGLAPRTKDKCKNKS

SEQ ID NO: 7956 - protein, 272 aa, Zea mays
  Clone ID: TF_ZmC1098_1.pep
MSPPLEPHDYIGLSAAAAAAPPTPTSSSSSSSSPAPRLTLRLGLPGSESPDRDRDRDRCEDVAAALSLGPLPATPKAPAAVSAKRAFPDPAQRPGAAKASDDKQASPAAPPAAKAQVVGWPPVRNYRKNTLAASASRSKAPAAEDAASAARPMYVKVSMDGAPYLRKVDIKMYSSYEDLSVALQKMFSCFIAGQSGLHKSSSKDRLTNGSKVDALKDQEYVLTYEDKDADWMLVGDLPWDYFTSICRKLKIMRGSDAVGIAPRTIEQTGQNK

SEQ ID NO: 7957 - protein, 138 aa, Zea mays
  Clone ID: TF_LIB3606-053-Q1-K6-C8.pep
DAWADAWADAWEEEEPEKQQQPAAANAFVKVSMDGAPYLRKVDLKTYGSYKDLSAALKNMFGTFTASGNSMNEGRLVDPAGDADDVVTTYEDKDGDWMLVGDVPWEMFVDSCKRLRIMKSSEAIGLAPRTKDKCKNKS

SEQ ID NO: 7958 - protein, 68 aa, Zea mays
  Clone ID: TF_LIB3597-014-Q1-N6-H10.pep
MNEGRLVDPAGDADDVVTTYEDKDGDWMLVGDVPWEMFVDSCKRLRIMKSSEAIGLAPRTKDKCKNKS

SEQ ID NO: 7959 - protein, 151 aa, Zea mays
  Clone ID: TF_ZmC1336_1.pep
KQTAGASSAVAGNGGTPPGSTTTATHTGGGETNGAAAAALAARPALAASSMFAKVHMEGYAIGRKVNLRAQDGYDSLSRTLTNMATNFFCPADCSGAAEKDAPKSDKFIFLYEDFEGDRMLVGDVPWELFLASAKGLYIVRKPSIRRQRSG

SEQ ID NO: 7960 - protein, 258 aa, Zea mays
  Clone ID: TF_ZmC8950_1.pep
PMSNFNQQQQMFKAAAPETDIQGADPSNNTLFGINGDGQLGFPMGADDFLSNGIDASKYQGHISTDIDGNYRIPKDGQQEISSSMVSQSFGASDMAFNSIDSGMNDGGFVNRTSWPPAPPLKRMRTFTKVYKRGAVGRSIDISQFSGYDELKHALARMFSMEGQLEERQRIGWKLVYKDHEDDILLLGDDPWEEFVNCVKCIRILSPQEVQQISLDGDLGNNILPNQACSSSDGGNAWRARCDQNSGNPSTGSYDQFE

SEQ ID NO: 7961 - protein, 239 aa, Zea mays
  Clone ID: TF_UC-ZMFLMO17210E05_FLI.pep
MEVAAAASYSYYGLEAADDDVDNLRATELRLGLPGTEEAAAAAAEAEEEEPRQAQKVAAPPSTPRGKKRDGVSGVTDPAPPAAKAQVVGWPPVRSYRKSCFLQQAAAAAGAKGKPAAAAPALAKGAPGPAGGGVFVKVSMDGAPYLRKVDLGTCGGYRQLREALEAMFLCFSGPGSGDASGGGGGGSPSDFAVTYEDKDGDLMLVGDVPFGMFIGTCKRLRIMKGSEARLGLGSAKNND

SEQ ID NO: 7962 - protein, 386 aa, Zea mays
  unsure (1)..(386): unsure at all Xaa locations
  Clone ID: TF_ZmC2734_2.pep
AEAPDATPKNHXQQQQPQCLPVPQHQQMQQQNMTNYQSISNALSPFSQLSPVSQSSPMALQTILPFSQAQSFTDTNVGSLSPSNGNTMQNTLRPFSSEAVSHLSMPRPTAIPVADPWSSKRVAVESLLPSRPQVSSQMEQLDPAPASIPHSSALAPLPGRGCLVDQDVNSDPQNHLLFGVSIDSQSLLMQGGIPGLQNGNDSAAIPYSTSNFLSPSQNDFPLDHTLNSSGCLDDSGYVPPCSDNSDKVNRPPATFVKVYKSGTYGRSLDITRFSSYHELRRELGRLFGLEGQLEDPLRSGWQLVFVDREEDVLLVGDDPWQEFVSTVSCIKILSPQEVQQMGKQGLELLSSAPARRLGSSCDDYVSRQESRSLSTGIASVGSVELG

SEQ ID NO: 7963 - protein, 94 aa, Zea mays
  Clone ID: TF_ZmC3003_4.pep
AAPASTGSAYACRPMRSERQPFHILLKARVLAPIVCLLGDHYYHFLQLKSFPVRTGLVANESTTPPLLHFPTILVNIMPIKAQQNKGARHRFIA

SEQ ID NO: 7964 - protein, 158 aa, Zea mays
  Clone ID: TF_ZmC1405_5.pep
MHVRAQAVGWPPVRSYRRNAMTVVQAVRSKKEEEPEKQQQPAAANAFVKVSMDGAPYLRKVDLKTYGSYKDLSAALKNMFGTFVTATGNSMNEGRLVDPAGDADDVVTTYEDKDGDWMLVGDVPWEMFVDSCKRLRIMKSSEAIGLAPRTKDKCKNKS

SEQ ID NO: 7965 - protein, 200 aa, Zea mays
  unsure (1)..(200): unsure at all Xaa locations
  Clone ID: TF_ZmC1426_1.pep
SRESDRMELELGLAPPNPHQPLAAAAEFVGLLSSSAGSCGNKRVLGDAFGAAKAATLPLFVCEDGDGGGGDRDRDGVVDHEQQSNKXKRLVGWPPVKCARRRSCGGGYVKVKLEGVPIGRKVDVSIHGSYQELLRTLERMFPSGNQQDHAEDEVVVSHERRRRHPYVVTYEDGEGDWLLVGDDVPWEVFVKSVKRLKILA

SEQ ID NO: 7966 - protein, 285 aa, Zea mays
  Clone ID: TF_ZmC37547_2.pep
YPRVFRDSPIPWDLFSPRKKLRVPHHPDFPFDGQLLNPIFHGNPLGPSNGGGALRCFSDIAPAGIQGARHAQFGLPLTDRQLNKLHLGLFQGGGFKRRLDAITPPCPISRGFVIGSAPVDESVSCVLTIGTPRAAERSDDRKKPHLMLFGKPILTEQQMSSRGSRETLSPEATGNSSDGSVQKTGNVSDGSGSSICIGSSSRGREASRLGFEFEAGHCKVFVESEDVGRTIDLSVFGSYEELYGQLADMFGIERAEVMSHLCYRDAAGAVKRTGDEPFCDFMKVA

SEQ ID NO: 7967 - protein, 128 aa, Zea mays
  unsure (1)..(128): unsure at all Xaa locations
  Clone ID: TF_LIB4185-022-R1-L1-G9.pep
MQDAAADEAPCCSASVRDVTNTSMNIITGVVTRFFVKLSLDCATYLRKADLMMYHCYXSSIXALDVMVNSVITSYMLTKFAAFYEDPNGDLMLVGYDQVDMFASTYAKVEIMMRSESTRVVSYTARYQ

SEQ ID NO: 7968 - protein, 247 aa, Zea mays
  Clone ID: TF_ZmC12865_2.pep
MPPPPLLEPRDYLGAGATSSCCSSSCSSGREGAGPHLALRLGLPGSDDSPGRGADTEHARAHVDAALTLGPGPGPAPPRGSAKRGFADSLDRSAKLDGVAADDAAGGVTRVAGAAAGAPPAAKAQVVGWPPVRSYRKNTLAASATKTNGGDEGRSEAGCCYVKVSMDGAPYLRKVDLKTYSSYEDLSLGLEKMFSCFITGQNSSCKTSRRDRLTDGSRVDALQDQEYVLTYEDKDADWMLVGDLPWE

SEQ ID NO: 7969 - protein, 353 aa, Zea mays
  Clone ID: TF_ZmC11045_1.pep
GNNEDSSVALTRGDFAGELQVQQVEQDELLPPPKLESSKSPDGGKSVSSFPNQGCFPQFFEGLDWMIPPSCYQDSNGIHSVTASDSIFNPSEGIPPSTMNADGMDAFQTSCLSECFPNSIQEFISSPDINTLTFMSPEMQHLDAQHDGSNLQSTSNSYVQMSFSEESQSASLSGLHMEAVHINSSCLQPLATGSFDAGTFSKLSNIKECQALPLQEIHSSSMGTPSCSMDAAAVEYCMDRSVKPLKPPVRTYTKVQKLGSVGRSIDVTRFRDYHELRSAIACMFGLQGKLEHPGSSDWKLVYVDYENDVLLVGDDPWEEFINCVRCIRILAPSEVQQMSENGVHVLNDCMQMA

SEQ ID NO: 7970 - protein, 336 aa, Zea mays
  Clone ID: TF_ZmC9890_1.pep
MAALPRSPNSARLPLSLRDLRWIGESMDPRIAGLPNPPRIPPAEASFYGDESRAPSSNHRPFITVTPAKGSGSARSIFLSPPTTAIHCIRIPSFLLSVQVQQPARASLQETESIRVPKLAALPAKQEDSCGMELELGLAPPSARRPTPMTIDQQQQQQQRHLAEDELSSTSSDHHPCAARSGKRGFAEAFQEAAATTTTLPLFDDGSSCGGRSGGGKRPLVGWPPLSSARSRACGGGAAKYVKVKKEGDAIGRKVDLSLHASYDELLATLARMFPTNNGSQDDKEISSKSTAAATTTTSHRDVVVTYEDGEGDWMLLGDVPWDDFARSVKRLKLLG

SEQ ID NO: 7971 - protein, 102 aa, Zea mays
  Clone ID: TF_ZmC2833_18.pep
TDRQERRVIFGFVQPRIMEIQLDSPLLLHVLLNTHAHTPLLGAQKKKNKATTHHSTHAQSFPLSLSLSLLPSKQLHISPRHVSGLLLAAAPLLADNARGEGT

SEQ ID NO: 7972 - protein, 151 aa, Zea mays
  Clone ID: TF_ZmC1098_2.pep
MSPPLEPHDYIGLSASRSKAPAEEAASGAGPMYVKVSMDGAPYLRKVDIKMYSSYEDLSLALEKMFSCFIAGQSGLHKSSSKDRLTNGSKVDALKDQEYVLTYEDKDADWMLVGDLPWDYFTSICRKLKIMRGSDAVGIAPRTVEQTGQNK

SEQ ID NO: 7973 - protein, 271 aa, Zea mays
  Clone ID: TF_ZmC1098_4.pep
KKKKKNRRSPPHHLHSKQGEGERQTNPPHRPSSSSSSPAPRLTLRLGLPGSESPDRDRDCCEDVAATLSLGPLPAAAAVSAKRAFPDPAQRPGASKASDAKQQASPAAPPAAKAQVVGWPPVRNYRKNTLAAATASRSKAPAEEAASGAGPMYVKVSMDGAPYLRKVDIKMYSSYEDLSLALEKMFSCFIAGQSGLHKSSSKDRLTNGSKVDALKDQEYVLTYEDKDADWMLVGDLPWDYFTSICRKLKIMRGSDAVGIAPRTVEQPGQNK

SEQ ID NO: 7974 - protein, 51 aa, Zea mays
  Clone ID: TF_LIB3236-105-P1-N1-E7.pep
SFLMNLIYIKRRRNRVYPPHEKDCYLASVCFSNPQLFLHFREKASTVHPQP

SEQ ID NO: 7975 - protein, 54 aa, Zea mays
  Clone ID: TF_LIB3159-016-Q1-K1-H5.pep
ICMRFVDYAPPPKLTLLAGGLSHKKNQIKYWGSNKKKEELDMNVVGPSVVVTHC

SEQ ID NO: 7976 - protein, 359 aa, Zea mays
  Clone ID: TF_ZmC12865_1.pep
MVCPLLILLSATSTTPPPARTENSPRPSPLVLLLPHRVSSTPGTRPLSVCPLPSSPPMPPPPPLLEPRDYLGAGATSSCCSSSCSSGREGAGPHLALRLGLPGSDDSPGRSADAEHAGAHVDAALTLGPGPAPAPPRGSAKRGFADSLDRSAKRDGVAADDAAGGVTRVAGAAAGAPPAAKDLFMIAFSAMDRAQVVGWPPVRSYRKNTLAASATKTNGGDEGRSEAGCCYVKVSMDGAPYLRKVDLKTYSSYEDLSLALEKMFTCFITGQSGSCKTSRRERLTDGSRADALQDQEYVLTYEDKDADWMLVGDLPWDLFTTICGKLRIMRGSDAAGMAPRSPEQIVGTRIRNVARHAES

SEQ ID NO: 7977 - protein, 166 aa, Zea mays
  Clone ID: TF_ZmC784_8.pep
STSSSCLVKTIELRCVALCRAQVVGWPPVCNYRKNTMTTTQLEGSKEDGDAKQGQGFLYVKVSMDGAPYLRKIDLKTYKNYKDLSTALEKMFSGFSTGKDGSSEYRKDGEYVLTYEDKDGDWMLVGDVPWEMFAGSCRRLRIMKGSDAIGLVLLAPRAADKSKNRN

SEQ ID NO: 7978 - protein, 166 aa, Zea mays
  unsure (1)..(166): unsure at all Xaa locations
  Clone ID: TF_ZmC1117_2.pep
TPHVHAPSSLRRHRLHQDSIQETGVHGLTCLFRFVRAQVVGWPPVRAYRKNTFQAAAAAKKVEQKQKQQQQGGLYVKVSMDGAPYLRKVDLRMYKGYRELREALDALFTNSFSAAAEGGGDHHQHAIAYEDKDGDLMLAGDVPWDXMFISSCKKLRIMKGSGSEAR

SEQ ID NO: 7979 - protein, 318 aa, Zea mays
  Clone ID: TF_ZmC1060_1.pep
MEASATGAADPHFPIYISSDEEDGHAYFIESYSPEEVQIQQTILLSLYTSRAQTAAACSASSSYPTGASSTPKAGTSSTPKETPIDHKRKRKLKLEDDTNDSKMKRSTRNRFNCAICFEMVLAAEKFVVSHCPHAFCNSCIGRYVAGKVADNVAVIGCPDPACETGFIEMDLCRDIIPPELFDRWSVVLCEELLGDDKFYCPFKDCSALLLNDDSAKIRETECPHCHRLFCARCHVPWHDGIECKEFRKLGDDEKGENDLMLKKLADKEKWQRCPKCRMYVSRKSGCLLINCRCKQYFCYHCAAPMDRETHYCENCKH

SEQ ID NO: 7980 - protein, 128 aa, Zea mays
  Clone ID: TF_ZmC1132424_1.pep
SLFLGARRTYCRFPVGSGMMVADDDGEECVTQSECHGCRRLFCARCAVPWHAGLTCEEIARLGEGEREREDLLLVKAAREGSWKRCPRCRFYVEKSSGCLHITCRCGYEFCYGCGQQWQLIHDGCPGA

SEQ ID NO: 7981 - protein, 122 aa, Zea mays
  unsure (1)..(122): unsure at all Xaa locations
  Clone ID: TF_700348060H1.pep
SCWNEYXTTRIEQNLVVNCTCRIADCRAQPTGAFIRAIVSSPEVISKYEKALMXGYVESFSNLTXCTNPQGCDRILCRHGLGCGTTCCKCGXASCFNCSFSDAHYAASCGHMSQWVDDGCYY

SEQ ID NO: 7982 - protein, 199 aa, Zea mays
  Clone ID: TF_ZmC108794_1.pep
VGTLPGCPQEGCATKLSVEGSRVFLSPRPVEIMVQRMREGQIPPSQKVYCPYPRCSALMSLGEVIHPMQESSSRHTAADAATLRKCVKCRGSFCLSCKVPWHDGMGCFEYKMWYPLAHPGDAKLQNLARQRLWRQCVKCKHMIELAEGCYHMICVCGYEFCYTCGKEWKNKKASCSCPLWDERNIIRDEDDDDDEDDLY

SEQ ID NO: 7983 - protein, 636 aa, Zea mays
  Clone ID: TF_ZmC13270_1.pep
IEFHGSLLKVSPVSIYSHSGLPFPAVRAKVSWPRKASRGVALVTCASGEAEFIVKDCFALGVGGRYVNCEVSNKWANCVFVTGIPLHVTEPELYDAFHSTTTRRILDIHLLRGQPTASSSVSECTEALMRAISLFMPNRNFPCQKFRVQVFPPEEKDSMMKATITFDGSFHREAARALDHLQGSVLPCCLPWQIIQCEHVFHSTVSCPMRIYNVISQDVGALLESFRSQKGVAYNLEKNENGNFRVKLTANATKTIADLRRPLELLMKGKIINHPDLMLSTVQLLWSRDGMEQLRSVERETGTYILYDRQSLNIKIFGSTDNVAAAEEKLVHALVQLHEKKPLEVCLRGRNLPPNLMKEVIVKFGADLEGLKNEVPAVDLQLNTRRQTLYVRGSKEDKQRVEGMISELITSSDHSAQLSSENACPICLCELEDPFKLESCGHMFCLACLVDQCESAMKSQDGFPLRCLESGCNKLFLLADLRSLLPDKLDELFRASLNAFVASSAGLYRFCPTPDCTSIYQVAAAGAQGDRPFVCGACSVETCTKCHIEYHPFISCEAYKEYKADPDATLLEWRKGKENVKNCPSCGFTIEKSEGCNHVECRCGSHICWNCLENFKSSEECYGHLRSVHLSYADLM

SEQ ID NO: 7984 - protein, 400 aa, Zea mays
  Clone ID: TF_ZmC3535_1.pep
DCGPRGRAGSSPLRNSEKLYFQIAEAEILEDQLLVALGHRILELVDKLEDFDLILLPSFELERPLQLAKEAIGIRYLSPYEVGTCPICREEKLGSQMIKAGCSHTYCYNCLTGYVEEKLLTSKLPIRCPQLRCKYIISASECKSFLPVSSYDSLERAFAEAGTSGMERFYCPFPNCSVLLDLSQHFSRASSSSQSDLSCVECPECHRDICINCGVPWHIMMGCDEYQSLPAEERDAGDLSLHRLAQNNRWRRCQRCRRMIELTQGCFHMTCWCGHEFCYSCGADYASGVQTCQCVFWDDEAMEPSSAARSTQAASEIWAWDTFDCMPTAVEGYSEQERAQLALIQRFLAGGFSLGENPCQSPPRCADSYIVDTMKDLHQLPWLERFVSVISDTYNDDYMQ

SEQ ID NO: 7985 - protein, 589 aa, Zea mays
  unsure (1)..(589): unsure at all Xaa locations
  Clone ID: TF_ZmC1251_2.pep
MESEDDMHDANDSAEDDFYSGGEAGLAASDDGDADYDFADHDSDDSAELISHRQQQNYSILSEVDIQRRQEDDINRVSTVLSISKPEACVLLRNYNWSVSKVHDEWFADEERVRKVVGLPEKHNEMPNDREVTCGICFESCPRGSMSAAACGHPFCSTCWRGYISTAISDGPGCLMLRCPDPSCAAAVGQDMINSLAADDDKEKYGRYLRRSYIEDNRKTKWCPAPGCEYAVEFVMGSGSYDVNCNCSYGFCWNCTEEAHRPVDCATVSKWILKNSAESENMNWILANSKPCPKCKRPIEKNQGCMHITCTPPCKFEFCWLCLGPWSEHGERTGGFYACNRYESARQEGAYDESERRREMAKNSLERYTHYYERWAANQSSRQKALGDLQSLQNDKLERLSDIQSQPESQLKFIVEAWLQIVECRRVLKWTYAYGFYLPEHEHAKRQFFEYLQGEAESGLERLHQCAEKELQIYLDAESPSKDFNDFRTKLAGLTSVTRNYFENLVRALETGLNDVGPSTSHGTCXKSATSKSLGGKSKSGKNRASSSSSKSGGSTRGVDDSNIWTCDQCTYANPKSARACQACDRQHR

SEQ ID NO: 7986 - protein, 607 aa, Zea mays
  unsure (1)..(607): unsure at all Xaa locations
  Clone ID: TF_ZmC12013_1.pep
MGRDAENTSPPVSSSELEQEDDDDCYLSDQGDDALEESVLHVLEDEHLEDCHWSASCVITKESLLAAQREDLRKVMELLGLREHHARTLLIHYRWDVERIFELLDQKDRDSLFSEAGIPLQYTNNAGPTSSAEVTCNVCYDDVPPSCALEMDCGHSYCNDCWTEYFIVKINEGQSRRVRCMAPKCNAICDEAIIRKLVIARHPDIAERFERFLLESYIEDNDTVKWCPSTPHCGNAIRVKGDIYCEVECTCGCQFCFNCSLRAHSPCSCMMWELWIKKCRDESETVNWITVNTKPCPKCHKPVEKNGGCNLVACICGQAFCWLCGGATGRDHTWSTISGHSCGRFTDDQTKKTEQARRDLYRYMHYHNRYKAHTDSLKQEAKLKNEIQGKISISENKESKIKDYSWVINGLNRLFRSRRVLSYSYPFAFYMFGDEIFKDEMTPEERELKQNLFEDQQQQLEFNVERLSGFLEKDFQLFTDDEVMDTMKHVINLPNVVDRLCKQMYQCIENDLLYPLRTPHNIAPYKSKGIDRASELNISWDPGEQSSQSTKHSQDEHRNKQASNILGKRTHELHGSSSSNKRERVDVNGGXVALFDLNVPAEVVDKI

SEQ ID NO: 7987 - protein, 589 aa, Zea mays
  Clone ID: TF_ZmC1251_1.pep
MESEDDMHDANDSAEDDFYSGGEAGLAASDDGDADYDFADHDSDDSAELLSHRQQQNYSILSEVDIKRRQEDDINRVSTVLSISKPEACVLLRNYNWSVSKVHDEWFADEERVRKVVGLPEKHIEMPNDREVTCGICFESCPLGSMSAAACGHPFCGTCWRGYISTAISDGPGCLMLRCPDPSCAAAVGQDMINSLADVEDTEKYGRYLRRSYIEDNRKTKWCPAPGCEYAAEFVMGSGSYDVNCNCSYGFCWNCTEEAHRPVDCATVSKWILKNSAESENMNWILANSKPCPKCKRPIEKNQGCMHITCTPPCKFEFCWLCLGPWSEHGERTGGFYACNRYESARQEGAYDESERRREMAKNSLERYTHYYERWAANQSSRQKALGDLQSLQNDKLERLSDIQSQPESQLKFIIEAWLQIVECRRVLKWTYAYGFYLPEHEHAKRQFFEYLQGEAESGLERLHQCAEKELQIYLDAESPSKDFNDFRTKLAGLTSVTRNYFENLVRALETGLNDVGPSTSHGTCSKSATSKSLGGKSKSGKNRASSTSSKSGGSSRGVDDSNIWTCDQCTYANPKSARACQACDHQHR

SEQ ID NO: 7988 - protein, 595 aa, Zea mays
  Clone ID: TF_ZmC2198_1.pep
MDSDVEMNTASDEEVMDNDDYYDYCYSDVGDDGGSNSGSEELVAGDYDEGLEAEGTDEVVSRREQTFVVLNEQVISERQAEDVSKVSAVTLITREEACALLHHYKWNISKLSDEWFADEEKVRHTVGLLLNGNHDPRSRKLVCGICFEGCSSDMMSSAGCAHFYCHECWEGYISAAIGDGPGCLSLRCPDPSCSAMVLQGMINELAKDEDRKKYARFLLRAYVEGSKKTKWCPAPDCTCAVEFLGDENYDVSCNCMFSFCWNCTEEAHRPVNCETVSKWILKNSAESENMNWILANSKPCPKCKRPIEKNQGCMHMTCTPPCKFEFCWLCLGAWSDHGERTGGFYACNRYESAKKEGVYDETDARRERAKNSLERYMHYYERWASNQTSRQKAQADLLKAEKDQIANLTDIFGIPETQLKFIIEAWSQIIECRRVLKWTYAYGYYLDDKIKSEFFEYLQGEAESGLERLHQCAEKDLQNFLPSVKSDSTETTTPTVAEFGEFRVKLAGLTSVTRNYFENLVQALEAGLEDVRATGQAAGTSSTATSSKKGGTKSKKKQHTAPSSDHTDDGWPCERCTFLNPPTVDACSVCEKSRY

SEQ ID NO: 7989 - protein, 123 aa, Zea mays
  Clone ID: TF_LIB143-055-Q1-E1-D9.pep
TEWSLTKLTCPDTTCCSPLPPSVLKSLLGDDCYKRWESFALQKLLDTMPDLVYCPRCNAACLEDDNDAQCPECFFTFCSLCKERRHVGKDCVTPEEKIRILREKHQKYSLPEKQLLKEQREID

SEQ ID NO: 7990 - protein, 164 aa, Zea mays
  Clone ID: TF_LIB4603-008-R1-K1-G12.pep
MTINCFPRWFCLHNSSSSDVSNYEFVMARLFICQTLIAEFLFQSELLAAEINYMAKRETELQNDHMNLRTKIEEGEQQLQQVTVAQSVAAAAATDVELNPFLEMDTKCFFPGGPFATLDMKCFFPGSLQMLEAQQRQMLATELNLGYQLAPPDTDVANNNPQQF

SEQ ID NO: 7991 - protein, 217 aa, Zea mays
  Clone ID: TF_ZmC1392_3.pep
PRVLLHLSLPSCRVVVGCRSGGARGWRSRSGGAMVGTGKRERIAIRRIDNLAARQVTFSKRRRGLFKKAEELSILCDAEVGLVVFSATGKLFHFASSRQMRGEELQRLSVEQLQELEKTLESGLGSVLKTKSQKILDEISGLERKRTQLIEENSRLKEQVTRMSRMETQLGADPEFVYEEGQSSESVTNTSYPRPSTDTDDCSDTSLRLGLPLFSSK

SEQ ID NO: 7992 - protein, 154 aa, Zea mays
  Clone ID: TF_ZmC2086_2.pep
MGRGRVELKRIENKINRQVTFAKRRNGLLKKAYELSVLCDAEVALIIFSNRGKLYEFSSTQSMPKTLEKYQKKEQMFCEANKCLRRRLEESNQVIWQHAWEQSERHSEVQPQQLNGNNFFHPLDGAGEPTLQIGYPSEALTSSCMTTFLPPWLP

SEQ ID NO: 7993 - protein, 88 aa, Zea mays
  Clone ID: TF_ZmC84_3.pep
TFANLQHYKQESARLRQQIVNLQNSNRALIGDSITTMSHKELKHLETRLDKALGKIRAKKNDVLCSEVEYMQRRVDSNKNTFFLSGPY

SEQ ID NO: 7994 - protein, 99 aa, Zea mays
  Clone ID: TF_LIB3067-030-Q1-K1-E9.pep
RTRGRTRGRTRGTELQKKERMFCEANKCLRRRLEESNQVIWQHAWEQSERHSEVQPQQLNGNNFFHPLDGAGEPTLQIGYPSEALTSSCMTTFLPPWLP

SEQ ID NO: 7995 - protein, 107 aa, Zea mays
  unsure (1)..(107): unsure at all Xaa locations
  Clone ID: TF_LIB3088-002-Q1-K1-D4.pep
MGNAQEANGALCETQTWYQEMLNLRALFXVLTRTHRHXIGLELGPLSAKELHQLEKQLECAKSHARHIKTLLIMDQVKXLRIKERHLGEINTQLTHNLEAAGCSNYG

SEQ ID NO: 7996 - protein, 260 aa, Zea mays
  unsure (1)..(260): unsure at all Xaa locations
  Clone ID: TF_ZmC1145_11.pep
MGRGKVQLKRIENKINRQVTFSKRRSGLLKKAHEISVLCDAEVALIIFSTKGKLYEYSTDSCMDKILDRYERYSYAEKVLISAESETQVSYASVWSSSRRAAFGAWLVHQLCRTSSCASSLGDPSSLPAGGRFGRVVAMCAWRVVLMSGGLSQLMVESISALQRKEKSLQEENKVLQKEKALLLHXLAEKQKDQRQQVQRDQTQQQTSSSSTSFMLREAAPTTNVSIFPVAAGGRVVEGAAAQPQARVGLPPWMLSHLSC

SEQ ID NO: 7997 - protein, 182 aa, Zea mays
  Clone ID: TF_LIB4758-083-R1-K1-A9.pep
MVRGKTQMKRIENPASRQVTFSKRRNGLLKKAFELSVLCDAEVALVVFSPRGKLYEFASGSAQKTIERYRTYTKDNVSNKTAHQDIEQVKADAEGLAKKLEALEAYKRKLLGERLEECSFEELHSLEVKLEKSLHCIRGRKCKKQPPPPPPMLMGPPPPPAPAAIDHTGAGGCRDGRGDGAV

SEQ ID NO: 7998 - protein, 197 aa, Zea mays
  unsure (1)..(197): unsure at all Xaa locations
  Clone ID: TF_ZmC1460_7.pep
GXLXELIEXYQTASAGKTTTDGCGRHNRMDPKHETTVLQQEINLLQKGLRYIYGNRANEHMNVDELNALERYLEIWMYNTRSAKMQIMAQEIQALKSKACQNPVHINSTKTRGFQHPFTSLKVSACTQEGMLKAANEILQEKIVEQSSLLDVGMVVADQQNGRFSTVPLVEEVISSNPLTVLSGYSSCRGSEMGYSF

SEQ ID NO: 7999 - protein, 133 aa, Zea mays
  Clone ID: TF_ZmC1089_9.pep
MGRGRVELKRIENKINRQVTFAKRRNGLLKKAYELSVLCDAEVALIIFSNRGKLYEFCSGQSITKTLERYEKNSYGGPDTAVQNKENELVQSSRNEYLKLKAKVDNLQRTQRNLLGEDLGSLGVKELEQLEKQ

SEQ ID NO: 8000 - protein, 199 aa, Zea mays
  Clone ID: TF_ZmC3819_2.pep
MGRGRSEIKRIENPTQRQSTFYKRRDGLFKKARELSVLCDVDLLLLLFSTSGKLYHYLSPTVPSVKDLVERYEATTHTKVWTDIRQERRAELEKAEQMCELMEKELRVMTVDDGEQYTVPSLELLEHSLEAAVRKVRSEKDRKIGGEINYLENIIRGRHEERYGLCDKLAHSQASNNGGEGGGSTPPSGGGLELKLGFN

SEQ ID NO: 8001 - protein, 235 aa, Zea mays
  Clone ID: TF_ZmC18079_3.pep
MGRGKVELKKIENPTNRQVTFSKRRMGLFKKANELAILCDAQIGVIIFSGSGRMYEYSSPPWRIASVFDRYLKAPSTRFEEMDIQQKIVQEMTRMKDERNRLRMIMAQYMAEDLASFSAQDLSNLEQQIEFSLYKVRLRKQELLDQQLLEIHQREMHMPAEQGGYLCLMNPAAAIASGQHQQAGEMVGINPRPFPWWDVGASGSGSGSQSQQQLLHGRDAAESSMTALGLSQLHG

SEQ ID NO: 8002 - protein, 273 aa, Zea mays
  unsure (1)..(273): unsure at all Xaa locations
  Clone ID: TF_21213723.pep
MGRGKVQLKRIENKINRQVTFSKRRNGLLKKAHEISVLCDAEVAVIVFXXKGKLYEYATDSRMDKILERYERYSYAEKALISAESESEGNWCHEYRKLKAKIETIXXCHKHLMGEDLESLNPKXXXXXXXXXXXXXXXXXSRKSHLMAESISXXXXXXXXXXXXXXXXXXXXXXXXXXXXXXXXXXXXXXXXXXXTHAQAQTSSSSSSFMMRQDQQGLPPPHNICFPPLTMGDRGEXXXXTARARAXQPLPGQAQPQLRIAGLPPWMLSHLNA

SEQ ID NO: 8003 - protein, 188 aa, Zea mays
  unsure (1)..(188): unsure at all Xaa locations
  Clone ID: TF_ZmC18079_1.pep
MGRGKVELKKIENPTNRQVTFSKRRMGLFKKANELAILCDAQIRVIIFSGSGRMYEYSSPPWRIASVFDRYLKAXSTRFEEMDIQQKIVQEMTRMKDERNRLRMIMAQXMAEDLASFSAQDLSNLEQQIEFSLYKVCLRKXELLDQQLLEIRQRVHNIPTSDPSLGSLYTSLFQKARVVVTHKSSVSS

SEQ ID NO: 8004 - protein, 212 aa, Zea mays
  Clone ID: TF_ZmC2134_5.pep
MGRGKIEIKRIENSTNRQVTFSKRRAGLVKKAREIGVLCDAEVGVVIFSSGGKLYDYCSPRTSLSRILEKYQTNSGKILWGEKHKNLSAEIDRVKKENDNMQIQLRHLKGEDLNSLQPRELIAIEEGLQNGQTNMREKQMDYWRMHKTNGKMLEDEHKILTFRMHQQAVDLSGGMRELETGYHQVQHDRDFISQMPFTFRVQPNHPNLQEDE

SEQ ID NO: 8005 - protein, 240 aa, Zea mays
  Clone ID: TF_ZmC1408_2.pep
MGRGKVVLQRIENKISRQVTFAKRRNGLLKKAYELSILCDAEVALVLFSHAGRLYQFSSSSNLLKTLERYQRYIYASADAAVPSSDQMQNNYQEYVKLKARVEVLQHSQRNLLGEDLALLSPSELDQLENQVDKTLKQIRSRKTQVLLDELCDLKRKEQMLQDANRVLKRKLGEFEAEAASPPQLAWQGEGGMLSHDPPQPEHFFQALESNPCLQPTYHTMDMNQQPVPAPGGCYPAWMS

SEQ ID NO: 8006 - protein, 241 aa, Zea mays
  Clone ID: TF_ZmC2121_1.pep
MGRGKVELKRIENKISRQVTFAKRRNGLLKKAYELSLLCDAEVALIIFSGRGRLFEFSSSSCMYKTLERYRSSNYSQEVKTPLDTEINYQDYLKLRTRVEFLQTTQRNILGEDLGPLSMKELEQLEDQIEISLKHISSRKNQMLLDQLFDLKSKEQELLDLNKDLRKQLQETRPENALRVSWEEGGHSGASGNVLDPYQGLLQHLDNDPSLQFGYHHQAYMDQLNNEDLVDPNEHGRSGWI

SEQ ID NO: 8007 - protein, 212 aa, Zea mays
  Clone ID: TF_ZmC2134_1.pep
MGRGKIKIKRIENSTNRQVTFSKRRAGLVKKAREIGVLCDAEVGVVIFSSGGKLYDYCSPRTSLSRILEKYQTNSGKILWGEKHKNLSAEIDRVKKENDNMQIQLRHLKGEDLNSLQHRELIAIEEGLQNGQTNMREKQMDYWRMHKTNGKMLEDEHKILTFRMHQQAVDLSGGMRELETGYHQVQHDRDFISQMPFTFRVQPNHPNLQEDE

SEQ ID NO: 8008 - protein, 185 aa, Zea mays
  unsure (1)..(185): unsure at all Xaa locations
  Clone ID: TF_ZmC1442_5.pep
MGRGRVELKRIENKINRQVTFSKRRNGLLKKAYELSVLCDAEVALIIFSSRGKLYEFGSAGITKTLERYQHCCYNAQDSNGALSETQSWYQEMSKLRAKFEALQRTQRHLLGEELGPLSVKELQQLEKQLECALSQARQRKTQLMMEQVEELRRKERHLGEMXRQLKHXLEAEGCSNYRTLQHAA

SEQ ID NO: 8009 - protein, 208 aa, Zea mays
  unsure (1)..(208): unsure at all Xaa locations
  Clone ID: TF_ZmC7776_6.pep
MGRGKIEIKRIDSATSRQVTFSKRRSGLFKKAKELAILCDAEVGLAVFSSTGRLYDFASTSMKCVIERYSEAREEHRQTMSASXLRPRQLLGQQLSGLNVGDLQNLENKLETSLRNIRLKKDQLIFYQIQELNRKGSLMHQESIELYNKVNLLHQHNTELQRKVYGQGVNNEQTSTTVRHSTRDTENLPINLELSVQRDKSETPSVGL

SEQ ID NO: 8010 - protein, 339 aa, Zea mays
  unsure (1)..(339): unsure at all Xaa locations
  Clone ID: TF_ZmC1145_13.pep
MGRGKVQLKRIENKINRQVTFSKRRSGLLKKAHEISVLCDAEVALIIFSTKGKLYEYSTDSCMDKILDRYERYSYAEKVLISVESETQMRHQRIGLTQSRSVFIEPKALDSNQSLWKCXDKGNWCHEYRKLXAKVETIQKCQKHLMGEDLETLNLKELQQLEQQLESSLKHIRTRKNQLMLESISELQRKEKSLQEENKVLQKEKALLLPXLAEKQKAQRKQVQWGQTQQQTSSYSSCFVIREAAPPXNISIXFPVAAGGRLVEGAAAQPQARVGLPPWMLSQMSTPPPQQLFPFIRLVQYSIIVIARAAAVGLPFFFYQCMSIYVSIKSAMCSPPPPP

SEQ ID NO: 8011 - protein, 594 aa, Zea mays
  unsure (1)..(594): unsure at all Xaa locations
  Clone ID: TF_ZmC7776_4.pep
GFIVSHREIEANLEKIEAIMRMEAPRSQKKVHRLTGCMAALSRLISRLGEKCMPFYKLLKKVDKFQWTTEAHEALEALKKFLTTPVLKPPXPNQPAEDLLLYISCTTHVVSTALVVERVEEGHTYPVQHLVYFISEVLGPXKMKYPQVQKLLYVVLLTARKLRHYFDDHKVIVGFPIGDILHNKEAIGRIAKWACELGAHDIEFRPRTAIKTQALVDFVSECTEHQVLDNLETTEVWRMYFDDSLKLQGAGARILFIAPGGEQLKYALQLLFPASNNAAEYEALIHGLNIAVSLSIKKLMVYGDSLVVISQINKDCDCSTDSMSKYRAAVRKSEYKFEGLEFHHVERDRNATADALSKLXSSRAQAPPGIFVQKISQPSILSLSQPESDPNDWREPIIRYIENEEEPDDKAAAERIARQSAHYTLIGGILYRRGATGVLMKCIHSAIGKQLLDEIHVGQCEAHAASRTLVGKAFRFGFYWPTTKSDAAELVHRCEAXQFLSKKQHLSAQQLQTIPVTWPFAYXRLDMIXPFKKAQXGYTHVLVAIDKFTYWLPLTSSCTACLIDFCKSISCKKKNHVARCFIVIYVSIAPSDIL

SEQ ID NO: 8012 - protein, 94 aa, Zea mays
  Clone ID: TF_LIB4736-006-R1-K1-F10.pep
KQWYNPRVRGNELLYAEVDYMQKREMALQTDNMYLRSKIAESNETGQPAMHMMGVPPPTSEYDHMAPFDSRNFLQVSMPQHYSHQLQPTTLQLG

SEQ ID NO: 8013 - protein, 152 aa, Zea mays
  Clone ID: TF_LIB4764-099-A1-K1-G5.pep
MGRGKIKIKRIENSTNRQVTFSKRRAGLVKKAREIGVLCDTEVGVVIFSSGGKLYDYCSPRTSLSRILEKYQTNSGKILWGEKHKNLSAEIDRVKKENDNMQIQLRHLKGEDLNSLQHRELIAIEEGLQNGQTNMREKQAVILTLPVAPELI

SEQ ID NO: 8014 - protein, 255 aa, Zea mays
  Clone ID: TF_ZmC1442_2.pep
MGRGRVELKRIENKINRQVTFSKRRNGLLKKAYELSVLCDAEVALIIFSGRGKLYEFGSAGVTKTLERYQHCCYNAQDSNNSALSESQSWYQEMSKLRAKFEALQRTQRHLLGEDLGPLSVKELQQLEKQLECALSQARQRKTQVMMEQVEELRRTERHLGEMNRQLKHKLEAEGCSNYTTLQHAACWPAPGGTIVEHDGATYQVHPPAHSVAMDCEPTLQIGYPHHQFPPPEAANNIPRSAATGENNFMLGWVL

SEQ ID NO: 8015 - protein, 70 aa, Zea mays
  unsure (1)..(70): unsure at all Xaa locations
  Clone ID: TF_LIB3117-033-P1-K1-D5.pep
GPLIMNELEQLXNQIEVWGGHIRGGRNHMLLYQLFYLKSKEQELHDLNTDLRVMLHETSPHIVIHDDSWE

SEQ ID NO: 8016 - protein, 89 aa, Zea mays
  unsure (1)..(89): unsure at all Xaa locations
  Clone ID: TF_LIB3068-025-Q1-K1-D7.pep
DLGSLDDMEVDQLEKPTDSFLNHIRSTRSQHMLEQLTDLQTWXQMMCEAYNFLTRKLDETSIQLHVQVCVHGANXLLYYQRYSLPQPAP

SEQ ID NO: 8017 - protein, 240 aa, Zea mays
  Clone ID: TF_ZmC2121_2.pep
MGRGKVELKRIENKISRQVTFAKRRNGLLKKAYELSLLCDAEVALIIFSGRGRLFEFSSSSCMYKTLERYRSSNYSTQEVKAPLESEINYQDYLKLRTRVDFLQTTQRNILGEDLGPLSMKELEQLENQIEVSLKHIRSRKNQMLLDQLFDLKSKEQELQDLNKDLRKKLQETSPQNVIHDVSWEEGGHSGSSVLGPFQGLLQHHGNDPSLQTRYHQQAYMDQLNEDMADPDEHGRSGWI

SEQ ID NO: 8018 - protein, 255 aa, Zea mays
  Clone ID: TF_ZmC1442_3.pep
MGRGRVELKRIENKINRQVTFSKRRNGLLKKAYELSVLCDAEVALIIFSGRGKLYEFGSAGVTKTLERYQHFCYNAQDSNNGALSESQSWYQEISKLRAKFEALQRTQRHLLGEDLGPLSVKELQQLEKQLECALSQARQRKTQLMMEQVEELRRTERHLGEMNRQLKHKLEAEGCSNYTTLQHAACWPAPGGTIVEHDGATYQVHPPAHSVAMDCEPTLQIGYPHHQFPPPEAANNIPRSAATGENNFMLGWVL

SEQ ID NO: 8019 - protein, 286 aa, Zea mays
  Clone ID: TF_ZmC84_1.pep
MHIREEEATPSTVTGIMSTLTSAGQQKLKEPISPGGGSASVAGSAAERNNGGRGKGKTEIKRIENTTNRQVTFCKRRNGLLKKAYELSVLCDAEVALIVFSSRGRLYEYANNSVKGTIERYKKATSDNSSAAGTIAEVTIQHYKQESARLRQQIVNLQNSNRALIGDSITTMSHKELKHLETRLDKALGKIRAKKNDVLCSEVEYMQRREMELQNDNLYLRSRVDENERAQQTANMMGAPSTSEYQQHGFTPYDPIRSFLQFNIVQQPQFYSQQEDRKDFNDQGGR

SEQ ID NO: 8020 - protein, 286 aa, Zea mays
  Clone ID: TF_ZmC84_2.pep
MHIREEEATPSTVTGIMSTLTSAGQQKLKEPISPGGGSASVAGSAAERNNGGRGKGKTEIKRIENTTNRQVTFCKRRNGLLKKAYELSVLCDAEVALIVFSSRGRLYEYANNSVKGTIERYKKATSDNSSAAGTIAEVTIQHYKQESARLRQQIVNLQNSNRALIGDSITTMSHKELKHLETRLDKALGKIRAKKNDVLCSEVEYMQRREMELQNDNLYLRSRVDENERAQQTANMMGAPSTSEYQQHGFTPYDPIRSFLQSNIVQQPQFYSQQEDRKDFNDQGGR

SEQ ID NO: 8021 - protein, 228 aa, Zea mays
  Clone ID: TF_ZmC371_1.pep
MVRGKTQMKRIENPASRQVTFSKRRNGLLKKAFELSVLCDAEVALVVFSPRGKLYEFASGSAQKTIERYRTYTKDNVSNKTAHQDIEQVKADAEGLAKKLEALEAYKRKLLGERLEECSFEELHSLEVKLEKSLHCIRGRKTQLLEEQLHKLKEKEMNLRKSNEDLREKCKKQPPPPPPMLMAPPPPPAPAAIDHTGPKDVGMDVETELYIGLPGRDYRSNNKDMTAQ

SEQ ID NO: 8022 - protein, 201 aa, Zea mays
  Clone ID: TF_ZmC53_11.pep
MSFLLKEKEMIIAAGIVASMGRGRIEIKRIENNTSRQVTFCKRRNGLLKKAYELSVLCDAEVALIVFSSRGRLYEYANNSVKATVERYKKAHTVGSSSGPPLLEHNAQQFYQQESAKLRNQIQMLQNTNRHLVGDSVGNLSLKELKQLESRLEKGISKIRARKSELLAAEISYMAKRETELQNDHMTPQTKIEGGESTAAA

SEQ ID NO: 8023 - protein, 113 aa, Zea mays
  Clone ID: TF_LIB4764-117-A1-K1-G12.pep
RPKKNSKKKKKKKKKSTRTQHMVDQLTELQKKEQMFCEANKCLRRRLEESNQVIWQHAWEQSERHSEVQPQQLNGNNFFHPLDGAGEPTLQIGYPSEALTSSCMTTFLPPWLP

SEQ ID NO: 8024 - protein, 228 aa, Zea mays
  Clone ID: TF_ZmC1460_2.pep
MARGKVQLRRVENPVHRQVTFCKRRAGLLKKARELSVLCDASVGIIVFSAHGKLYDLATTGTMEELIERYKAASAGEATTDGCGRHNRMDPKHETTVLQQEINLLQKGLRYIYGNRANEHMNVDELNALERYLEIWMYNTRSAKMQIMAQEIQALKSKEGMLKAANEILQEKIVEQSSLLDVGMVVADQQNGRFSTVPLVEEVISSNPLTILSGYSSCRGSEMGYSFC

SEQ ID NO: 8025 - protein, 227 aa, Zea mays
  Clone ID: TF_ZmC1460_3.pep
MARGKVQLRRVENPVHRQVTFCKRRAGLLKKARELSVLCDASVGIIVFSAHGKLYDLATTGTMEELIERYKAASAGEATTDGCGRHNRMDPKHETTVLQQEINLLQKGLRYIYGNRANEHMNVDELNALERYLEIWMYNTRSAKMQIMAQEIQALKSKEGMLKAANEILQEKIVEQSSLLDVGMVVADQQNGRFSTVPLVEKVISSNPLTVLSGYSSCRGSKMGYSF

SEQ ID NO: 8026 - protein, 275 aa, Zea mays
  unsure (1)..(275): unsure at all Xaa locations
  Clone ID: TF_ZmC1808_2.pep
ILTDLSCGPSSKAKGGQPAAAPGSGGDRQGRGKIEIKRIENTTNRQVTFCKRRNGLLKKAYELSVLCDAEVALVVFSSTLEAGRDANNSVKSTIERYKKANSDTSNSGTVAEVNAQHYQQESSKLRQAIDSLQNANRTIVGDSIHTMGLRELKQMEGKLEKAINKIRARKNELLYAEVEYMQRRMDLQTDNMYLRSKIAENNNETGQPAMNMIGVPSTSEYDHMASFVDSRNFLQVNMQQQQPQHYSHXAATNDPPTRMMKLRIFGQQSMHASTQ

SEQ ID NO: 8027 - protein, 118 aa, Zea mays
  Clone ID: TF_LIB4719-003-R1-K1-B4.pep
NCWQTQLMMEQVEELRRKERHLGEMNRQLKHKLEAEGCSNYRTLQHAAWPAPGSTMVEHDGATYHVHPTTAQSVAMDCEPTLQIGYPPHHQFLPSEAANNIPRSPPGGENNFMLGWVL

SEQ ID NO: 8028 - protein, 212 aa, Zea mays
  Clone ID: TF_ZmC2134_2.pep
MGRGKIEIKRIENSTNRQVTFSKRRAGLVKKAREIGVLCDAEVGVVIFSSGGKLYDYCSPRTSLSRILEKYQTNSGKILWGEKHKNLSAEIDRVKKENDNMQIQLRHLKGEDLNSLQPRELIAIEEGLQNGQTNMREKQMDYWRMHTTNGKMLEDEHKILTFRMHQQAVDLSGGMRELETGYHQVQHDRDFISQMPFTFRVQPNHPNLQEDE

SEQ ID NO: 8029 - protein, 179 aa, Zea mays
  Clone ID: TF_ZmC1408_3.pep
KDCYKLKRVDVETFGTSPSNTCCEKMQNNYQEYVKLKARVEVLQHSQRNLLGEELAPLSPSELDQLESQVDKTLKQIRSRKTQVLLDELCDLKRKEQMLQDANRVLKRKLHEFETEAASPPQLAWQGGGGMLSHDPPQPEHFFVALESNAPLQPTYHTMDMNQQPEPAPGDCYPPAWMA

SEQ ID NO: 8030 - protein, 121 aa, Zea mays
  Clone ID: TF_LIB4764-090-A1-K1-F3.pep
GIDRTLSLDGGSITKTLERYQHCCYNAQDSNGALSETQSWYQEMSKLRAKFEALQRTQRHLLGEELGPLSVKELQQLEKQLECALSQARQRKTQLMMGAVEELRRKERHLGEMTRQLKHQL

SEQ ID NO: 8031 - protein, 255 aa, Zea mays
  Clone ID: TF_ZmC1442_1.pep
MGRGRVELKRIENKINRQVTFSKRRNGLLKKAYELSVLCDAEVALIIFSSRGKLYEFGSAGITKTLERYQHCCYNAQDSNGALSETQSWYQEMSKLRAKFEALQRTQRHLLGEELGPLSVKELQQLEKQLECALSQARQRKTQLMMEQVEELRRKERHLGEMNRQLKHKLEAEGCSNYRTLQHAAWPAPGSTMVEHDGATYHVHPTTAQSVAMDCEPTLQIGYPPHHQFLPSEAANNIPRSPPGGENNFMLGWVL

SEQ ID NO: 8032 - protein, 219 aa, Zea mays
  Clone ID: TF_ZmC53_7.pep
MGRGRIEIKRIENNSVKATIERYKKAHAVGSSSGPPLLEHNAQQFYQQESAKLRNQIQMLQNTNRHLVGDSVGNLSLKELKQLESRLEKGISKIRARKSELLAAEINYMAKRETELQNDHMNLRTKIEEGEQQLQQVTVAQSVAAAAATDVELNPFLEMDTKCFFPGGPFATLDMKCFFPGSLQMLEAQQRQMLATELNLGYQLAPPDTDVANNNPQQF

SEQ ID NO: 8033 - protein, 265 aa, Zea mays
  Clone ID: TF_ZmC53_2.pep
MGRGRIEIKRIENNTSRQVTFCKRRNGLLKKAYELSVLCDAEVALVVFSSRGRLYEYANNSVKATIERYKKAHAVGSSSGPPLLEHNAQQFYQQESAKLRNQIQMLQNTNRHLVGDSVGNLSLKELKQLESRLEKGISKIRARKSELLAAEINYMAKRETELQNDHMNLRTKIEEGEQQLQQVTVAQSVAAAAATDVELNPFLEMDTKCFFPGGPFATLDMKCFFPGSLQMLEAQQRQMLATELNLGYQLAPPDTDVANNNPQQF

SEQ ID NO: 8034 - protein, 265 aa, Zea mays; identical to SEQ ID NO: 8033
  Clone ID: TF_ZmC53_4.pep

SEQ ID NO: 8035 - protein, 265 aa, Zea mays; identical to SEQ ID NO: 8033
  Clone ID: TF_ZmC53_5.pep

SEQ ID NO: 8036 - protein, 241 aa, Zea mays
  Clone ID: TF_ZmC1408_1.pep
MGRGKVVLQRIENKISRQVTFAKRRNGLLKKAYELSILCDAEVALVLFSHAGRLYQFSSSSDLLKTLERYQRHIYASADAAVPSSDEMQNNYQEYVKLKARVEVLQHSQRNLLGEELAPLSPSELDQLESQVDKTLKQIRSRKTQVLLDELCDLKRKEQMLQDANRVLKRKLHEFEAEAASPPQLAWQGGGGMLSHDPPQPEHFFVALESNAPLQPTYHTMDMNQQPEPAPGGCYPPAWMA

SEQ ID NO: 8037 - protein, 115 aa, Zea mays
  unsure (1)..(115): unsure at all Xaa locations
  Clone ID: TF_ZmC2121_7.pep
REKGXSLKHISSRKNQMLLDQLFDLKSKEQELLDLNKDLRKQLQETRPENALRVSWEEGGHSGASGNVLDPYQGLLQHLDNDPSLQFGYHHQAYMDQLNNEDLVDPNEHGRSGWI

SEQ ID NO: 8038 - protein, 268 aa, Zea mays
  Clone ID: TF_ZmC8761_2.pep
MGRGKIEIKRIENTTSRQVTFCKRRNGLLKKAYELSILCDAEIALIVFSTRGRLYEYSSNSVRSTIERYKKASASTSGTAPVTDVNSLQYFQQEAAKLRQQIQTLQNSNRHLMGESTGNMTAKELKGLESRLERGIGRIRSKKHELLLAEIEYMQKREADLHNENMFLRAKVAEAERALEQEAAEDQTMMVPAAVRGATTELKALPASFDASGYYQYQQHQHVVAAASAASSSQYAEQPQGQQEYHHQTALHLGYHVKIDSAADKGFL

SEQ ID NO: 8039 - protein, 208 aa, Zea mays
  unsure (1)..(208): unsure at all Xaa locations
  Clone ID: TF_ZmC1408_4.pep
PTPHCPRPSLSLVLFSHAGRLYQFSSSSDLLKTLERYQRHIYASADAAVPSSDEMQNNYQEXVKLKARVEVLQHSQRNLLGEELAPLSPSELDQLESQVDKTLKQIRSRKTQVLLDELCDLKRKEQMLQDANRVLKRKLHEFEAEAASPPQLAWQGGGGMLSHDPPQPEHFFVALESNAPLQPTYHTMDMNQQPEPAPGGCYPPAWMA

SEQ ID NO: 8040 - protein, 66 aa, Zea mays; identical to SEQ ID NO: 6415
  unsure (1)..(66): unsure at all Xaa locations
  Clone ID: TF_LIB4185-037-R1-L1-D9.pep

SEQ ID NO: 8041 - protein, 268 aa, Zea mays
  Clone ID: TF_ZmC53_6.pep
MGRGRIEIKRIENNTSRQVTFCKRRNGLLKTYELSVLCDAEVALIVFSSRGRLYEYANNSVKATIERYKKAHTVGSSSGPPLLEHNAQQFYQQESAKLRNQIQMLQNTNRHLVGDSVGNLSLKELKQLESRLEKGISKIRARKSELLAAEISYMAERETELQNDHMTLRTEIEEGEQQLQQVTVARSVAAAAAAATNLELNPFLEMDTKCFFTGGPFATLDMKCFLPGSLQQMLEAQQRQMLATELNLGYQLAPPGSDAADNNPHHQF

SEQ ID NO: 8042 - protein, 257 aa, Zea mays
  unsure (1)..(257): unsure at all Xaa locations
  Clone ID: TF_ZmC1089_4.pep
MGRGRVELKRIENKINRQVTFAKRRNGLLKKAYELSVLCDAEVALIIFSNRGKLYEFCSGQSITKTLERYEKNSYGGPDTAVQNKENELVQSSRNEYLKLKARVDNLQRTQRQVDSTFELYLRNKRNLLGEDLGSLGVKELEQLEKQLDSSLRHIRSTRTQHMLDQLTDLQRREQMLCEAISAFRXKLEETSNQVHGQVWEHGANLLGYERHSPQQQAPSHVGNGLFFHPLEAAAEPTLQIGFAPEHMNNFMPTWLP

SEQ ID NO: 8043 - protein, 259 aa, Zea mays
  Clone ID: TF_ZmC29979_1.pep
MGRGKIEIKRIENSTNRQVTFSKRRGGLLKKANELAVLCDARVGVVIFSSTGKMFEYCSPACSLRELIEQYQHATNSHFEEINHDQQILLEMTRMKNEMEKLETGIRRYTGDDLSSLTLDDVSDLEQQLEYSVSKVRARKHQLLNQQLDNLRRKEQILEDQNTFLYRMINENQQAALTGEVKLGEMAPLAMLQPPPAFAHSATAYYGGESSSSGTALQLMSAAPQLHADDLGFRLQPTQPNLQDPAAPCGGLHGHGLQL

SEQ ID NO: 8044 - protein, 259 aa, Zea mays; identical to SEQ ID NO: 8043
  Clone ID: TF_ZmC29979_2.pep

SEQ ID NO: 8045 - protein, 212 aa, Zea mays
  Clone ID: TF_ZmC2121_4.pep
KISRQVTFAKRRNGLLKKAYELSVLCDAEVALIIFSSRGRLFEFSTSSCIYKTLERYRSCSFASEASAPLEAELNNYQEYLKLKTRVEFLQTTQRNLLGEDLGPLSVKELEQLENQIEISLKQIRSSKNQQMLDQLFDLKRKEQQLQDANKDLRMKIEETSEENVLRLSSQDIGCSGSSGHGDEANQEHLQLALDPSLHIGYQAYMDHLNND

SEQ ID NO: 8046 - protein, 200 aa, Zea mays
  Clone ID: TF_ZmC2121_5.pep
FEFSSSSCMYKTLERYRSSNYSQEVKTPLDTEIKYQDYLKLRTRVEFLQTTQRNILGEDLGPLSMKELEQLEDQIEISLKHISSRKNQMLLDQLFDLKSKEQELLDLNKDLRKQVMQWPPNISVYTYLQETRPENALRVSWEEGGHSGASGNVLDPYQGLLQHLDNDPSLQFGYHHQAYMDQLNNEDLVDPNEHGRSGWI

SEQ ID NO: 8047 - protein, 240 aa, Zea mays
  Clone ID: TF_ZmC2086_1.pep
MGRGRVELKRIENKINRQVTFAKRRNGLLKKAYELSVLCDAEVALIIFSNRGKLYEFSSTQSMPKTLEKYQKCSFAGPETALQNRENEQLKSSRNEYLKLKARVDNLQRTQRNLLGEDLESLGIKELEHLEKQLDSSLKHIRSTRTQHMVDQLTELQKKEQMFCEANKCLRRRLEESNQVIWQHAWEQSERHSEVQPQQLNGNNFFHPLDGAGEPTLQIGYPSEALTSSCMTTFLPPWLP

SEQ ID NO: 8048 - protein, 240 aa, Zea mays; identical to SEQ ID NO: 8047
  Clone ID: TF_ZmC2086_3.pep

SEQ ID NO: 8049 - protein, 240 aa, Zea mays
  unsure (1)..(240): unsure at all Xaa locations
  Clone ID: TF_LIB4742-134-Q1-K1-B1.pep
MGRGRIEIKRIENNTSRQVTFCKRRNGLLKKAYELSVLCDAEVALVVFSSRGRLYEYANNSVKATIERYKKAHAVGSSSGPPLLEHNAQQFYQQESVKLRNQIQMLQNTNRHLVGDSVGNLSLKELKQLESRLEKGISKIRARKSELLAAEINYMAKRETELQNDHMNLRTKIEEGEQQLQQVTVAQSVAAAAATDVELNPFLEMDTKCFFPGGPXATLDMKCFFPXSLQMLEAQQRQML

SEQ ID NO: 8050 - protein, 187 aa, Zea mays
  unsure (1)..(187): unsure at all Xaa locations
  Clone ID: TF_LIB5026-042-Q1-XP2-F5.pep
MARGKVQLRRVENPVHRQVTFCKRRAGLLKKARELSVLCDASVGIIVFSAHGKLYDLATTGTMEELIERYKAASAGEATTDGCGRHNRMDPKHETTVLQQEINLLQKGLSIVLGRYIHGNRANEHMNVDELNALERYLEXIWMYNTRSAKMQIMAQEIQALKSKEGMVKAANEILQEKIVEQSSLLD

SEQ ID NO: 8051 - protein, 228 aa, Zea mays
  unsure (1)..(228): unsure at all Xaa locations
  Clone ID: TF_LIB4742-069-R1-K1-D8.pep
MSFLLKEKEMIIAAGIPSMGRGRIEIKRIENNTSRQVTFCKRRNGLLKKAYELSVLCDAEVALIVFSSRGRLYEYANNSVKATIERYKKAHTVGSSSGPPLLEHNAQQFYQQESAKLRNQIQMLQNTNRHLVGDSVGNLSLKELKQLESRLEKGISKIRARKSELLAAEISYMAKRETELQNDHMTLRTKIEEGXQQLQQVTVARSVAAAAAAATNLELNPFXEMDTK

SEQ ID NO: 8052 - protein, 268 aa, Zea mays
  Clone ID: TF_ZmC53_1.pep
MGRGRIEIKRIENNTSRQVTFCKRRNGLLKKAYELSVLCDAEVALIVFSSRGRLYEYANNSVKATVERYKKAHTVGSSSGPPLLEHNAQQFYQQESAKLRNQIQMLQNTNRHLVGDSVGNLSLKELKQLESRLEKGISKIRARKSELLAAEISYMAKRETELQNDHMTLRTKIEEGEQQLQQVTVARSVAAAAAATNLELNPFLEMDTKCFFTGGPFATLDMKCFLPGSLQQMLEAQQRQMLATELNLGYQLAPPGSDAANNNPHHQF

SEQ ID NO: 8053 - protein, 287 aa, Zea mays
  Clone ID: TF_ZmC53_3.pep
MSFLLKEKEMIIAAGIASMGRGRIEIKRIENNTSRQVTFCKRRNGLLKKAYELSVLCDAEVALIVFSSRGRLYEYANNSVKATIERYKKAHTVGSSSGPPLLEHNAQQFYQQESAKLRNQIQMLQNTNRHLVGDSVGNLSLKELKQLESRLEKGISKIRARKSELLAAEISYMAKRETELQNDHMTLRTKIEEGEQQLQQVTVARSVAAAAAATTNLELNPFLEMDTKCFFTGGPFATLDMKCFLPGSLQQMLEAQQRQMLATELNLGYQLAPPGSDAADNNPHHQF

SEQ ID NO: 8054 - protein, 233 aa, Zea mays
  unsure (1)..(233): unsure at all Xaa locations
  Clone ID: TF_ZmC53_8.pep
MGRGRIEIKRIENNTSRQVTFCKRRNGLLKKAYELSVLCDAEVALIVFSSRGRLYEYANNSVKATIERYKKAHTVGSSSGPPLLEHNAQQFYQQESAKLRNQIQMLQNTNRHLVGDSVGNLSLKELKQLESRLEKGISKIRARKSELLAAEISYMAKRETELQNDHMTLRTKIEEGEQQLQQVTVARSVAAAAAAATNLELXPFLEMDTKCFFTGGPXTLDMKCFLPGSLQQM

SEQ ID NO: 8055 - protein, 251 aa, Zea mays
  Clone ID: TF_ZmC53_9.pep
MGRGRIEIKRIENNTSRQVTFCKRRNGLLKKAYELSVLCDAEVALIVFSSRGRLYEYANNSVKATVERYKKAHTVGSSSGPPLLEHNAQQFYQQESAKLRNQIQMLQNTNRHLVGDSVGNLSLKELKQLESRLEKGISKIRARKSELLAAEISYMAKRETELQNDHMTLRTKIEEGEQQLQQVTVARSVAAAAAATNLELNPFLEMDTKCFFTGGPFATLDMKCFLPGSLQQMLGAQQRQMLATELNLGYQ

SEQ ID NO: 8056 - protein, 212 aa, Zea mays
  Clone ID: TF_13274179.pep
MGRGKIKIKRIENSTNRQVTFSKRRAGLVKKAREIGVLCDTEVGVVIFSSGGKLYDYCSPRTSLSRILEKYQTNSGKILWGEKHKNLSAEIDRVKKENDNMQIQLRHLKGEDLNSLQHRELIAIEEGLQNGQTNMREKQMDYWRMHKTNGKMLEDEHKILTFRMHQQAVDLSGRMRELEIGYHQVQHDRDFISQMPFTFRVQPNHPNLQEDE

SEQ ID NO: 8057 - protein, 240 aa, Zea mays
  Clone ID: TF_ZmC37457_1.pep
MGRGKIVIRRIDNSTSRQVTFSKRRNGIFKKAKELAILCDAEVGLVIFSSTGRLYEYSSTSMKSVIDRYGKAKEEQQVVANPNSELKFWQREAASLRQQLHNLQENYRQLTGDDLSGLNVKELQSLENQLETSLRGVRAKKDHLLIDEIHDLNRKASLFHQENTDLYNKINLIRQENDELHKKIYETEGPSGVNRESPTPFNFAVVETRDVPVQLELSTLPQQNNIEPSTAPKLGLQLIP

SEQ ID NO: 8058 - protein, 221 aa, Zea mays
  Clone ID: TF_ZmC1460_4.pep
MARGKVQLRRIENPVHRQVTFCKRRAGLLKKARELSVLCDAHVGIIVFSAHGKLYDLATTGTMEELIERYRTASSGEAADGCGDNNRMDAKQETMVLQQEINLLQKGLRYIYGNRTNEHMNVEELNALERYLEIWMYNIRSAKMQIMIQEIQALKSKEGMLQAANEVLQEKIVEQSSLLDVGMVVADQQNGHFSTVPLVEEMISNPLTILSGYSNCRGYSF

SEQ ID NO: 8059 - protein, 245 aa, Zea mays
  Clone ID: TF_ZmC17645_1.pep
MGRGRGKVEVRRIENSVSRQVTFSKRRRGLAKKARELAVLCDADVALLVFSDKGRLHDFAAHGSMERILGRYERYLLCEDRDDVTQDYPEESQGNMSYDHIKLRSKLEAIKKSQRNLMGEQLESLTFREVQQLEHRIDSALRNVRSRKDHILLNSIQELRNKETFLMEQNGILEKEKAAVGASSSLHTTTSTAAASSTAAAAAALPNLNICPDDSDEPGMAAAAGIRLPWWMLQPSAVSQRQEQH

SEQ ID NO: 8060 - protein, 243 aa, Zea mays
  Clone ID: TF_ZmC1089_1.pep
MGRGRVELKRIENKINRQVTFAKRRNGLLKKAYELSVLCDAEVALIIFSNRGKLYEFCSGQSITKTLERYEKNSYGGPDTAVQNKENELVQSSRNEYLKLKARVDNLQRTQRNLLGEDLGSLGVKELEQLEKQLDSSLRHIRSTRTQHMLDQLTDLQRREQMLCEANKCLRRKLEETSNQVHGQVWEHGANLLGYERHSPQQQAPSHVGNGLFFHPLEAAAEPTLQIGFAPEHMNNFMPTWLP

SEQ ID NO: 8061 - protein, 173 aa, Zea mays
  Clone ID: TF_ZmC2134_9.pep
MGRGKIKIKRIENSTNRQVTFSKRRAGLVKKAREIGVLCDAEVGVVIFSSGGKLYDYCSPRTSLSRILEKYQTNSGKILWGEKHKNLSAEIDRVKKENDNMQIQLRPVHLKGEDLNSLQHRELIAIEEGLQNGQTNMREKQMDYWRMHKTNGKMLEDEHKILTFRMHQQAVDL

SEQ ID NO: 8062 - protein, 259 aa, Zea mays
  Clone ID: TF_ZmC1808_1.pep
MLNMMTDLSCGPSSKVKEQVAAAPTGSGDRQGQGRGKIEIKRIENTTSRQVTFCKRRNGLLKKAYELSVLCDAEVALVVFSSRGRLYEYANNSVKSTIERYKKANSDSSNSGTVAEVNAQYYQQESSKLRQMIHSLQNANTRNIVGDSIHTMGLRDLKQMEGKLEKAIIKIRARKNELLYAEVDYMQKREMDLQTDNMYLRSKIAESNETGQPAMHMTMGAPPTSEYDHMAPFDSRNFLQVSMPQHYSHQLQPTTLQLG

SEQ ID NO: 8063 - protein, 155 aa, Zea mays
  Clone ID: TF_ZmC2121_3.pep
INYQDYLKLRTRVEFLQTTQRNILGEDLGPLSMKELEQLEDQIEISLKHISSRKNQMLLDQLFDLKSKEQELLDLNKDLRKQLQETRPENALRVSWEEGGHSGASGNVLDPYQGLLQHLDNDPSLQFGYHHQAYMDQLNNEDLVDPNEHGRSGWI

SEQ ID NO: 8064 - protein, 252 aa, Zea mays
  unsure (1)..(252): unsure at all Xaa locations
  Clone ID: TF_ZmC371_4.pep
MVRGKTQMKRIENPASRQVTFSKRRNGLLKKAFELSVLCDAEVALVVFSPRGKLYEFASGSAQKTIERYRTYTKDNVSNKTAHQDIEQVKADAEGLAKKLEALEAYKRKLLGERLEECSFEELHSLEVKLEKSLHCIRGRKTQLLEEQLHKLKEKEMNLRKSNEDLREKVMGAKTFCRRCTAASGMPTTQENXCKKQPPPPPPMLMAPPPPPAPAAIDHTGPKDVGMDVETELYIGLPGRDYRSNNKDMTAQ

SEQ ID NO: 8065 - protein, 149 aa, Zea mays
  unsure (1)..(149): unsure at all Xaa locations
  Clone ID: TF_LIB4172-011-Q1-L1-C9.pep
MAQRLMTFRDVAVDFSPEEWECLSLDQRSLYRDVMLESYSHLVSVGLFVYRPHLFSLLEKGQDPWMILRDETRGPYPDIDFSSQNKKFLGKPSTYEELSQREMKEYFRKRSLERFLFLEMXXDGXNQFQTHXNQEYSKXLAVAYEKVLT

SEQ ID NO: 8066 - protein, 107 aa, Zea mays
  Clone ID: TF_LIB3597-024-Q1-K6-D9.pep
MATAQELLTFRDVCVDFTLEEWQQLDSAQKNLYRDVMLENYSHLVSVGYLGAKPDVVLRLGRGEEAGMTEGETPTWKYPDVAPLDVNRTGLLWKEASCQHPDAYDEK

SEQ ID NO: 8067 - protein, 139 aa, Zea mays
  unsure (1)..(139): unsure at all Xaa locations
  Clone ID: TF_LIB4073-009-Q6-K2-F5.pep
MALSQGLFTFKDVAIEFSQEEWECLDPAQRALYRDVMLENYRNLLSLDEDNIPPEDDISVGFTSKGLSPKENNKEELYHLVILERKESHGINNFDLKEVWENMPKFDSLWDYDVKNYXGNALTCNKLTHDQTYKLIHFS

SEQ ID NO: 8068 - protein, 122 aa, Zea mays
  unsure (1)..(122): unsure at all Xaa locations
  Clone ID: TF_ZmC180138_1.pep
GFACVNCIFRAPAPKRTLRLLVFWRGKVRSFRSEEEISGEEAXRRMASSSSQHTVCGLVTFRDVAVDFSQEEWACLDATQKVLYRDTMLETYSHLVTVVGSCLSKPHLITLLEQEKEPWMAV

SEQ ID NO: 8069 - protein, 95 aa, Zea mays
  Clone ID: TF_LIB3595-024-Q1-N6-E1.pep
VIKTLVDSGSNAWLLKTLQVTVEEKSYHKSCFKCSHGGCAITPSNYAALEGILYCKHHFSQLFKEKGSYNHLIKCASVKRAAEAQPEQPASDSSS

SEQ ID NO: 8070 - protein, 101 aa, Zea mays
  unsure (1)..(101): unsure at all Xaa locations
  Clone ID: TF_LIB148-007-Q1-E1-H9.pep
MSFTGTHATCPACDWTVHVIAVFMAVGCIYHIGCFKCSXCIGVLSMCRSSSMDGVLYCTTXFDQLFKETGTFSYTFTPSAMSIDDGEVTWCSTNLSSAFSG

SEQ ID NO: 8071 - protein, 77 aa, Zea mays
  Clone ID: TF_LIB3066-032-Q1-K1-B12.pep
CDKTVHLINLLTADGVTYHMTCFKCSHCKGILYMSSYYCMDGALNCTTHFEQIFVDTDSFSKIFTPSGQSSDMGVLA

SEQ ID NO: 8072 - protein, 503 aa, Zea mays
  Clone ID: TF_ZmC1365_1.pep
MAYSSRTCGRCNNHERRSGFMKWLCNFLKGPKPGEPNRRRPQVTAGEEEDALWHQRPVRPKNDPPRNDNEEVDRAIAESLTEDVRTPKEKTRKGDKDDEDLARAIQDSLNMNPYTPYNPYAPSHAQPRGHRLCAGCKHEIGHGHYLSCMGIYWHPQCFRCNSCGHPIRETEFTLLSTDPYHKLCYKELHHPKCDVCLQFIPTNRSGLIEYRAHPFWGQKYCPSHEHDRTPRCCSCEKMEPRNTKYMSLGDGRSLCMECLGSAVMDTGECQPLYHSIRDYYEGMNMKLDQQIPMLLVERQALNEAMEGESRGPHHMPETRGLCLSEEQTVSSILRRPRIGGNRLLDMRTQPQKLTRRCEVTAILVLYGLPRLLTGSILAHELMHGWLRLKGYRNLNAEVEEGICQVMSYLWLESEILPSSSRHAQPSSSYASSSSSSYSYPPTSSKKGGISHTEKKLGEFFMHQIAHDTSTAYGDGFRTAYAAVNKYGLRQTLNHIRLTGGLPV

SEQ ID NO: 8073 - protein, 157 aa, Zea mays
  unsure (1)..(157): unsure at all Xaa locations
  Clone ID: TF_LIB4742-051-R1-K1-H8.pep
HWVPRGRPGLHSFEGVLYCRPHFDQLFKRTGSLDKSFQGTPKVVKPERNVGNENATKVSSAFAGTREKCVGCSKTVYPIERVTVNNTMYHKSCFKCCHGGCTISPSNYIAHEGKLYCKHHHVQLIKEKGXTSASSRMTTRRHRRLGRWRTTKKKSIN

SEQ ID NO: 8074 - protein, 121 aa, Zea mays
  unsure (1)..(121): unsure at all Xaa locations
  Clone ID: TF_LIB3061-021-Q1-K1-D2.pep
FEPSSLDNRLSIQVTVNNTMYHKSCFKCCHGGCTISPSNYIAHEGKLYCKHHHIQLIKEXRGTSASLRMTTRRHHRLGHNGGHVCSENNDIVVLYLHVNVVIFESDTLPGFTIFIGQKMPL

SEQ ID NO: 8075 - protein, 261 aa, Zea mays
  Clone ID: TF_ZmC7269_1.pep
MVSADTIRTAIGVIGNGTALVLFLSPVPTFVGIWKKRAVEQYSPIPYVATLLNCMMWVLYGLPLVHPHSMLVVTINGTGMLIQLTYVALFILCSAGAVRRRVVLLFAAEVAFVVALAALVLTLAHTHERRSMLVGIVSVFFGTGMYAAPLSVMKLVIQTKSVEYMPLFLSLASLANSICWTAYALIRFDLYITIPNGLGVLFALGQLGLYAMFYKNTKQIMEARRRKADQQSTMMEVVTDASATPPPPPNNNNGGGGGNGY

SEQ ID NO: 8076 - protein, 198 aa, Zea mays
  Clone ID: TF_ZmC383_1.pep
MFSGTQQKCKVCTKTVYPMDQLSTDGVVFHRSCFKCQHCKSTLSLSNYSSFEGVPYCKTHFEQLFKETGSYNKSFQSQSPAKITPEKLAPELTRSPSKAARMFSGTQDKCATCGKTAYPLEKVTVEEKSYHKSCFKCSHGGCAITPSNYAALEGILYCKHHFSQLFKEKGSYNHLIKCASVKRAAEAQPEQPASDSSS

SEQ ID NO: 8077 - protein, 198 aa, Zea mays
  unsure (1)..(198): unsure at all Xaa locations
  Clone ID: TF_LIB4744-028-R1-K1-C9.pep
MATSFQGTTTKCTACDKTVYLVDKLTADNRIYHKACFRCHHCKGTLKLANYNSFEGVLYCRPHFDQLFKRTGSLDKSFEGTPKVVKPERNVGNENATKVSSAFAGTREKCVGCSKTVYPTERVTVNNTMYHKSCFKCCHGGCTISPSNYIAHEGKLYCKHHHIQLIKEXGTSASLRMTTRRHHRXLGHWRRMNKSIDH

SEQ ID NO: 8078 - protein, 198 aa, Zea mays
  unsure (1)..(198): unsure at all Xaa locations
  Clone ID: TF_ZmC844_1.pep
MATSFQGTTTKCTACDKTVYLVDKLTADNRIYHKACFRCHHCKGTLKLANYNSFEGVLYCRPHFDQLFKRTGSLDKSFEGTPKVVKPERNVGNENATKVSSAFAGTREKCVGCSKTVYPTERVTVNNTMYHKSCFKCCHGGCTISPSNYIAHEGKLYCKHHHIQLIKEXRGTSASLRMTTRRHHRLGHWRRMNKSIDH

SEQ ID NO: 8079 - protein, 198 aa, Zea mays; identical to SEQ ID NO: 8078
  unsure (1)..(198): unsure at all Xaa locations
  Clone ID: TF_ZmC844_3.pep

SEQ ID NO: 8080 - protein, 508 aa, Zea mays
  Clone ID: TF_ZmC13606_1.pep
MGWLTKFFRGSTHNISEEQYHSRPAEDTAWNEPSSSPVVTDILSEFNNEDIDRAIALSLSEEEQRKEKAIDKDMHLEEDEQLARAIQESLNVESPPRRNGSANGGTMYHPPRETGNAYQPPRENGSANGGNAYHPLPFMFSSGFRACAGCHREIGHGRFLSCMGAVWHPECFRCHACSQPIYDYEFSMSGNHPYHKTCYKEQFHPKCDVCKQFIPTNMNGLIEYRAHPFWVQKYCPSHEMDGTPRCCSCERMEPRESKYVLLDDGRKLCLECLDSAVMDTNDCQPLYLEIQEFYEGLNMKVEQQVPLLLVERQALNEAMEGEKAGHHHLPETRGLCLSEEQTVSTILRPRMAGNKIMGMITEPYRLTRRCEVTAILILYGLPRLLTGSILAHEMMHAWLRLKGYRTLSPDVEEGICQVLAHMWIESEIMAGSGSSAASSSSGSSSSTSSKKGGRSQFEHRLGDFFKHQIETDTSMAYGDGFRTGNRAVLHYGLKRTLEHIRLTGTFPF

SEQ ID NO: 8081 - protein, 197 aa, Zea mays
  unsure (1)..(197): unsure at all Xaa locations
  Clone ID: TF_ZmC844_2.pep
MATSFQGTTTKCTACDKTVYLVDKLTADNRVYHKACFRCHHCKGTLKLANYNSFDGVLYCRPHFDQLFKRTGSLDKSFQGTPKVVKPERNVGNENATKVSSAFAGTREKCVGCSKTVYPIERVTVNNTMYHKCCFKCCHGGCTISPSNYIAHEGKLYCKHHHVQLIKEXGTSASSRMTTRRHRRLGRWRTTKKKSIN

SEQ ID NO: 8082 - protein, 201 aa, Zea mays
  Clone ID: TF_ZmC2245_1.pep
MSAGKCAACGKTAYPLESVTALEQTFHKICFKCDVCKGTLNLKNYKGVNGKVYCFTHTPVDRSSTGSDSVTTKTAMQAPKKQAEGLGTAQKGTGEKPNVGLDTVTVQTAIKAPKAVAEGLGTAQKGTGEKPTVGTESVHLKSALSAPKVRAENIGTVHKGDSITAPQQASFDVEHPAPASEEAHHHEEAEPVSYDEQPADE

SEQ ID NO: 8083 - protein, 204 aa, Zea mays
  Clone ID: TF_ZmC1143_1.pep
MSFTGTQDKCTACDKTVHFIDLLTADGAIYHKTCFKCSHCKGVLSMCSYSSMDGVLYCKTHFEQLFKETGSFSKNFTPGGKSSDKGELTRAPSKLSSAFSGTQDKCAACQKTVYPLEKLTLEGESYHKSCFKCSHGGCILTTSSYAALNGVLYCKIHFAQLFMEKGSYNHMNKKSPSQEVLPDVADEEQPPEPAPPQDEKEEDN

SEQ ID NO: 8084 - protein, 129 aa, Zea mays
  Clone ID: TF_LIB5116-029-A1-PF1-H8.pep
MFSGTQQKCKVCTKTVYPMDQLSTDGAVFHRACFKCHHCKSTLSFSSYSSFEGVPYCKPHFAQLFKETGSYNKSFQSQSPAKSATEKLTPELTRSPSKAAGMFSGTQDKCATCGKTAYPLEKVTVEEKS

SEQ ID NO: 8085 - protein, 117 aa, Zea mays
  unsure (1)..(117): unsure at all Xaa locations
  Clone ID: TF_ZmC844_14.pep
MATSFQGTTTKCTVCDKTVYLVDKLTXDNRIYHKACFRCHHCKGTLKLANYNSFEGVLYCRPHFDQLFKRTGSLDKSFEGTPKVVKPERNVGNENATKVSSAFAGTREKCVGCSXTV

SEQ ID NO: 8086 - protein, 188 aa, Zea mays
  unsure (1)..(188): unsure at all Xaa locations
  Clone ID: TF_ZmC1143_8.pep
MSFTGTQDKCTACDKTVHFIDLLTADGAIYHKTCFKCSHCKGVLSMXQLFKETGSFSKNFTPGDKSSDKGELTRAPSKLSSAFSGTQDKCAACQKTVYPLEKLTLEGESYHKSCFKCSHGGCILTTSSYAALNGVLYYKIHFAQLFMEKGSYNHMNKKSPSQEVLPDVADEEQPPEPAPPQDEKEEDN

SEQ ID NO: 8087 - protein, 155 aa, Zea mays
  Clone ID: TF_ZmC383_2.pep
QLSNYSSFEGVPYCKTHFEQLFKETGSYNKSFQSQSPAKITPEKLAPELTRSPSKAARMFSGTQDKCATCGKTAYPLEKVTVEEKSYHKSCFKCSHGGCAITPSNYAALEGILYCKHHFSQLFKEKGSYNHLIKCASVKRAAEAQPEQPASDSSS

SEQ ID NO: 8088 - protein, 137 aa, Zea mays
  unsure (1)..(137): unsure at all Xaa locations
  Clone ID: TF_ZmC844_11.pep
LHIIWQNATKVSSAFAGTREKCVGCSKTVYPTERVRFCVQPSQSFFRXFEPSSLDNRLSIQVTVNNTMYHKSCFKCCHGGCTISPSNYIAHEGKLYCKHHHIQLIKEXRGTSASLRMTTRRHHRLGHWRRMNKSIDH
